United States Patent Application Publication US 2018/0126003 A1 - sequence listing, part 41

SEQ ID NO: 68665 - DNA, 5025 bp, Artificial Sequence
  derived and/or modified sequence
atgctcggagccccagatgagtcttccgtcagggtggctgtccggatccggcctcagctggctaaagaaaaaattgaaggctgccatatatgtacatccgtgacccccggggagccccaggttttccttgggaaagataaagcctttactttcgactacgtttttgacatcgacagtcagcaggaacagatctacatccagtgcatcgaaaagctgattgaggggtgctttgaaggctacaatgcgactgtcttcgcttatggccagacgggcgccggcaaaacctacactatgggtaccgggttcgatgtgaacatagtggaagaggagcttggcatcatatcccgagcagtgaagcatctgtttaagtccatcgaagagaaaaagcatattgccattaagaatgggctgccagcacctgacttcaaggtgaatgcccagtttctggagctctacaatgaagaagtgttggatctgttcgacaccacccgagacatcgacgccaagagtaaaaaatctaatattaggatccatgaggactctactgggggtatttacacagtgggagtaacgacgcgcacagtgaacacggaatccgagatgatgcaatgcctgaagctcggtgccctcagccggacaactgcctcaacccagatgaacgtgcaatcttctcgctctcatgccatcttcacaattcacgtttgccaaacccgggtctgtccacaaatcgacgccgacaatgccaccgataataaaattatttctgaaagcgcacagatgaatgagttcgagacattgactgctaaatttcacttcgttgacctagctggctccgaaaggctcaaaaggaccggagcaactggagaacgagcaaaagaaggcattagcattaactgcggcctactggcactagggaacgttatttccgcactgggagataagtcaaaacgggcaacccacgtgccataccgtgactctaagttgactcgtctgctgcaagattccctgggtggaaattcacaaaccatcatgattgcctgtgtctctccttcagatagagactttatggagacactgaataccctgaagtatgcgaatagggccagaaacatcaaaaataaagtgatggtgaaccaagaccgcgcttctcagcaaattaacgcgctgcgaagcgaaattacacggctgcaaatggagctaatggaatataaaaccggcaaacgcattatcgacgaagagggagtggagtccatcaatgacatgtttcacgagaacgcaatgctgcagaccgagaataataacttacgagtgcgaatcaaggccatgcaggagacagttgatgccctgcggtccagaattacccagttggtaagtgaccaggcgaaccacgtgctcgctagagcgggagagggcaacgaagagatttcgaacatgattcactcctatatcaaggagatagaggatctccgtgccaagctgcttgaaagtgaagctgtcaatgaaaatctccgcaaaaacctaactcgggctacggcgcgggccccttacttctcgggcagttcgaccttctccccaactatcctctctagcgataaagagacgatcgagatcatcgatctggcaaaaaaggatcttgagaagttaaaaagaaaagagaagaggaaaaaaaagaggctacaaaaactcgaagaatcgaaccgggaagaacgatcggtcgctggaaaggaggataacactgacaccgaccaggagaaaaaggaggagaaaggggtctctgagagggagaacaatgagctggaggtggaggagtcgcaagaggtctctgaccacgaagatgaggaggaggaagaggaagaggaggaagacgatatcgatggtggcgagtcaagcgatgaatcagattccgagagtgacgaaaaggctaactatcaggccgacctagccaatatcacttgtgagattgctattaaacagaagctgatcgacgagttagaaaactctcagaaacgtctccagacccttaagaagcagtatgaagagaaactgatgatgctgcagcataagatccgcgacacccaacttgaaagagaccaggtactacagaatctgggtagtgtcgagagctattctgaggaaaaggctaagaaggtgcgctctgaatatgaaaagaagttgcaagccatgaacaaggagctccagagactacaagcagcccagaaggaacacgctaggctattgaagaaccaatcccagtacgagaaacagctcaagaaacttcagcaggacgtcatggaaatgaaaaaaaccaaggtgaggttaatgaagcaaatgaaggaggaacaggaaaaggcccggcttaccgaaagccgccgaaatcgggagattgctcagctcaagaaggaccagcgtaaaagagatcatcagctccgcttactggaagcccagaaacgcaatcaggaggttgtactgagaagaaagacagaggaagtgaccgcactgagacggcaggtacggcctatgtccgataaagtggccggaaaggttacccggaaactgtcttcctcagacgcccccgcccaagatactggatcgagtgctgccgctgtggaaaccgacgcttcgcggactggcgctcagcagaagatgaggatccccgtagccagggtgcaggctcttccgacgccagcaacgaacgggaaccggaagaagtatcaacggaaagggttaaccgggcgggttttcatctctaagacagcccgaatgaagtggcagctgctggagaggagagtaacggatattatcatgcaaaaaatgaccatctccaacatggaagctgatatgaatagacttctaaaacagagagaagagctaaccaagcgaagagagaagctttccaagcgacgcgaaaaaatcgtcaaagagaacggtgagggtgataaaaacgtggcaaacattaacgaggaaatggaatctctgacagccaatattgattacatcaacgactcaatcagtgattgccaggcaaacatcatgcagatggaagaggccaaggaggagggcgagacccttgatgtgacagccgtgataaacgcatgtaccttgaccgaagcccgatatctcctggaccatttcctgagcatgggaattaataagggcctgcaagcagctcaaaaggaagcccagataaaggttctggagggacggctgaagcaaaccgagatcactagtgccactcaaaaccaactactctttcacatgttgaaggaaaaggccgagctgaaccctgaactggacgccctgttgggacacgcgctgcaggacctggactcagtgcctcttgaaaatgtggaggattcaacagacgaggacgccccactcaactcacccggctcggagggcagtaccctgagtagcgatctgatgaagctctgcggagaggtcaaaccgaagaacaaggcaagacggaggacgacaactcaaatggaactcttgtatgccgattcctcggaactggccagcgatactagtaccggagatgcttctctcccaggtcccctcactccggttgctgaaggtcaggagatagggatgaataccgaaactagcggaacaagtgcaagagaaaaggaactgtccccccccccaggcctgcccagcaaaatcggctcgattagccgtcagagctcgctgagcgaaaagaagattcccgagccatcccccgtgaccaggagaaaggcatacgagaaagcagaaaagtcaaaagccaaagaacagaagcattccgattcagggacttctgaagcctcactgagcccgccctcctctcctccgagcaggccccgaaacgagctgaacgtgtttaatagactgaccgttagccagggcaataccagcgtgcaacaggataagtctgacgagagcgactctagtctctccgaagtccatagatcctcccgccgaggaatcattaacccattcccagccagtaaagggataagggccttcccgctccagtgcatccatatcgccgaagggcatacgaaagcagtgctttgcgtggatagtaccgatgaccttttgttcactgggtctaaggataggacctgtaaagtttggaacttggttacaggacaggagatcatgtctttgggaggtcatcctaataacgtcgtaagtgtgaagtattgcaattatacaagcctcgtcttcacagtgagtacaagctacatcaaagtgtgggatatacgtgactcagcaaaatgcattcgcactctgacgtcatcaggccaagtaactttaggagacgcctgttctgcatctactagccgcactgtggccatcccatcgggggagaatcagattaatcagatcgccctaaatccaactggaacattcttatacgccgcgagcggaaacgctgtgagaatgtgggacctcaagcggtttcaaagtacaggtaagctcaccggtcacctcgggcccgtgatgtgcctgacggtggaccagattagctcagggcaagatctgatcatcaccggttctaaggatcactatatcaagatgttcgacgtcacagagggagcattagggactgtctctcccacccataatttcgagcctccccactatgatggcattgaggccctgaccatacagggtgataacttattctcaggctcacgagacaatggaatcaaaaagtgggaccttactcagaaggaccttttgcaacaggtgccaaatgcgcacaaggattgggtttgcgctctgggagtggtccccgatcacccagtgcttctcagcgggtgcagaggtggcatcctgaaggtgtggaacatggacaccttcatgcccgtaggtgaaatgaaggggcatgattcccctattaatgcgatctgcgtgaattctactcatatttttacagccgctgacgacagaactgtgaggatctggaaagcccgtaatttacaagacggccagatcagcgatacaggggatttgggagaggatatagcaagcaactag

SEQ ID NO: 68666 - DNA, 5044 bp, Artificial Sequence
  derived and/or modified sequence
gctgcccgccgccagcatgttgggcgccccggacgagagctccgtgcgggtggctgtcagaataagaccacagcttgccaaagagaagattgaaggatgccatatttgtacatctgtcacaccaggagagcctcaggtcttcctagggaaagataaggcttttacttttgactatgtatttgacattgactcccagcaagagcagatctacattcaatgtatagaaaaactaattgaaggttgctttgaaggatacaatgctacagtttttgcttatggacaaactggagctggtaaaacatacacaatgggaacaggatttgatgttaacattgttgaggaagaactgggtattatttctcgagctgttaaacacctttttaagagtattgaagaaaaaaaacacatagcaattaaaaatgggcttcctgctccagattttaaagtgaatgcccaattcttagagctctataatgaagaggtccttgacttatttgataccactcgtgatattgatgcaaaaagtaaaaaatcaaatataagaattcatgaagattcaactggaggaatttatactgtgggcgttacaacacgtactgtgaatacagaatcagagatgatgcagtgtttgaagttgggtgctttatcccggacaactgccagtacccagatgaatgttcagagctctcgttcacatgccatttttaccattcatgtgtgtcaaaccagagtgtgtccccaaatagatgctgacaatgcaactgataataaaattatttctgaatcagcacagatgaatgaatttgaaaccctgactgcaaagttccattttgttgatctcgcaggatctgaaagactgaagcgtactggagctacaggcgagagggcaaaagaaggcatttctatcaactgtggacttttggcacttggcaatgtaataagtgccttgggagacaagagcaagagggccacacatgtcccctatagagattccaagctaacaagactactacaggattccctcgggggtaatagccaaacaatcatgatagcatgtgtcagcccttcagacagagactttatggaaacgttaaacaccctgaaatacgccaatcgagctagaaatatcaagaataaggtgatggtcaatcaggacagagctagtcagcaaatcaatgcacttcgtagtgaaatcacacgacttcagatggagctcatggagtacaaaacaggtaaaagaataattgacgaagagggtgtggaaagcatcaatgacatgtttcatgagaatgctatgctacagactgaaaataataacctgcgtgtaagaattaaagccatgcaagagacggttgatgcattgaggtccagaattacacagcttgttagtgatcaggccaaccatgttcttgccagagcaggtgaaggaaatgaggagattagtaatatgattcatagttatataaaagaaatcgaagatctcagggcaaaattattagaaagtgaagcagtgaatgagaaccttcgaaaaaacttgacaagagccacagcaagagcgccatatttcagcggatcatcaactttttctcctaccatactatcctcagacaaagaaaccattgaaattatagacctagcaaaaaaagatttagagaagttgaaaagaaaagaaaagaggaagaaaaaaaggctacagaaacttgaggaaagcaatcgagaagaaagaagtgtggctggtaaagaggataatacagacactgaccaagagaagaaagaagaaaagggtgtttcggaaagagaaaacaatgaattagaagtggaagaaagtcaagaagtgagtgatcatgaggatgaagaagaggaggaggaggaggaggaagatgacattgatgggggtgaaagttctgatgaatcagattctgaatcagatgaaaaagccaattatcaagcagacttggcaaacattacttgtgaaattgcaattaagcaaaagctgattgatgaactagaaaacagccagaaaagactgcagactctgaaaaagcagtatgaagagaagctaatgatgctgcaacataaaattcgggatactcagcttgaaagagaccaggtgcttcaaaacttaggctcggtagaatcttactcagaagaaaaagcaaaaaaagttaggtctgaatatgaaaagaaactccaagccatgaacaaagaactgcagagacttcaagcagctcaaaaagaacatgcaaggttgcttaaaaatcagtctcagtatgaaaagcaattgaagaaattgcagcaggatgtgatggaaatgaaaaaaacaaaggttcgcctaatgaaacaaatgaaagaagaacaagagaaagccagactgactgagtctagaagaaacagagagattgctcagttgaaaaaggatcaacgtaaaagagatcatcaacttagacttctggaagcccaaaaaagaaaccaagaagtggttctacgtcgcaaaactgaagaggttacggctcttcgtcggcaagtaagacccatgtcagataaagtggctgggaaagttactcggaagctgagttcatctgatgcacctgctcaggacacaggttccagtgcagctgctgtcgaaacagatgcatcaaggacaggagcccagcagaaaatgagaattcctgtggcgagagtccaggccttaccaacgccggcaacaaatggaaacaggaaaaaatatcagaggaaaggattgactggccgagtgtttatttccaagacagctcgcatgaagtggcagctccttgagcgcagggtcacagacatcatcatgcagaagatgaccatttccaacatggaggcagatatgaatagactcctcaagcaacgggaggaactcacaaaaagacgagagaaactttcaaaaagaagggagaagatagtcaaggagaatggagagggagataaaaatgtggctaatatcaatgaagagatggagtcactgactgctaatatcgattacatcaatgacagtatttctgattgtcaggccaacataatgcagatggaagaagcaaaggaagaaggtgagacattggatgttactgcagtcattaatgcctgcacccttacagaagcccgatacctgctagatcacttcctgtcaatgggcatcaataagggtcttcaggctgcccagaaagaggctcaaattaaagtactggaaggtcgactcaaacaaacagaaataaccagtgctacccaaaaccagctcttattccatatgttgaaagagaaggcagaattaaatcctgagctagatgctttactaggccatgctttacaagatctagatagcgtaccattagaaaatgtagaggatagtactgatgaggatgctcctttaaacagcccaggatcagaaggaagcacgctgtcttcagatctcatgaagctttgtggtgaagtgaaacctaagaacaaggcccgaaggagaaccaccactcagatggaattgctgtatgcagatagcagtgaactagcttcagacactagtacaggagatgcctccttgcctggccctctcacacctgttgcagaagggcaagagattggaatgaatacagagacaagtggtacttctgctagggaaaaagagctctctcccccacctggcttaccttctaagataggcagcatttccaggcagtcatctctatcagaaaaaaaaattccagagccttctcctgtaacaaggagaaaggcatatgagaaagcagaaaaatcaaaggccaaggaacaaaagcactcagattctggaacttcagaggctagtctttcacctccttcttccccaccaagccggccccgtaatgaactgaatgtttttaatcgtcttactgtttctcagggaaacacatcagttcagcaggataagtctgatgaaagtgactcctctctctcggaggtacacagatcctccagaaggggcataatcaacccatttcctgcttcaaaaggaatcagagcttttccacttcagtgtattcacatagctgaagggcatacaaaagctgtgctctgtgtggattctactgatgatctcctcttcactggatcaaaagatcgtacttgtaaagtatggaatctggtgactgggcaggaaataatgtcactggggggtcatcccaacaatgtcgtgtctgtaaaatactgtaattataccagtttggtcttcactgtatcaacatcttatattaaggtgtgggatatcagagattcagcaaagtgcattcgaacactaacgtcttcaggtcaagttactcttggagatgcttgttctgcaagtaccagtcgaacagtagctattccttctggagagaaccagatcaatcaaattgccctaaacccaactggcaccttcctctatgctgcttctggaaatgctgtcaggatgtgggatcttaaaaggtttcagtctacaggaaagttaacaggacacctaggccctgttatgtgccttactgtggatcagatttccagtggacaagatctaatcatcactggctccaaggatcattacatcaaaatgtttgatgttacagaaggagctcttgggactgtgagtcccacccacaattttgaaccccctcattatgatggcatagaagcactaaccattcaaggggataacctatttagtgggtctagagataatggaatcaagaaatgggacttaactcaaaaagaccttcttcagcaagttccaaatgcacataaggattgggtctgtgccctgggagtggtgccagaccacccagttttgctcagtggctgcagagggggcattttgaaagtctggaacatggatacttttatgccagtgggagagatgaagggtcatgatagtcctatcaatgccatatgtgttaattccacccacatttttactgcagctgatgatcgaactgtgagaatttggaaggctcgcaatttgcaagatggtcagatctctgacacaggagatctgggggaagatattgccagtaattaaaca

SEQ ID NO: 68667 - DNA, 5025 bp, Artificial Sequence
  derived and/or modified sequence
atgctgggcgccccagatgagagctctgtgcgggtggccgtgcgcatccggccccagctggccaaggagaagattgagggctgccacatctgcacctctgtgaccccaggagagccccaggtgttcctgggcaaggacaaggccttcacctttgattatgtgtttgatattgacagccagcaggagcagatctacatccagtgcatcgagaagctgattgagggctgctttgagggctacaatgccaccgtgtttgcctacggccagacaggagctgggaagacctacaccatgggcaccggctttgatgtgaacatcgtggaggaggagctgggcatcatcagcagagctgtgaagcacctgttcaagagcattgaggagaagaagcacatcgccatcaagaatggcctgcctgccccagacttcaaggtgaatgcccagttcctggagctgtacaatgaggaggtgctggacctgtttgacaccacccgggacattgatgccaagagcaagaagagcaacatccgcatccacgaggacagcactggaggcatctacacagtgggcgtgaccaccaggacagtgaacacagaaagtgagatgatgcagtgcctgaagctgggcgccctgagcaggaccacagccagcacccagatgaatgtgcagagcagccgcagccacgccatcttcaccatccacgtgtgccagaccagggtgtgcccccagattgatgctgacaatgccacagacaacaagatcatcagcgagagcgcccagatgaatgaatttgagaccctgacagccaagttccactttgtggacctggccggcagcgagcggctgaagaggactggagccactggagagcgggccaaggagggcatcagcatcaactgtggcctgctggccctgggcaatgtcatcagcgccctgggggacaagagcaagagggccacccacgtgccctacagagacagcaagctgacccggctgctgcaggacagcctgggcggcaacagccagaccatcatgattgcctgtgtgagccccagcgaccgggacttcatggagaccctgaacaccctgaagtatgccaacagagccaggaacatcaagaacaaggtgatggtgaaccaggaccgggccagccagcagatcaatgccctgcggtctgagatcacccggctgcagatggagctgatggagtacaagacaggcaagaggatcattgatgaggagggcgtggagagcatcaatgacatgtttcatgaaaatgccatgctgcagacagagaacaacaacctgcgggtgcgcatcaaggccatgcaggagaccgtggatgccctgcggagccgcatcacccagctggtgtctgaccaggccaaccacgtgctggcccgggccggggagggcaatgaggagatcagcaacatgatccacagctacatcaaggagattgaggacctgcgggccaagctgctggagagcgaggccgtgaatgaaaacctgaggaagaacctgacccgggccacagcccgggccccctacttcagcggcagcagcaccttcagccccaccatcctgagcagtgacaaggagaccatcgagatcatcgacctggccaagaaggacctggagaagctgaagaggaaggagaagaggaagaagaagaggctgcagaagctggaggagagcaaccgggaggagaggtctgtggccggcaaggaggacaacacagacacagaccaggagaagaaggaggagaagggcgtgtctgaaagagaaaataatgagctggaggtggaggagagccaggaggtgtctgaccatgaagatgaggaggaggaggaggaggaggaggaggatgacattgatggaggagagagcagtgatgaaagtgacagcgagagtgatgagaaggccaactaccaggccgacctggccaacatcacctgtgagatcgccatcaagcagaagctgattgatgagctggagaacagccagaagaggctgcagaccctgaagaagcagtatgaggagaagctgatgatgctgcagcacaagatccgggacacccagctggagcgggaccaggtgctgcagaacctgggctctgtggagagctacagcgaggagaaggccaagaaggtgcgctcagaatatgagaagaagctgcaggccatgaacaaggagctgcagaggctgcaggccgcccagaaggagcacgcccggctgctgaagaaccagagccagtatgagaagcagctgaagaagctgcagcaggatgtgatggagatgaagaagaccaaggtgcggctgatgaagcagatgaaggaggagcaggagaaggcccggctgacagagagcagaagaaaccgggagatcgcccagctgaagaaggaccagaggaagagggaccaccagctgcggctgctggaggcccagaagaggaaccaggaggtggtgctgcggaggaagacagaggaggtgacagccctgcggcggcaggtgcggcccatgtctgacaaggtggccggcaaggtgaccaggaagctgagcagcagtgatgccccagcccaggacaccggcagcagcgctgctgctgtggagacagatgccagcaggactggagcccagcagaagatgagaattcctgtggcccgggtgcaggccctgcccaccccagccaccaacggcaacaggaagaagtaccagaggaagggcctgaccggccgggtcttcatcagcaagacagccaggatgaagtggcagctgctggagcggcgggtgacagacatcatcatgcagaagatgaccatcagcaacatggaggccgacatgaaccggctgctgaagcagcgggaggagctgaccaagaggcgggagaagctgagcaagagaagagagaagatcgtgaaggaaaatggagagggggacaagaatgtggccaacatcaatgaggagatggagagcctgacagccaacatcgactacatcaatgacagcatcagtgactgccaggccaacatcatgcagatggaggaggccaaggaggagggggagaccctggatgtgacagctgtgatcaatgcctgcaccctgacagaggcccgctacctgctggaccacttcctgtccatgggcatcaacaagggcctgcaggccgcccagaaggaggcccagatcaaggtgctggagggccgcctgaagcagacagagatcaccagcgccacccagaaccagctgctcttccacatgctgaaggagaaggccgagctgaaccctgagctggatgccctgctgggccacgccctgcaggacctggacagcgtgcccctggagaatgtggaggacagcacagatgaagatgcccccctgaacagccctggcagcgagggcagcaccctgagcagtgacctgatgaagctgtgtggggaggtgaagcccaagaacaaggcccggcggaggaccaccacccagatggagctgctgtatgctgacagcagcgagctggccagtgacaccagcactggagatgccagcctgcccggccccctgacccctgtggccgagggccaggagatcggcatgaacacagagaccagcggcaccagcgcccgggagaaggagctgagccccccacctggcctgcccagcaagattggcagcatcagccggcagagcagcctgtctgagaagaagatccctgagcccagccctgtgaccaggaggaaggcctatgagaaggccgagaagagcaaggccaaggagcagaagcacagcgacagcggcaccagcgaggccagcctgagcccccccagcagcccccccagccggcccagaaatgagctgaatgtgttcaaccggctgactgtgtcccagggcaacacctctgtgcagcaggacaagagtgatgaaagtgacagcagcctgtctgaggtgcacaggagcagcagaagaggcatcatcaaccccttccctgccagcaagggcatccgggccttccccctgcagtgcatccacatcgccgagggccacaccaaggctgtgctgtgtgtggacagcacagatgacctgctcttcaccggcagcaaggacaggacctgcaaggtgtggaacctggtgacaggccaggagatcatgagcctgggcggccaccccaacaacgtggtgtctgtgaagtactgcaactacaccagcctggtgttcaccgtgtccaccagctacatcaaggtgtgggacatccgggacagcgccaagtgcatccgcaccctgaccagcagcggccaggtgaccctgggagatgcctgcagcgccagcaccagcaggacagtggccatccccagcggggagaaccagatcaaccagatcgccctgaaccccaccggcaccttcctgtatgctgccagcggaaatgctgtgaggatgtgggacctgaagcgcttccagagcacaggcaagctgaccggccacctgggccctgtgatgtgcctgactgtggaccagatcagcagcggccaggacctgatcatcaccggcagcaaggaccactacatcaagatgtttgatgtgacagaaggagccctgggcaccgtgagccccacccacaactttgagcccccccactatgatggcatcgaggccctgaccatccagggcgacaacctcttcagcggcagccgggacaatggcatcaagaagtgggacctgacccagaaggacctgctgcagcaggtgcccaatgcccacaaggactgggtgtgtgccctgggcgtggtgcctgaccaccctgtgctgctgagcggctgccggggcggcatcctgaaggtgtggaacatggacaccttcatgcctgtgggggagatgaagggccatgacagccccatcaatgccatctgtgtgaacagcacccacatcttcaccgctgctgatgacagaacagtgcgcatctggaaggccaggaacctgcaggacggccagatcagtgacaccggggacctgggagaagatattgccagcaactag

SEQ ID NO: 68668 - DNA, 5025 bp, Artificial Sequence
  derived and/or modified sequence
atgctgggcgcccccgacgagagcagcgtgcgggtggccgtgcggatcaggccacaattggctaaagagaagattgagggctgccatatctgtacgagtgtcacccccggggagccccaggtctttctcggcaaggacaaggccttcaccttcgactatgtctttgatattgactcacagcaggaacaaatatacatccagtgtattgagaaattgattgagggttgtttcgaaggctacaacgccacagtgttcgcctatgggcagactggcgcaggaaagacctatacgatggggactgggttcgacgtgaatattgtcgaagaagaacttgggattattagtagagcagtcaaacacctgtttaagtctatcgaggagaaaaagcacatcgccatcaagaacggcctccccgcacctgattttaaggtgaacgctcaatttctcgagctgtacaacgaagaagtcctcgatctgttcgacacaacccgcgacattgacgcgaaatcgaagaagagcaatattcgcatccacgaggacagcaccgggggcatttatacagtgggcgtcaccactagaacggttaataccgagtccgagatgatgcagtgccttaagctgggcgctctctcacgcaccactgcgtcaacccagatgaatgtccaaagttcacgcagtcacgctatttttaccatccacgtatgccagaccagagtttgtccccaaatcgatgccgataatgcgaccgataataaaattatttccgagagcgcgcagatgaatgagtttgaaacactgacagcaaagtttcactttgttgatcttgcagggagcgaaagactgaagagaaccggagccaccggcgaacgcgccaaggaaggcatctcgattaactgcggtctcctggcactggggaacgtgataagcgccctcggcgacaagtcgaagcgtgccacccatgtgccctatagggactctaagcttacccgtctcctgcaggatagcctgggtggcaacagccaaaccatcatgatcgcttgcgttagtccatccgaccgggatttcatggagacactaaatacgttgaagtatgctaacagggcacggaacatcaaaaacaaggttatggtgaaccaggaccgggccagtcaacaaatcaacgccctgaggtctgagattacacgcctccagatggagcttatggaatataagacgggaaagcgtataatcgacgaagaaggtgttgagtctataaacgacatgtttcacgaaaacgcgatgcttcagaccgaaaacaacaacctgagggtccgaatcaaggcaatgcaggagacagtggatgcgctgcgatcccgcatcactcagttagttagtgaccaggccaatcatgtgcttgcaagagcgggcgagggcaatgaagagatttcaaatatgattcattcatacattaaggaaattgaggaccttcgcgccaagctcctggaatctgaagcggtgaacgagaacctgcgtaagaacctcactcgggctaccgcgcgcgctccatattttagtggttcctcgaccttctcacctactattttgagctccgacaaagaaacaattgagattatagatcttgctaaaaaggatctggagaaattgaaaagaaaggagaagaggaagaaaaaacgactgcagaaactggaagagtcgaatagagaggagagaagtgtggcaggcaaagaagacaacacagatacagatcaggagaaaaaggaagaaaaaggagtcagcgagagggaaaataatgagctggaagtcgaggagtcgcaagaggtttctgatcatgaagacgaggaagaggaggaagaggaggaggaggacgatatagacggcggtgagtcatcagatgaatcagactctgagagtgacgaaaaagcaaattatcaggcagatcttgctaatattacttgtgaaatcgccataaagcaaaagctgatcgacgaactcgagaatagccagaaaaggctccagacgctcaaaaaacagtacgaagagaaactgatgatgctgcaacataagatcagagacacacagctggaacgggatcaggtactccagaacctgggatcagtagagagctactctgaagagaaagcaaaaaaggtacgctccgagtatgagaagaagctgcaagctatgaacaaggaactgcagcggctgcaggccgcccaaaaagagcatgcacgactgctgaagaatcagtctcagtacgaaaagcagttaaaaaaattgcaacaagatgtaatggagatgaaaaagacaaaagtcagactgatgaaacagatgaaggaagaacaggaaaaggcacgcctcactgagagccggaggaaccgggaaatcgcacaactgaagaaggaccagagaaagcgggaccatcagcttcggctactcgaagctcaaaaacgcaatcaagaggtcgtgttaagacgcaagacggaagaggtcactgctctgcggaggcaggtgcggcctatgtccgataaagttgctggaaaggtgacccggaagctgagtagttctgacgccccagcccaagacacaggaagcagcgccgcagctgttgagacggatgcaagccggacaggcgcacagcagaaaatgcgaatccctgtggccagggtgcaggccttacctacacctgctactaatgggaacagaaaaaagtaccagagaaagggcctgacgggtagggtttttatctcaaaaaccgccagaatgaagtggcagctgctggagcgtagagtgacagatatcatcatgcagaagatgaccatctctaacatggaagctgatatgaaccgtctgctgaagcagcgagaagagttgactaagcgtcgagaaaagctatccaaacgaagagaaaaaattgttaaggagaatggcgagggtgataagaatgttgcaaacatcaatgaggagatggaatcgctgaccgcaaatattgactacataaacgattccatctctgattgtcaggcaaatattatgcagatggaggaagcgaaggaagagggcgaaacactcgatgttaccgcagtgattaacgcctgcacactgactgaggcacgttaccttctggaccactttctgagcatggggatcaacaaggggcttcaggctgcgcagaaggaagcccagattaaggtcttggagggaaggttgaagcagacagagatcactagcgccacccagaatcaactgctctttcatatgttaaaggaaaaggcggagttaaaccctgaactggatgcgctcttggggcacgctcttcaggacttggactctgtaccgttagaaaatgtggaggacagcaccgacgaggacgctccattgaacagccctgggtccgagggttcaactttgagctctgacctcatgaagttatgcggcgaggtgaaacccaagaacaaagcccggaggcgtactactacacagatggagctgctctacgcagattcttctgagctggcaagcgatactagtactggcgatgccagcctcccggggcctttgaccccagtcgctgaaggccaagaaatcggaatgaataccgagacatctggcacttcagctagggaaaaggagcttagtcccccaccagggttgccttctaaaattggctctattagcaggcagtccagtctgtctgagaagaaaatacccgagccaagccctgtcacccggagaaaggcctacgagaaagccgaaaaatctaaggctaaagaacagaagcatagcgactccggtacctctgaagcctctttatcccctccctcgtcaccgccttccaggcccagaaacgagctgaacgttttcaacaggttgacagtgtcacaaggcaatacttcagtgcagcaggacaagtctgatgagtccgactcgagcttgtcagaggtgcatcgcagctcaaggagaggaattattaatccgtttccggcaagtaaggggatccgggcttttcctcttcagtgtatccacatcgccgaagggcacacaaaggcagtgctgtgcgtggacagcactgacgacctgctctttacaggctccaaagatcgcacatgcaaagtctggaatttggtgactggtcaggagattatgtccctcggaggacatccaaataacgttgtgtccgtgaagtattgcaactatacgtctttggtgttcactgtatccacgtcttatatcaaggtgtgggatatccgcgatagtgccaaatgcattaggaccctgaccagttctgggcaggtgacccttggtgacgcatgttctgccagtaccagccggaccgtggcaatccctagtggggagaaccagatcaaccaaatcgctcttaatccaacgggtacttttctgtacgctgcatcgggtaacgcagtgagaatgtgggacctgaagcgattccagtcaacagggaaacttacaggtcatctggggcctgtgatgtgccttacagttgaccagataagcagtgggcaagatctgataattactggttccaaggaccactacatcaagatgtttgatgtgacggagggcgccctaggtacggtttctcccacacataactttgagccacctcactatgacggaatcgaggccctgaccattcaaggcgataatctttttagtgggtctcgggacaatggcatcaaaaaatgggaccttacccagaaagacttgttgcagcaggttcccaacgcccataaagactgggtctgtgctctgggtgtggtccctgatcatccagtactgttgtcaggctgcagaggggggatccttaaggtctggaacatggatacgttcatgccggtgggggagatgaaggggcacgattcccccattaatgcgatctgcgtgaatagcacccacatcttcaccgcagctgacgaccgaaccgttcgaatatggaaagccagaaatctgcaggatggccaaatctccgacacgggcgacttgggagaggacatcgccagcaattag

SEQ ID NO: 68669 - DNA, 5025 bp, Artificial Sequence
  derived and/or modified sequence
atgttgggagctccagacgaatcctcggttagagtcgcggtcaggattcggccacagctggctaaggagaagatcgaaggctgtcatatctgcacctctgtgacgcccggagaaccccaggttttcctggggaaagataaagcatttacattcgactacgtgtttgatatagattcacagcaggaacagatctatatacaatgcatcgaaaagcttattgagggctgcttcgagggctacaacgcaactgtcttcgcttatggacagaccggagcgggtaaaacttacaccatggggacaggctttgacgtcaacatcgtggaggaggaattgggtattatttctagggctgtgaagcatctgttcaagagcatcgaagagaagaagcatatcgcgattaaaaatggactccccgctcctgatttcaaggtgaacgcccaatttttagagctttataacgaagaggttctggatctcttcgacaccacccgggacatcgatgcaaagtccaaaaaaagcaatatccggatccatgaggattccaccggcggaatttacacggttggcgtgacaacacgaacggttaatactgaatcagagatgatgcagtgtctgaagcttggagctctgagcaggacaaccgcgagtacgcaaatgaacgttcagtcatcacggagccatgcaatctttactattcacgtctgtcagactagggtctgtcctcagattgatgcagacaacgccacggataacaagatcattagtgagagtgcacaaatgaacgagtttgagaccctgacagcaaaatttcacttcgtagacctcgcagggagcgaacgcctgaagcgcaccggcgctacaggcgagagggctaaagaaggaatcagtattaactgcggcctgctggctctgggaaacgtaattagcgctttaggcgataagtctaaaagggcaacccacgtaccatatcgtgacagcaagttaactagattactgcaggattccctgggtggaaactcccagactatcatgattgcgtgtgtcagtccttcagaccgtgattttatggagaccctcaatactttgaagtatgccaatagggcgagaaacattaaaaataaagtcatggtgaatcaggatagagcttcgcagcagatcaacgccctgcgcagcgagattacgaggctgcagatggagctcatggaatataaaaccgggaagcgaattattgacgaagaaggtgtcgaatcaatcaacgacatgtttcatgaaaacgcgatgctgcagaccgagaataataacctccgcgtcaggatcaaggctatgcaggagacagtagatgcgttacgatcaagaattacacaactggtgagtgatcaggcgaatcacgtactggctcgcgcaggcgagggcaatgaagaaatcagtaacatgatccactcatatattaaggagatagaggacctgcgtgcaaagctgttggaatccgaggccgtgaacgagaatctgagaaagaacctgacccgtgcaacagcacgagccccttacttttcaggaagtagcactttctcaccaactattctttctagtgacaaagagacgattgagattatagatctggccaaaaaagacttagagaagctgaagcgcaaagaaaaacggaaaaaaaagcgactgcagaaactggaggagagtaatcgcgaggagcgaagcgtcgccggtaaagaagacaacaccgatactgatcaggagaagaaggaggaaaagggagttagcgaaagggagaataacgaactcgaggttgaggaatcccaggaggtgagcgatcacgaggacgaagaggaggaggaagaagaggaggaagacgatatagatggtggagaaagcagcgatgaaagcgacagtgagagtgatgaaaaggccaactaccaggctgacctggctaatattacctgtgaaatcgctattaaacagaagttaatcgacgaactcgaaaattcacaaaagaggctccagaccctcaagaagcagtacgaggagaagctgatgatgttgcaacataaaatcagagacactcagctggagcgcgaccaggtgctgcagaacctaggatctgttgaaagctactctgaagaaaaggccaaaaaggttcgttccgaatacgagaagaaacttcaggctatgaacaaagaactgcaaaggctgcaggccgcacaaaaagagcatgctcggttgctgaagaatcagagccagtacgagaagcagctgaaaaagttacaacaagatgttatggagatgaaaaaaacaaaggttagactgatgaaacagatgaaggaggaacaggagaaagctcggcttaccgagtcgcgcagaaatagggagatagctcagcttaagaaggatcagaggaagagggaccaccagctcagactcctcgaagcacagaaaagaaaccaggaggtcgttttacgtcgtaaaacggaagaagtcacggccctgagaaggcaggtgcggcctatgtcggataaggtagcaggaaaagtaactcggaagctttcctcatccgacgctcctgcccaggacacaggtagcagcgccgcagcagttgagaccgatgcttcccgtactggagcacaacaaaaaatgcgcatccccgtggccagagtgcaggccctgccgacccctgcgacaaatggaaaccgtaagaagtatcagagaaagggtctgacaggccgagtatttatctccaaaacagctcgaatgaagtggcagctgctggaacgcagggtgaccgacataataatgcagaaaatgacgatcagcaatatggaggctgatatgaatcggctactaaagcaacgcgaagagctgaccaaaagacgagagaagctgtccaagcgtcgtgagaaaatagtgaaggagaacggtgagggcgacaaaaacgttgccaacatcaacgaggagatggaatccttgacagctaacatcgattatatcaatgacagcatttcagactgtcaggctaacatcatgcagatggaggaggccaaagaggagggcgagacacttgatgtgactgccgtaataaatgcctgtactctgaccgaggcacggtatctcctggaccactttttgtcaatgggtataaataagggcctccaggccgctcaaaaggaggctcagattaaggtccttgagggccgacttaagcaaactgagatcacgagcgccactcagaaccagctgcttttccacatgttaaaggaaaaggcagagctgaatccggaactggatgcgctgctgggccatgccctgcaggatctggactcagttccactggaaaacgtggaggattctacggacgaggatgctcctcttaattctcccggatctgaaggatcaacacttagttccgacttaatgaagctctgtggagaggtaaagcctaagaacaaggcgaggcggagaacaacgactcagatggaactcttgtacgcggattcttccgaattagcctctgatacatccactggagatgctagtctgcccggaccactgacacccgtcgcagaggggcaggagattggaatgaacactgaaacctccggtacaagtgcgcgagaaaaggagttgtctcctccaccagggttgcccagtaaaattggtagtatttcccgccagtcctccctctccgaaaagaagattcctgaaccctccccagtcacccgcaggaaggcctacgagaaagccgaaaagtccaaagctaaggaacagaagcactctgattcaggaacctctgaggcatctctgagccccccaagttctcctcccagtaggccacggaacgaacttaacgtttttaaccgattgaccgtcagtcagggaaatacttcggtccagcaggacaagtccgatgagagcgattcctctctgtctgaggtgcataggtcctccaggaggggtattatcaatccctttccggctagtaaagggataagggcttttcctttacagtgcatccacatcgctgaaggccacaccaaggcagtgctgtgcgtcgactcaactgacgatctgctgtttactggatccaaggataggacgtgcaaggtgtggaacctggtgacaggccaggaaataatgtctctaggtggtcacccaaataacgtggtatccgtcaaatactgcaattacacatcattagtgttcaccgtgagcacctcctatattaaggtgtgggacattcgagacagtgcgaaatgcatccggacactcacgtcaagtggtcaggtgactttgggcgacgcttgcagcgcatctaccagcaggaccgtcgctattcctagcggagagaaccagatcaaccaaattgctctcaatcctacaggcacctttctgtacgcagcctctggaaacgccgttcgaatgtgggacctcaaacggttccagagtactggcaaactgactggtcaccttgggcctgtgatgtgcctgactgttgatcagatcagcagcggtcaggacttgataattactggaagcaaggatcactatattaagatgtttgacgtgaccgagggagcacttggtactgttagccctacacataactttgaaccaccccattatgatgggattgaggctctcactatccagggtgataacctgttctctggaagccgcgataacggaataaagaaatgggatctgacccagaaggaccttttacaacaagttccaaacgctcataaagactgggtgtgcgctctgggcgtcgtgcccgatcaccccgtgttgttatcagggtgcagaggcggtatccttaaggtctggaatatggacacatttatgccagtgggggaaatgaaggggcatgactcccccataaatgccatttgtgtaaatagtactcacatatttactgccgcagatgatcggacagtccggatttggaaagccagaaatctccaggatggccagatttccgatactggggatctgggggaggacatcgccagcaactag

SEQ ID NO: 68670 - DNA, 5025 bp, Artificial Sequence
  derived and/or modified sequence
atgctgggcgcccccgacgagagcagcgtgagagtggccgtgagaatcagaccccagctggccaaggagaagatcgagggctgccacatctgcaccagcgtgacccccggcgagccccaggtgttcctgggcaaggacaaggccttcaccttcgactacgtgttcgacatcgacagccagcaggagcagatctacatccagtgcatcgagaagctgatcgagggctgcttcgagggctacaacgccaccgtgttcgcctacggccagaccggcgccggcaagacctacaccatgggcaccggcttcgacgtgaacatcgtggaggaggagctgggcatcatcagcagagccgtgaagcacctgttcaagagcatcgaggagaagaagcacatcgccatcaagaacggcctgcccgcccccgacttcaaggtgaacgcccagttcctggagctgtacaacgaggaggtgctggacctgttcgacaccaccagagacatcgacgccaagagcaagaagagcaacatcagaatccacgaggacagcaccggcggcatctacaccgtgggcgtgaccaccagaaccgtgaacaccgagagcgagatgatgcagtgcctgaagctgggcgccctgagcagaaccaccgccagcacccagatgaacgtgcagagcagcagaagccacgccatcttcaccatccacgtgtgccagaccagagtgtgcccccagatcgacgccgacaacgccaccgacaacaagatcatcagcgagagcgcccagatgaacgagttcgagaccctgaccgccaagttccacttcgtggacctggccggcagcgagagactgaagagaaccggcgccaccggcgagagagccaaggagggcatcagcatcaactgcggcctgctggccctgggcaacgtgatcagcgccctgggcgacaagagcaagagagccacccacgtgccctacagagacagcaagctgaccagactgctgcaggacagcctgggcggcaacagccagaccatcatgatcgcctgcgtgagccccagcgacagagacttcatggagaccctgaacaccctgaagtacgccaacagagccagaaacatcaagaacaaggtgatggtgaaccaggacagagccagccagcagatcaacgccctgagaagcgagatcaccagactgcagatggagctgatggagtacaagaccggcaagagaatcatcgacgaggagggcgtggagagcatcaacgacatgttccacgagaacgccatgctgcagaccgagaacaacaacctgagagtgagaatcaaggccatgcaggagaccgtggacgccctgagaagcagaatcacccagctggtgagcgaccaggccaaccacgtgctggccagagccggcgagggcaacgaggagatcagcaacatgatccacagctacatcaaggagatcgaggacctgagagccaagctgctggagagcgaggccgtgaacgagaacctgagaaagaacctgaccagagccaccgccagagccccctacttcagcggcagcagcaccttcagccccaccatcctgagcagcgacaaggagaccatcgagatcatcgacctggccaagaaggacctggagaagctgaagagaaaggagaagagaaagaagaagagactgcagaagctggaggagagcaacagagaggagagaagcgtggccggcaaggaggacaacaccgacaccgaccaggagaagaaggaggagaagggcgtgagcgagagagagaacaacgagctggaggtggaggagagccaggaggtgagcgaccacgaggacgaggaggaggaggaggaggaggaggaggacgacatcgacggcggcgagagcagcgacgagagcgacagcgagagcgacgagaaggccaactaccaggccgacctggccaacatcacctgcgagatcgccatcaagcagaagctgatcgacgagctggagaacagccagaagagactgcagaccctgaagaagcagtacgaggagaagctgatgatgctgcagcacaagatcagagacacccagctggagagagaccaggtgctgcagaacctgggcagcgtggagagctacagcgaggagaaggccaagaaggtgagaagcgagtacgagaagaagctgcaggccatgaacaaggagctgcagagactgcaggccgcccagaaggagcacgccagactgctgaagaaccagagccagtacgagaagcagctgaagaagctgcagcaggacgtgatggagatgaagaagaccaaggtgagactgatgaagcagatgaaggaggagcaggagaaggccagactgaccgagagcagaagaaacagagagatcgcccagctgaagaaggaccagagaaagagagaccaccagctgagactgctggaggcccagaagagaaaccaggaggtggtgctgagaagaaagaccgaggaggtgaccgccctgagaagacaggtgagacccatgagcgacaaggtggccggcaaggtgaccagaaagctgagcagcagcgacgcccccgcccaggacaccggcagcagcgccgccgccgtggagaccgacgccagcagaaccggcgcccagcagaagatgagaatccccgtggccagagtgcaggccctgcccacccccgccaccaacggcaacagaaagaagtaccagagaaagggcctgaccggcagagtgttcatcagcaagaccgccagaatgaagtggcagctgctggagagaagagtgaccgacatcatcatgcagaagatgaccatcagcaacatggaggccgacatgaacagactgctgaagcagagagaggagctgaccaagagaagagagaagctgagcaagagaagagagaagatcgtgaaggagaacggcgagggcgacaagaacgtggccaacatcaacgaggagatggagagcctgaccgccaacatcgactacatcaacgacagcatcagcgactgccaggccaacatcatgcagatggaggaggccaaggaggagggcgagaccctggacgtgaccgccgtgatcaacgcctgcaccctgaccgaggccagatacctgctggaccacttcctgagcatgggcatcaacaagggcctgcaggccgcccagaaggaggcccagatcaaggtgctggagggcagactgaagcagaccgagatcaccagcgccacccagaaccagctgctgttccacatgctgaaggagaaggccgagctgaaccccgagctggacgccctgctgggccacgccctgcaggacctggacagcgtgcccctggagaacgtggaggacagcaccgacgaggacgcccccctgaacagccccggcagcgagggcagcaccctgagcagcgacctgatgaagctgtgcggcgaggtgaagcccaagaacaaggccagaagaagaaccaccacccagatggagctgctgtacgccgacagcagcgagctggccagcgacaccagcaccggcgacgccagcctgcccggccccctgacccccgtggccgagggccaggagatcggcatgaacaccgagaccagcggcaccagcgccagagagaaggagctgagccccccccccggcctgcccagcaagatcggcagcatcagcagacagagcagcctgagcgagaagaagatccccgagcccagccccgtgaccagaagaaaggcctacgagaaggccgagaagagcaaggccaaggagcagaagcacagcgacagcggcaccagcgaggccagcctgagcccccccagcagcccccccagcagacccagaaacgagctgaacgtgttcaacagactgaccgtgagccagggcaacaccagcgtgcagcaggacaagagcgacgagagcgacagcagcctgagcgaggtgcacagaagcagcagaagaggcatcatcaaccccttccccgccagcaagggcatcagagccttccccctgcagtgcatccacatcgccgagggccacaccaaggccgtgctgtgcgtggacagcaccgacgacctgctgttcaccggcagcaaggacagaacctgcaaggtgtggaacctggtgaccggccaggagatcatgagcctgggcggccaccccaacaacgtggtgagcgtgaagtactgcaactacaccagcctggtgttcaccgtgagcaccagctacatcaaggtgtgggacatcagagacagcgccaagtgcatcagaaccctgaccagcagcggccaggtgaccctgggcgacgcctgcagcgccagcaccagcagaaccgtggccatccccagcggcgagaaccagatcaaccagatcgccctgaaccccaccggcaccttcctgtacgccgccagcggcaacgccgtgagaatgtgggacctgaagagattccagagcaccggcaagctgaccggccacctgggccccgtgatgtgcctgaccgtggaccagatcagcagcggccaggacctgatcatcaccggcagcaaggaccactacatcaagatgttcgacgtgaccgagggcgccctgggcaccgtgagccccacccacaacttcgagcccccccactacgacggcatcgaggccctgaccatccagggcgacaacctgttcagcggcagcagagacaacggcatcaagaagtgggacctgacccagaaggacctgctgcagcaggtgcccaacgcccacaaggactgggtgtgcgccctgggcgtggtgcccgaccaccccgtgctgctgagcggctgcagaggcggcatcctgaaggtgtggaacatggacaccttcatgcccgtgggcgagatgaagggccacgacagccccatcaacgccatctgcgtgaacagcacccacatcttcaccgccgccgacgacagaaccgtgagaatctggaaggccagaaacctgcaggacggccagatcagcgacaccggcgacctgggcgaggacatcgccagcaactag

SEQ ID NO: 68671 - protein, 1621 aa, Artificial Sequence
  derived and/or modified sequence
MLGAPDESSVRVAVRIRPQLAKEKIEGCHICTSVTPGEPQVFLGKDKAFTFDYVFDIDSQQEQIYIQCIEKLIEGCFEGYNATVFAYGQTGAGKTYTMGTGFDVNIVEEELGIISRAVKHLFKSIEEKKHIAIKNGLPAPDFKVNAQFLELYNEEVLDLFDTTRDIDAKSKKSNIRIHEDSTGGIYTVGVTTRTVNTESEMMQCLKLGALSRTTASTQMNVQSSRSHAIFTIHVCQTRVCPQIDADNATDNKIISESAQMNEFETLTAKFHFVDLAGSERLKRTGATGERAKEGISINCGLLALGNVISALGDKSKRATHVPYRDSKLTRLLQDSLGGNSQTIMIACVSPSDRDFMETLNTLKYANRARNIKNKVMVNQDRASQQINALRSEITRLQMELMEYKTGKRIIDEEGVESINDMFHENAMLQTENNNLRVRIKAMQETVDALRSRITQLVSDQANHVLARAGEGNEEISNMIHSYIKEIEDLRAKLLESEAVNENLRKNLTRATARAPYFSGSSTFSPTILSSDKETIEIIDLAKKDLEKLKRKEKRKKKSVAGKEDNTDTDQEKKEEKGVSERENNELEVEESQEVSDHEDEEEEEEEEEDDIDGGESSDESDSESDEKANYQADLANITCEIAIKQKLIDELENSQKRLQTLKKQYEEKLMMLQHKIRDTQLERDQVLQNLGSVESYSEEKAKKVRSEYEKKLQAMNKELQRLQAAQKEHARLLKNQSQYEKQLKKLQQDVMEMKKTKVRLMKQMKEEQEKARLTESRRNREIAQLKKDQRKRDVTALRRQVRPMSDKVAGKVTRKLSSSDAPAQDTGSSAAAVETDASRTGAQQKMRIPVARVQALPTPATNGNRKKYQRKGLTGRVFISKTARMKWQLLERRVTDIIMQKMTISNMEADMNRLLKQREELTKRREKLSKRREKIVKENGEGDKNVANINEEMESLTANIDYINDSISDCQANIMQMEEAKEEGETLDVTAVINACTLTEARYLLDHFLSMGINKGLQAAQKEAQIKVLEGRLKQTEITSATQNQLLFHMLKEKAELNPELDALLGHALQDLDSVPLENVEDSTDEDAPLNSPGSEGSTLSSDLMKLCGEVKPKNKARRRTTTQMELLYADSSELASDTSTGDASLPGPLTPVAEGQEIGMNTETSGTSAREKELSPPPGLPSKIGSISRQSSLSEKKIPEPSPVTRRKAYEKAEKSKAKEQKHSDSGTSEASLSPPSSPPSRPRNELNVFNRLTVSQGNTSVQQDKGIINPFPASKGIRAFPLQCIHIAEGHTKAVLCVDSTDDLLFTGSKDRTCKVWNLVTGQEIMSLGGHPNNVVSVKYCNYTSLVFTVSTSYIKVWDIRDSAKCIRTLTSSGQVTLGDACSASTSRTVAIPSGENQINQIALNPTGTFLYAASGNAVRMWDLKRFQSTGKLTGHLGPVMCLTVDQISSGQDLIITGSKDHYIKMFDVTEGALGTVSPTHNFEPPHYDGIEALTIQGDNLFSGSRDNGIKKWDLTQKDLLQQVPNAHKDWVCALGVVPDHPVLLSGCRGGILKVWNMDTFMPVGEMKGHDSPINAICVNSTHIFTAADDRTVRIWKARNLQDGQISDTGDLGEDIASN

SEQ ID NO: 68672 - DNA, 285 bp, Artificial Sequence
  derived and/or modified sequence
atgcaacatagcctcgtgttttttttcgctgtgatcctgcacctgtcccacctcctgcatctggatgcaagtattcaccctttcagactgcccttttcctctaaacccttcttactgatcccgatgtcgaataccacattaccccacacagcttggcctctgtctttcctccaccagacggtgagcaccctcaaagctgtggccgtcacacacagcctttggcatctgcagattccagtggactgtcaagcttgtaacagaaagtccaagaaaatatattgttag

SEQ ID NO: 68673 - DNA, 4866 bp, Artificial Sequence
  derived and/or modified sequence
atgcttggtgctcccgacgaaagcagtgtgagagtggccgtacgcataagaccccagctcgctaaggaaaaaatagagggctgtcatatctgcacctctgtgacccctggggaacctcaggtgtttttgggcaaagataaggccttcacttttgactatgtgtttgatatagactcgcaacaagaacaaatatatattcagtgcatcgagaaactgattgaaggctgtttcgaggggtataacgccaccgtgttcgcctacggacagactggtgctggaaagacctatacaatgggcacgggcttcgacgtgaacattgtagaggaggagctgggcatcatttcaagggctgtcaaacacctcttcaagagcattgaagagaaaaaacatattgccattaagaatggcctccctgcacctgattttaaagtcaacgctcagttcctcgaactgtacaatgaggaagtccttgatttgttcgataccactcgggacatcgacgcgaaatcaaaaaagtctaacattaggattcacgaagactcgaccggcggaatctataccgtcggcgtgacaactaggacagttaatacggaaagcgaaatgatgcagtgccttaagcttggcgccctgtcgcgaactactgccagcacccagatgaacgtgcaaagcagtcgctcacatgccatatttactatccatgtttgccagactagggtctgccctcagatcgatgccgataacgccaccgataataaaatcatcagcgaaagtgcccagatgaacgaattcgagactctgacggccaagtttcactttgtggatctggcaggcagcgaaagactgaagaggaccggcgccactggggagcgcgccaaagaggggattagcattaattgtggtcttctcgcgttggggaatgtgatcagcgccctcggggacaagtccaaacgcgcgacccatgtgccttatagggactctaagcttactcggctgctgcaggacagtctaggtggaaactcccaaaccatcatgatcgcttgcgtgtcaccatccgatagagattttatggagaccctgaataccttgaagtacgcgaacagagctagaaacataaagaacaaggtcatggtgaaccaagaccgggccagccagcagatcaacgccctccggtcagagatcaccaggctgcagatggaattgatggagtataaaacaggaaagcggattatcgacgaggaaggggtggagtccatcaacgacatgttccacgagaatgcaatgttgcagactgaaaacaacaacctgcgggtcagaatcaaggccatgcaggagacagtcgacgcactgcgaagtcgcatcacccagcttgttagcgatcaggcgaaccatgtcctagctcgcgcgggcgaggggaacgaagaaattagcaacatgatacattcttacatcaaagagatagaagacttgcgtgccaagcttctggaaagtgaggctgttaacgaaaatctgagaaagaatctcaccagagctaccgccagagccccgtacttctccggctcgtcaactttttccccaaccatcctttcttccgacaaggaaactatcgaaatcattgacctggctaaaaaggacttggagaagctgaagcggaaagaaaaacgtaagaagaaaagcgtggcagggaaggaagacaacacggacactgaccaggagaagaaagaggaaaaaggcgtgtcagagcgtgaaaacaacgaactcgaagtagaagaatcccaggaagtgagtgatcatgaggacgaggaggaagaagaggaagaggaagaggacgatatcgatggcggggagagttctgacgaaagcgactcagaaagtgacgaaaaagcaaactaccaggccgatctggcaaatatcacctgtgaaatcgctataaagcagaagctcatcgacgagctcgaaaactcccagaaacgtctccagaccctgaaaaaacaatacgaggagaagctgatgatgcttcagcacaaaatccgggatacccagttagaacgggatcaggtcctccagaatttggggagtgtcgaatcatattccgaggagaaggccaagaaggtcaggagtgagtacgaaaagaaactacaagcaatgaataaggagctgcaacgcctgcaggccgcacagaaagagcatgctcgtctgcttaaaaaccagagccagtacgaaaaacagctgaaaaagcttcagcaggatgttatggagatgaagaagacaaaggtcagactgatgaaacagatgaaggaggaacaggagaaagccagactaaccgagtcaagaagaaatcgagaaatcgctcagctcaaaaaggatcagagaaagagggatgtaaccgccttgcgcagacaggttagacccatgagcgacaaagtggccggcaaggttactcggaagttatcgtcttccgatgcccccgcccaagacaccggcagcagcgccgcagccgtcgagacggacgccagcagaacaggagcacagcagaagatgagaatacctgtcgcccgggtgcaagctcttcccactcctgcaaccaatggaaacagaaagaagtatcaacggaagggactcactgggcgtgtcttcattagtaaaacagccaggatgaagtggcagctgcttgaacggagggtcaccgatatcattatgcagaagatgactatttccaacatggaagctgatatgaatagattgttaaaacagcgggaagagctaactaaaagaagggagaagctgagtaagcggcgcgagaagatcgtcaaagagaatggggaaggcgacaagaatgtggccaatatcaatgaggagatggagagcctaacagccaacatagactatatcaatgacagtataagcgattgtcaggccaacattatgcagatggaggaggcaaaagaggagggagagactctcgacgtcacagccgtgattaacgcttgtacccttacagaggctcgatatctgctcgaccattttctgagcatgggaatcaataaaggtctgcaagctgctcagaaagaggcacagatcaaggtgctggagggccgcctgaagcagaccgaaataacgagtgctactcagaaccagttgctgttccacatgctgaaggagaaggccgagctgaaccctgagcttgatgctctattaggccacgctcttcaggacttggattctgtgcctcttgaaaatgtcgaggattctacggacgaggatgcgcccctgaactcccctggctccgagggttctaccttgagctccgacctgatgaagttatgcggggaagtcaagccgaaaaataaagcacggcggcggacaacaacccagatggaactgctgtacgcagatagttccgaattggccagtgacacaagcactggagacgcctccctgcctggccccctcacccctgttgccgagggccaagagataggaatgaacacagaaacttcaggcacctctgctagggaaaaagagctctctccacccccgggactgcccagtaaaatcggaagtatctcacgccaatctagcttatctgagaagaaaattcctgagcccagccccgtgacccgcagaaaagcatatgaaaaggccgaaaagtccaaggctaaggaacagaagcactccgactctggcacgagcgaggccagcctcagcccaccatcctcccctccctcacgacccagaaatgaactgaacgtcttcaatcgcctgacagtgagccagggcaataccagtgtccagcaggataagggaatcattaacccgtttcctgcttccaaaggcattcgcgcttttcccttacagtgcatccatatagcagagggccacacaaaggcagtgctttgtgtggatagtaccgatgacctcctgtttacaggcagcaaagaccgcacatgtaaggtgtggaacttagtgacaggacaagagatcatgagtcttggggggcaccccaataatgtggtctccgtgaagtactgcaactatacaagtctggtgttcaccgtgtccacctcctatatcaaagtttgggatatcagggattcagctaaatgtatccgcaccctgacttctagcggacaggtgacactcggtgacgcctgctccgcctccaccagcagaacggtcgctatcccatcaggcgagaaccagatcaaccagattgcgctcaacccgaccgggacttttctttatgctgcctctgggaatgctgtgagaatgtgggacctgaaaagatttcagtccactggcaagctcactgggcacttgggccccgtgatgtgtctgactgtcgaccagatctcatcaggacaggatctgataatcaccggatctaaagaccactacataaagatgtttgatgtaaccgaaggcgccctcggcaccgtgtcccccactcacaacttcgaacccccacattacgatggaatcgaggccctcactatccagggggacaatctgttctctggttcaagagataatggcattaaaaagtgggatttaacccagaaggacttgctgcaacaggtgcctaacgcccacaaggactgggtctgtgccctcggagtggtgcccgatcacccagtgttgctgtcaggatgccgcggggggatcctgaaagtgtggaacatggatacattcatgcctgtcggcgagatgaaaggccatgattcacccattaacgctatttgtgtaaatagtacacacatcttcacagcagcggacgacagaactgtgcgtatttggaaagcccgcaatctgcaggacggccagatttccgataccggcgaccttggtgaggacattgccagtaactag

SEQ ID NO: 68674 - DNA, 4866 bp, Artificial Sequence
  derived and/or modified sequence
atgttgggcgccccggacgagagctccgtgcgggtggctgtcagaataagaccacagcttgccaaagagaagattgaaggatgccatatttgtacatctgtcacaccaggagagcctcaggtcttcctagggaaagataaggcttttacttttgactatgtatttgacattgactcccagcaagagcagatctacattcaatgtatagaaaaactaattgaaggttgctttgaaggatacaatgctacagtttttgcttatggacaaactggagctggtaaaacatacacaatgggaacaggatttgatgttaacattgttgaggaagaactgggtattatttctcgagctgttaaacacctttttaagagtattgaagaaaaaaaacacatagcaattaaaaatgggcttcctgctccagattttaaagtgaatgcccaattcttagagctctataatgaagaggtccttgacttatttgataccactcgtgatattgatgcaaaaagtaaaaaatcaaatataagaattcatgaagattcaactggaggaatttatactgtgggcgttacaacacgtactgtgaatacagaatcagagatgatgcagtgtttgaagttgggtgctttatcccggacaactgccagtacccagatgaatgttcagagctctcgttcacatgccatttttaccattcatgtgtgtcaaaccagagtgtgtccccaaatagatgctgacaatgcaactgataataaaattatttctgaatcagcacagatgaatgaatttgaaaccctgactgcaaagttccattttgttgatctcgcaggatctgaaagactgaagcgtactggagctacaggcgagagggcaaaagaaggcatttctatcaactgtggacttttggcacttggcaatgtaataagtgccttgggagacaagagcaagagggccacacatgtcccctatagagattccaagctaacaagactactacaggattccctcgggggtaatagccaaacaatcatgatagcatgtgtcagcccttcagacagagactttatggaaacgttaaacaccctgaaatacgccaatcgagctagaaatatcaagaataaggtgatggtcaatcaggacagagctagtcagcaaatcaatgcacttcgtagtgaaatcacacgacttcagatggagctcatggagtacaaaacaggtaaaagaataattgacgaagagggtgtggaaagcatcaatgacatgtttcatgagaatgctatgctacagactgaaaataataacctgcgtgtaagaattaaagccatgcaagagacggttgatgcattgaggtccagaattacacagcttgttagtgatcaggccaaccatgttcttgccagagcaggtgaaggaaatgaggagattagtaatatgattcatagttatataaaagaaatcgaagatctcagggcaaaattattagaaagtgaagcagtgaatgagaaccttcgaaaaaacttgacaagagccacagcaagagcgccatatttcagcggatcatcaactttttctcctaccatactatcctcagacaaagaaaccattgaaattatagacctagcaaaaaaagatttagagaagttgaaaagaaaagaaaagaggaagaaaaaaagtgtggctggtaaagaggataatacagacactgaccaagagaagaaagaagaaaagggtgtttcggaaagagaaaacaatgaattagaagtggaagaaagtcaagaagtgagtgatcatgaggatgaagaagaggaggaggaggaggaggaagatgacattgatgggggtgaaagttctgatgaatcagattctgaatcagatgaaaaagccaattatcaagcagacttggcaaacattacttgtgaaattgcaattaagcaaaagctgattgatgaactagaaaacagccagaaaagactgcagactctgaaaaagcagtatgaagagaagctaatgatgctgcaacataaaattcgggatactcagcttgaaagagaccaggtgcttcaaaacttaggctcggtagaatcttactcagaagaaaaagcaaaaaaagttaggtctgaatatgaaaagaaactccaagccatgaacaaagaactgcagagacttcaagcagctcaaaaagaacatgcaaggttgcttaaaaatcagtctcagtatgaaaagcaattgaagaaattgcagcaggatgtgatggaaatgaaaaaaacaaaggttcgcctaatgaaacaaatgaaagaagaacaagagaaagccagactgactgagtctagaagaaacagagagattgctcagttgaaaaaggatcaacgtaaaagagatgttacggctcttcgtcggcaagtaagacccatgtcagataaagtggctgggaaagttactcggaagctgagttcatctgatgcacctgctcaggacacaggttccagtgcagctgctgtcgaaacagatgcatcaaggacaggagcccagcagaaaatgagaattcctgtggcgagagtccaggccttaccaacgccggcaacaaatggaaacaggaaaaaatatcagaggaaaggattgactggccgagtgtttatttccaagacagctcgcatgaagtggcagctccttgagcgcagggtcacagacatcatcatgcagaagatgaccatttccaacatggaggcagatatgaatagactcctcaagcaacgggaggaactcacaaaaagacgagagaaactttcaaaaagaagggagaagatagtcaaggagaatggagagggagataaaaatgtggctaatatcaatgaagagatggagtcactgactgctaatatcgattacatcaatgacagtatttctgattgtcaggccaacataatgcagatggaagaagcaaaggaagaaggtgagacattggatgttactgcagtcattaatgcctgcacccttacagaagcccgatacctgctagatcacttcctgtcaatgggcatcaataagggtcttcaggctgcccagaaagaggctcaaattaaagtactggaaggtcgactcaaacaaacagaaataaccagtgctacccaaaaccagctcttattccatatgttgaaagagaaggcagaattaaatcctgagctagatgctttactaggccatgctttacaagatctagatagcgtaccattagaaaatgtagaggatagtactgatgaggatgctcctttaaacagcccaggatcagaaggaagcacgctgtcttcagatctcatgaagctttgtggtgaagtgaaacctaagaacaaggcccgaaggagaaccaccactcagatggaattgctgtatgcagatagcagtgaactagcttcagacactagtacaggagatgcctccttgcctggccctctcacacctgttgcagaagggcaagagattggaatgaatacagagacaagtggtacttctgctagggaaaaagagctctctcccccacctggcttaccttctaagataggcagcatttccaggcagtcatctctatcagaaaaaaaaattccagagccttctcctgtaacaaggagaaaggcatatgagaaagcagaaaaatcaaaggccaaggaacaaaagcactcagattctggaacttcagaggctagtctttcacctccttcttccccaccaagccggccccgtaatgaactgaatgtttttaatcgtcttactgtttctcagggaaacacatcagttcagcaggataagggcataatcaacccatttcctgcttcaaaaggaatcagagcttttccacttcagtgtattcacatagctgaagggcatacaaaagctgtgctctgtgtggattctactgatgatctcctcttcactggatcaaaagatcgtacttgtaaagtatggaatctggtgactgggcaggaaataatgtcactggggggtcatcccaacaatgtcgtgtctgtaaaatactgtaattataccagtttggtcttcactgtatcaacatcttatattaaggtgtgggatatcagagattcagcaaagtgcattcgaacactaacgtcttcaggtcaagttactcttggagatgcttgttctgcaagtaccagtcgaacagtagctattccttctggagagaaccagatcaatcaaattgccctaaacccaactggcaccttcctctatgctgcttctggaaatgctgtcaggatgtgggatcttaaaaggtttcagtctacaggaaagttaacaggacacctaggccctgttatgtgccttactgtggatcagatttccagtggacaagatctaatcatcactggctccaaggatcattacatcaaaatgtttgatgttacagaaggagctcttgggactgtgagtcccacccacaattttgaaccccctcattatgatggcatagaagcactaaccattcaaggggataacctatttagtgggtctagagataatggaatcaagaaatgggacttaactcaaaaagaccttcttcagcaagttccaaatgcacataaggattgggtctgtgccctgggagtggtgccagaccacccagttttgctcagtggctgcagagggggcattttgaaagtctggaacatggatacttttatgccagtgggagagatgaagggtcatgatagtcctatcaatgccatatgtgttaattccacccacatttttactgcagctgatgatcgaactgtgagaatttggaaggctcgcaatttgcaagatggtcagatctctgacacaggagatctgggggaagatattgccagtaattaa

SEQ ID NO: 68675 - DNA, 4866 bp, Artificial Sequence
  derived and/or modified sequence
atgctgggcgccccagatgagagctctgtgcgggtggccgtgcgcatccggccccagctggccaaggagaagattgagggctgccacatctgcacctctgtgaccccaggagagccccaggtgttcctgggcaaggacaaggccttcacctttgattatgtgtttgatattgacagccagcaggagcagatctacatccagtgcatcgagaagctgattgagggctgctttgagggctacaatgccaccgtgtttgcctacggccagacaggagctgggaagacctacaccatgggcaccggctttgatgtgaacatcgtggaggaggagctgggcatcatcagcagagctgtgaagcacctgttcaagagcattgaggagaagaagcacatcgccatcaagaatggcctgcctgccccagacttcaaggtgaatgcccagttcctggagctgtacaatgaggaggtgctggacctgtttgacaccacccgggacattgatgccaagagcaagaagagcaacatccgcatccacgaggacagcactggaggcatctacacagtgggcgtgaccaccaggacagtgaacacagaaagtgagatgatgcagtgcctgaagctgggcgccctgagcaggaccacagccagcacccagatgaatgtgcagagcagccgcagccacgccatcttcaccatccacgtgtgccagaccagggtgtgcccccagattgatgctgacaatgccacagacaacaagatcatcagcgagagcgcccagatgaatgaatttgagaccctgacagccaagttccactttgtggacctggccggcagcgagcggctgaagaggactggagccactggagagcgggccaaggagggcatcagcatcaactgtggcctgctggccctgggcaatgtcatcagcgccctgggggacaagagcaagagggccacccacgtgccctacagagacagcaagctgacccggctgctgcaggacagcctgggcggcaacagccagaccatcatgattgcctgtgtgagccccagcgaccgggacttcatggagaccctgaacaccctgaagtatgccaacagagccaggaacatcaagaacaaggtgatggtgaaccaggaccgggccagccagcagatcaatgccctgcggtctgagatcacccggctgcagatggagctgatggagtacaagacaggcaagaggatcattgatgaggagggcgtggagagcatcaatgacatgtttcatgaaaatgccatgctgcagacagagaacaacaacctgcgggtgcgcatcaaggccatgcaggagaccgtggatgccctgcggagccgcatcacccagctggtgtctgaccaggccaaccacgtgctggcccgggccggggagggcaatgaggagatcagcaacatgatccacagctacatcaaggagattgaggacctgcgggccaagctgctggagagcgaggccgtgaatgaaaacctgaggaagaacctgacccgggccacagcccgggccccctacttcagcggcagcagcaccttcagccccaccatcctgagcagtgacaaggagaccatcgagatcatcgacctggccaagaaggacctggagaagctgaagaggaaggagaagaggaagaagaagtctgtggccggcaaggaggacaacacagacacagaccaggagaagaaggaggagaagggcgtgtctgagcgggagaacaatgagctggaggtggaggagagccaggaggtgtctgaccatgaagatgaggaggaggaggaggaggaggaggaggatgacattgatggaggagagagcagtgatgaaagtgacagcgagagtgatgagaaggccaactaccaggccgacctggccaacatcacctgtgaaattgccatcaagcagaagctgattgatgagctggagaacagccagaagaggctgcagaccctgaagaagcagtatgaggagaagctgatgatgctgcagcacaagatccgggacacccagctggagcgggaccaggtgctgcagaacctgggctctgtggagagctacagcgaggagaaggccaagaaggtgcgctcagaatatgagaagaagctgcaggccatgaacaaggagctgcagaggctgcaggccgcccagaaggagcacgcccggctgctgaagaaccagagccagtatgagaagcagctgaagaagctgcagcaggatgtgatggagatgaagaagaccaaggtgcggctgatgaagcagatgaaggaggagcaggagaaggcccggctgacagagagcagaagaaaccgggagatcgcccagctgaagaaggaccagaggaagagagatgtgacagccctgcggcggcaggtgcggcccatgtctgacaaggtggccggcaaggtgaccaggaagctgagcagcagtgatgccccagcccaggacaccggcagcagcgctgctgctgtggagacagatgccagcaggactggagcccagcagaagatgagaattcctgtggcccgggtgcaggccctgcccaccccagccaccaacggcaacaggaagaagtaccagaggaagggcctgaccggccgggtcttcatcagcaagacagccaggatgaagtggcagctgctggagcggcgggtgacagacatcatcatgcagaagatgaccatcagcaacatggaggccgacatgaaccggctgctgaagcagcgggaggagctgaccaagaggcgggagaagctgagcaagagaagagagaagatcgtgaaggaaaatggagagggggacaagaatgtggccaacatcaatgaggagatggagagcctgacagccaacatcgactacatcaatgacagcatcagtgactgccaggccaacatcatgcagatggaggaggccaaggaggagggggagaccctggatgtgacagctgtgatcaatgcctgcaccctgacagaggcccgctacctgctggaccacttcctgtccatgggcatcaacaagggcctgcaggccgcccagaaggaggcccagatcaaggtgctggagggccgcctgaagcagacagagatcaccagcgccacccagaaccagctgctcttccacatgctgaaggagaaggccgagctgaaccctgagctggatgccctgctgggccacgccctgcaggacctggacagcgtgcccctggagaatgtggaggacagcacagatgaagatgcccccctgaacagccctggcagcgagggcagcaccctgagcagtgacctgatgaagctgtgtggggaggtgaagcccaagaacaaggcccggcggaggaccaccacccagatggagctgctgtatgctgacagcagcgagctggccagtgacaccagcactggagatgccagcctgcccggccccctgacccctgtggccgagggccaggagatcggcatgaacacagagaccagcggcaccagcgcccgggagaaggagctgagccccccacctggcctgcccagcaagattggcagcatcagccggcagagcagcctgtctgagaagaagatccctgagcccagccctgtgaccaggaggaaggcctatgagaaggccgagaagagcaaggccaaggagcagaagcacagcgacagcggcaccagcgaggccagcctgagcccccccagcagcccccccagccggcccagaaatgagctgaatgtgttcaaccggctgactgtgtcccagggcaacacctctgtgcagcaggacaagggcatcatcaaccccttccctgccagcaagggcatccgggccttccccctgcagtgcatccacatcgccgagggccacaccaaggctgtgctgtgtgtggacagcacagatgacctgctcttcaccggcagcaaggacaggacctgcaaggtgtggaacctggtgacaggccaggagatcatgagcctgggcggccaccccaacaacgtggtgtctgtgaagtactgcaactacaccagcctggtgttcaccgtgtccaccagctacatcaaggtgtgggacatccgggacagcgccaagtgcatccgcaccctgaccagcagcggccaggtgaccctgggagatgcctgcagcgccagcaccagcaggacagtggccatccccagcggggagaaccagatcaaccagatcgccctgaaccccaccggcaccttcctgtatgctgccagcggaaatgctgtgaggatgtgggacctgaagcgcttccagagcacaggcaagctgaccggccacctgggccctgtgatgtgcctgactgtggaccagatcagcagcggccaggacctgatcatcaccggcagcaaggaccactacatcaagatgtttgatgtgacagagggcgccctgggcaccgtgagccccacccacaactttgagcccccccactatgatggcatcgaggccctgaccatccagggcgacaacctcttcagcggcagccgggacaatggcatcaagaagtgggacctgacccagaaggacctgctgcagcaggtgcccaatgcccacaaggactgggtgtgtgccctgggcgtggtgcctgaccaccctgtgctgctgagcggctgccggggcggcatcctgaaggtgtggaacatggacaccttcatgcctgtgggggagatgaagggccatgacagccccatcaatgccatctgtgtgaacagcacccacatcttcaccgctgctgatgacagaacagtgcgcatctggaaggccaggaacctgcaggacggccagatcagtgacacaggagacctgggggaggacatcgccagcaactag

SEQ ID NO: 68676 - DNA, 4866 bp, Artificial Sequence
  derived and/or modified sequence
atgctgggcgcccccgacgagagcagcgtgcgggtggccgtgcggatccgtcctcagctggctaaggagaagattgaaggatgtcacatctgcacttcagtcacgccaggagagccccaggtcttcctcgggaaggataaagcttttacctttgactatgtgtttgacattgacagtcagcaggagcagatttacatccaatgtattgagaagctcatcgaggggtgtttcgagggatataatgcaactgtgttcgcctatggacaaaccggggccggtaaaacttataccatggggaccggcttcgatgtcaacatagtggaagaggagttaggaattatttctcgggctgtaaaacatctgttcaagtccatagaggagaaaaagcacatcgcaatcaaaaatggcctgccagccccagactttaaggtgaacgcacaatttctggagctctataacgaagaagttctggatttgtttgataccacacgcgacattgacgcaaagagcaaaaaaagtaacattaggatccacgaagattccacaggcggaatatacactgtgggcgtcaccacccgaaccgtgaacacagaaagcgagatgatgcaatgcctgaaactgggtgcactgagcagaaccacagctagtactcagatgaatgtgcagtcttctcggtcccacgctattttcacgatccacgtatgccagacgagagtttgtccccaaatcgatgccgataatgcaacggacaataaaattatctccgaatctgcccagatgaatgaattcgagacactcaccgcaaagtttcacttcgtggacctcgcaggctcagagcgactgaaaaggacaggtgccactggagaaagagcaaaggaaggaatctcgatcaattgcggtctcctagcgctggggaatgttatttccgcactcggagataagagtaaacgagcaacacatgtgccttatcgggatagtaaactgaccaggttactccaggatagtcttggtggaaattctcagacgataatgattgcctgcgtgtccccatccgatagggacttcatggagaccttaaatacactcaaatacgccaatcgcgccagaaatataaaaaacaaggtaatggttaaccaagatcgagcctcccagcagatcaacgctcttaggtctgagataacccgcttgcaaatggagctcatggagtataaaacggggaagagaatcattgacgaggaaggcgttgaaagtattaatgacatgtttcacgagaacgctatgctgcaaactgaaaacaataacttgagagtgcgaatcaaggctatgcaagagaccgtggatgctcttaggtctaggattactcagttagtgtccgatcaggccaaccacgtgcttgctagagccggagaggggaatgaagaaatcagcaatatgatccacagctatattaaggagatcgaggacttgcgtgcaaagttactggagagtgaggccgtgaacgagaatctgcggaaaaacctaacgcgggcgacagcgagggccccgtacttctccgggtcttcaacttttagccccactattctatccagtgacaaagagacaattgaaattatcgaccttgcaaagaaagacttggagaaactcaagcgcaaggaaaagaggaagaagaagagtgttgcaggcaaggaggacaataccgataccgaccaagaaaaaaaggaggagaagggcgtctccgaaagagaaaataatgagttggaggtggaagagagtcaggaagtctctgaccacgaagatgaggaggaagaggaggaagaagaagaagacgatattgacggcggcgaaagctctgacgagtccgattctgaatccgacgaaaaggcaaactatcaggcagatctggccaatattacatgcgaaatcgctatcaagcagaagctgatcgacgagctcgagaattcacagaagcggctgcaaaccctgaagaaacagtatgaggagaagctcatgatgttgcagcataaaattagggatacccagcttgagcgcgatcaggtgttacaaaatcttggctccgttgagtcctacagcgaggagaaggcgaaaaaagtaagatccgagtacgaaaagaaactgcaagccatgaacaaggagttgcagagattgcaggccgcgcagaaagaacacgccaggttactcaaaaatcaaagtcagtatgaaaaacagctgaaaaagctccaacaggacgtaatggagatgaagaagactaaagttagactcatgaagcagatgaaggaagagcaggaaaaggcccgcctgacagagtccaggcgcaaccgcgagatcgcccaactgaaaaaagatcaacgcaagcgtgatgtgacggctttaagaagacaggtccgtcccatgtccgataaggtcgccggaaaagtgacccgcaaactcagctcctcagacgcacctgcccaggacaccggtagttctgccgcggcagtagagacggatgcctctcggaccggtgcgcagcagaaaatgcgcatccccgtggctcgggtgcaggcccttcccacacctgccacaaacgggaaccggaagaagtatcaacggaagggactcactggacgtgttttcattagcaaaactgcacgcatgaagtggcagcttctggagcgccgtgttactgatattataatgcaaaagatgacaatctcaaacatggaagctgatatgaaccggctcctgaagcaacgggaggaattaacgaagcggagggagaagctttcgaaaagaagggagaaaatcgtgaaggaaaatggagaaggggacaaaaacgtcgccaacattaatgaggaaatggagagcctgaccgcaaacattgattatataaatgattccattagtgactgtcaagctaatatcatgcagatggaagaggcaaaagaggaaggggaaactctcgatgttaccgcagtaatcaatgcttgtacgctcacagaagcgcgatacttacttgatcatttcctgagcatggggattaataaaggactccaggccgcacagaaagaagcccagataaaagtactggaaggccggttgaaacagacagaaatcacaagcgcaacgcagaaccagttgttgtttcatatgctgaaggagaaggctgagcttaatccggagttggacgcactgctgggccacgctctgcaagacctcgactccgtgccactggagaacgtggaggactccaccgatgaagatgcgccgctcaatagtcccggcagtgagggaagtacactctcctcagatctcatgaagctctgcggcgaggtaaaaccaaaaaataaagcaaggagaagaaccaccacccaaatggaactgttatacgctgactcaagtgagttagccagtgatacctccactggagacgccagtcttccaggtcctctgaccccagtggcagagggccaggagattggaatgaacacagagactagcgggacgagtgcaagagaaaaagagcttagtcccccacctggcttgcctagtaaaatcggttcgattagcaggcagagttcacttagcgaaaaaaagatcccagagcctagcccggtcacacgccgaaaggcctacgagaaggctgagaagtccaaggcaaaggaacagaaacactccgattcaggcacctctgaggcttcgctgtcccctccaagttccccaccaagtagaccccggaacgaattaaatgttttcaacagactaaccgtctctcaagggaacacgtcagtgcagcaagataagggaatcataaacccgtttcctgcaagcaagggaatacgcgcatttccattacagtgtattcacatcgccgaggggcatacgaaagccgttctctgtgtagattccacagatgatttgctcttcactggctccaaagaccgcacttgcaaggtctggaatttggtgacaggccaggaaattatgagcttaggtggacatcccaacaacgtcgtgagtgtaaaatattgcaattatacgtccttagttttcacagtatctacttcctatatcaaagtgtgggatatccgcgacagcgctaagtgcattcggacccttacatctagcggccaggtcacactgggcgacgcctgcagcgctagtaccagtcgcaccgttgctatcccatccggcgaaaaccagataaatcagatagctctgaatcccactgggacatttctgtatgcagcttcaggtaatgccgtgcggatgtgggacctgaaaagattccagtctaccggcaagctcacagggcatctgggccccgtcatgtgtcttaccgtagatcagataagctctggccaggatctcattattactggaagtaaggaccattatatcaaaatgtttgatgtgaccgagggcgctctgggcacagtgtctccaactcataatttcgagccaccccactatgatggcattgaggctctaacaattcaaggcgacaatctgttcagtgggtcacgtgataacggaataaagaagtgggacctcacccagaaagatctgctacagcaggtgcccaatgctcacaaagactgggtgtgcgccctgggtgttgtgccagaccaccccgtgctcctgtcgggttgcaggggcggtattctgaaagtttggaatatggatacttttatgccagtcggggaaatgaaaggtcacgacagtcccattaatgctatctgcgtcaattcaacccatatttttaccgcagccgatgatcggaccgtacgaatctggaaggcgcgcaacttgcaggacggacaaattagcgatacgggagacctgggagaggacatcgcctcaaattag

SEQ ID NO: 68677 - DNA, 4866 bp, Artificial Sequence
  derived and/or modified sequence
atgctcggcgctcccgacgagagctctgttagagtggccgtgcgtatccgaccccagctggccaaagagaaaatcgaggggtgccacatctgtaccagcgttacacctggggaaccccaagtatttctagggaaagataaggcattcacatttgactatgtgtttgacatagatagtcagcaggagcaaatttatatacaatgcattgagaagctgatcgaaggatgctttgaaggctacaacgctactgtgttcgcgtacgggcagaccggggctggcaagacctacaccatgggaaccggattcgacgttaatatcgtcgaagaggagctgggaattattagtagagcggtgaaacacctttttaaaagtatcgaagagaaaaagcacattgcaatcaagaatgggctccctgcccctgattttaaggtgaacgctcaatttctggagttgtacaatgaggaagtccttgatttattcgacacaacccgagatattgatgcaaagagtaagaagagcaacattaggatccacgaggattcaactggcggaatctacaccgtaggggtgacgacaagaactgtgaacaccgagagcgagatgatgcagtgtctgaaactaggcgcactctcccgcaccactgcgtctacccagatgaacgtccagagttccagaagtcacgctatctttacaatccacgtttgtcaaactagggtttgtcctcagatagacgccgacaatgccaccgataataagattattagcgaatcagcccagatgaacgagttcgaaaccctgacagccaagttccacttcgtggacctagctggaagcgagaggttgaagcggacaggcgctacgggcgaaagggcgaaagaaggaatttccatcaattgtgggctgctagcgctgggcaatgtcatatctgctttgggggacaaatctaagagagcaacccacgtgccctacagagacagcaagctgacaagattgctgcaggactcattgggtggcaattctcagaccataatgatcgcttgtgtaagtccctcagatagggattttatggagaccctgaacacattgaagtatgctaatcgtgcacggaatatcaaaaataaggtgatggtgaaccaggatcgagcatctcagcagattaatgccctgaggagtgagatcacccgcttgcaaatggagctcatggagtacaagaccggaaagaggatcattgacgaagaaggagttgagagtataaacgacatgttccacgagaatgcgatgctacagaccgagaataataacctgcgcgtccggataaaagctatgcaggagacggtggacgccttacggtccagaatcacccagctcgtgagcgaccaagctaatcacgtgttagctcgcgctggtgagggaaatgaagagatcagcaacatgatccactcctacatcaaagaaattgaggatcttagagctaaactgctggaatccgaggcggtaaacgagaaccttagaaaaaacctcactcgtgcgaccgcgagggcaccctatttcagtggctccagtacattttctcctacgatactctccagcgacaaagaaactatagaaattattgacctggcgaagaaagatttggaaaagctaaagcgaaaggagaagagaaagaagaaatcagttgccggtaaggaagataatactgataccgatcaggagaaaaaagaggaaaaaggggtgtctgaacgggagaataatgaattggaggtcgaagagagccaggaagtttcggatcacgaggatgaagaggaggaggaggaagaggaagaagatgatatcgatggcggtgagtcttccgatgagagtgactcagaaagtgacgaaaaggcgaactatcaagctgacctagccaacataacctgtgagattgctattaaacagaagctgattgacgagctcgagaactcgcagaagcggcttcagactcttaagaagcagtatgaggagaaattaatgatgctgcaacataagatcagagacacccaactcgagcgggaccaggtactccagaaccttgggagcgtggagtcctattctgaagaaaaagctaagaaagtgcgatcagagtacgaaaagaaactccaggctatgaacaaagaactccaacgcctgcaagccgcacagaaggagcatgcacgcctgcttaaaaaccagagtcagtatgagaagcaactgaaaaagctgcagcaggatgttatggaaatgaagaagacaaaggtccgtctgatgaaacagatgaaggaagagcaggaaaaggctcgtcttaccgagtcccgccgtaacagggagattgcgcaacttaagaaagatcagcgcaagcgggatgtgaccgctcttcgcaggcaggtgagacccatgtcagacaaggttgctgggaaagtgacacgaaagctatcctcttcggatgcacctgcccaggacacagggagcagcgcggcagcagtggagactgatgccagtaggacaggcgctcagcagaagatgcggatccctgtggctcgggtccaggccttgccgacccctgcaacaaacggcaaccgtaaaaaataccaaaggaaggggcttacgggtcgagtctttatttccaaaaccgcgcgtatgaaatggcagctgctcgagaggagagttactgatataataatgcaaaaaatgacaatcagcaacatggaggcagacatgaatcgactgctgaaacaacgtgaggaactcacaaaaaggagagagaagctctcaaagcgacgcgagaagatcgtgaaagagaatggagagggcgataagaacgtggccaatataaatgaggaaatggaatcacttacagctaatattgattacatcaacgattcaatcagcgactgccaggcaaatattatgcagatggaggaagctaaagaagagggtgagaccctagacgtaactgccgtgatcaacgcctgtacactaaccgaggctaggtatctgctcgaccatttcctgtctatgggaatcaataagggcctgcaggcggctcagaaggaagcccaaattaaggtcctggaaggtcggctaaaacagaccgaaatcacatcagcaacgcagaatcagctccttttccacatgctaaaagaaaaggcggagctgaaccctgaacttgacgctctgcttggtcacgctctgcaggatctggattccgttcccctcgagaacgtggaggacagcactgatgaagacgcaccactcaactcacctggtagcgaagggagcaccctctcctctgacttaatgaaactgtgcggggaagtgaaacctaaaaataaagccagacgtagaaccaccacacagatggagttgctgtatgcggattcatctgaactagcttccgatacctcgaccggcgatgccagcctcccaggtccgctaacaccagtcgcagaaggtcaggaaataggaatgaacacggaaaccagcggaacttcagccagggaaaaggagctctcccctccacctgggcttccatccaaaatcggaagtatctcccgccaatccagcctgtcagagaaaaaaatcccagagccaagcccagtgacacgcaggaaggcctatgagaaagccgagaagagcaaagcaaaagagcaaaaacattcagacagcggaacctcagaggccagcctcagcccgccatcatcaccgccttcccggccaagaaatgagctaaatgtcttcaaccgcctaacggtgtctcaggggaatacctctgtgcagcaggacaaaggaatcatcaacccatttcctgcctcaaaagggatcagagccttccctttgcaatgtatccatatcgcggagggacacactaaggctgtcctgtgcgtagattcaactgatgatctgctgtttactgggagtaaggataggacatgtaaagtctggaatctcgttactggacaggagatcatgagtctcggcggtcacccgaataatgtggtgtccgtaaagtattgtaactacacttccctggtgttcactgtttcaacttcctacatcaaggtctgggatatcagggacagcgccaagtgtattcggactctgaccagcagcgggcaagtcactctaggagacgcatgctctgcatctacgagtcgcacagtggctatacccagcggggagaatcaaatcaaccaaattgccttgaacccaaccggaacctttctgtatgccgctagtggcaatgcggtgagaatgtgggatctcaaaaggtttcagagcacgggtaaacttaccggtcatttgggtccagtgatgtgtctgactgttgatcagatctccagtgggcaggatcttataataacaggtagtaaggaccactatatcaaaatgtttgatgtgactgagggggctctgggtacagtttctccaacacacaatttcgagcctcctcactacgatggaatagaagcattaactatccaaggggacaatctgttttctggctcgcgagacaatgggattaagaaatgggacttgacgcagaaagacctactgcagcaagtccccaatgcgcacaaagactgggtgtgtgctttgggggtggtgccggaccaccctgtgttgctgtcaggctgccgcggaggcatactgaaagtgtggaatatggacacatttatgcctgtgggagaaatgaagggacatgattctcccatcaatgctatttgcgtgaattctacccacatcttcacagcggctgacgacagaacagtacgtatttggaaggccagaaatttgcaggacgggcagatttcagacaccggcgatctgggtgaggatatcgctagcaactag

SEQ ID NO: 68678 - DNA, 4866 bp, Artificial Sequence
  derived and/or modified sequence
atgctgggcgcccccgacgagagcagcgtgagagtggccgtgagaatcagaccccagctggccaaggagaagatcgagggctgccacatctgcaccagcgtgacccccggcgagccccaggtgttcctgggcaaggacaaggccttcaccttcgactacgtgttcgacatcgacagccagcaggagcagatctacatccagtgcatcgagaagctgatcgagggctgcttcgagggctacaacgccaccgtgttcgcctacggccagaccggcgccggcaagacctacaccatgggcaccggcttcgacgtgaacatcgtggaggaggagctgggcatcatcagcagagccgtgaagcacctgttcaagagcatcgaggagaagaagcacatcgccatcaagaacggcctgcccgcccccgacttcaaggtgaacgcccagttcctggagctgtacaacgaggaggtgctggacctgttcgacaccaccagagacatcgacgccaagagcaagaagagcaacatcagaatccacgaggacagcaccggcggcatctacaccgtgggcgtgaccaccagaaccgtgaacaccgagagcgagatgatgcagtgcctgaagctgggcgccctgagcagaaccaccgccagcacccagatgaacgtgcagagcagcagaagccacgccatcttcaccatccacgtgtgccagaccagagtgtgcccccagatcgacgccgacaacgccaccgacaacaagatcatcagcgagagcgcccagatgaacgagttcgagaccctgaccgccaagttccacttcgtggacctggccggcagcgagagactgaagagaaccggcgccaccggcgagagagccaaggagggcatcagcatcaactgcggcctgctggccctgggcaacgtgatcagcgccctgggcgacaagagcaagagagccacccacgtgccctacagagacagcaagctgaccagactgctgcaggacagcctgggcggcaacagccagaccatcatgatcgcctgcgtgagccccagcgacagagacttcatggagaccctgaacaccctgaagtacgccaacagagccagaaacatcaagaacaaggtgatggtgaaccaggacagagccagccagcagatcaacgccctgagaagcgagatcaccagactgcagatggagctgatggagtacaagaccggcaagagaatcatcgacgaggagggcgtggagagcatcaacgacatgttccacgagaacgccatgctgcagaccgagaacaacaacctgagagtgagaatcaaggccatgcaggagaccgtggacgccctgagaagcagaatcacccagctggtgagcgaccaggccaaccacgtgctggccagagccggcgagggcaacgaggagatcagcaacatgatccacagctacatcaaggagatcgaggacctgagagccaagctgctggagagcgaggccgtgaacgagaacctgagaaagaacctgaccagagccaccgccagagccccctacttcagcggcagcagcaccttcagccccaccatcctgagcagcgacaaggagaccatcgagatcatcgacctggccaagaaggacctggagaagctgaagagaaaggagaagagaaagaagaagagcgtggccggcaaggaggacaacaccgacaccgaccaggagaagaaggaggagaagggcgtgagcgagagagagaacaacgagctggaggtggaggagagccaggaggtgagcgaccacgaggacgaggaggaggaggaggaggaggaggaggacgacatcgacggcggcgagagcagcgacgagagcgacagcgagagcgacgagaaggccaactaccaggccgacctggccaacatcacctgcgagatcgccatcaagcagaagctgatcgacgagctggagaacagccagaagagactgcagaccctgaagaagcagtacgaggagaagctgatgatgctgcagcacaagatcagagacacccagctggagagagaccaggtgctgcagaacctgggcagcgtggagagctacagcgaggagaaggccaagaaggtgagaagcgagtacgagaagaagctgcaggccatgaacaaggagctgcagagactgcaggccgcccagaaggagcacgccagactgctgaagaaccagagccagtacgagaagcagctgaagaagctgcagcaggacgtgatggagatgaagaagaccaaggtgagactgatgaagcagatgaaggaggagcaggagaaggccagactgaccgagagcagaagaaacagagagatcgcccagctgaagaaggaccagagaaagagagacgtgaccgccctgagaagacaggtgagacccatgagcgacaaggtggccggcaaggtgaccagaaagctgagcagcagcgacgcccccgcccaggacaccggcagcagcgccgccgccgtggagaccgacgccagcagaaccggcgcccagcagaagatgagaatccccgtggccagagtgcaggccctgcccacccccgccaccaacggcaacagaaagaagtaccagagaaagggcctgaccggcagagtgttcatcagcaagaccgccagaatgaagtggcagctgctggagagaagagtgaccgacatcatcatgcagaagatgaccatcagcaacatggaggccgacatgaacagactgctgaagcagagagaggagctgaccaagagaagagagaagctgagcaagagaagagagaagatcgtgaaggagaacggcgagggcgacaagaacgtggccaacatcaacgaggagatggagagcctgaccgccaacatcgactacatcaacgacagcatcagcgactgccaggccaacatcatgcagatggaggaggccaaggaggagggcgagaccctggacgtgaccgccgtgatcaacgcctgcaccctgaccgaggccagatacctgctggaccacttcctgagcatgggcatcaacaagggcctgcaggccgcccagaaggaggcccagatcaaggtgctggagggcagactgaagcagaccgagatcaccagcgccacccagaaccagctgctgttccacatgctgaaggagaaggccgagctgaaccccgagctggacgccctgctgggccacgccctgcaggacctggacagcgtgcccctggagaacgtggaggacagcaccgacgaggacgcccccctgaacagccccggcagcgagggcagcaccctgagcagcgacctgatgaagctgtgcggcgaggtgaagcccaagaacaaggccagaagaagaaccaccacccagatggagctgctgtacgccgacagcagcgagctggccagcgacaccagcaccggcgacgccagcctgcccggccccctgacccccgtggccgagggccaggagatcggcatgaacaccgagaccagcggcaccagcgccagagagaaggagctgagccccccccccggcctgcccagcaagatcggcagcatcagcagacagagcagcctgagcgagaagaagatccccgagcccagccccgtgaccagaagaaaggcctacgagaaggccgagaagagcaaggccaaggagcagaagcacagcgacagcggcaccagcgaggccagcctgagcccccccagcagcccccccagcagacccagaaacgagctgaacgtgttcaacagactgaccgtgagccagggcaacaccagcgtgcagcaggacaagggcatcatcaaccccttccccgccagcaagggcatcagagccttccccctgcagtgcatccacatcgccgagggccacaccaaggccgtgctgtgcgtggacagcaccgacgacctgctgttcaccggcagcaaggacagaacctgcaaggtgtggaacctggtgaccggccaggagatcatgagcctgggcggccaccccaacaacgtggtgagcgtgaagtactgcaactacaccagcctggtgttcaccgtgagcaccagctacatcaaggtgtgggacatcagagacagcgccaagtgcatcagaaccctgaccagcagcggccaggtgaccctgggcgacgcctgcagcgccagcaccagcagaaccgtggccatccccagcggcgagaaccagatcaaccagatcgccctgaaccccaccggcaccttcctgtacgccgccagcggcaacgccgtgagaatgtgggacctgaagagattccagagcaccggcaagctgaccggccacctgggccccgtgatgtgcctgaccgtggaccagatcagcagcggccaggacctgatcatcaccggcagcaaggaccactacatcaagatgttcgacgtgaccgagggcgccctgggcaccgtgagccccacccacaacttcgagcccccccactacgacggcatcgaggccctgaccatccagggcgacaacctgttcagcggcagcagagacaacggcatcaagaagtgggacctgacccagaaggacctgctgcagcaggtgcccaacgcccacaaggactgggtgtgcgccctgggcgtggtgcccgaccaccccgtgctgctgagcggctgcagaggcggcatcctgaaggtgtggaacatggacaccttcatgcccgtgggcgagatgaagggccacgacagccccatcaacgccatctgcgtgaacagcacccacatcttcaccgccgccgacgacagaaccgtgagaatctggaaggccagaaacctgcaggacggccagatcagcgacaccggcgacctgggcgaggacatcgccagcaactag

SEQ ID NO: 68679 - protein, 513 aa, Artificial Sequence
  derived and/or modified sequence
MCSLGLFPPPPPRGQVTLYEHNNELVTGSSYESPPPDFRGQWINLPVLQLTKDPLKTPGRLDHGTRTAFIHHREQVWKRCINIWRDVGLFGVLNEIANSEEEVFEWVKTASGWALALCRWASSLHGSLFPHLSLRSEDLIAEFAQVTNCTIVPSLKHRLQRNVASLAWKPLSASVLAVACQSCILIWTLDPTSLSTRPSSGCAQVLSHPGHTPVTSLAWAPSGGRLLSASPVDAAIRVWDVSTETCVPLPWFRGGGVTNLLWSPDGSKILATTPSAVFRVWEAQMWTCERWPTLSGRCQTGCWSPDGSRLLFTVLGEPLIYSLSFPERCGEGKGCVGGAKSATIVADLSETTIQTPDGEERLGGEAHSMVWDPSGERLAVLMKGKPRVQDGKPVILLFRTRNSPVFELLPCGIIQGEPGAQPQLITFHPSFNKGALLSVGWSTGRIAHIPLYFVNAQFPRFSPVLGRAQEPPAGGGGSIHDLPLFTETSPTSAPWDPLPGPPPVLPHSPHSHL

SEQ ID NO: 68680 - DNA, 1542 bp, Artificial Sequence
  derived and/or modified sequence
atgtgtagccttggactgttccccccacccccgccacgtggccaggtgacactgtatgagcacaataacgagctagtgactggctcctcttatgaatctccacctcctgacttcagaggccagtggatcaatctccctgtgttgcaactgaccaaggaccccctgaagactccaggcagattggatcacggcacgagaaccgcttttatccaccacagagagcaggtatggaagcgctgcatcaacatttggagagatgtggggctgtttggagtgctgaacgaaatagctaattccgaagaggaagtgtttgagtgggtgaagacagcaagtgggtgggcgttagccttgtgtcgatgggcaagtagtctccatgggagcctgtttccacatttgagcctgagatctgaagatctcatcgctgaattcgcccaggtcacaaattgtactattgtgccatcgctcaaacatcgcctgcaaagaaacgtcgccagcctggcctggaagcccctctctgctagtgtgctcgcggtggcatgccagagctgcatcctgatttggacattggacccaacgagcctgtctacacgtccgagtagtggctgtgcacaggtcttaagtcacccaggacacaccccagtgaccagcttggcctgggctcccagtggcggcagactcctgtcagcatcaccagtggacgctgctattagggtctgggatgtatccacagagacgtgtgtccctttgccatggttccggggaggcggtgtaacaaacctgctctggtcccctgacggcagtaagattttggctactactccttcagctgtgttccgggtgtgggaagcacaaatgtggacttgtgaacgttggcccaccctgagcggaagatgccagacgggctgctggtccccagatggctctcgcctgttgttcacagttctcggtgagccgctcatatactctctgagctttcctgagcgctgtggtgaggggaagggttgcgtgggcggcgcaaagtcagccaccattgtcgccgacctttctgagacaacgatacagactcctgacggagaagaacgactcggaggcgaagcccacagcatggtttgggatcccagcggcgagcggctcgctgtcctcatgaaaggaaagccacgcgtgcaggatggcaagcccgtgatcctgctgttccgaacccgtaacagtccagtctttgaactgctgccatgcgggattattcaaggcgaaccaggcgctcagccacagctgatcactttccacccgtcctttaataagggcgccctgctgtccgtcggatggtcaactggcaggatagcccacattcctctttatttcgtcaacgcacagtttccaaggtttagtcccgtattaggtagggcccaggaaccaccagcaggaggtggggggtcgatacacgatttaccgttgtttaccgagacttctccaacgagcgccccttgggatcccctaccggggcctccgccagtgctgccacactctcctcactcccatctctag

SEQ ID NO: 68681 - DNA, 1542 bp, Artificial Sequence
  derived and/or modified sequence
atgtgcagcctgggcctcttccccccacctccaccccggggccaggtgaccctgtatgagcacaacaatgagctggtgacaggcagcagctatgagagccccccaccagacttccggggccagtggatcaacctgcctgtgctgcagctgaccaaggaccccctgaagaccccaggccgcctggaccacggcaccaggacagccttcatccaccaccgggagcaggtgtggaagcgctgcatcaacatctggagagatgtgggcctgtttggagtgctgaatgagatcgccaacagcgaggaggaggtgtttgagtgggtgaagacagccagcggctgggccctggccctgtgccgctgggccagcagcctgcacggcagcctcttcccccacctgagcctgcggtctgaggacctgattgctgagtttgcccaggtgaccaactgcaccatcgtgcccagcctgaagcaccggctgcagagaaatgtggccagcctggcctggaagcccctgagcgcctctgtgctggccgtggcctgccagagctgcatcctgatctggaccctggaccccaccagcctgagcacccggcccagcagcggctgtgcccaggtgctgagccaccctggccacacccctgtgaccagcctggcctgggcccccagcggcggccgcctgctgagcgccagccctgtggatgctgccatccgggtgtgggatgtgtccacagagacctgtgtgcccctgccctggttccggggcggcggcgtgaccaacctgctgtggagcccagatggcagcaagatcctggccaccaccccatctgctgtgttccgggtgtgggaggcccagatgtggacctgtgagcgctggcccaccctgagcggccgctgccagacaggctgctggagcccagatggcagccggctgctcttcaccgtgctgggggagcccctcatctacagcctgtccttccctgagcgctgtggggagggcaagggctgtgtgggcggggccaagagcgccaccatcgtggccgacctgtctgagaccaccatccagaccccagatggagaggagcggctgggcggggaggcccacagcatggtgtgggaccccagcggggagcggctggccgtgctgatgaagggcaagccccgggtgcaggacggcaagcctgtgatcctgctcttccgcaccaggaacagccctgtgtttgagctgctgccctgtggcatcatccagggcgagcccggggcccagccccagctgatcaccttccaccccagcttcaacaagggggccctgctgtctgtgggctggagcacaggccgcatcgcccacatccccctgtactttgtgaatgcccagttcccccgcttcagccctgtgctgggccgggcccaggagcccccagctgggggcggcggcagcatccatgacctgcccctcttcacagagaccagccccaccagcgccccctgggaccccctgcccggccccccacctgtgctgccccacagcccccacagccacctgtag

SEQ ID NO: 68682 - DNA, 1542 bp, Artificial Sequence
  derived and/or modified sequence
atgtgcagcctgggcctgttcccccccccccccccccggggccaggtgactctatatgaacacaataatgaactggtcacaggatcatcatacgagagccccccgccggactttaggggccagtggataaatctccctgtcttgcaattgacaaaggatccactcaagacacccggcagactagaccatgggacccgaaccgctttcatccaccatcgagaacaggtttggaagcggtgtattaatatttggagggacgttgggctttttggtgtgttgaacgagatcgctaactccgaagaggaggtttttgaatgggtcaagacagcaagtggttgggccctagctctttgtcgctgggcctcgtcactccatggtagtctgtttccacacctgtctttacgatccgaagatctgatagcagaatttgcacaagtaaccaattgtaccatagtacctagtttgaagcatcgcctacaaagaaacgtcgcttctctggcctggaaaccactttccgcatccgtgcttgccgtcgcctgccagagttgtatcctcatttggaccctagaccctacatccctgtcaaccaggccttctagtggctgtgcacaagtgctttctcaccctggtcacacaccggtcactagtctggcatgggccccaagcgggggcagactgttgagcgcatcccccgtcgatgccgccattcgtgtgtgggacgttagcactgagacatgtgtgcccttgccctggtttagaggcggaggggtgacaaacctcctgtggtcgcccgacgggagtaagatcctcgcgaccactccctctgccgtttttagggtgtgggaagcccagatgtggacatgtgaacgctggcccacgctgtcagggcggtgccagacaggctgctggtctcctgacggtagcaggctgctgttcacggttttgggagaacctttaatctacagccttagcttcccagaacggtgcggagaggggaagggttgcgtgggaggcgccaaatctgcaacgattgtggcagatttatcggaaacgactatccagactcctgacggcgaggagcgcctgggtggagaggcgcactctatggtctgggacccctccggagaaagattagctgttttgatgaaaggtaaaccaagagtgcaagacgggaaaccggttatccttttgttccggactcgcaacagtccagtattcgagctcctgccctgcggaatcattcaaggggagccgggagcacagcctcagctaattactttccaccccagcttcaataagggcgcactgctgtccgtggggtggagcacgggaaggatcgcgcatatccccctctatttcgtgaatgcgcagtttccacggttctccccagtgctgggaagagctcaggagcccccagccggcggcggcggaagcattcacgacctaccgctatttactgagaccagccccacctctgcaccgtgggaccccctccccgggccccctcccgttctcccacattccccccattcccacctgtag

SEQ ID NO: 68683 - DNA, 1542 bp, Artificial Sequence
  derived and/or modified sequence
atgtgttctctcgggctgtttccccctccccctccacggggacaggttaccttatacgaacacaacaacgaactcgtgactggctcgtcctacgaaagcccgcctccagactttcggggacagtggatcaatctgccggtactgcagctgaccaaagatccattaaaaactcccggacgacttgatcatggcacacggacagcctttatacaccatcgggagcaggtgtggaaaaggtgcatcaatatctggcgtgacgttggcctattcggcgtgctcaacgagatagctaactctgaggaggaagtgttcgagtgggtaaagaccgccagtggatgggctctggcgttatgtcgctgggcatcctccctacacggctcccttttcccccacttgtcattgcggtccgaggatctgatcgcagagttcgcacaggtgacaaactgcacaattgtcccatctctaaagcaccggcttcagcgcaatgtggcttccctggcctggaaaccactcagcgcaagcgtgctcgcggtcgcctgccagtcatgcatcctcatctggaccctggatccaacgagcctgtcaaccaggccatcttcagggtgcgcccaggttttatcccatcctggccatactccagtcacctcacttgcttgggccccttctggaggcaggcttctttcagccagccctgtcgacgcggctattagagtgtgggacgtaagcactgagacatgcgtcccacttccctggttccggggtggcggagtgacgaacctgctctggtcccccgacgggagcaagatcctggctacgacaccctccgccgtcttcagggtgtgggaggcgcagatgtggacttgtgagcgttggccgacattaagcggtagatgccagactggatgttggagtcctgatggcagtcgcctgctgtttactgtcctgggcgagcccctgatttacagcctgtcatttcctgaaaggtgtggagaagggaaggggtgcgtcggcggagctaaaagcgcgaccatcgtggcagatttgtctgagaccacaatccagaccccagacggagaggaacggctcggaggcgaggcacattcaatggtctgggaccccagcggagaacgactggccgtcttgatgaagggtaaacccagggtgcaggatggaaagccggtgatactgctctttcgaacacggaatagcccagtgttcgagttgctaccttgcgggattattcagggagagcctggcgctcagccccagctgattaccttccacccaagctttaacaagggagccttgctcagcgttggctggtctacagggaggatcgcccatatccctctctattttgtaaatgctcagttccctcgcttcagtcccgtgctgggacgggctcaagagccacctgccggtggcggtggctcgattcatgacctacctctttttaccgagactagtcccaccagcgcaccatgggatcccctgccgggtcctccccctgtgctccctcactctccacacagccacctatag

SEQ ID NO: 68684 - DNA, 1703 bp, Artificial Sequence
  derived and/or modified sequence
ccgcctcgccgtttgtcccttgcggtacccgtccgcatacgaatctagcccgggaaccgagttgcgggagtgcggtctgtgccgttccggccaggagtttgccgactgcagacgtcctgcgaaccggcaagatgtgctctctggggttgttccctcctccaccgcctcggggtcaagtcaccctatatgagcacaataacgagctggtgacgggcagtagctatgagagcccgccccccgacttccggggccagtggatcaatcttcctgtcctacaactgacaaaggatcccctaaagacccctggaaggctggaccatggcacaagaactgccttcatccatcaccgggagcaagtgtggaagagatgcatcaacatttggcgtgatgtgggcctttttggggtgctaaatgaaattgcaaactcagaagaagaggtgtttgagtgggtgaagacggcatccggctgggccctggcactctgtcgatgggcctcttccctccatgggtccctgttcccccatctgtctctcaggagcgaagatctgatcgctgaatttgcccaagtcacaaattgcaccatagtcccctccctgaagcaccggctgcagcgaaatgtggcgtctctggcctggaagccccttagtgcctctgtcttggctgtggcctgccagagctgcattcttatctggaccctggaccctacctccttgtctacccgaccctcttctggctgtgcccaagtgctgtctcaccctgggcatacacctgttaccagcttggcctgggcccccagtggggggcggctgctctcagcttcacccgtggatgctgctatccgggtatgggatgtctcaacagagacctgtgtcccccttccctggttccgaggaggtggggtgaccaacctgctctggtccccagacggcagcaaaatcctggctaccactccttcagctgtctttcgagtctgggaggcccagatgtggacttgtgagaggtggcctactctatcagggcgctgtcagactggctgctggagcccagatggcagccgactgctgttcactgtattgggagagccactgatttactccctgtcttttccagaacgttgtggtgagggaaaggggtgcgttggaggtgcaaagtcagcaacgattgtggcagatctgtctgagacaacaatacagacaccagatggtgaggagaggcttgggggagaggctcactccatggtctgggaccccagtggggaacgtctggctgtgcttatgaaaggaaagccaagggtacaggatggtaaaccagtcatcctcctttttcgcactcgaaacagccctgtgtttgagctccttccctgtggcattatccagggggagccaggagcccagccccagctcatcactttccatccttccttcaacaaaggggccctgctcagtgtgggctggtccacaggccgaattgcccacatcccgctgtactttgtcaatgcccagtttccacgttttagcccagtgcttgggcgggcccaggaaccccctgctgggggtggaggctctattcatgacctgcccctctttactgagacatccccaacctctgccccttgggaccctctcccagggccaccacctgttctgccccactccccacattcccacctctaagaataaataagttttccttttgttttccac

SEQ ID NO: 68685 - DNA, 1542 bp, Artificial Sequence
  derived and/or modified sequence
atgtgcagcctgggcctgttccccccccccccccccagaggccaggtgaccctgtacgagcacaacaacgagctggtgaccggcagcagctacgagagccccccccccgacttcagaggccagtggatcaacctgcccgtgctgcagctgaccaaggaccccctgaagacccccggcagactggaccacggcaccagaaccgccttcatccaccacagagagcaggtgtggaagagatgcatcaacatctggagagacgtgggcctgttcggcgtgctgaacgagatcgccaacagcgaggaggaggtgttcgagtgggtgaagaccgccagcggctgggccctggccctgtgcagatgggccagcagcctgcacggcagcctgttcccccacctgagcctgagaagcgaggacctgatcgccgagttcgcccaggtgaccaactgcaccatcgtgcccagcctgaagcacagactgcagagaaacgtggccagcctggcctggaagcccctgagcgccagcgtgctggccgtggcctgccagagctgcatcctgatctggaccctggaccccaccagcctgagcaccagacccagcagcggctgcgcccaggtgctgagccaccccggccacacccccgtgaccagcctggcctgggcccccagcggcggcagactgctgagcgccagccccgtggacgccgccatcagagtgtgggacgtgagcaccgagacctgcgtgcccctgccctggttcagaggcggcggcgtgaccaacctgctgtggagccccgacggcagcaagatcctggccaccacccccagcgccgtgttcagagtgtgggaggcccagatgtggacctgcgagagatggcccaccctgagcggcagatgccagaccggctgctggagccccgacggcagcagactgctgttcaccgtgctgggcgagcccctgatctacagcctgagcttccccgagagatgcggcgagggcaagggctgcgtgggcggcgccaagagcgccaccatcgtggccgacctgagcgagaccaccatccagacccccgacggcgaggagagactgggcggcgaggcccacagcatggtgtgggaccccagcggcgagagactggccgtgctgatgaagggcaagcccagagtgcaggacggcaagcccgtgatcctgctgttcagaaccagaaacagccccgtgttcgagctgctgccctgcggcatcatccagggcgagcccggcgcccagccccagctgatcaccttccaccccagcttcaacaagggcgccctgctgagcgtgggctggagcaccggcagaatcgcccacatccccctgtacttcgtgaacgcccagttccccagattcagccccgtgctgggcagagcccaggagccccccgccggcggcggcggcagcatccacgacctgcccctgttcaccgagaccagccccaccagcgccccctgggaccccctgcccggccccccccccgtgctgccccacagcccccacagccacctgtag

SEQ ID NO: 68686 - protein, 341 aa, Artificial Sequence
  derived and/or modified sequence
MAAVSGLVRRPLREVSGLLKRRFHWTAPAALQVTVRDAINQGMDEELERDEKVFLLGEEVAQYDGAYKVSRGLWKKYGDKRIIDTPISEMGFAGIAVGAAMAGLRPICEFMTFNFSMQAIDQVINSAAKTYYMSGVAAQHSQCFAAWYGHCPGLKVVSPWNSEDAKGLIKSAIRDNNPVVVLENELMYGVPFEFPPEAQSKDFLIPIGKAKIERQGTHITVVSHSRPVGHCLEAAAVLSKEGVECEVINMRTIRPMDMETIEASVMKTNHLVTVEGGWPQFGVGAEICARIMEGPAFNFLDAPAVRVTGADVPMPYAKILEDNSIPQVKDIIFAIKKTLNI

SEQ ID NO: 68687 - DNA, 1026 bp, Artificial Sequence
  derived and/or modified sequence
atggccgcagtgagcggacttgtgaggagaccactcagagaggtgagtgggcttcttaagcggcggttccactggacagcgcctgccgctttgcaggtgaccgtgcgcgacgccatcaatcaggggatggatgaggagttagaaagagatgagaaagtgtttctgcttggggaagaagtggcacagtatgacggggcctataaagtctctcgaggactatggaaaaaatacggggacaaacgaatcatagatacaccaattagtgagatgggcttcgccggcatagccgtgggcgctgctatggcagggctccgccccatttgcgagtttatgactttcaacttttccatgcaggctatcgatcaagtgattaattctgccgctaaaacatattatatgtccggcgtggccgcccagcactcacagtgtttcgccgcttggtatggccactgtccaggcctaaaggtcgtgtccccctggaatagcgaggatgcaaaggggctgattaaaagtgccattcgggacaataatcctgtagtggtactcgagaacgagttgatgtatggggtaccatttgaatttccgcccgaagcacagtccaaggattttctgatccctatcgggaaagccaaaatcgaacgacaggggacacacatcactgtcgtctcacacagccggccagtcggacattgtttggaggctgccgctgtgttgagcaaggaaggcgtggaatgcgaagtgattaatatgaggactattcggcccatggatatggagaccattgaagcaagcgtcatgaaaacgaatcacttggtaactgttgaggggggatggccacagtttggagtcggggccgaaatctgcgcacgtatcatggagggtccagcttttaatttccttgacgctcctgcagttagagtcaccggggcagacgtgcctatgccatatgccaaaattctggaagataattccattccacaggtgaaggatattatcttcgccattaagaaaacgttaaatatctag

SEQ ID NO: 68688 - DNA, 1026 bp, Artificial Sequence
  derived and/or modified sequence
atggctgctgtgtctggcctggtgagaagacccctgcgggaggtgtctggcctgctgaagaggcgcttccactggacagccccagctgccctgcaggtgacagtgagagatgccatcaaccagggcatggatgaggagctggagagagatgagaaggtgttcctgctgggggaggaggtggcccagtatgatggagcctacaaggtgtcccggggcctgtggaagaagtatggagacaagaggatcatcgacacccccatcagcgagatgggctttgctggcattgctgtgggcgccgccatggccggcctgcggcccatctgtgagttcatgaccttcaacttctccatgcaggccatcgaccaggtgatcaacagcgctgccaagacctactacatgtctggagtggccgcccagcacagccagtgctttgctgcctggtacggccactgccccggcctgaaggtggtgagcccctggaacagtgaagatgccaagggcctcatcaagagcgccatccgggacaacaaccctgtggtggtgctggagaatgagctgatgtatggagtgccctttgagttccccccagaggcccagagcaaggacttcctgatccccatcggcaaggccaagattgaaaggcagggcacccacatcaccgtggtgagccacagcaggcctgtgggccactgcctggaggccgctgctgtgctgagcaaggagggcgtggagtgtgaggtgatcaacatgaggaccatccggcccatggacatggagaccatcgaggcctctgtgatgaagaccaaccacctggtgacagtggagggcggctggccccagtttggagtgggcgctgagatctgtgcccgcatcatggagggccctgccttcaacttcctggatgccccagctgtgcgggtgactggagcagatgtgcccatgccctatgccaagatcctggaggacaacagcatcccccaggtgaaggacatcatctttgccatcaagaagaccctgaacatctag

SEQ ID NO: 68689 - DNA, 1026 bp, Artificial Sequence
  derived and/or modified sequence
atggccgccgtgagcggcctggtgcggcggcccctgcgggaggtgagcggcttgctgaagcgacgttttcactggacggcccccgctgctttgcaggttaccgtccgggacgctattaatcaagggatggatgaagaactcgagcgcgacgaaaaggtgtttctgctcggggaagaagtggcacagtatgatggggcctacaaggtatcaagaggcctgtggaagaagtacggcgataaaagaattatcgacacgcctattagtgaaatggggttcgccggtattgccgtgggagctgcaatggcaggtctgagacctatctgtgaatttatgaccttcaacttctcaatgcaggcgattgaccaggtgatcaattcagccgcgaagacatattacatgtctggagtggctgcgcagcactctcagtgcttcgccgcctggtatgggcattgtccaggtctcaaggttgtgagtccatggaactctgaggacgccaaagggctgattaagagcgctataagagataataatcccgtagtcgttctcgagaatgagctgatgtatggggtgccatttgagttcccccctgaggcacagtccaaggactttctcatccccatagggaaggcaaagatcgaacgacagggcactcatatcacggtggtgtcccattccaggcctgtcggacattgtttggaagctgctgcagtcctgtctaaagaaggagtcgaatgcgaagtgataaatatgaggactatccggccaatggatatggagactattgaggcatcggtcatgaaaacaaaccacctcgttacagtggaaggcggttggcctcagtttggcgtgggagctgagatatgcgctagaataatggaaggtccagctttcaacttcctcgatgccccagctgtgagagtgactggagctgatgtaccgatgccctatgcaaagattctcgaagataacagcatcccccaagtcaaagatataatttttgccatcaaaaagacactgaatatttag

SEQ ID NO: 68690 - DNA, 1026 bp, Artificial Sequence
  derived and/or modified sequence
atggcggcagtctccggtctggttcggagacctcttcgggaggtcagcggtctgctgaagcggcgttttcactggaccgctccggctgcccttcaggtgacagtccgggatgcaatcaatcaaggtatggacgaggagctggagagagacgaaaaggtgttcctgctaggggaggaagtggcccagtacgatggcgcttacaaggtgtccaggggcctgtggaaaaaatacggtgataagcgcatcatagacaccccaatctccgaaatggggttcgccggaattgcagtgggagctgccatggccggtctccggccaatctgtgagtttatgacattcaatttcagcatgcaggcgattgaccaggttataaattcagctgcgaaaacctattatatgtcaggcgtcgcagcacagcatagtcagtgctttgcagcgtggtatggtcattgcccgggactcaaggttgtctccccttggaactctgaagacgccaaaggcctgattaagtctgccatccgcgacaacaatccggtggtggtgctggaaaatgaattgatgtacggcgtgccttttgaatttccccctgaggctcaaagcaaggacttcctcatccccatcggcaaggccaaaatcgaaaggcagggcacacacatcacagtggttagccatagcaggcccgtgggccattgcctcgaggccgcagctgttctgagcaaggaaggggtagaatgtgaagtgattaatatgcgcaccattcgccctatggacatggaaacaatcgaggcttcagtaatgaaaactaatcacctggtcaccgtcgagggcggttggccacaatttggcgttggcgctgagatctgtgcacgaattatggagggacctgccttcaactttctggacgccccagccgtaagagttacaggcgcagacgtaccgatgccctacgcgaagattctggaggataattcaatcccacaggtcaaggacatcatctttgctattaaaaaaacactgaacatctag

SEQ ID NO: 68691 - DNA, 1397 bp, Artificial Sequence
  derived and/or modified sequence
acgaccaagatggcggcggtgtctggcttggtgcggagaccccttcgggaggtctccgggctgctgaagaggcgctttcactggaccgcgccggctgcgctgcaggtgacagttcgtgatgctataaatcagggtatggatgaggagctggaaagagatgagaaggtatttctgcttggagaagaagttgcccagtatgatggggcatacaaggttagtcgagggctgtggaagaaatatggagacaagaggattattgacactcccatatcagagatgggctttgctggaattgctgtaggtgcagctatggctgggttgcggcccatttgtgaatttatgaccttcaatttctccatgcaagccattgaccaggttataaactcagctgccaagacctactacatgtctggtgtagctgcccagcactcacagtgctttgctgcctggtatgggcactgcccaggcttaaaggtggtcagtccctggaattcagaggatgctaaaggacttattaaatcagccattcgggataacaatccagtggtggtgctagagaatgaattgatgtatggggttccttttgaatttcctccggaagctcagtcaaaagattttctgattcctattggaaaagccaaaatagaaaggcaaggaacacatataactgtggtttcccattcaagacctgtgggccactgcttagaagctgcagcagtgctatctaaagaaggagttgaatgtgaggtgataaatatgcgtaccattagaccaatggacatggaaaccatagaagccagtgtcatgaagacaaatcatcttgtaactgtggaaggaggctggccacagtttggagtaggagctgaaatctgtgccaggatcatggaaggtcctgcgttcaatttcctggatgctcctgctgttcgtgtcactggtgctgatgtccctatgccttatgcaaagattctagaggacaactctatacctcaggtcaaagacatcatatttgcaataaagaaaacattaaatatttagtttggacttgaatatcaagtcgttgaaatttatttgaaatacttgctggcactgcacctggatttgtactgcaagacctgactattcataacggaaaacgatttctaaagcaacagcaggtatttttgtacagggaagtttaaatgtgtttgtgtatggaaaactctccactctcctcccctagatgccatgcttccttttgtctgttacggttgccatgttctttgaataacaaattatataacattttatcctctctcaccacaaggacaaagtatggatgtggcagagtcctcatgaaagatgtatccaaacaagataacttatatgtataaaattaaagcatataatatacatttact

SEQ ID NO: 68692 - DNA, 1026 bp, Artificial Sequence
  derived and/or modified sequence
atggccgccgtgagcggcctggtgagaagacccctgagagaggtgagcggcctgctgaagagaagattccactggaccgcccccgccgccctgcaggtgaccgtgagagacgccatcaaccagggcatggacgaggagctggagagagacgagaaggtgttcctgctgggcgaggaggtggcccagtacgacggcgcctacaaggtgagcagaggcctgtggaagaagtacggcgacaagagaatcatcgacacccccatcagcgagatgggcttcgccggcatcgccgtgggcgccgccatggccggcctgagacccatctgcgagttcatgaccttcaacttcagcatgcaggccatcgaccaggtgatcaacagcgccgccaagacctactacatgagcggcgtggccgcccagcacagccagtgcttcgccgcctggtacggccactgccccggcctgaaggtggtgagcccctggaacagcgaggacgccaagggcctgatcaagagcgccatcagagacaacaaccccgtggtggtgctggagaacgagctgatgtacggcgtgcccttcgagttcccccccgaggcccagagcaaggacttcctgatccccatcggcaaggccaagatcgagagacagggcacccacatcaccgtggtgagccacagcagacccgtgggccactgcctggaggccgccgccgtgctgagcaaggagggcgtggagtgcgaggtgatcaacatgagaaccatcagacccatggacatggagaccatcgaggccagcgtgatgaagaccaaccacctggtgaccgtggagggcggctggccccagttcggcgtgggcgccgagatctgcgccagaatcatggagggccccgccttcaacttcctggacgcccccgccgtgagagtgaccggcgccgacgtgcccatgccctacgccaagatcctggaggacaacagcatcccccaggtgaaggacatcatcttcgccatcaagaagaccctgaacatctag

SEQ ID NO: 68693 - protein, 605 aa, Artificial Sequence
  derived and/or modified sequence
MVLCPVIGKLLHKRVVLASASPRRQEILSNAGLRFEVVPSKFKEKLDKASFATPYGYAMETAKQKALEVANRLYQTVGGLILEKPVDKQDAYRMLSRLSGREHSVFTGVAIVHCSSKDHQLDTRVSEFYEETKVKFSELSEELLWEYVHSGEPMDKAGGYGIQALGGMLVESVHGDFLNVVGFPLNHFCKQLVKLYYPPRPEDLRRSVKHDSIPAADTFEDLSDVEGGGSEPTQRDAGSRDEKAEAGEAGQATAEAECHRTRETLPPFPTRLLELIEGFMLSKGLLTACKLKVFDLLKDEAPQKAADIASKVDASACGMERLLDICAAMGLLEKTEQGYSNTETANVYLASDGEYSLHGFIMHNNDLTWNLFTYLEFAIREGTNQHHRALGKKAEDLFQDAYYQSPETRLRFMRAMHGMTKLTACQVATAFNLSRFSSACDVGGCTGALARELAREYPRMQVTVFDLPDIIELAAHFQPPGPQAVQIHFAAGDFFRDPLPSAELYVLCRILHDWPDDKVHKLLSRVAESCKPGAGLLLVETLLDEEKRVAQRALMQSLNMLVQTEGKERSLGEYQCLLELHGFHQVQVVHLGGVLDAILATKVAP

SEQ ID NO: 68694 - DNA, 1818 bp, Artificial Sequence
  derived and/or modified sequence
atggtgctgtgccccgtgatcggcaagctgctgcacaagagagtggtgctggccagcgccagccccagaagacaggagatcctgagcaacgccggcctgagattcgaggtggtgcccagcaagttcaaggagaagctggacaaggccagcttcgccaccccctacggctacgccatggagaccgccaagcagaaggccctggaggtggccaacagactgtaccagaccgtgggcggcctgatcctggagaagcccgtggacaagcaggacgcctacagaatgctgagcagactgagcggcagagagcacagcgtgttcaccggcgtggccatcgtgcactgcagcagcaaggaccaccagctggacaccagagtgagcgagttctacgaggagaccaaggtgaagttcagcgagctgagcgaggagctgctgtgggagtacgtgcacagcggcgagcccatggacaaggccggcggctacggcatccaggccctgggcggcatgctggtggagagcgtgcacggcgacttcctgaacgtggtgggcttccccctgaaccacttctgcaagcagctggtgaagctgtactacccccccagacccgaggacctgagaagaagcgtgaagcacgacagcatccccgccgccgacaccttcgaggacctgagcgacgtggagggcggcggcagcgagcccacccagagagacgccggcagcagagacgagaaggccgaggccggcgaggccggccaggccaccgccgaggccgagtgccacagaaccagagagaccctgccccccttccccaccagactgctggagctgatcgagggcttcatgctgagcaagggcctgctgaccgcctgcaagctgaaggtgttcgacctgctgaaggacgaggccccccagaaggccgccgacatcgccagcaaggtggacgccagcgcctgcggcatggagagactgctggacatctgcgccgccatgggcctgctggagaagaccgagcagggctacagcaacaccgagaccgccaacgtgtacctggccagcgacggcgagtacagcctgcacggcttcatcatgcacaacaacgacctgacctggaacctgttcacctacctggagttcgccatcagagagggcaccaaccagcaccacagagccctgggcaagaaggccgaggacctgttccaggacgcctactaccagagccccgagaccagactgagattcatgagagccatgcacggcatgaccaagctgaccgcctgccaggtggccaccgccttcaacctgagcagattcagcagcgcctgcgacgtgggcggctgcaccggcgccctggccagagagctggccagagagtaccccagaatgcaggtgaccgtgttcgacctgcccgacatcatcgagctggccgcccacttccagccccccggcccccaggccgtgcagatccacttcgccgccggcgacttcttcagagaccccctgcccagcgccgagctgtacgtgctgtgcagaatcctgcacgactggcccgacgacaaggtgcacaagctgctgagcagagtggccgagagctgcaagcccggcgccggcctgctgctggtggagaccctgctggacgaggagaagagagtggcccagagagccctgatgcagagcctgaacatgctggtgcagaccgagggcaaggagagaagcctgggcgagtaccagtgcctgctggagctgcacggcttccaccaggtgcaggtggtgcacctgggcggcgtgctggacgccatcctggccaccaaggtggccccctag

SEQ ID NO: 68695 - DNA, 1818 bp, Artificial Sequence
  derived and/or modified sequence
atggttctttgccccgtgataggaaagctcctgcacaaacgggtggtgctagcgtctgcttcaccgcgaagacaggaaattctgagcaatgcaggactgcggttcgaagtggtgccatcgaaatttaaagagaagctagataaggcttcctttgccaccccatatggatatgctatggaaacagcaaagcagaaggcactagaggttgctaataggctgtatcagaccgttggcggcttaattctggaaaagcccgtggataaacaagatgcctacagaatgttgagtcggctttcaggacgagaacattccgtgtttaccggcgttgccatcgtgcactgcagtagtaaggaccatcaattagacaccagagtatcggaattctacgaagagacaaaagtaaagttcagcgaactctcagaagagctcctgtgggaatacgtgcatagtggcgagcccatggacaaggcaggcggctacgggatccaggcactgggcgggatgctagtggaaagtgtgcacggagactttctcaacgtggtaggatttcccttgaaccacttctgtaaacagctagttaagctctattacccgcctcggcccgaggatctgcgccgaagcgtgaagcacgactctattcccgccgcagatacttttgaggacctgagtgatgtcgagggtggaggttcagaacccacacagagagacgccggatcacgggacgaaaaggcggaggccggcgaagcaggccaggccacagcagaagccgaatgccatcgcacgagggagactctcccacccttccccaccagactcttggagctgatcgagggattcatgctctctaaagggctattgacagcatgtaaattaaaggtgtttgaccttctgaaggacgaggcccctcaaaaggccgccgacattgcctccaaggttgacgcttctgcttgcgggatggagcgcctcttagatatctgtgcagccatgggccttctggagaagacagagcagggatacagtaacaccgagacagctaatgtatacctcgcctccgacggagagtactctctgcatggttttattatgcacaacaatgacctgacatggaacctcttcacttatcttgaatttgcgatacgtgagggtactaaccagcaccacagggctctcggcaagaaagcagaggatctgttccaggacgcatattaccagagccctgagacccgacttaggttcatgcgagctatgcacggtatgaccaagctcaccgcatgccaggtggccacagcttttaacctcagtaggttttcctccgcctgcgatgtcggaggttgtactggagctctggctcgcgagctcgcccgagagtacccaagaatgcaggttacagtttttgacctcccggatattattgaactcgcagcccactttcagccgcccggtccccaggcagttcaaatccatttcgcggcaggcgatttctttcgtgaccctttgccctccgcagagctgtatgtactctgtcggatccttcacgattggcctgatgacaaagtgcacaagctgttgtctcgggttgccgaatcctgtaagccgggagccgggttgctcctggtggaaacactgctggatgaggaaaagcgggtcgcccagagggccctcatgcagagcctaaacatgctggtccaaactgagggcaaggagcgtagcctcggagaatatcaatgcctactggagcttcacggtttccaccaggtacaagtggtacacctgggaggcgtcctcgatgccatcctggctacgaaggtcgcgccctag

SEQ ID NO: 68696 - DNA, 1818 bp, Artificial Sequence
  derived and/or modified sequence
atggtgctgtgccctgtgattggcaagctgctgcacaagagggtggtgctggccagcgccagcccccggcggcaggagatcctgagcaatgccggcctgcgctttgaggtggtgcccagcaagttcaaggagaagctggacaaggccagctttgccaccccctacggctacgccatggagacagccaagcagaaggccctggaggtggccaacagactctaccagacagtgggcggcctcatcctggagaagcctgtggacaagcaggatgcctacaggatgctgagccggctgagcggccgggagcacagcgtcttcaccggggtggccatcgtgcactgcagcagcaaggaccaccagctggacaccagggtgtctgagttctatgaggagaccaaggtgaagttcagcgagctgtctgaggagctgctgtgggagtatgtgcacagcggggagcccatggacaaggccggcggctacggcatccaggccctgggcggcatgctggtggagagcgtgcacggggacttcctgaatgtggtgggcttccccctgaaccacttctgcaagcagctggtgaagctgtactacccacccaggcctgaggacctgcggcgctctgtgaagcatgacagcatcccagctgctgacacctttgaggacctgagtgatgtggagggcggcggcagcgagcccacccagagagatgctggcagcagagatgagaaggccgaggccggggaggccggccaggccacagctgaggccgagtgccacaggacccgggagaccctgccccccttccccacccggctgctggagctgattgagggcttcatgctgagcaagggcctgctgacagcctgcaagctgaaggtgtttgacctgctgaaggatgaggccccccagaaggctgctgacatcgccagcaaggtggatgccagcgcctgtggcatggagcggctgctggacatctgtgccgccatgggcctgctggagaagacagagcagggctacagcaacacagaaacagccaacgtgtacctggccagtgatggagagtacagcctgcacggcttcatcatgcacaacaatgacctgacctggaacctcttcacctacctggagtttgccatccgggagggcaccaaccagcaccaccgggccctgggcaagaaggcagaagatctcttccaggatgcctactaccagagccctgagacccggctgcgcttcatgagggccatgcacggcatgaccaagctgacagcctgccaggtggccacagccttcaacctgagccgcttcagcagcgcctgtgatgtgggcggctgcaccggggccctggcccgggagctggcccgggagtaccccaggatgcaggtgacagtgtttgacctgcctgacatcatcgagctggccgcccacttccagcccccaggcccccaggccgtgcagatccactttgctgctggggacttcttccgggaccccctgcccagcgctgagctgtatgtgctgtgccgcatcctgcatgactggccagatgacaaggtgcacaagctgctgagccgggtggccgagagctgcaagccaggggccggcctgctgctggtggagaccctgctggatgaggagaagagggtggcccagagggccctgatgcagagcctgaacatgctggtgcagacagagggcaaggagaggagcctgggggagtaccagtgcctgctggagctgcacggcttccaccaggtgcaggtggtgcacctgggcggcgtgctggatgccatcctggccaccaaggtggccccctag

SEQ ID NO: 68697 - DNA, 2035 bp, Artificial Sequence
  derived and/or modified sequence
ctggccgcctgttttttttgcagccgcgctgcgcgcaccgcgggctccgggctcagaagtgcggacgcccggctcccggcgtggacgccatggtgctgtgcccggtgattgggaagctgctgcacaagcgcgtggtgctggccagcgcctccccacgccgtcaggagatcctcagcaacgcgggtctcaggtttgaggtggtcccctccaagtttaaagagaagctggacaaagcctccttcgctactccgtatgggtacgccatggagaccgccaagcagaaggccctggaggtggccaaccggctgtaccagacagtcggggggctgattctggagaagccggtggacaagcaggacgcctacaggatgctgtcccggttgagtgggagagaacacagcgtgttcacaggtgtcgcgatcgtccactgctccagcaaagaccatcagctggacaccagggtctcggaattctacgaggaaacgaaggtgaagttctcggagctgtccgaggagctgctctgggaatacgtccacagcggggagcccatggacaaagctggcggctacgggatccaggccctgggcggcatgctggtggagtccgtacacggggactttctgaacgtggtgggattcccgctgaaccacttctgcaagcagctggtgaagctctactacccgccccgtccggaggacctgcggcggagtgtcaagcacgactccatcccggccgcggacaccttcgaagacctcagtgacgtggaggggggcggctcggagcccactcagagggacgcgggcagccgcgatgagaaggccgaggcgggagaggcgggacaggccacggcagaggctgagtgtcacaggactcgggagaccctgcctccgttcccgacacgcctcctggagctgattgagggctttatgctatccaagggcctgctcaccgcttgcaaactgaaggtgttcgatttgttaaaagatgaagcaccccagaaggctgcggatattgccagcaaagtggacgcctctgcgtgtggaatggagaggcttctggacatctgtgctgccatggggctcctggagaagacagagcaaggttacagtaacacagagacagcgaacgtctacctggcatcggatggcgaatactctctgcacggcttcatcatgcacaataatgacctcacatggaacctctttacatacctggagtttgccatccgagagggaacaaaccagcaccacagggcgttggggaagaaggcggaagatctgttccaggatgcgtactaccagagcccggagacgcggctgaggttcatgcgggccatgcacggcatgacgaagctgactgcgtgccaggtggccacggccttcaatctgtcccgcttctcctccgcctgcgacgtgggaggctgcacgggtgcactggcccgagagctggcccgtgagtaccctcgtatgcaggtgactgtgtttgacctcccagacattatcgagctggccgcccacttccaaccccccggaccgcaggcagtgcagatccacttcgcagcaggtgactttttcagggaccccctccccagcgctgagctgtacgtcctgtgccggatcctgcatgactggccagacgacaaagtccacaagttactcagcagggtcgccgagagctgcaagccaggggccggcctgctgctggtggagacgctcctggatgaggagaagagggtggcgcagcgcgccctgatgcagtcactgaacatgctggtgcagactgaaggcaaggagcggagcctgggcgagtatcagtgcttgctggagctgcacggcttccaccaggtgcaggtggtgcacttggggggtgtcctggatgccatcttggccaccaaagtggccccctgaagcccaggcagcatgttcattatagggatgtcctcccccaggctgcaggtggaccgcccggtccccaagtaccataggacagtcacataggagcgtgtagtcgtgactgaataaagaaagcaaaagcc

SEQ ID NO: 68698 - DNA, 1818 bp, Artificial Sequence
  derived and/or modified sequence
atggtgctgtgccccgtgatcggcaagctgctgcacaagcgggtggtgttggccagtgcctctcccagacgccaagagatccttagtaacgctggtttgcgattcgaggtggtgcctagcaagtttaaggagaagctggacaaggcaagttttgccacaccttatggttacgctatggagaccgcaaaacagaaggcgctggaggtggctaacagactgtaccagacggtagggggccttatcttggagaagcctgttgacaaacaagatgcatacaggatgctctccaggcttagcggcagggaacacagcgtctttacgggcgtagccatagttcactgctcttccaaagatcaccagctcgatacccgggtttctgagttttacgaagagacaaaggtcaagttctccgaactgtctgaggagctcctgtgggaatatgttcactccggtgagcccatggataaagccggggggtacggtattcaagcccttggtggcatgctcgtggagtctgtccacggcgattttctgaacgtcgtgggctttccacttaaccatttttgtaagcagctggtgaagctgtattatcctccacggccagaggaccttagaagatcagtcaaacatgattcgattcctgccgctgataccttcgaggatcttagtgacgtggaaggcgggggcagtgagcccacccagcgcgacgcaggcagccgagatgaaaaggccgaggctggtgaagccggacaggctactgcggaagccgaatgtcacaggacccgtgagacgctccccccttttccaacccgcctcctagagttgatcgaggggttcatgttgtctaaagggctgctcactgcttgtaagcttaaggtattcgacctgctgaaagacgaagccccacagaaggctgcggatatcgctagtaaagtggacgcctctgcttgtggcatggaaaggctcctggacatctgcgcagcgatgggcctgctagagaaaactgaacaggggtactccaacaccgagacagccaatgtctacctggcatcagatggcgagtactccctgcacggattcattatgcacaacaatgatctgacgtggaatttatttacatatctcgagttcgcaatcagggaagggaccaaccagcaccaccgagcactgggcaagaaggcggaggacctgtttcaggacgcttactatcagagcccagagactaggttgagattcatgcgggccatgcacgggatgaccaagctgaccgcttgccaggtggcaaccgcttttaacctctcccgttttagtagcgcatgtgacgtcggaggttgtaccggtgcccttgccagggagctggcaagggagtacccccggatgcaggtgacagtctttgatctgcccgacatcatcgagctcgccgcacacttccagcccccaggacctcaggccgtgcagatccatttcgctgctggtgatttttttcgagaccccttgccttcggccgaactgtacgttctgtgtcggatcctgcacgactggcctgatgacaaggtgcacaagttactgtcgagagtcgccgaaagttgtaagccgggcgctggtctccttttagtggaaaccctgctggacgaggaaaagagggtcgcccaacgcgctctgatgcagtccctcaatatgctagtccagaccgaggggaaagaaagatctctgggagagtatcaatgcctgctggagctccatggctttcatcaggtccaggtggtccacttggggggcgttctggacgcaatcttagcaaccaaggtagcaccttag

SEQ ID NO: 68699 - DNA, 1818 bp, Artificial Sequence
  derived and/or modified sequence
atggtgttgtgtcccgtgattggtaaattgctgcacaagagagtggtgctggcaagcgcctctccccgaagacaggagatcctgagcaacgcaggcctgagattcgaggtggtccccagcaaatttaaggagaagctcgataaggcctcattcgccacaccatacggctacgccatggagaccgcgaaacaaaaggctctggaggtcgctaatcgcctgtaccagaccgtgggcggtttaatactggagaaacctgtggacaagcaggatgcctacaggatgctttcccggctctccgggagggagcacagcgtctttaccggagtcgccattgtgcattgttcctccaaagaccatcagctggatactagggtctcagagttctatgaggagaccaaggtcaagttttccgaactctccgaggagctcctctgggagtacgtgcactctggtgagccgatggacaaggccggaggatatggcatccaggccctggggggaatgctggtcgaaagtgtgcacggcgatttcctgaatgtggtcggctttcccctgaatcacttctgtaagcaactggttaagttatattatccccctaggcctgaggacctccgcaggagtgttaagcacgacagtattcccgcagccgatacattcgaagatctctctgacgtggaagggggaggcagcgagccaactcagcgcgatgctggatcccgggatgaaaaggcggaggcaggcgaggctggccaggcaactgcagaagcagagtgtcatcggactcgggaaacgctgccgccatttcctactcgcctcctcgaattaatcgaaggcttcatgctcagcaagggactccttaccgcttgcaagctaaaggtgttcgaccttctaaaggatgaagccccacagaaagccgcagacatcgcatccaaagtcgacgccagcgcctgcggcatggaacgattgctggacatttgtgcagctatgggcctccttgagaagacagaacagggatactcgaatacagaaactgctaacgtgtacttagcaagcgacggagagtatagtcttcatggatttatcatgcataacaacgatctcacctggaacctttttacttacctggaatttgccatcagagagggaacaaaccagcaccatcgcgctttaggaaaaaaggcggaggatctttttcaagacgcgtactaccagtctcccgagacacgtctacgatttatgcgggcaatgcacggaatgacaaaactgactgcctgccaagtcgccacagcgttcaatttatctcgcttttcttctgcatgcgacgtagggggatgcaccggcgcactcgccagagagctcgcccgagaataccctaggatgcaggttacggtatttgacttgcccgacattattgagttagccgctcacttccagccccctggccctcaagctgttcagattcattttgccgcaggcgatttctttcgcgatccactgccatctgctgaactttatgtgctctgtaggatattgcatgattggcccgacgataaagtacataagctcctttccagagtcgcggaatcttgtaaacccggtgctggcctgttactcgtcgagacacttctggatgaagagaaaagggtagctcagcgtgctctgatgcagtctctgaacatgctggtccagacagaaggaaaggaacggtcccttggcgaatatcaatgtctattagagttacacggttttcaccaggtgcaagtggtgcatcttggcggagtgctcgacgctatattggcaacgaaggtggcaccttag

SEQ ID NO: 68700 - protein, 113 aa, Artificial Sequence
  derived and/or modified sequence
MKPSPSQNRRSSDTGSKAPPTFKVSLMDQSVREGQDVIMSIRVQGEPKPVVSWLRNRQPVRPDQRRFAEEAEGGLCRLRILAAERGDAGFYTCKAVNEYGARQCEARLEVRGE

SEQ ID NO: 68701 - DNA, 342 bp, Artificial Sequence
  derived and/or modified sequence
atgaagccctctccctcccagaaccgaaggagtagcgacaccggaagtaaagccccacccacattcaaggtttctctgatggatcagtctgtgagagaggggcaagacgttatcatgtcaattcgagtgcaaggcgagcccaaacccgttgtgagctggctcagaaacagacagccagtgcgaccggatcagcgccggttcgccgaagaggccgagggaggcctatgtcggctaagaatccttgctgccgagcggggagatgcgggcttttacacctgcaaggccgtgaacgagtacggtgctcggcagtgtgaagcgagacttgaggtgcgtggagagtag

SEQ ID NO: 68702 - DNA, 342 bp, Artificial Sequence
  derived and/or modified sequence
atgaaaccgtcgccctcccagaaccgccggtcctcagacacagggtccaaagctcctccaacctttaaagtttccctgatggaccagtcagtgcgggagggacaagatgtgatcatgtctatcagggtgcagggggagcccaaacctgtcgtgtcctggttgcggaacagacagcctgtccgtcccgaccaacgccggttcgcagaagaggcagaaggtggtctatgcagattgcggattctcgccgctgagagaggcgatgcgggattttatacctgtaaggcagtgaacgagtatggcgctcggcagtgcgaggcgcgtcttgaggttaggggtgaatag

SEQ ID NO: 68703 - DNA, 342 bp, Artificial Sequence
  derived and/or modified sequence
atgaaaccgtccccctcacagaaccgtcgtagcagtgatactggaagcaaggctcctcccacctttaaggtgtccctgatggatcaatctgtcagagaggggcaagacgtcatcatgtccatcagagtgcagggcgagcccaagcctgtcgtgagttggttaagaaatcgccagccagtgcggccagatcaaagacgctttgccgaagaagccgagggcggattatgccgattgagaattttggctgcagagcgcggcgatgctggtttctacacctgtaaagcagtcaacgagtacggtgcacgccaatgtgaggcacgtctagaggttcgcggcgagtag

SEQ ID NO: 68704 - DNA, 342 bp, Artificial Sequence
  derived and/or modified sequence
atgaagcccagccccagccagaacagaagaagcagtgacaccggcagcaaggccccacccaccttcaaggtgtccctgatggaccagagcgtgcgggagggccaggacgtcatcatgagcatccgggtgcagggcgagcccaagcctgtggtgtcctggctgaggaaccggcagcctgtgcggccagaccagaggagatttgctgaggaggccgagggcggcctgtgccgcctgcgcatcctggccgctgagagaggagatgctggcttctacacctgcaaggctgtgaatgaatatggagcccggcagtgtgaggcccggctggaggtgcggggggagtag

SEQ ID NO: 68705 - DNA, 342 bp, Artificial Sequence
  derived and/or modified sequence
atgaagcccagccccagccagaaccggcggagcagcgacaccggcagcaaggctccgccaacattcaaagtttctctaatggatcagtcagtccgggagggtcaggatgtgataatgtccattagggtgcaaggcgaaccgaaacccgttgtgagctggctccggaacaggcagcctgtccgtccagatcagcgtcggttcgccgaagaagctgagggcgggctttgccgactgagaattcttgccgcggagcgaggcgatgctggattttatacatgcaaagccgtgaacgaatacggggcccgccagtgcgaggcccgcctggaagtccggggtgaatag

SEQ ID NO: 68706 - DNA, 342 bp, Artificial Sequence
  derived and/or modified sequence
atgaagcccagccccagccagaaccggcggagcagcgacaccggcagtaaggcgccccccacgttcaaggtctcgttgatggatcagtctgtgcgagagggccaggacgttataatgagcatcagagttcaaggcgaacctaaaccagtggtcagctggctcaggaatcgccagcctgtgaggccagaccagcgcagatttgcagaggaggcggaggggggcttgtgcaggctgagaatcctggccgctgagcgaggcgatgcagggttttacacatgtaaagccgttaacgagtatggtgcccggcagtgtgaggcccggctggaggtgcgcggcgaatag

SEQ ID NO: 68707 - DNA, 342 bp, Artificial Sequence
  derived and/or modified sequence
atgaagcccagccccagccagaaccggcggagcagcgacaccggcagtaaagctccccccacatttaaagtgagcttgatggaccagtctgtcagagaaggccaggatgtcatcatgtcaatcagagtccagggcgaaccgaagccagtcgtgtcatggctacgaaatcgccagcccgtcaggcccgaccagcgcaggttcgccgaagaggctgaaggaggtctatgtcggttgagaatcctggctgcagagcgaggggacgcaggcttctacacctgtaaggctgtgaatgagtacggagccagacagtgcgaagctagactggaagtccgaggtgagtag

SEQ ID NO: 68708 - DNA, 342 bp, Artificial Sequence
  derived and/or modified sequence
atgaagccctctcccagtcagaaccgcagatcatcagacacaggaagcaaagcacctcctacattcaaggtctcacttatggaccagagtgtgagggaaggtcaggacgttatcatgtctatccgcgtccaaggtgaacccaaacctgtggtctcgtggttacgcaatcggcagccagtgaggcctgatcagagacgattcgcagaagaggccgaggggggactctgtaggctgaggatcttggctgcagaaagaggagacgccggtttttacacatgtaaggccgtgaacgaatacggtgctcgccagtgtgaggctcggctcgaggtgcggggagagtag

SEQ ID NO: 68709 - DNA, 342 bp, Artificial Sequence
  derived and/or modified sequence
atgaagcccagtcccagtcagaatcggagatctagtgacaccggctccaaagcaccacctacctttaaggtgagcttaatggaccagagcgtgcgggagggccaggatgtaataatgtcaattcgcgtgcaaggcgagcccaaacccgtagtgtcatggttgaggaatcggcagcctgtgagacctgaccagcgaagatttgctgaggaggccgaagggggactgtgtaggctcagaattctggcggctgaaagaggcgatgcagggttctatacttgtaaagccgtgaatgaatacggcgcaaggcagtgtgaagctcggctggaagtcaggggtgaatag

SEQ ID NO: 68710 - DNA, 342 bp, Artificial Sequence
  derived and/or modified sequence
atgaaacctagcccgtcccagaaccggcgttcctcggacactggaagtaaggctccacccacctttaaagtgtcactgatggatcagtcagtccgcgagggacaagatgttattatgtcgatcagggtgcaaggtgagcccaaaccagtcgtttcttggttgcggaatcgccagcccgtgaggcctgatcagcgcaggttcgccgaagaggctgaaggcggtctgtgcaggctaaggatactagctgctgagcgaggggatgccggattctacacctgtaaagccgtcaacgagtacggcgcacgacagtgcgaagccaggctcgaggttcgaggagagtag

SEQ ID NO: 68711 - DNA, 342 bp, Artificial Sequence
  derived and/or modified sequence
atgaagcccagccccagccagaacagaagaagcagcgacaccggcagcaaggccccccccaccttcaaggtgagcctgatggaccagagcgtgagagagggccaggacgtgatcatgagcatcagagtgcagggcgagcccaagcccgtggtgagctggctgagaaacagacagcccgtgagacccgaccagagaagattcgccgaggaggccgagggcggcctgtgcagactgagaatcctggccgccgagagaggcgacgccggcttctacacctgcaaggccgtgaacgagtacggcgccagacagtgcgaggccagactggaggtgagaggcgagtag

SEQ ID NO: 68712 - protein, 463 aa, Artificial Sequence
  derived and/or modified sequence
MQWIRGGSGMLWVNQEDEVEEGPSDVQNGHLDPNSDCLCLGRPLQNRDQMRANVINEIMSTERHYIKHLKDICEGYLKQCRKRRDMFSDEQLKVIFGNIEDIYRFQMGFVRDLEKQYNNDDPHLSEIGPCFLEHQDGFWIYSEYCNNHLDACMELSKLMKDSRYQHFFEACRLLQQMIDIAIDGFLLTPVQKICKYPLQLAELLKYTAQDHSDYRYVAAALAVMRNVTQQINERKRRLENIDKIAQWQASVLDWEGEDILDRSSELIYTGEMAWIYQPYGRNQQRVFFLFDHQMVLCKKDLIRRDILYYKGRIDMDKYEVVDIEDGRDDDFNVSMKNAFKLHNKETEEIHLFFAKKLEEKIRWLRAFREERKMVQEDEKIGFEISENQKRQAAMTVRKVPKQKGVNSARSVPPSYPPPQDPLNHGQYLVPDGIAQSQVFEFTEPKRSQSPFWQNFSRLTPFKK

SEQ ID NO: 68713 - DNA, 1392 bp, Artificial Sequence
  derived and/or modified sequence
atgcagtggattagaggtggttccggaatgctctgggtcaaccaggaggacgaggttgaggaaggccctagtgacgtccagaacggccatctggacccaaactctgactgtctatgtcttggccgacctctccaaaaccgcgaccagatgagagccaacgtaattaatgagatcatgtccactgaaagacattatatcaagcatctgaaggacatctgtgaaggctacctcaagcagtgtaggaagcgtcgggacatgtttagtgacgaacagctaaaggtgatttttgggaatatagaggatatttatcgatttcagatggggttcgtaagagacttggagaagcaatataacaatgatgatcctcacctgtctgagatcggcccctgcttcttagagcaccaagatggcttttggatctattctgagtactgtaacaatcatctcgacgcttgcatggaattaagtaagctcatgaaagactcacggtaccagcacttttttgaggcttgccgcttactgcagcagatgatcgatattgccatcgacggattcttgctcacacctgttcagaaaatttgtaagtatcccttgcagctcgccgagttactcaaatacactgctcaggaccattctgactacagatatgtggccgcggctttggcagtgatgcgaaatgtgacccagcagatcaatgagcggaagagaagattggaaaacatcgacaagatagctcagtggcaggcctccgtgctggattgggaaggggaagacatactggatcggagtagtgagctaatctatacaggagaaatggcctggatctatcagccctacggtaggaaccagcagagagtgttcttcctgttcgatcatcagatggttctctgtaaaaaggatctgatcagacgcgacattctgtattacaaaggtcggatcgacatggacaagtacgaggtggtcgatatagaagatggacgcgacgatgactttaacgtgtccatgaagaacgcctttaagctgcataataaggaaaccgaggaaattcacctattcttcgccaagaaactcgaggagaaaatacgctggcttagagcattccgagaagaaaggaagatggtgcaggaggatgaaaaaatcggctttgagataagcgagaaccagaaaagacaggccgcgatgactgtgcggaaagtgcctaaacaaaaaggcgttaatagcgcccggtcagtgccaccatcatatccacctcctcaggatccgctcaatcacggtcagtatctcgtccctgacggcattgcccagtcccaggtcttcgagtttaccgaacccaagcgctctcagtcacctttttggcagaatttcagccgccttacaccatttaagaaatag

SEQ ID NO: 68714 - DNA, 1392 bp, Artificial Sequence
  derived and/or modified sequence
atgcagtggatccggggcggcagcggcatgctgtgggtgaaccaggaggatgaggtggaggagggccccagtgatgtgcagaatggccacctggaccccaacagcgactgcctgtgcctgggccggcccctgcagaacagagaccagatgagggccaacgtcatcaatgagatcatgagcacagagcggcactacatcaagcacctgaaggacatctgtgagggctacctgaagcagtgcaggaagagaagagacatgttcagtgatgagcagctgaaggtgatcttcggcaacatcgaggacatctaccgcttccagatgggctttgtgcgggacctggagaagcagtacaacaatgatgacccccacctgtctgaaattggcccctgcttcctggagcaccaggacggcttctggatctacagcgagtactgcaacaaccacctggatgcctgcatggagctgagcaagctgatgaaggacagccgctaccagcacttctttgaggcctgccgcctgctgcagcagatgattgacatcgccattgatggcttcctgctgacccctgtgcagaagatctgcaagtaccccctgcagctggccgagctgctgaagtacacagcccaggaccacagcgactaccgctacgtggccgccgccctggccgtgatgagaaatgtgacccagcagatcaatgaaaggaagaggcggctggagaacatcgacaagatcgcccagtggcaggcctctgtgctggactgggagggggaggacatcctggacaggagcagcgagctgatctacacaggagagatggcctggatctaccagccctatggaagaaaccagcagagggtcttcttcctgtttgaccaccagatggtgctgtgcaagaaggacctgatcagaagagacatcctgtactacaagggcagaattgacatggacaagtatgaggtggtggacattgaagatggaagagatgatgacttcaacgtgtccatgaagaatgccttcaagctgcacaacaaggagacagaggagatccacctgttctttgccaagaagctggaggagaagatccgctggctgcgggccttccgggaggagaggaagatggtgcaggaggatgagaagattggatttgagatcagcgagaaccagaagaggcaggccgccatgacagtgaggaaggtgcccaagcagaagggcgtgaacagcgcccggtctgtgccccccagctaccccccaccccaggaccccctgaaccacggccagtacctggtgcctgatggcatcgcccagagccaggtgtttgagttcacagagcccaagaggagccagagccccttctggcagaacttcagccggctgacccccttcaagaagtag

SEQ ID NO: 68715 - DNA, 1392 bp, Artificial Sequence
  derived and/or modified sequence
atgcagtggatccggggcggcagcggcatgctgtgggtgaaccaggaagatgaggtggaagaaggcccctctgatgtacaaaatggacatctggatccaaattctgattgcctttgcctgggtcgcccccttcagaaccgcgaccagatgagagcgaatgtgataaacgaaatcatgtcaaccgaacggcattacattaagcacctgaaagatatctgcgaaggttatctgaagcagtgtcggaagcgccgggatatgttttccgatgaacaactgaaggtgatttttgggaacatagaagacatttaccggtttcagatggggttcgttagggatcttgagaaacagtacaataatgatgatccgcatctctccgagattgggccatgctttcttgaacaccaagacgggttctggatctactccgagtactgtaacaaccacctggatgcctgtatggaactttccaaattgatgaaggatagtaggtaccaacacttcttcgaggcatgccgcctcctgcaacagatgatcgacattgcaatcgacggattcttgctgacgcccgtgcagaagatctgtaaatatccactgcagctggccgaactgctgaaatacacagcccaggaccacagtgactaccgctatgtagccgcagccctggctgtcatgcggaacgtgacccagcaaattaacgagcggaagagaagacttgaaaacattgataagattgcccaatggcaagcatcagttctagattgggagggcgaagatatcttggacagatcgtccgagctgatttacactggcgagatggcctggatctatcaaccgtacggcagaaaccagcagagagtgtttttcctgtttgatcatcagatggtgctgtgtaagaaagacctcataagacgcgacatcctgtactacaaagggagaatcgacatggacaaatatgaagtggtggacatcgaggatggaagagacgacgatttcaacgtgtcaatgaaaaacgcatttaagttacacaacaaagagacagaagagatccaccttttcttcgccaagaaattggaggagaagataaggtggctcagagccttccgcgaggagaggaagatggtacaggaggacgagaaaatcggctttgaaatctccgaaaatcagaagcgccaggctgccatgactgtccgcaaggttcccaagcagaaaggtgtgaatagcgccaggtctgtgcccccgtcatatccacctccacaggacccactcaaccacgggcagtacttggtgcctgacggaattgcacagagccaagtgtttgagtttactgagcctaaacgatcccaatctcccttttggcagaatttttctcgcctgacgcccttcaaaaagtag

SEQ ID NO: 68716 - DNA, 1392 bp, Artificial Sequence
  derived and/or modified sequence
atgcagtggatccggggaggatccggcatgctttgggttaaccaagaggacgaagtcgaagagggcccatcagatgtacagaacggacatctcgatcccaacagtgactgcctgtgtttgggtagacccctgcagaatagagaccaaatgagggccaatgttattaacgaaatcatgtctacagaacgtcattatattaagcatttaaaggatatatgtgaaggttaccttaaacagtgccgtaagcggcgtgacatgttcagtgacgaacagcttaaagtcatatttggcaatatcgaggatatctaccgcttccagatgggcttcgttagagatctggaaaaacagtataacaatgacgacccacacttatcagagatcggaccctgttttcttgagcatcaggacggtttttggatctatagcgagtactgcaacaatcatctcgatgcctgtatggagctgagtaagctcatgaaggatagtcgatatcaacacttcttcgaggcatgcagacttctgcagcagatgattgacatcgccatcgacggctttctgctaactcccgttcagaagatatgcaagtatcccctgcagttggctgaactcttgaaatacacagcccaggatcattcagactacagatatgtggccgctgcgcttgccgtgatgcgaaatgtcacccagcagattaacgaacgcaagcgaagactggaaaacatagataagattgctcagtggcaggcctccgtccttgactgggagggcgaagacatcctggacagaagcagcgagctgatatacacaggcgagatggcgtggatataccagccttacggaaggaatcagcaacgagtttttttcctgttcgaccatcagatggtgctctgcaagaaggacctaataagacgcgatattctatattacaaagggcgtatcgacatggacaaatatgaggtagtggacatcgaagacgggagagacgatgattttaacgtgtccatgaagaatgcctttaaactccataacaaggagacagaagaaattcacctattcttcgccaagaagctggaggaaaagattaggtggctacgcgcattccgagaggaacggaagatggtgcaagaggacgagaaaatcgggttcgaaatctctgaaaaccagaagagacaggcagcaatgaccgtccgcaaggtgcctaaacagaagggcgtaaactctgcccgatcagtaccacccagctatccccctcctcaagaccctcttaatcatgggcagtatctcgtgccagatggcattgctcagtcgcaggtgtttgagttcacagaaccaaaaaggtcccagtctcctttctggcaaaatttttcacggcttaccccctttaaaaagtag

SEQ ID NO: 68717 - DNA, 4845 bp, Artificial Sequence
  derived and/or modified sequence
atctaactccagcgcagcgggaggcaggcagaggtagcagctgccttctcctgggcgggcggaggctattcgcccccatcctctccctgcaccccacccccacagttctcaagccttggtgggggacaaaagcagcccattaggacccccccacactcgcacctctccctgccaagacctctaggagcagcagggcggagagacagagcctgccggttggcatggaacaaactgactgaaggcgaggtccggggcggaggggattgggttgtagggctgtggaggaggggcggcggagggggcgctggggctctcgcttgcttcagcccagcccttctagtcagcccgcgacaactcgcgccagctacggggcctcagagaagccggacttcgcaagcaccatgcagtggataaggggcggatcgggaatgctctgggtgaaccaggaggatgaggtggaggaggggcccagcgatgtgcagaacggacacctggaccccaattcagactgcctctgtctggggcggccactacagaaccgggaccagatgcgggccaatgtcatcaatgagataatgagcactgagcgtcactacatcaagcacctcaaggatatttgtgagggctatctgaagcagtgccggaagagaagggacatgttcagtgacgagcaactgaaggtaatctttgggaacattgaagatatctacagatttcagatgggctttgtgagagacctggagaaacagtataacaatgatgacccccacctcagcgagataggaccctgcttcctagagcaccaagatggattctggatatactctgagtattgtaacaaccacctggatgcttgcatggagctctccaaactgatgaaggacagccgctaccagcacttctttgaggcctgtcgcctcttgcagcagatgattgacattgctatcgatggtttccttttgactccagtgcagaagatctgcaagtatcccttacagttggctgagctcctaaagtatactgcccaagaccacagtgactacaggtatgtggcagctgctttggctgtcatgagaaatgtgactcagcagatcaacgaacgcaagcgacgtttagagaatattgacaagattgctcagtggcaggcttctgtcctagactgggagggcgaggacatcctagacaggagctcggagctgatctacactggggagatggcctggatctaccagccctacggccgcaaccagcagcgggtcttcttcctgtttgaccaccagatggtcctctgcaagaaggacctaatccggagagacatcctgtactacaaaggccgcattgacatggataaatatgaggtagttgacattgaggatggcagagatgatgacttcaatgtcagcatgaagaatgcctttaagcttcacaacaaggagactgaggagatacatctgttctttgccaagaagctggaggaaaaaatacgctggctcagggctttcagagaagagaggaaaatggtacaggaagatgaaaaaattggctttgaaatttctgaaaaccagaagaggcaggctgcaatgactgtgagaaaagtccctaagcaaaaaggtgtcaactctgcccgctcagttcctccttcctacccaccaccgcaggacccgttaaaccacggccagtacctggtccccgacggcatcgctcagtcgcaggtctttgagttcaccgaacccaagcgcagccagtcaccattctggcaaaacttcagcaggttaacccccttcaaaaaatgatacctacagggaggcagataattttaaaataaagtaaataaaattatatttatagatggaccttttttcggagaagcactgttgaaatttatacacacacacacacacagagacccttgagtacacatacacacacacacacacagacacacacacacacacacacacacacacacacacagagagataaggaacaaaagtgttttctgttgttttggggaagtgaaatatgtggttggtaggaagaggtaccaatgacttccaaacatgtgattccgtcttaaaagttttccatttttaccctgtcccccttccctttgctttcagaagttgacatttctattcattgcttttcttgttaagataatctctttactcccctgtgagtgattcactgccttgtcattattacgatagatgtgtttgtattgttttttttctgatgatactgatgttgatgaatttttaattttatttgatgtggtagagttgggaggtttcagggttttttcccctcttttactttccattgaggaagggaatgagctcctttctcctctccttcagccaatcattatcaaatgttccttcagccctgcagttgccccaaataaccttttttcagcatcctctgtcctcagtcatgccagtctggacatgctctgttgtgccctgtgacaaaactgctcagtattcctattgcttttactgtgttttaggtactgtgaagggatcaaaaaaccaaacagaagcaagggagtatcagactatgatgatgctggagtggacttctgttcagggaacattttgcattcaggctgtttcttctatcactggggtttcccatgttgcagcacttctgggtcgttgcaattttgcatctaggagttagtttgatcgagttattctcttttttcaagtcacttttgttataggtctccccctaggcctgtctctcccttagcccaaaagatctgaactggaagcagaggttgagattctgcctcccaggagagggatttacctgccccctagtaccagataggtttagggcagtgatctctacagcaatcagttcagtgtcctggttgtccctgctcccatttacagatgtttgggcagcattgatagaagtatggaggggttcaagacagagcccacctgatcaagatcatcagctaccttcaaattattgacctggacagggtccaagtctgatagtaaccttttacaagaaagaacagggatgggaatggaaagagatagccttgatccacagtattgtacctgcattttctaccaccctaaaattgtgtgagacttctcccattgttaacagattgcatggacaatcttccctggcttctttctttccctctctctttcttctttctcctgccatcctagcacaggaggatttttggtattgatatagttaaagctgttctggcactcaaagaaggccgtgtttccaacatcctctcatcccaggacatttggggcaagtgagttaggggcccaggggcaattttccctctgaataacgtgtctgaggcagggatgctaccctcaggctcgcttttggccagctttttgcttgggaaaatctaacttctttcacaaggaggcaggcttcctatggatgttggagtacctgtttttcctccacacatagcccttttcatggatagaccttgaacaacaaaaagggtataagggaataaggatgaactctgctgtgaagagcaagccactgtagtgaggaatgtggagactgggagtctgtcctaaaccccatgggagaagacttcatcatgacaggacttcagcttaccaagcagcagccatagctgtgtggaggcttcagcatagctagcatgtttactgctctatgcctcctgatccagaccaggcattgcccagcctgggaatcttttctttgtgggaatcaaattacaagctatttaagtttatattccatcacaaccaagtcagacttgtattataagtcaaggatgagcctgatctggggagagggccggggctcgggactggccaccactgttcagcacatgacctaactacgtaagcctctttggcaagggtcctggtgcccagcacccaggctaaaatatcctgtctggcagagtgttttggtagctatgcaggcctcccttcagtgtacctctttttccaacttctcactcctccttactaggcttggccttgacatgcttcttcgagggttggcagcacaccgggaggggatgcttggacaagtttctgggcctacatttcttgactaggccctctcatttcctccctccttggggcttctgcccagggctccaggatcagggatattacttctcaacccgcacttctcctctactgaacccactggcatcacctgatgccactaatttgtgaacaacaagaaatcatttccccattggttggagtattccctcagcctatagcatcaaagcagaccagtggccaacagccccaaggggagcccaattaaatacctgggttcagtatcctaacctgttatgtcctgacagcaatggtaaccccagtaattctgtaatgttgtaatttccgcatggccctgagctcccttttcctcaactcagtgaggccaggatttgctctccaaaaggctttgctagtgtgttcaatgggacctgctgtggggagtcctaagacagacatctaattattctctctttttccccccctctctatgtgtatatttctaatggatctataagaacagcaacaagagagttctaacaattctagtgtgaagccaaatagtgatcttttagtgctttggggatggggtgggctggggtggatggatgggcaacagtgactttgattacccttgctgctctgcatttgccagtttattcttttgtttcttttatctgactgactctgtcaaacaagtgtcaaagttgtgtgttaaaaaatgtttaacaaaaaaaatgttgtaatgacacaaagccttatgaaaatatttatggagttcaataaaagaagt

SEQ ID NO: 68718 - DNA, 1392 bp, Artificial Sequence
  derived and/or modified sequence
atgcagtggatcagaggcggcagcggcatgctgtgggtgaaccaggaggacgaggtggaggagggccccagcgacgtgcagaacggccacctggaccccaacagcgactgcctgtgcctgggcagacccctgcagaacagagaccagatgagagccaacgtgatcaacgagatcatgagcaccgagagacactacatcaagcacctgaaggacatctgcgagggctacctgaagcagtgcagaaagagaagagacatgttcagcgacgagcagctgaaggtgatcttcggcaacatcgaggacatctacagattccagatgggcttcgtgagagacctggagaagcagtacaacaacgacgacccccacctgagcgagatcggcccctgcttcctggagcaccaggacggcttctggatctacagcgagtactgcaacaaccacctggacgcctgcatggagctgagcaagctgatgaaggacagcagataccagcacttcttcgaggcctgcagactgctgcagcagatgatcgacatcgccatcgacggcttcctgctgacccccgtgcagaagatctgcaagtaccccctgcagctggccgagctgctgaagtacaccgcccaggaccacagcgactacagatacgtggccgccgccctggccgtgatgagaaacgtgacccagcagatcaacgagagaaagagaagactggagaacatcgacaagatcgcccagtggcaggccagcgtgctggactgggagggcgaggacatcctggacagaagcagcgagctgatctacaccggcgagatggcctggatctaccagccctacggcagaaaccagcagagagtgttcttcctgttcgaccaccagatggtgctgtgcaagaaggacctgatcagaagagacatcctgtactacaagggcagaatcgacatggacaagtacgaggtggtggacatcgaggacggcagagacgacgacttcaacgtgagcatgaagaacgccttcaagctgcacaacaaggagaccgaggagatccacctgttcttcgccaagaagctggaggagaagatcagatggctgagagccttcagagaggagagaaagatggtgcaggaggacgagaagatcggcttcgagatcagcgagaaccagaagagacaggccgccatgaccgtgagaaaggtgcccaagcagaagggcgtgaacagcgccagaagcgtgccccccagctacccccccccccaggaccccctgaaccacggccagtacctggtgcccgacggcatcgcccagagccaggtgttcgagttcaccgagcccaagagaagccagagccccttctggcagaacttcagcagactgacccccttcaagaagtag

SEQ ID NO: 68719 - protein, 414 aa, Artificial Sequence
  derived and/or modified sequence
MRANVINEIMSTERHYIKHLKDICEGYLKQCRKRRDMFSDEQLKVIFGNIEDIYRFQMGFVRDLEKQYNNDDPHLSEIGPCFLEHQDGFWIYSEYCNNHLDACMELSKLMKDSRYQHFFEACRLLQQMIDIAIDGFLLTPVQKICKYPLQLAELLKYTAQDHSDYRYVAAALAVMRNVTQQINERKRRLENIDKIAQWQASVLDWEGEDILDRSSELIYTGEMAWIYQPYGRNQQRVFFLFDHQMVLCKKDLIRRDILYYKGRIDMDKYEVVDIEDGRDDDFNVSMKNAFKLHNKETEEIHLFFAKKLEEKIRWLRAFREERKMVQEDEKIGFEISENQKRQAAMTVRKVPKQKGVNSARSVPPSYPPPQDPLNHGQYLVPDGIAQSQVFEFTEPKRSQSPFWQNFSRLTPFKK

SEQ ID NO: 68720 - DNA, 1245 bp, Artificial Sequence
  derived and/or modified sequence
atgcgcgcaaatgtgatcaacgaaatcatgtctactgagcggcattacatcaagcatcttaaagacatctgtgagggttatctcaagcaatgcaggaagaggcgggacatgttttctgacgaacagcttaaggttatcttcggcaatatcgaggacatctaccgttttcagatggggttcgtacgtgatctcgagaagcagtataacaacgacgacccccacctgtctgagatcggtccttgttttctggagcaccaggacggtttctggatctactccgaatactgtaacaaccacctggacgcatgcatggagcttagcaagttgatgaaggacagtcggtaccagcacttttttgaggcctgtagactactccaacaaatgattgacattgccattgacgggttcctactgactcctgtccaaaagatttgcaagtaccccctgcagctggccgagctgctcaaatacactgcccaagatcactctgactatagatatgtggctgccgccctggccgtaatgaggaatgtgacacagcagattaatgagcgaaagcggaggctggagaacattgacaagattgcacagtggcaggcgagtgtcctggactgggaaggcgaagatatcctggaccggagtagtgagctcatttatacaggcgaaatggcgtggatttaccagccttatggaagaaatcagcagcgggtttttttcctttttgaccatcagatggtgttgtgcaagaaggatcttatacggcgggatatcctttactataagggtagaatcgacatggacaagtacgaagtcgtggacattgaagacggaagggatgacgatttcaatgtgagtatgaagaatgcatttaagctacacaataaggagaccgaggagatccacctgttcttcgctaagaagttagaggagaagattagatggctgagggcctttagagaggagcgaaagatggttcaggaagacgagaagatagggtttgaaattagcgagaatcagaagcggcaagcagctatgacagtgaggaaggtacccaagcagaagggggtcaattcagcccgttctgtcccaccctcataccctcccccacaggaccctctgaatcacggacagtatttagtgcccgatgggatcgcccagtcacaagtcttcgaattcacagagcccaagagaagtcagagccctttctggcagaatttcagcagactgactcccttcaaaaaatag

SEQ ID NO: 68721 - DNA, 1245 bp, Artificial Sequence
  derived and/or modified sequence
atgagggccaacgtcatcaatgagatcatgagcacagagcggcactacatcaagcacctgaaggacatctgtgagggctacctgaagcagtgcaggaagaggcgggacatgttcagtgatgagcagctgaaggtgatctttggaaatattgaggacatctaccgcttccagatgggctttgtgcgggacctggagaagcagtacaacaatgatgacccccacctgtctgagatcggcccctgcttcctggagcaccaggacggcttctggatctacagcgagtactgcaacaaccacctggatgcctgcatggagctgagcaagctgatgaaggacagccgctaccagcacttctttgaggcctgccgcctgctgcagcagatgattgatattgccattgatggcttcctgctgacccctgtgcagaagatctgcaagtaccccctgcagctggccgagctgctgaagtacacagcccaggaccacagcgactaccgctacgtggccgccgccctggccgtgatgagaaatgtgacccagcagatcaatgaaaggaagaggcggctggagaacatcgacaagatcgcccagtggcaggcctctgtgctggactgggagggggaggacatcctggacaggagcagcgagctgatctacaccggggagatggcctggatctaccagccctacggcaggaaccagcagagggtcttcttcctgtttgaccaccagatggtgctgtgcaagaaggacctgatccggcgggacatcctgtactacaagggcagaattgacatggacaagtatgaggtggtggacattgaagatggaagagatgatgacttcaacgtgtccatgaagaatgccttcaagctgcacaacaaggagacagaggagatccacctgttctttgccaagaagctggaggagaagatccgctggctgcgggccttccgggaggagaggaagatggtgcaggaggatgagaagattggatttgagatcagcgagaaccagaagaggcaggccgccatgacagtgaggaaggtgcccaagcagaagggcgtgaacagcgcccggtctgtgcccccatcctaccccccaccccaggaccccctgaaccacggccagtacctggtgcctgatggcatcgcccagagccaggtgtttgagttcacagagcccaagaggagccagagccccttctggcagaacttcagccggctgacccccttcaagaagtag

SEQ ID NO: 68722 - DNA, 1245 bp, Artificial Sequence
  derived and/or modified sequence
atgcgggccaacgtgatcaacgagatcatgagcaccgagcggcactatatcaagcatctcaaggacatctgcgagggttacctgaagcagtgtcggaaaaggcgagacatgttcagtgatgagcaactaaaagttatcttcggaaacatcgaggacatctacagatttcagatgggattcgtacgggacctcgagaaacagtacaataatgatgacccacacctgtcagaaatcgggccttgcttcctcgagcatcaggacggtttctggatttatagtgagtactgcaacaaccatttggatgcttgcatggagctctccaaacttatgaaggactccagataccagcacttcttcgaggcttgtcgcctgctgcagcagatgatcgacatcgctattgacgggttccttctcacaccagtgcagaaaatatgtaagtatcccctgcaactggcggaacttcttaagtataccgcgcaagatcatagcgattaccgctacgtggcagccgcccttgccgtaatgcggaatgttacacagcaaataaatgagagaaaacggaggctggagaacatcgacaaaatcgctcagtggcaagcctctgtcctggattgggagggggaagacatccttgaccgcagcagtgagttaatctatacaggcgaaatggcatggatttatcagccatatggccgcaaccaacagagagtgttcttcctttttgaccaccagatggtactctgcaaaaaggaccttattagacgagatattctttactataagggacgtatcgatatggacaagtatgaagttgttgacattgaagacggccgggatgatgactttaacgtttcaatgaagaacgcattcaagcttcataataaggagaccgaagagatccacctgttcttcgccaaaaagcttgaggagaaaattcgctggctgagggcattcagagaagagaggaagatggtgcaagaggacgagaaaatcggattcgagatcagtgagaatcagaagaggcaggcagctatgaccgtgcgaaaagttcccaagcaaaaaggtgtgaatagcgctcgatcagtaccaccctcctacccccctccacaggaccctctaaaccatggacagtaccttgtccctgacggtatcgctcagtcccaagtgtttgagtttacggagcctaaaagatcgcaaagtcctttctggcagaactttagtaggcttacccctttcaagaaatag

SEQ ID NO: 68723 - DNA, 1245 bp, Artificial Sequence
  derived and/or modified sequence
atgcgagcaaacgtcataaacgagatcatgtctaccgaaaggcactacatcaagcacctgaaagacatctgtgaagggtatctgaaacagtgtcggaagcggagagacatgttctccgatgagcaactcaaggtgatttttggaaatatcgaggacatttaccggtttcagatggggtttgttcgggatttagaaaagcagtataataacgatgatccccatctcagcgagatcgggccttgcttccttgagcatcaggacggtttttggatctatagtgaatactgcaataatcaccttgatgcttgcatggaattgtctaagctgatgaaggattcacgttaccagcatttttttgaggcttgccgcctgctccagcagatgatcgatatcgcgattgatggcttcctcctcacaccagtccaaaagatttgtaaatatcccctgcagctagctgaattgctgaaatacaccgctcaggaccacagcgattacagatatgttgcagctgcactcgcagtgatgcggaatgttacccagcaaatcaacgagagaaagagaagactcgagaatatcgataagattgcacagtggcaggcatctgtactagattgggagggtgaggacatcctggataggtctagtgaactcatctacacaggcgaaatggcatggatttaccagccctacggacggaatcagcagcgagtgttctttctttttgaccatcagatggtgttgtgtaagaaagatttgatccgtagggacatactatactataagggaaggatcgatatggacaagtacgaggtggtggacatcgaagatgggagggatgacgattttaatgtctcgatgaagaatgcttttaagctgcacaataaagagaccgaggaaattcatctgttcttcgccaagaaacttgaagagaaaattaggtggcttagggcttttagggaagagcgcaagatggttcaggaggacgaaaagataggattcgagatatctgaaaatcaaaagcgacaagcagctatgacagtccggaaggtgcccaagcaaaaaggcgttaattcagctcgatcagtccctccctcatatcctccgccacaggatccactgaatcatggccaatatctggtgccagatggcatcgcacagtctcaggtgttcgaatttacagagcctaagcggagccagagtcctttttggcagaacttctcccggctgacaccctttaagaagtag

SEQ ID NO: 68724 - DNA, 1245 bp, Artificial Sequence
  derived and/or modified sequence
atgagagccaacgtgatcaacgagatcatgagcaccgagagacactacatcaagcacctgaaggacatctgcgagggctacctgaagcagtgcagaaagagaagagacatgttcagcgacgagcagctgaaggtgatcttcggcaacatcgaggacatctacagattccagatgggcttcgtgagagacctggagaagcagtacaacaacgacgacccccacctgagcgagatcggcccctgcttcctggagcaccaggacggcttctggatctacagcgagtactgcaacaaccacctggacgcctgcatggagctgagcaagctgatgaaggacagcagataccagcacttcttcgaggcctgcagactgctgcagcagatgatcgacatcgccatcgacggcttcctgctgacccccgtgcagaagatctgcaagtaccccctgcagctggccgagctgctgaagtacaccgcccaggaccacagcgactacagatacgtggccgccgccctggccgtgatgagaaacgtgacccagcagatcaacgagagaaagagaagactggagaacatcgacaagatcgcccagtggcaggccagcgtgctggactgggagggcgaggacatcctggacagaagcagcgagctgatctacaccggcgagatggcctggatctaccagccctacggcagaaaccagcagagagtgttcttcctgttcgaccaccagatggtgctgtgcaagaaggacctgatcagaagagacatcctgtactacaagggcagaatcgacatggacaagtacgaggtggtggacatcgaggacggcagagacgacgacttcaacgtgagcatgaagaacgccttcaagctgcacaacaaggagaccgaggagatccacctgttcttcgccaagaagctggaggagaagatcagatggctgagagccttcagagaggagagaaagatggtgcaggaggacgagaagatcggcttcgagatcagcgagaaccagaagagacaggccgccatgaccgtgagaaaggtgcccaagcagaagggcgtgaacagcgccagaagcgtgccccccagctacccccccccccaggaccccctgaaccacggccagtacctggtgcccgacggcatcgcccagagccaggtgttcgagttcaccgagcccaagagaagccagagccccttctggcagaacttcagcagactgacccccttcaagaagtag

SEQ ID NO: 68725 - protein, 441 aa, Artificial Sequence
  derived and/or modified sequence
MAGEGDQQDAAHNMGNHLPLLPESEEEDEMEVEDQDSKEAKKPNIINFDTSLPTSHTYLGADMEEFHGRTLHDDDSCQVIPVLPQVMMILIPGQTLPLQLFHPQEVSMVRNLIQKDRTFAVLAYSNVQEREAQFGTTAEIYAYREEQDFGIEIVKVKAIGRQRFKVLELRTQSDGIQQAKVQILPECVLPSTMSAVQLESLNKCQIFPSKPVSREDQCSYKWWQKYQKRKFHCANLTSWPRWLYSLYDAETLMDRIKKQLREWDENLKDDSLPSNPIDFSYRVAACLPIDDVLRIQLLKIGSAIQRLRCELDIMNKCTSLCCKQCQETEITTKNEIFSLSLCGPMAAYVNPHGYVHETLTVYKACNLNLIGRPSTEHSWFPGYAWTVAQCKICASHIGWKFTATKKDMSPQKFWGLTRSALLPTIPDTEDEISPDKVILCL

SEQ ID NO: 68726 - DNA, 1326 bp, Artificial Sequence
  derived and/or modified sequence
atggctggagagggtgaccagcaggacgcagcccataacatgggcaaccacttgcccctcttacctgaaagcgaggaagaggacgagatggaagtggaagatcaggactctaaggaggctaagaaacccaacattatcaacttcgacactagcttgcccacttcccatacttacctcggcgcagatatggaggagtttcacgggcgcaccttgcatgatgacgattcgtgccaggtcattcctgtgttaccacaggtgatgatgattctgatccccgggcaaaccctgcccctacaactcttccacccccaggaggttagcatggtccggaacctgatccagaaggaccggacctttgctgtgctggcgtatagtaacgtacaagagagggaggcccagtttggaacgactgctgagatatacgcatatcgtgaggaacaagattttgggattgagattgtgaaggtcaaagctataggaaggcagcgcttcaaagtgttagagctgagaacccagtcagatgggattcagcaagccaaagtgcagatcctgcctgagtgtgtcctaccaagcactatgagcgcggtccagctggagagtcttaacaagtgtcaaattttcccctctaaacctgtgagtagggaggatcagtgctcatataagtggtggcagaaatatcagaagagaaagtttcactgtgccaacttaactagctggccccggtggctgtacagtctttacgacgctgaaacgcttatggatagaatcaaaaaacagctgagagagtgggacgagaacctgaaggacgatagcttacccagcaaccctatagacttttcctatcgtgtggccgcctgcctgccaattgatgatgtcctgcgcatacagcttctgaagatcggatctgccatccagcggctgagatgcgagctggatatcatgaacaaatgtacttccttatgctgtaagcagtgccaggagacagaaatcactacaaagaatgagattttctcacttagcctgtgcggtccgatggctgcttacgttaatccacacgggtatgtccacgagacccttaccgtatacaaagcctgcaatttgaaccttatcgggcgcccttcaaccgagcactcgtggttccctggttatgcttggaccgtggctcaatgtaaaatctgcgcctcccatatagggtggaaattcaccgcaactaagaaagatatgtccccccagaagttttggggtctgactcgatccgcactccttccgacgatccccgatacagaggacgagatctcacccgacaaggttattctttgtctatag

SEQ ID NO: 68727 - DNA, 1326 bp, Artificial Sequence
  derived and/or modified sequence
atggccggggagggggaccagcaggatgctgcccacaacatgggcaaccacctgcccctgctgcctgagagcgaggaggaggatgagatggaggtggaggaccaggacagcaaggaggccaagaagcccaacatcatcaactttgacaccagcctgcccaccagccacacctacctgggcgctgacatggaggagttccacggccgcaccctgcatgatgatgacagctgccaggtgattcctgtgctgccccaggtgatgatgatcctgatccctggccagaccctgcccctgcagctgttccacccccaggaggtgtccatggtgaggaacctgatccagaaggacaggacctttgctgtgctggcctacagcaatgtgcaggagcgggaggcccagtttggcaccacagctgagatctatgcctaccgggaggagcaggactttggaattgaaattgtgaaggtgaaggccatcggccggcagcgcttcaaggtgctggagctgcggacccagagtgatggcatccagcaggccaaggtgcagatcctgcctgaatgtgtgctgcccagcaccatgtctgctgtgcagctggagagcctgaacaagtgccagatcttccccagcaagcctgtgtcccgggaggaccagtgcagctacaagtggtggcagaagtaccagaagaggaagttccactgtgccaacctgacctcctggccccgctggctgtacagcctgtatgatgctgagaccctgatggaccgcatcaagaagcagctgcgggagtgggatgagaacctgaaggatgacagcctgcccagcaaccccatcgacttctcctacagagtggccgcctgcctgcccattgatgatgtgctgcgcatccagctgctgaagattggcagcgccatccagaggctgcgctgtgagctggacatcatgaacaagtgcaccagcctgtgctgcaagcagtgccaggagacagagatcaccaccaagaatgagatcttcagcctgagcctgtgtggccccatggccgcctacgtgaacccccacggctacgtgcatgagaccctgactgtgtacaaggcctgcaacctgaacctgattggccggcccagcacagagcacagctggttccctggctacgcctggacagtggcccagtgcaagatctgtgccagccacatcggctggaagttcaccgccaccaagaaggacatgagcccccagaagttctggggcctgaccaggtctgccctgctgcccaccatcccagacacagaagatgagatcagcccagacaaggtgatcctgtgcctgtag

SEQ ID NO: 68728 - DNA, 1326 bp, Artificial Sequence
  derived and/or modified sequence
atggccggcgagggcgaccagcaggacgccgcccacaacatgggcaaccatctgcccctcttgcccgagtcggaggaagaggacgagatggaggttgaggaccaagactccaaggaggctaagaaacccaatatcattaatttcgatacctccctccctacctctcatacctatctgggggccgacatggaagagttccatggcaggaccttacatgacgacgactcatgtcaggtcattcctgtgcttccacaagttatgatgatattgattcctggccagacactcccactacaactgttccatccccaagaggttagcatggtccgtaatctgatccagaaagaccgtacctttgctgtcctggcatactcaaatgtacaagaaagagaagcgcaatttggtacgacagcagaaatatatgcctaccgggaagagcaggatttcggcatcgagatcgtgaaagtgaaagccatcggacgccaacggttcaaggtactcgagctcaggacacaaagtgatggaattcagcaggccaaagtgcagattttgcctgaatgtgtcctcccatcaaccatgtctgccgtacagctcgagtccttaaacaagtgccaaatcttcccctctaaacctgtatcacgggaagaccagtgtagctataagtggtggcagaagtaccagaagcgtaaatttcactgtgcgaacttgactagctggccacgttggctttactctctctacgatgctgagactcttatggaccgcataaaaaaacaactaagggagtgggatgagaacctgaaagatgattctctgccaagcaatccgatcgatttcagttacagagtggctgcgtgcctgccaattgatgacgtattgagaatacagttacttaagattgggagtgccattcagcgcctgcgatgcgagctggacattatgaataagtgcacctcactgtgctgtaagcaatgccaggagacagagatcacaaccaagaacgagatattttccctgtctctgtgtggccccatggccgcctacgtgaacccgcatgggtatgtgcacgagactctgactgtttacaaagcttgtaacttaaacctcattggacggccttcaaccgagcacagctggtttccagggtacgcctggactgtagcccagtgcaaaatatgcgcttcccatatcggctggaagttcacagctaccaaaaaagatatgagtccgcaaaagttttggggccttacccggtccgcccttttgccaactatcccagatactgaagacgagatttcccccgacaaggtgatactgtgtctctag

SEQ ID NO: 68729 - DNA, 1326 bp, Artificial Sequence
  derived and/or modified sequence
atggccggagaaggcgaccaacaggacgccgctcataatatgggcaatcatctaccactgctgcccgagtccgaagaggaagacgagatggaggtcgaagaccaggactcaaaggaggcaaagaagccaaacattatcaattttgatacttcactgcccaccagccatacatatctgggagctgacatggaggagttccacggcagaaccctccacgacgatgatagctgtcaggtaatacccgtgctcccacaggtgatgatgatcctgatacccggtcagactctgccactgcagctgtttcacccccaggaagtttccatggtccgcaacctgatccagaaggaccgcacttttgccgtactggcatattccaacgtccaggaaagagaagctcaattcggcactacggcagaaatctatgcttatagggaagaacaggattttggcatcgaaatcgttaaggtgaaggcgatcggacgtcagcgattcaaggtgctcgaactcagaacccagtccgatggcattcagcaggcaaaggtgcaaattctgccagaatgcgtgcttccctcaaccatgtctgctgtgcagctcgagtcactgaataagtgtcagatcttccccagcaagcctgtttcgcgagaggaccagtgctcgtataagtggtggcagaagtaccaaaagaggaaattccactgtgctaatcttacctcctggcccaggtggctgtatagcctctacgacgctgagactctaatggacagaatcaaaaagcaactaagagagtgggatgagaatctcaaggacgacagcctgccctccaatcctattgatttttcttaccgggtggcagcctgcctacccatcgatgacgttcttaggatccaactgctcaaaatcgggagcgctatacagaggctgagatgtgagctggacattatgaacaaatgcactagcctgtgttgcaagcagtgtcaggagactgaaattacaacaaagaacgagatctttagcctgtcattgtgcggcccaatggcagcctacgttaacccacatggctacgttcacgaaacgctcactgtatataaggcctgtaacctgaatttgatcggaaggccaagcacagagcactcctggttcccgggatatgcttggaccgtagcccaatgtaaaatctgtgcaagccatataggatggaagttcaccgctaccaaaaaggatatgagtccccagaaattttggggattgacaaggagtgccttactgccaacaatccctgatactgaagacgagataagccctgacaaagtgatactttgcttgtag

SEQ ID NO: 68730 - DNA, 1468 bp, Artificial Sequence
  derived and/or modified sequence
ctttgcgggtaaacagacatggccggcgaaggagatcagcaggacgctgcgcacaacatgggcaaccacctgccgctcctgcctgtacctaggtgctgatatggaagaatttcatggcaggactttgcacgatgacgacagctgtcaggtgattccagttcttccacaagtgatgatgatcctgattcccggacagacattacctcttcagctttttcaccctcaagaagtcagtatggtgcggaatttaattcagaaagatagaacctttgctgttcttgcatacagcaatgtacaggaaagggaagcacagtttggaacaacagcagagatatatgcctatcgagaagaacaggattttggaattgagatagtgaaagtgaaagcaattggaagacaaaggttcaaagtccttgagctaagaacacagtcagatggaatccagcaagctaaagtgcaaattcttcccgaatgtgtgttgccttcaaccatgtctgcagttcaattagaatccctcaataagtgccagatatttccttcaaaacctgtctcaagagaagaccaatgttcatataaatggtggcagaaataccagaagagaaagtttcattgtgcaaatctaacttcatggcctcgctggctgtattccttatatgatgctgagaccttaatggacagaatcaagaaacagctacgtgaatgggatgaaaatctaaaagatgattctcttccttcaaatttttcttacagagtagctgcttgtcttcctattgatgatgtattgagaattcagctccttaaaattggcagtgctatccagcgacttcgctgtgaattagacattatgaataaatgtacttccctttgctgtaaacaatgtcaagaaacagaaataacaaccaaaaatgaaatattcagtttatccttatgtgggccgatggcagcttatgtgaatcctcatggatatgtgcatgagacacttactgtgtataaggcttgcaacttgaatctgataggccggccttctacagaacacagctggtttcctgggtatgcctggactgttgcccagtgtaagatctgtgcaagccatattggatggaagtttacggccaccaaaaaagacatgtcacctcaaaaattttggggcttaacgcgatctgctctgttgcccacgatcccagacactgaagatgaaataagtccagacaaagtaatactttgcttgtaaacagatgtgatagagataaagttatctaacaaattggttatattctaagatctgctttggaaattattgcctctgatacatacctaagtaaacataacattaatacctaagtaaacataacattacttggagggttgcagtttctaagtgaaactgtatttgaaacttttaagtatactttaggaaacaagcatgaacggcagtctagaataccagaaacatctacttgggtagctt

SEQ ID NO: 68731 - DNA, 2203 bp, Artificial Sequence
  derived and/or modified sequence
gcctcctttgcgggtaaacagacatggccggcgaaggagatcagcaggacgctgcgcacaacatgggcaaccacctgccgctcctgcctgagagtgaggaagaagatgaaatggaagttgaagaccaggatagtaaagaagccaaaaaaccaaacatcataaattttgacaccagtctgccgacatcacatacatacctaggtgctgatatggaagaatttcatggcaggactttgcacgatgacgacagctgtcaggtgattccagttcttccacaagtgatgatgatcctgattcccggacagacattacctcttcagctttttcaccctcaagaagtcagtatggtgcggaatttaattcagaaagatagaacctttgctgttcttgcatacagcaatgtacaggaaagggaagcacagtttggaacaacagcagagatatatgcctatcgagaagaacaggattttggaattgagatagtgaaagtgaaagcaattggaagacaaaggttcaaagtccttgagctaagaacacagtcagatggaatccagcaagctaaagtgcaaattcttcccgaatgtgtgttgccttcaaccatgtctgcagttcaattagaatccctcaataagtgccagatatttccttcaaaacctgtctcaagagaagaccaatgttcatataaatggtggcagaaataccagaagagaaagtttcattgtgcaaatctaacttcatggcctcgctggctgtattccttatatgatgctgagaccttaatggacagaatcaagaaacagctacgtgaatgggatgaaaatctaaaagatgattctcttccttcaaatccaatagatttttcttacagagtagctgcttgtcttcctattgatgatgtattgagaattcagctccttaaaattggcagtgctatccagcgacttcgctgtgaattagacattatgaataaatgtacttccctttgctgtaaacaatgtcaagaaacagaaataacaaccaaaaatgaaatattcagtttatccttatgtgggccgatggcagcttatgtgaatcctcatggatatgtgcatgagacacttactgtgtataaggcttgcaacttgaatctgataggccggccttctacagaacacagctggtttcctgggtatgcctggactgttgcccagtgtaagatctgtgcaagccatattggatggaagtttacggccaccaaaaaagacatgtcacctcaaaaattttggggcttaacgcgatctgctctgttgcccacgatcccagacactgaagatgaaataagtccagacaaagtaatactttgcttgtaaacagatgtgatagagataaagttatctaacaaattggttatattctaagatctgctttggaaattattgcctctgatacatacctaagtaaacataacattaatacctaagtaaacataacattacttggagggttgcagtttctaagtgaaactgtatttgaaacttttaagtatactttaggaaacaagcatgaacggcagtctagaataccagaaacatctacttgggtagcttggtgccattatcctgtggaatctgatatgtctggtagcatgtcattgatgggacatgaagacatctttggaaatgatgagattatttcctgtgttaaaaaaaaaaaaaatcttaaattcctacaatgtgaaactgaaactaataatttgatcctgatgtatgggacagcgtatctgtaccagtgctctaaataacaaaagctagggtgacaagtacatgttccttttggaaagaagcaaggcaatgtatattaattattctaaaagggctttgttcctttccattttctttaacttctctgagatactgatttgtaaattttgaaaattagttaaaatatgcagttttttgagcccacgaatagttgtcatttcctttatgtgcctgttagtaaaaagtagtattgtgtatttgctcagtatctgaactataagcccatttatactgttccatacaaaagctatttttcaaaaattaatttgaaccaaaactactactatagggaaaagatgccaaaacatgtcccctcacccagactaaacttgatactgtattattttgttcaatgtaaattgaagaaaatctgtaagtaagtaaaccttaagtgtgaaactaaa

SEQ ID NO: 68732 - DNA, 1326 bp, Artificial Sequence
  derived and/or modified sequence
atggccggcgagggcgaccagcaggacgccgcccacaacatgggcaaccacctgcccctgctgcccgagagcgaggaggaggacgagatggaggtggaggaccaggacagcaaggaggccaagaagcccaacatcatcaacttcgacaccagcctgcccaccagccacacctacctgggcgccgacatggaggagttccacggcagaaccctgcacgacgacgacagctgccaggtgatccccgtgctgccccaggtgatgatgatcctgatccccggccagaccctgcccctgcagctgttccacccccaggaggtgagcatggtgagaaacctgatccagaaggacagaaccttcgccgtgctggcctacagcaacgtgcaggagagagaggcccagttcggcaccaccgccgagatctacgcctacagagaggagcaggacttcggcatcgagatcgtgaaggtgaaggccatcggcagacagagattcaaggtgctggagctgagaacccagagcgacggcatccagcaggccaaggtgcagatcctgcccgagtgcgtgctgcccagcaccatgagcgccgtgcagctggagagcctgaacaagtgccagatcttccccagcaagcccgtgagcagagaggaccagtgcagctacaagtggtggcagaagtaccagaagagaaagttccactgcgccaacctgaccagctggcccagatggctgtacagcctgtacgacgccgagaccctgatggacagaatcaagaagcagctgagagagtgggacgagaacctgaaggacgacagcctgcccagcaaccccatcgacttcagctacagagtggccgcctgcctgcccatcgacgacgtgctgagaatccagctgctgaagatcggcagcgccatccagagactgagatgcgagctggacatcatgaacaagtgcaccagcctgtgctgcaagcagtgccaggagaccgagatcaccaccaagaacgagatcttcagcctgagcctgtgcggccccatggccgcctacgtgaacccccacggctacgtgcacgagaccctgaccgtgtacaaggcctgcaacctgaacctgatcggcagacccagcaccgagcacagctggttccccggctacgcctggaccgtggcccagtgcaagatctgcgccagccacatcggctggaagttcaccgccaccaagaaggacatgagcccccagaagttctggggcctgaccagaagcgccctgctgcccaccatccccgacaccgaggacgagatcagccccgacaaggtgatcctgtgcctgtag

SEQ ID NO: 68733 - protein, 705 aa, Artificial Sequence
  derived and/or modified sequence
MGFMLPLIFRYSPRLMEKILQMAEGIDIGEMPSYDLVLSKPSKGQKRHLSTCDGQNPPKKQAGSKFHARPRFEPVHFVASSSKDERQEDPYGPQTKEVNEQTHFASMPRDIYQDYTQDSFSIQDGNSQYCDSSGFILTKDQPVTANMYFDSGNPAPSTTSQQANSQSTPEPSPSQTFPESVVAEKQYFIEKLTATIWKNLSNPEMTSGSDKINYTYMLTRCIQACKTNPEYIYAPLKEIPPADIPKNKKLLTDGYACEVRCQNIYLTTGYAGSKNGSRDRATELAVKLLQKRIEVRVVRRKFKHTFGEDLVVCQIGMSSYEFPPALKPPEDLVVLGKDASGQPIFNASAKHWTNFVITENANDAIGILNNSASFNKMSIEYKYEMMPNRTWRCRVFLQDHCLAEGYGTKKTSKHAAADEALKILQKTQPTYPSVKSSQCHTGSSPRGSGKKKDIKDLVVYENSSNPVCTLNDTAQFNRMTVEYVYERMTGLRWKCKVILESEVIAEAVGVKKTVKYEAAGEAVKTLKKTQPTVINNLKKGAVEDVISRNEIQGRSAEEAYKQQIKEDNIGNQLLRKMGWTGGGLGKSGEGIREPISVKEQHKREGLGLDVERVNKIAKRDIEQIIRNYARSESHTDLTFSRELTNDERKQIHQIAQKYGLKSKSHGVGHDRYLVVGRKRRKEDLLDQLKQEGQVGHYELVMPQAN

SEQ ID NO: 68734 - DNA, 3263 bp, Artificial Sequence
  derived and/or modified sequence
ggagcagtggcgctatagccacgaaagtgactggcagtgggctctgcggcgcagcttcatctgtcggcacctgcacagctatcccggggctgccctcgaccagctcctcgcgctctccgccgcctggaccaaccacgtcttcctgggctgcaggtacagcccacgcttgatggaaaaaattctccaaatggctgaaggtattgatattggggagatgccttcatatgatctggtgctgtccaaaccttccaaaggtcaaaaacgccacctctcaacatgtgatggtcaaaatcctcctaaaaagcaagccggttccaaattccatgcgagacctcgttttgagcctgtacattttgtagctagtagttcaaaagatgaaagacaggaagatccttatggccctcaaacaaaagaggtaaatgaacaaacacattttgccagcatgccaagagacatctaccaagattatactcaagactctttcagtatacaagatgggaattctcagtattgtgattcatcaggattcattctcacaaaagaccagcctgtaacagccaacatgtattttgacagtgggaaccctgccccaagcaccacatcacagcaggcaaactctcagtcaactcctgagccttcaccatcacagacatttcccgagtctgtggtagccgagaagcagtattttattgaaaaattaacggcgacaatctggaagaacctttctaatccagaaatgacttctggatctgataaaattaattatacatatatgttaactcgttgtattcaggcgtgtaagacaaatcctgagtatatatatgctcctttaaaggaaattcctcctgccgacatccccaaaaataaaaaacttctaactgatggctatgcttgtgaagttagatgccaaaatatctacttaactacaggttatgctggcagcaagaatgggtccagggatcgagctacagagctagctgtaaaactcttgcagaaacgtattgaagttagagttgtccggcggaaattcaagcatacatttggagaggacctcgtggtgtgtcagattggcatgtcctcctatgaatttcctccagctctgaagccaccagaagacctggtggtgctgggtaaagatgcttccgggcagccaatttttaatgcttctgccaaacactggaccaattttgtcattacagaaaatgcaaatgatgcaattggtatccttaacaattctgcctcattcaacaagatgtcaattgaatacaaatatgagatgatgccaaatcgcacatggcgttgtcgagtgtttttacaagatcactgcttagctgaaggttatggaaccaagaaaacaagtaaacatgcagctgccgacgaggctttgaaaattcttcaaaaaacacagcccacttatccatctgtcaaaagttcacaatgccatacaggctcttcacccagaggatctggaaagaagaaagatataaaggatcttgtagtttatgagaattcttcaaatcccgtgtgcacgctgaacgacacagctcagtttaaccgaatgacagttgagtatgtctatgaaaggatgacaggcctccgctggaaatgcaaagtgattctagagagtgaagtaattgcagaagcagttggggtgaagaaaactgtcaaatatgaagctgctggggaagctgtgaaaaccctcaaaaagacccagccaactgtcattaacaacttgaagaaaggagctgttgaagatgtgatttcaagaaatgaaattcagggccgctcagcagaggaggcttacaaacagcaaatcaaagaagataatattggaaatcagctgctgagaaagatgggttggactggtggtggtttaggtaaatctggtgagggcatacgggagcctatctcagtgaaagagcagcataagcgggaagggcttggtctggatgtagagagggtgaataaaattgccaagagagatattgaacagatcatcagaaactacgcccgctccgagagccacacagatttgactttctctagagagctgactaatgatgaacggaagcaaatacatcagattgcccagaagtatggtcttaagagtaagtctcatggggtgggccatgataggtacctagtggtaggtagaaaaagacggaaggaagacctactagatcagctcaaacaggaaggccaagtgggccattacgagcttgttatgcctcaagcaaattgagatcttactaatttattttgtaaatgcctaatgaggcagatttttgaattaaagaaatgctacatgttccggttgcagagtatattcataagatgtctcaccttgttcatttcacatagtggtttattagatattggaacctaaagaattctgtccacttgtattagcttaatccagcagatgatattgtgcagttactgtttgtgtctttgatattgctgtgtccctcagattttagtagtttgacaagcaagaacacatatccaaatggaattttaccctgagaaattatcattttaaagggcatagcacagcaatctgcaacaatatgtaaagttgatattgactacaataaaaatccagtcttaattccagatttactgaaaatgtcagatcattttgtattaatctattttcatctttgtgtgaagccagttatagaatgtttgacaataaattgtgctgtacacgtaaatgtccttaccaactaaatgatgtaaaactttcttaaagtaattttagtgttcatttatttataacttctaccatgtgatttccagactattggaagtgatttactgtatcttgtgatatatgggttttaacaaattctagtcttcacgctgagagagcactacttgagagagcagttgaaagtttcaaaaactttggttcaatctgaagaaaggaagcttgaactgtttgttcttggtgccttgcagagagactcacagcaactctccattatagctttcacacggtttggatgtgcagcacatccaaggcaaccacagctgtggtagagcttggtaaaagactgaagatacattggtgctttgatgaaaaggtcagttggctggtccctctctcaaaaagcttattaagcctgaaaagccaactttgtaacatatttaaaactgctattttcgcttatttctggaatgtaaaaaaaaaaaatgtataaaaagaattagtgtatgcttcctgaataaaaaggagccaaagttgatcagaaaaaaaa

SEQ ID NO: 68735 - DNA, 2118 bp, Artificial Sequence
  derived and/or modified sequence
atggggttcatgttgcccctaatctttaggtattcgcccaggctcatggagaagattctgcagatggcagagggaatcgatatcggagaaatgccctcctatgatttggtcctttcgaaaccctctaagggacagaaaaggcatctgagcacatgtgatggccagaatcctccgaagaagcaggccggctccaaattccacgcacgcccaaggttcgaaccagtgcattttgtagccagctcttccaaagatgagcgccaggaagacccatacggaccacagactaaggaagtaaacgaacagacccacttcgctagcatgccacgggacatttaccaagactacacgcaggattccttctctatccaagacggcaattcacagtattgcgacagctccggcttcattttaaccaaggatcagcccgtcacagcaaacatgtatttcgatagtgggaatccagcaccttctacaactagccagcaggcaaattcgcagtctacacctgagccaagcccctcacagacattcccggaaagcgtggtggccgagaaacaatatttcatcgagaaactcactgctaccatttggaaaaatcttagcaaccctgagatgacatccggtagcgataagattaactacacttacatgctcaccaggtgtatccaggcatgcaagacaaatcccgaatatatttatgcccccctcaaggagattccgccagccgatattccaaaaaacaaaaagctgctcaccgatgggtacgcctgcgaggtgaggtgtcagaacatatacctgaccacgggctatgctggcagcaagaatgggagcagagaccgtgctactgaacttgcagtcaaactgcttcagaaaagaatagaggtgcgagtggtcagaaggaaatttaagcacacctttggggaagacctggtggtatgccagataggcatgtcttcctacgagtttcctcccgcgcttaagccgcccgaagacctggtggttttgggcaaggacgcatctggacagcccatcttcaacgcatcagctaagcattggactaactttgttatcaccgagaacgccaatgatgccatcggcatcttgaataacagcgcctcttttaacaagatgagtatcgagtataagtatgagatgatgcccaacagaacctggaggtgtagggtctttttacaggaccactgcctggctgagggctacggtaccaagaaaaccagtaaacacgccgctgctgacgaggccctaaaaatcttacaaaaaacccagcccacatatcccagtgtgaagtcgagtcaatgtcataccgggtcctcaccccgcggctcggggaagaagaaagacatcaaagacctcgttgtgtacgaaaactcttcaaaccccgtttgtaccctaaacgatacagcccagtttaaccgcatgacagtggagtatgtctatgaaaggatgactggcttgcgatggaaatgcaaagtcattttagaatccgaagtcatagccgaagctgtcggcgtgaagaagaccgtcaaatatgaggccgccggcgaggcagtcaagaccctgaagaagacccagcctactgtgattaataatctgaagaaaggcgccgttgaggatgttattagccgtaacgaaattcagggtaggtcagccgaggaagcttacaagcaacagatcaaagaagacaacattggcaatcagcttcttcgcaagatggggtggactgggggtggactcggaaagagtggcgaagggatccgagagcctatctctgtcaaagagcagcataagagagaaggcctgggcctcgatgtggaacgtgtgaataagatcgctaagcgcgatattgaacagattattagaaattatgcacggtcagagagtcacactgatctgactttttctagagaactcactaacgatgaacgcaaacagatccatcaaatagcccagaagtatgggctgaaaagcaaaagtcatggagtgggacacgatcgctacctagtcgtcggccggaagcggcggaaggaagatctgctcgaccagctgaagcaagagggccaggtgggacactacgagctagtaatgccacaagctaactag

SEQ ID NO: 68736 - DNA, 2118 bp, Artificial Sequence
  derived and/or modified sequence
atgggcttcatgctgcccctcatcttccgctacagcccccggctgatggagaagatcctgcagatggccgagggcatcgacatcggggagatgcccagctatgacctggtgctgagcaagcccagcaagggccagaagaggcacctgagcacctgtgatggccagaacccccccaagaagcaggccggcagcaagttccacgcccggcccaggtttgagcctgtgcactttgtggccagcagcagcaaggatgagcggcaggaggacccctacggcccccagaccaaggaggtgaatgagcagacccactttgcctccatgccccgggacatctaccaggactacacccaggacagcttcagcatccaggacggcaacagccagtactgtgacagcagcggcttcatcctgaccaaggaccagcctgtgacagccaacatgtactttgattctggcaacccagcccccagcaccaccagccagcaggccaacagccagagcaccccagagcccagccccagccagaccttccctgagagcgtggtggccgagaagcagtacttcatcgagaagctgacagccaccatctggaagaacctgagcaaccctgagatgaccagcggcagtgacaagatcaactacacctacatgctgacccgctgcatccaggcctgcaagaccaaccctgagtacatctatgcccccctgaaggagatccccccagctgacatccccaagaacaagaagctgctgacagatggctacgcctgtgaggtgcgctgccagaacatctacctgaccaccggctacgccggcagcaagaatggcagccgggaccgggccacagagctggccgtgaagctgctgcagaagagaattgaggtgcgggtggtgcggaggaagttcaagcacaccttcggggaggacctggtggtgtgccagatcggcatgagcagctatgagttccccccagccctgaagcccccagaggacctggtggtgctgggcaaggatgccagcggccagcccatcttcaatgccagcgccaagcactggaccaactttgtgatcacagaaaatgccaatgatgccatcggcatcctgaacaacagcgccagcttcaacaagatgagcattgagtacaagtatgagatgatgcccaacagaacctggcgctgcagggtcttcctgcaggaccactgcctggccgagggctacggcaccaagaagaccagcaagcatgctgctgctgatgaggccctgaagatcctgcagaagacccagcccacctaccccagcgtgaagagcagccagtgccacacaggcagcagcccccggggcagcggcaagaagaaggacatcaaggacctggtggtgtatgagaacagcagcaaccctgtgtgcaccctgaatgacacagcccagttcaacaggatgacagtggagtatgtgtatgaaagaatgacaggcctgcgctggaagtgcaaggtgatcctggagagcgaggtgattgctgaggccgtgggcgtgaagaagacagtgaagtatgaggccgccggggaggccgtgaagaccctgaagaagacccagcccaccgtcatcaacaacctgaagaagggagctgtggaggatgtgatcagcagaaatgagatccagggccgctctgctgaggaggcctacaagcagcagatcaaggaggacaacatcggcaaccagctgctgaggaagatgggctggacaggaggcggcctgggcaagtctggagagggcatccgggagcccatctctgtgaaggagcagcacaagcgggagggcctgggcctggatgtggagcgggtgaacaagatcgccaagagggacatcgagcagatcatccggaactatgcccggtctgagagccacacagacctgaccttcagccgggagctgaccaatgatgagaggaagcagatccaccagatcgcccagaagtatggcctgaagagcaagagccatggagtgggccatgaccgctacctggtggtgggcaggaagaggaggaaggaggacctgctggaccagctgaagcaggagggccaggtgggccactatgagctggtgatgccccaggccaactag

SEQ ID NO: 68737 - DNA, 2118 bp, Artificial Sequence
  derived and/or modified sequence
atgggcttcatgctgcccctgatcttccggtacagcccccggctgatggagaagattctgcagatggcagagggcattgacatcggagagatgccatcatacgatcttgtgttaagcaagccgtctaagggtcagaaacggcacttaagcacctgtgacggccagaatccccctaagaagcaggccggctcaaagttccatgctcgtcctcggttcgaacctgtgcatttcgtagcttcttcatcaaaagatgaacggcaggaagatccttacggtcctcagaccaaggaggtcaatgagcagacgcactttgcgtctatgcccagagacatctaccaggattatacacaggattccttctctatccaagatggtaacagtcagtattgcgactcctccggcttcattctgacaaaagatcagcccgtcactgccaacatgtacttcgacagtggaaacccggcacctagcacaacgtcgcagcaggccaactcacagtcgactcccgaaccatccccatcccagacatttcctgaatctgtggtagctgagaagcaatactttatcgaaaagttgaccgctacaatttggaagaatctcagcaatcctgaaatgacgtccggatcagacaagatcaactacacatacatgctgacacggtgcatccaggcctgcaaaacaaatccagaatacatttacgcccctctgaaagagataccccccgcagatatccccaaaaacaagaaactgctgaccgacggctacgcctgcgaggtccggtgtcagaacatctatttgactacaggttatgccggtagcaagaacggatctagagacagagctacagaattggccgtgaaactgctgcaaaaaagaatagaagtgcgcgttgttcggcggaagttcaaacacacttttggcgaggacctggtagtctgtcagattgggatgtcttcctacgaattcccccccgcgcttaaacccccggaggacctggtcgtactgggcaaagacgctagcggccagcctatatttaacgcttcggccaagcactggacaaatttcgtgattactgagaatgcgaatgatgccatcggaatcttaaataattctgcatccttcaataagatgtctattgagtataaatatgaaatgatgcctaaccggacatggcggtgcagagtgttcctgcaggatcactgtctcgcagagggatacgggacaaaaaaaaccagtaaacatgctgccgctgacgaggccctgaagattttgcagaaaacccagcctacctatccctctgttaaaagcagccagtgtcacaccggctcatccccccggggaagcgggaagaagaaggatattaaggatctggtcgtgtatgagaacagctccaatcccgtgtgtactctcaacgataccgctcagttcaaccgcatgacggtggaatatgtgtacgagagaatgactggattgcgatggaagtgtaaagtgatcctcgaatcagaagttattgcggaagcagttggcgtgaagaagacagtgaaatacgaggccgccggcgaagctgtcaagaccttgaaaaaaactcaacctaccgtgattaacaatctgaagaagggagctgtggaagacgtcatcagccgcaatgagatccaagggcgctccgcagaagaagcatacaagcagcaaatcaaggaggataatatcggcaaccagctgctcagaaagatgggctggaccggcgggggcctcgggaagtctggcgagggcatcagagagcccatcagtgtgaaggagcagcataaacgggaagggctgggactggatgtcgagcgcgtgaataagattgccaagagggacattgagcagatcatccggaactacgcccgcagcgaaagtcacaccgacctaactttcagtcgggagctcactaacgacgaacgcaagcaaattcatcagatcgcccagaagtacggactcaagtcaaagtcccatggggtgggacacgaccgttatttggtcgtggggcggaagagaagaaaggaagatctcctggaccagctgaagcaggaagggcaggtgggccactacgaacttgtcatgccccaggccaactag

SEQ ID NO: 68738 - DNA, 3269 bp, Artificial Sequence
  derived and/or modified sequence
cgagccagtgctggagcagtggcgctatagccacgaaagtgactggcagtgggctctgcggcgcagcttcatctgtcggcacctgcacagctatcccggggctgccctcgaccagctcctcgcgctctccgccgcctggaccaaccacgtcttcctgggctgcaggtacagcccacgcttgatggaaaaaattctccaaatggctgaaggtattgatattggggagatgccttcatatgatctggtgctgtccaaaccttccaaaggtcaaaaacgccacctctcaacatgtgatggtcaaaatcctcctaaaaagcaagccggttccaaattccatgcgagacctcgttttgagcctgtacattttgtagctagtagttcaaaagatgaaagacaggaagatccttatggccctcaaacaaaagaggtaaatgaacaaacacattttgccagcatgccaagagacatctaccaagattatactcaagactctttcagtatacaagatgggaattctcagtattgtgattcatcaggattcattctcacaaaagaccagcctgtaacagccaacatgtattttgacagtgggaaccctgccccaagcaccacatcacagcaggcaaactctcagtcaactcctgagccttcaccatcacagacatttcccgagtctgtggtagccgagaagcagtattttattgaaaaattaacggcgacaatctggaagaacctttctaatccagaaatgacttctggatctgataaaattaattatacatatatgttaactcgttgtattcaggcgtgtaagacaaatcctgagtatatatatgctcctttaaaggaaattcctcctgccgacatccccaaaaataaaaaacttctaactgatggctatgcttgtgaagttagatgccaaaatatctacttaactacaggttatgctggcagcaagaatgggtccagggatcgagctacagagctagctgtaaaactcttgcagaaacgtattgaagttagagttgtccggcggaaattcaagcatacatttggagaggacctcgtggtgtgtcagattggcatgtcctcctatgaatttcctccagctctgaagccaccagaagacctggtggtgctgggtaaagatgcttccgggcagccaatttttaatgcttctgccaaacactggaccaattttgtcattacagaaaatgcaaatgatgcaattggtatccttaacaattctgcctcattcaacaagatgtcaattgaatacaaatatgagatgatgccaaatcgcacatggcgttgtcgagtgtttttacaagatcactgcttagctgaaggttatggaaccaagaaaacaagtaaacatgcagctgccgacgaggctttgaaaattcttcaaaaaacacagcccacttatccatctgtcaaaagttcacaatgccatacaggctcttcacccagaggatctggaaagaagaaagatataaaggatcttgtagtttatgagaattcttcaaatcccgtgtgcacgctgaacgacacagctcagtttaaccgaatgacagttgagtatgtctatgaaaggatgacaggcctccgctggaaatgcaaagtgattctagagagtgaagtaattgcagaagcagttggggtgaagaaaactgtcaaatatgaagctgctggggaagctgtgaaaaccctcaaaaagacccagccaactgtcattaacaacttgaagaaaggagctgttgaagatgtgatttcaagaaatgaaattcagggccgctcagcagaggaggcttacaaacagcaaatcaaagaagataatattggaaatcagctgctgagaaagatgggttggactggtggtggtttaggtaaatctggtgagggcatacgggagcctatctcagtgaaagagcagcataagcgggaagggcttggtctggatgtagagagggtgaataaaattgccaagagagatattgaacagatcatcagaaactacgcccgctccgagagccacacagatttgactttctctagagagctgactaatgatgaacggaagcaaatacatcagattgcccagaagtatggtcttaagagtaagtctcatggggtgggccatgataggtacctagtggtaggtagaaaaagacggaaggaagacctactagatcagctcaaacaggaaggccaagtgggccattacgagcttgttatgcctcaagcaaattgagatcttactaatttattttgtaaatgcctaatgaggcagatttttgaattaaagaaatgctacatgttccggttgcagagtatattcataagatgtctcaccttgttcatttcacatagtggtttattagatattggaacctaaagaattctgtccacttgtattagcttaatccagcagatgatattgtgcagttactgtttgtgtctttgatattgctgtgtccctcagattttagtagtttgacaagcaagaacacatatccaaatggaattttaccctgagaaattatcattttaaagggcatagcacagcaatctgcaacaatatgtaaagttgatattgactacaataaaaatccagtcttaattccagatttactgaaaatgtcagatcattttgtattaatctattttcatctttgtgtgaagccagttatagaatgtttgacaataaattgtgctgtacacgtaaatgtccttaccaactaaatgatgtaaaactttcttaaagtaattttagtgttcatttatttataacttctaccatgtgatttccagactattggaagtgatttactgtatcttgtgatatatgggttttaacaaattctagtcttcacgctgagagagcactacttgagagagcagttgaaagtttcaaaaactttggttcaatctgaagaaaggaagcttgaactgtttgttcttggtgccttgcagagagactcacagcaactctccattatagctttcacacggtttggatgtgcagcacatccaaggcaaccacagctgtggtagagcttggtaaaagactgaagatacattggtgctttgatgaaaaggtcagttggctggtccctctctcaaaaagcttattaagcctgaaaagccaactttgtaacatatttaaaactgctattttcgcttatttctggaatgtaaaaaaaaaaaatgtataaaaagaattagtgtatgcttcctgaataaaaaggagccaaagttgatcagaa

SEQ ID NO: 68739 - DNA, 3741 bp, Artificial Sequence
  derived and/or modified sequence
cagaataatgacatggttccttccatcctccaaaggtgaccaataatagtttgtaagtatcattatgaactaatgaattttcaacatatttgatatatttcaatccattgccatcattgttcttatcgatatttgagttggctcactttgccagtaagagtctattcaaattggcttctgagtccatttgacacaacacctttgatctttgacagtttccttggttttaggtgctagatgatttctcaggctcaccttagacatttcctgccacagacttagaatcagccatttctctaaggaccctgattccatttcatgagaaatgatagagaccacaatcaaaacaagtcatgaatttatactgatattttcaattcaaattaaagatgaggtttttgctaaatttttttgagtttatatttgtatgtcttatgctgaaaaatcttgtttcctaattagtaacataattattcatttgatgggtaaatattttagggccgattctttggttttatagccaagataccctgttgataaagtcttgtgggagcaattataagactggcttattttgaagctttttaaaaaagacatccttacctgttttaactgtagattatattaacttaaataggtacagcccacgcttgatggaaaaaattctccaaatggctgaaggtattgatattggggagatgccttcatatgatctggtgctgtccaaaccttccaaaggtcaaaaacgccacctctcaacatgtgatggtcaaaatcctcctaaaaagcaagccggttccaaattccatgcgagacctcgttttgagcctgtacattttgtagctagtagttcaaaagatgaaagacaggaagatccttatggccctcaaacaaaagaggtaaatgaacaaacacattttgccagcatgccaagagacatctaccaagattatactcaagactctttcagtatacaagatgggaattctcagtattgtgattcatcaggattcattctcacaaaagaccagcctgtaacagccaacatgtattttgacagtgggaaccctgccccaagcaccacatcacagcaggcaaactctcagtcaactcctgagccttcaccatcacagacatttcccgagtctgtggtagccgagaagcagtattttattgaaaaattaacggcgacaatctggaagaacctttctaatccagaaatgacttctggatctgataaaattaattatacatatatgttaactcgttgtattcaggcgtgtaagacaaatcctgagtatatatatgctcctttaaaggaaattcctcctgccgacatccccaaaaataaaaaacttctaactgatggctatgcttgtgaagttagatgccaaaatatctacttaactacaggttatgctggcagcaagaatgggtccagggatcgagctacagagctagctgtaaaactcttgcagaaacgtattgaagttagagttgtccggcggaaattcaagcatacatttggagaggacctcgtggtgtgtcagattggcatgtcctcctatgaatttcctccagctctgaagccaccagaagacctggtggtgctgggtaaagatgcttccgggcagccaatttttaatgcttctgccaaacactggaccaattttgtcattacagaaaatgcaaatgatgcaattggtatccttaacaattctgcctcattcaacaagatgtcaattgaatacaaatatgagatgatgccaaatcgcacatggcgttgtcgagtgtttttacaagatcactgcttagctgaaggttatggaaccaagaaaacaagtaaacatgcagctgccgacgaggctttgaaaattcttcaaaaaacacagcccacttatccatctgtcaaaagttcacaatgccatacaggctcttcacccagaggatctggaaagaagaaagatataaaggatcttgtagtttatgagaattcttcaaatcccgtgtgcacgctgaacgacacagctcagtttaaccgaatgacagttgagtatgtctatgaaaggatgacaggcctccgctggaaatgcaaagtgattctagagagtgaagtaattgcagaagcagttggggtgaagaaaactgtcaaatatgaagctgctggggaagctgtgaaaaccctcaaaaagacccagccaactgtcattaacaacttgaagaaaggagctgttgaagatgtgatttcaagaaatgaaattcagggccgctcagcagaggaggcttacaaacagcaaatcaaagaagataatattggaaatcagctgctgagaaagatgggttggactggtggtggtttaggtaaatctggtgagggcatacgggagcctatctcagtgaaagagcagcataagcgggaagggcttggtctggatgtagagagggtgaataaaattgccaagagagatattgaacagatcatcagaaactacgcccgctccgagagccacacagatttgactttctctagagagctgactaatgatgaacggaagcaaatacatcagattgcccagaagtatggtcttaagagtaagtctcatggggtgggccatgataggtacctagtggtaggtagaaaaagacggaaggaagacctactagatcagctcaaacaggaaggccaagtgggccattacgagcttgttatgcctcaagcaaattgagatcttactaatttattttgtaaatgcctaatgaggcagatttttgaattaaagaaatgctacatgttccggttgcagagtatattcataagatgtctcaccttgttcatttcacatagtggtttattagatattggaacctaaagaattctgtccacttgtattagcttaatccagcagatgatattgtgcagttactgtttgtgtctttgatattgctgtgtccctcagattttagtagtttgacaagcaagaacacatatccaaatggaattttaccctgagaaattatcattttaaagggcatagcacagcaatctgcaacaatatgtaaagttgatattgactacaataaaaatccagtcttaattccagatttactgaaaatgtcagatcattttgtattaatctattttcatctttgtgtgaagccagttatagaatgtttgacaataaattgtgctgtacacgtaaatgtccttaccaactaaatgatgtaaaactttcttaaagtaattttagtgttcatttatttataacttctaccatgtgatttccagactattggaagtgatttactgtatcttgtgatatatgggttttaacaaattctagtcttcacgctgagagagcactacttgagagagcagttgaaagtttcaaaaactttggttcaatctgaagaaaggaagcttgaactgtttgttcttggtgccttgcagagagactcacagcaactctccattatagctttcacacggtttggatgtgcagcacatccaaggcaaccacagctgtggtagagcttggtaaaagactgaagatacattggtgctttgatgaaaaggtcagttggctggtccctctctcaaaaagcttattaagcctgaaaagccaactttgtaacatatttaaaactgctattttcgcttatttctggaatgtaaaaaaaaaaaatgtataaaaagaattagtgtatgcttcctgaataaaaaggagccaaagttgatcagaa

SEQ ID NO: 68740 - DNA, 3351 bp, Artificial Sequence
  derived and/or modified sequence
ggagcagtggcgctatagccacgaaagtgactggcagtgggctctgcggcgcagcttcatctgtcggcacctgcacagctatcccggggctgccctcgaccagctcctcgcgctctccgccgcctggaccaaccacgtcttcctgggctgcagcttccatatagaagaaagggaagggccaatgaagactcttggaagctagggaccaagtgcagtctttagatgggctttatgttacctctcatcttcaggtacagcccacgcttgatggaaaaaattctccaaatggctgaaggtattgatattggggagatgccttcatatgatctggtgctgtccaaaccttccaaaggtcaaaaacgccacctctcaacatgtgatggtcaaaatcctcctaaaaagcaagccggttccaaattccatgcgagacctcgttttgagcctgtacattttgtagctagtagttcaaaagatgaaagacaggaagatccttatggccctcaaacaaaagaggtaaatgaacaaacacattttgccagcatgccaagagacatctaccaagattatactcaagactctttcagtatacaagatgggaattctcagtattgtgattcatcaggattcattctcacaaaagaccagcctgtaacagccaacatgtattttgacagtgggaaccctgccccaagcaccacatcacagcaggcaaactctcagtcaactcctgagccttcaccatcacagacatttcccgagtctgtggtagccgagaagcagtattttattgaaaaattaacggcgacaatctggaagaacctttctaatccagaaatgacttctggatctgataaaattaattatacatatatgttaactcgttgtattcaggcgtgtaagacaaatcctgagtatatatatgctcctttaaaggaaattcctcctgccgacatccccaaaaataaaaaacttctaactgatggctatgcttgtgaagttagatgccaaaatatctacttaactacaggttatgctggcagcaagaatgggtccagggatcgagctacagagctagctgtaaaactcttgcagaaacgtattgaagttagagttgtccggcggaaattcaagcatacatttggagaggacctcgtggtgtgtcagattggcatgtcctcctatgaatttcctccagctctgaagccaccagaagacctggtggtgctgggtaaagatgcttccgggcagccaatttttaatgcttctgccaaacactggaccaattttgtcattacagaaaatgcaaatgatgcaattggtatccttaacaattctgcctcattcaacaagatgtcaattgaatacaaatatgagatgatgccaaatcgcacatggcgttgtcgagtgtttttacaagatcactgcttagctgaaggttatggaaccaagaaaacaagtaaacatgcagctgccgacgaggctttgaaaattcttcaaaaaacacagcccacttatccatctgtcaaaagttcacaatgccatacaggctcttcacccagaggatctggaaagaagaaagatataaaggatcttgtagtttatgagaattcttcaaatcccgtgtgcacgctgaacgacacagctcagtttaaccgaatgacagttgagtatgtctatgaaaggatgacaggcctccgctggaaatgcaaagtgattctagagagtgaagtaattgcagaagcagttggggtgaagaaaactgtcaaatatgaagctgctggggaagctgtgaaaaccctcaaaaagacccagccaactgtcattaacaacttgaagaaaggagctgttgaagatgtgatttcaagaaatgaaattcagggccgctcagcagaggaggcttacaaacagcaaatcaaagaagataatattggaaatcagctgctgagaaagatgggttggactggtggtggtttaggtaaatctggtgagggcatacgggagcctatctcagtgaaagagcagcataagcgggaagggcttggtctggatgtagagagggtgaataaaattgccaagagagatattgaacagatcatcagaaactacgcccgctccgagagccacacagatttgactttctctagagagctgactaatgatgaacggaagcaaatacatcagattgcccagaagtatggtcttaagagtaagtctcatggggtgggccatgataggtacctagtggtaggtagaaaaagacggaaggaagacctactagatcagctcaaacaggaaggccaagtgggccattacgagcttgttatgcctcaagcaaattgagatcttactaatttattttgtaaatgcctaatgaggcagatttttgaattaaagaaatgctacatgttccggttgcagagtatattcataagatgtctcaccttgttcatttcacatagtggtttattagatattggaacctaaagaattctgtccacttgtattagcttaatccagcagatgatattgtgcagttactgtttgtgtctttgatattgctgtgtccctcagattttagtagtttgacaagcaagaacacatatccaaatggaattttaccctgagaaattatcattttaaagggcatagcacagcaatctgcaacaatatgtaaagttgatattgactacaataaaaatccagtcttaattccagatttactgaaaatgtcagatcattttgtattaatctattttcatctttgtgtgaagccagttatagaatgtttgacaataaattgtgctgtacacgtaaatgtccttaccaactaaatgatgtaaaactttcttaaagtaattttagtgttcatttatttataacttctaccatgtgatttccagactattggaagtgatttactgtatcttgtgatatatgggttttaacaaattctagtcttcacgctgagagagcactacttgagagagcagttgaaagtttcaaaaactttggttcaatctgaagaaaggaagcttgaactgtttgttcttggtgccttgcagagagactcacagcaactctccattatagctttcacacggtttggatgtgcagcacatccaaggcaaccacagctgtggtagagcttggtaaaagactgaagatacattggtgctttgatgaaaaggtcagttggctggtccctctctcaaaaagcttattaagcctgaaaagccaactttgtaacatatttaaaactgctattttcgcttatttctggaatgtaaaaaaaaaaaatgtataaaaagaattagtgtatgcttcctgaataaaaaggagccaaagttgatc

SEQ ID NO: 68741 - DNA, 2118 bp, Artificial Sequence
  derived and/or modified sequence
atgggctttatgctgcccttgatcttccgatattctcccaggcttatggaaaagatcctgcagatggcagaaggcattgatatcggagaaatgccttcatatgacctggtgttatcaaagccctcaaaggggcagaagcgccacctctccacctgcgatgggcagaatcctcctaagaagcaggcagggtccaagtttcatgccagaccaagatttgagcccgtgcactttgtagccagctctagtaaggacgaaaggcaggaagacccatacgggccacagacgaaggaagtcaatgagcagactcatttcgcatcaatgccccgtgatatttatcaagactatactcaggactccttttctattcaggatgggaacagccaatactgtgactctagtggcttcatattgaccaaagaccaacccgtgaccgccaacatgtacttcgacagcggaaaccctgcccctagcacgacatcccagcaagcaaactcacaaagcacaccagaacctagtccatctcaaacgtttcctgaaagcgttgtggccgaaaagcagtattttattgaaaaactgacagccacaatttggaaaaacctttctaaccctgaaatgacgtctggttctgacaagattaattatacctatatgctgacaagatgcatccaggcttgcaagaccaaccctgagtacatatacgcccctctaaaggaaattcctccggctgacatccctaagaacaaaaaactcctgaccgacgggtatgcatgcgaggtgcggtgccagaatatttaccttaccaccggatacgccggtagtaagaatggatccagggatcgcgcaaccgaactggccgtgaagctgctgcagaagcgcatcgaagtgagggtggtgcgtcggaagttcaaacatacattcggcgaagacctcgtggtttgtcaaatcgggatgagtagttatgagttccctcctgcattaaagcctccagaggacttggtggtgctggggaaagacgcatcgggacaacctatctttaatgcatcagccaagcattggactaattttgtgattactgagaatgctaacgacgctatcggtattctaaataactcagcctccttcaacaaaatgtccatcgaatataagtacgaaatgatgcccaatcggacatggagatgcagggttttcctccaggatcactgcctggcagagggctatgggacaaagaagacgtcgaaacatgctgctgccgacgaggcgctcaaaattttacagaagactcaaccaacttatcccagcgtaaagagtagtcagtgtcatacaggaagctcacccaggggatccgggaaaaagaaagacattaaggatttggtggtgtatgagaattcctccaaccccgtctgtactttgaacgacacagcccaattcaatcgaatgaccgtggaatacgtgtacgagaggatgacagggctgcgctggaaatgcaaagttatcttggaatccgaagtgattgccgaggctgtgggcgtcaaaaagaccgtcaagtacgaggccgcaggcgaggccgtgaagactctaaagaagacccagcccacagtgatcaacaatctcaagaagggcgcagtcgaggatgtgatttcccggaatgaaatccaggggcgatctgccgaggaggcatacaagcaacaaatcaaagaagacaatatcggcaatcagctactgagaaagatgggatggaccgggggaggcctggggaagtctggcgaaggcattagagagcccatctccgtgaaggagcagcacaagagagagggactcgggttggacgttgagcgcgtcaataagattgctaagagggacatagaacagatcatcagaaactacgccagatctgagagccacacagatctcactttcagccgcgagttgacaaacgatgaacggaagcagatccatcagatcgcccagaaatatggcctgaagtctaaaagccacggggtgggccacgacagatatctcgtggtggggcgaaagagacgtaaagaggatctgctggaccagttgaaacaggaagggcaagtgggccactatgagctagtcatgccgcaagccaattag

SEQ ID NO: 68742 - DNA, 2118 bp, Artificial Sequence
  derived and/or modified sequence
atgggcttcatgctgcccctgatcttcagatacagccccagactgatggagaagatcctgcagatggccgagggcatcgacatcggcgagatgcccagctacgacctggtgctgagcaagcccagcaagggccagaagagacacctgagcacctgcgacggccagaacccccccaagaagcaggccggcagcaagttccacgccagacccagattcgagcccgtgcacttcgtggccagcagcagcaaggacgagagacaggaggacccctacggcccccagaccaaggaggtgaacgagcagacccacttcgccagcatgcccagagacatctaccaggactacacccaggacagcttcagcatccaggacggcaacagccagtactgcgacagcagcggcttcatcctgaccaaggaccagcccgtgaccgccaacatgtacttcgacagcggcaaccccgcccccagcaccaccagccagcaggccaacagccagagcacccccgagcccagccccagccagaccttccccgagagcgtggtggccgagaagcagtacttcatcgagaagctgaccgccaccatctggaagaacctgagcaaccccgagatgaccagcggcagcgacaagatcaactacacctacatgctgaccagatgcatccaggcctgcaagaccaaccccgagtacatctacgcccccctgaaggagatcccccccgccgacatccccaagaacaagaagctgctgaccgacggctacgcctgcgaggtgagatgccagaacatctacctgaccaccggctacgccggcagcaagaacggcagcagagacagagccaccgagctggccgtgaagctgctgcagaagagaatcgaggtgagagtggtgagaagaaagttcaagcacaccttcggcgaggacctggtggtgtgccagatcggcatgagcagctacgagttcccccccgccctgaagccccccgaggacctggtggtgctgggcaaggacgccagcggccagcccatcttcaacgccagcgccaagcactggaccaacttcgtgatcaccgagaacgccaacgacgccatcggcatcctgaacaacagcgccagcttcaacaagatgagcatcgagtacaagtacgagatgatgcccaacagaacctggagatgcagagtgttcctgcaggaccactgcctggccgagggctacggcaccaagaagaccagcaagcacgccgccgccgacgaggccctgaagatcctgcagaagacccagcccacctaccccagcgtgaagagcagccagtgccacaccggcagcagccccagaggcagcggcaagaagaaggacatcaaggacctggtggtgtacgagaacagcagcaaccccgtgtgcaccctgaacgacaccgcccagttcaacagaatgaccgtggagtacgtgtacgagagaatgaccggcctgagatggaagtgcaaggtgatcctggagagcgaggtgatcgccgaggccgtgggcgtgaagaagaccgtgaagtacgaggccgccggcgaggccgtgaagaccctgaagaagacccagcccaccgtgatcaacaacctgaagaagggcgccgtggaggacgtgatcagcagaaacgagatccagggcagaagcgccgaggaggcctacaagcagcagatcaaggaggacaacatcggcaaccagctgctgagaaagatgggctggaccggcggcggcctgggcaagagcggcgagggcatcagagagcccatcagcgtgaaggagcagcacaagagagagggcctgggcctggacgtggagagagtgaacaagatcgccaagagagacatcgagcagatcatcagaaactacgccagaagcgagagccacaccgacctgaccttcagcagagagctgaccaacgacgagagaaagcagatccaccagatcgcccagaagtacggcctgaagagcaagagccacggcgtgggccacgacagatacctggtggtgggcagaaagagaagaaaggaggacctgctggaccagctgaagcaggagggccaggtgggccactacgagctggtgatgccccaggccaactag

SEQ ID NO: 68743 - protein, 1010 aa, Artificial Sequence
  derived and/or modified sequence
MGAYARASGVCARGCLDSAGPWTMSRALRPPLPPLCFFLLLLAAAGARAGGYETCPTVQPNMLNVHLLPHTHDDVGWLKTVDQYFYGIKNDIQHAGVQYILDSVISALLADPTRRFIYVEIAFFSRWWHQQTNATQEVVRDLVRQGRLEFANGGWVMNDEAATHYGAIVDQMTLGLRFLEDTFGNDGRPRVAWHIDPFGHSREQASLFAQMGFDGFFFGRLDYQDKWVRMQKLEMEQVWRASTSLKPPTADLFTGVLPNGYNPPRNLCWDVLCVDQPLVEDPRSPEYNAKELVDYFLNVATAQGRYYRTNHTVMTMGSDFQYENANMWFKNLDKLIRLVNAQAKGSSVHVLYSTPACYLWELNKANLTWSVKHDDFFPYADGPHQFWTGYFSSRPALKRYERLSYNFLQVCNQLEALVGLAANVGPYGSGDSAPLNEAMAVLQHHDAVSGTSRQHVANDYARQLAAGWGPCEVLLSNALARLRGFKDHFTFCQQLNISICPLSQTAARFQVIVYNPLGRKVNWMVRLPVSEGVFVVKDPNGRTVPSDVVIFPSSDSQAHPPELLFSASLPALGFSTYSVAQVPRWKPQARAPQPIPRRSWSPALTIENEHIRATFDPDTGLLMEIMNMNQQLLLPVRQTFFWYNASIGDNESDQASGAYIFRPNQQKPLPVSRWAQIHLVKTPLVQEVHQNFSAWCSQVVRLYPGQRHLELEWSVGPIPVGDTWGKEVISRFDTPLETKGRFYTDSNGREILERRRDYRPTWKLNQTEPVAGNYYPVNTRIYITDGNMQLTVLTDRSQGGSSLRDGSLELMVHRRLLKDDGRGVSEPLMENGSGAWVRGRHLVLLDTAQAAAAGHRLLAEQEVLAPQVVLAPGGGAAYNLGAPPRTQFSGLRRDLPPSVHLLTLASWGPEMVLLRLEHQFAVGEDSGRNLSAPVTLNLRDLFSTFTITRLQETTLVANQLREAASRLKWTTNTGPTPHQTPYQLDPANITLEPMEIRTFLASVQWKEVDG

SEQ ID NO: 68744 - DNA, 3170 bp, Artificial Sequence
  derived and/or modified sequence
ggccggggaaccccaggaggaagctgctgagccatgggcgcctacgcgcgggcttcgggggtctgcgctcgcggctgcctggactcagcaggcccctggaccatgtcccgcgccctgcggccaccgctcccgcctctctgctttttccttttgttgctggcggctgccggtgctcgggccgggggatacgagacatgccccacagtgcagccgaacatgctgaacgtgcacctgctgcctcacacacatgatgacgtgggctggctcaaaaccgtggaccagtacttttatggaatcaagaatgacatccagcacgccggtgtgcagtacatcctggactcggtcatctctgccttgctggcagatcccacccgtcgcttcatttacgtggagattgccttcttctcccgttggtggcaccagcagacaaatgccacacaggaagtcgtgcgagaccttgtgcgccaggggcgcctggagttcgccaatggtggctgggtgatgaacgatgaggcagccacccactacggtgccatcgtggaccagatgacacttgggctgcgctttctggaggacacatttggcaatgatgggcgaccccgtgtggcctggcacattgaccccttcggccactctcgggagcaggcctcgctgtttgcgcagatgggcttcgacggcttcttctttgggcgccttgattatcaagataagtgggtacggatgcagaagctggagatggagcaggtgtggcgggccagcaccagcctgaagcccccgaccgcggacctcttcactggtgtgcttcccaatggttacaacccgccaaggaatctgtgctgggatgtgctgtgtgtcgatcagccgctggtggaggaccctcgcagccccgagtacaacgccaaggagctggtcgattacttcctaaatgtggccactgcccagggccggtattaccgcaccaaccacactgtgatgaccatgggctcggacttccaatatgagaatgccaacatgtggttcaagaaccttgacaagctcatccggctggtaaatgcgcaggcaaaaggaagcagtgtccatgttctctactccacccccgcttgttacctctgggagctgaacaaggccaacctcacctggtcagtgaaacatgacgacttcttcccttacgcggatggcccccaccagttctggaccggttacttttccagtcggccggccctcaaacgctacgagcgcctcagctacaacttcctgcaggtgtgcaaccagctggaggcgctggtgggcctggcggccaacgtgggaccctatggctccggagacagtgcacccctcaatgaggcgatggctgtgctccagcatcacgacgccgtcagcggcacctcccgccagcacgtggccaacgactacgcgcgccagcttgcggcaggctgggggccttgcgaggttcttctgagcaacgcgctggcgcggctcagaggcttcaaagatcacttcaccttttgccaacagctaaacatcagcatctgcccgctcagccagacggcggcgcgcttccaggtcatcgtttataatcccctggggcggaaggtgaattggatggtacggctgccggtcagcgaaggcgttttcgttgtgaaggaccccaatggcaggacagtgcccagcgatgtggtaatatttcccagctcagacagccaggcgcaccctccggagctgctgttctcagcctcactgcccgccctgggcttcagcacctattcagtagcccaggtgcctcgctggaagccccaggcccgcgcaccacagcccatccccagaagatcctggtcccctgctttaaccatcgaaaatgagcacatccgggcaacgtttgatcctgacacagggctgttgatggagattatgaacatgaatcagcaactcctgctgcctgttcgccagaccttcttctggtacaacgccagtataggtgacaacgaaagtgaccaggcctcaggtgcctacatcttcagacccaaccaacagaaaccgctgcctgtgagccgctgggctcagatccacctggtgaagacacccttggtgcaggaggtgcaccagaacttctcagcttggtgttcccaggtggttcgcctgtacccaggacagcggcacctggagctagagtggtcggtggggccgatacctgtgggcgacacctgggggaaggaggtcatcagccgttttgacacaccgctggagacaaagggacgcttctacacagacagcaatggccgggagatcctggagaggaggcgggattatcgacccacctggaaactgaaccagacggagcccgtggcaggaaactactatccagtcaacacccggatttacatcacggatggaaacatgcagctgactgtgctgactgaccgctcccaggggggcagcagcctgagagatggctcgctggagctcatggtgcaccgaaggctgctgaaggacgatggacgcggagtatcggagccactaatggagaacgggtcgggggcgtgggtgcgagggcgccacctggtgctgctggacacagcccaggctgcagccgccggacaccggctcctggcggagcaggaggtcctggcccctcaggtggtgctggccccgggtggcggcgccgcctacaatctcggggctcctccgcgcacgcagttctcagggctgcgcagggacctgccgccctcggtgcacctgctcacgctggccagctggggccccgaaatggtgctgctgcgcttggagcaccagtttgccgtaggagaggattccggacgtaacctgagcgcccccgttaccttgaacttgagggacctgttctccaccttcaccatcacccgcctgcaggagaccacgctggtggccaaccagctccgcgaggcagcctccaggctcaagtggacaacaaacacaggccccacaccccaccaaactccgtaccagctggacccggccaacatcacgctggaacccatggaaatccgcactttcctggcctcagttcaatggaaggaggtggatggttaggtctgctgggatgggccctccaagcccaagcctcctgctccgggggcagaccagactctgactctcctcttggggctgctgccattaaaacgctactactaaga

SEQ ID NO: 68745 - DNA, 3033 bp, Artificial Sequence
  derived and/or modified sequence
atgggcgcctacgccagagccagcggcgtgtgcgccagaggctgcctggacagcgccggcccctggaccatgagcagagccctgagaccccccctgccccccctgtgcttcttcctgctgctgctggccgccgccggcgccagagccggcggctacgagacctgccccaccgtgcagcccaacatgctgaacgtgcacctgctgccccacacccacgacgacgtgggctggctgaagaccgtggaccagtacttctacggcatcaagaacgacatccagcacgccggcgtgcagtacatcctggacagcgtgatcagcgccctgctggccgaccccaccagaagattcatctacgtggagatcgccttcttcagcagatggtggcaccagcagaccaacgccacccaggaggtggtgagagacctggtgagacagggcagactggagttcgccaacggcggctgggtgatgaacgacgaggccgccacccactacggcgccatcgtggaccagatgaccctgggcctgagattcctggaggacaccttcggcaacgacggcagacccagagtggcctggcacatcgaccccttcggccacagcagagagcaggccagcctgttcgcccagatgggcttcgacggcttcttcttcggcagactggactaccaggacaagtgggtgagaatgcagaagctggagatggagcaggtgtggagagccagcaccagcctgaagccccccaccgccgacctgttcaccggcgtgctgcccaacggctacaacccccccagaaacctgtgctgggacgtgctgtgcgtggaccagcccctggtggaggaccccagaagccccgagtacaacgccaaggagctggtggactacttcctgaacgtggccaccgcccagggcagatactacagaaccaaccacaccgtgatgaccatgggcagcgacttccagtacgagaacgccaacatgtggttcaagaacctggacaagctgatcagactggtgaacgcccaggccaagggcagcagcgtgcacgtgctgtacagcacccccgcctgctacctgtgggagctgaacaaggccaacctgacctggagcgtgaagcacgacgacttcttcccctacgccgacggcccccaccagttctggaccggctacttcagcagcagacccgccctgaagagatacgagagactgagctacaacttcctgcaggtgtgcaaccagctggaggccctggtgggcctggccgccaacgtgggcccctacggcagcggcgacagcgcccccctgaacgaggccatggccgtgctgcagcaccacgacgccgtgagcggcaccagcagacagcacgtggccaacgactacgccagacagctggccgccggctggggcccctgcgaggtgctgctgagcaacgccctggccagactgagaggcttcaaggaccacttcaccttctgccagcagctgaacatcagcatctgccccctgagccagaccgccgccagattccaggtgatcgtgtacaaccccctgggcagaaaggtgaactggatggtgagactgcccgtgagcgagggcgtgttcgtggtgaaggaccccaacggcagaaccgtgcccagcgacgtggtgatcttccccagcagcgacagccaggcccacccccccgagctgctgttcagcgccagcctgcccgccctgggcttcagcacctacagcgtggcccaggtgcccagatggaagccccaggccagagccccccagcccatccccagaagaagctggagccccgccctgaccatcgagaacgagcacatcagagccaccttcgaccccgacaccggcctgctgatggagatcatgaacatgaaccagcagctgctgctgcccgtgagacagaccttcttctggtacaacgccagcatcggcgacaacgagagcgaccaggccagcggcgcctacatcttcagacccaaccagcagaagcccctgcccgtgagcagatgggcccagatccacctggtgaagacccccctggtgcaggaggtgcaccagaacttcagcgcctggtgcagccaggtggtgagactgtaccccggccagagacacctggagctggagtggagcgtgggccccatccccgtgggcgacacctggggcaaggaggtgatcagcagattcgacacccccctggagaccaagggcagattctacaccgacagcaacggcagagagatcctggagagaagaagagactacagacccacctggaagctgaaccagaccgagcccgtggccggcaactactaccccgtgaacaccagaatctacatcaccgacggcaacatgcagctgaccgtgctgaccgacagaagccagggcggcagcagcctgagagacggcagcctggagctgatggtgcacagaagactgctgaaggacgacggcagaggcgtgagcgagcccctgatggagaacggcagcggcgcctgggtgagaggcagacacctggtgctgctggacaccgcccaggccgccgccgccggccacagactgctggccgagcaggaggtgctggccccccaggtggtgctggcccccggcggcggcgccgcctacaacctgggcgccccccccagaacccagttcagcggcctgagaagagacctgccccccagcgtgcacctgctgaccctggccagctggggccccgagatggtgctgctgagactggagcaccagttcgccgtgggcgaggacagcggcagaaacctgagcgcccccgtgaccctgaacctgagagacctgttcagcaccttcaccatcaccagactgcaggagaccaccctggtggccaaccagctgagagaggccgccagcagactgaagtggaccaccaacaccggccccaccccccaccagaccccctaccagctggaccccgccaacatcaccctggagcccatggagatcagaaccttcctggccagcgtgcagtggaaggaggtggacggctag

SEQ ID NO: 68746 - DNA, 3033 bp, Artificial Sequence
  derived and/or modified sequence
atgggcgcctatgccagagcaagcggcgtgtgcgctcgtggctgtctggattctgctgggccttggactatgtcgcgcgccctgaggccaccgctgcctcctttatgtttctttctgcttctgttagctgctgccggcgccagagctgggggctacgagacatgcccgaccgttcagccgaacatgctgaacgtgcatcttctcccccacacccacgatgacgtagggtggttgaaaaccgtggatcaatacttctacggaatcaaaaatgacatccagcatgcgggagtccaatacatcctagattcggtcattagcgccctccttgccgatcccacccgccgcttcatctatgttgagatcgcgttcttctcccgatggtggcaccaacagacgaatgcgactcaagaggttgtcagggatttggtgagacaaggtagacttgagttcgccaacggtggatgggttatgaatgacgaagccgccacccactacggcgccatcgtggaccagatgacgttgggcctgaggttcctggaggatacattcggcaatgatggcagaccccgtgttgcctggcacatcgacccctttggacattcacgagagcaagccagtctattcgctcaaatgggatttgacggatttttttttggtaggcttgactaccaagataaatgggttaggatgcagaagttggaaatggaacaggtctggagggcgagtacatctctgaaaccaccaacagcggatctcttcaccggcgtactgcctaacggatacaaccccccccgaaatctctgttgggacgtgctgtgtgtggaccagcctctagttgaagacccacgctcccccgagtataatgcaaaggagctggttgattacttcctaaacgtggcaaccgcccagggcaggtactaccgcacaaaccacactgttatgaccatgggatcggacttccagtatgaaaacgccaatatgtggtttaagaatctagacaagctaatcagactggtaaatgctcaggccaaaggttccagcgttcatgtgctctactctactcccgcctgttatctctgggaactaaataaagctaatttaacatggtcagtgaagcacgatgatttcttcccctacgccgacggaccacatcagttttggacaggctatttttcaagtcgcccggctctgaagagatatgagagattaagctataacttcctacaggtctgtaatcagctggaggccctggtaggactagctgcaaacgtggggccctatgggtctggggactcggcaccattaaatgaagccatggcagtgctgcaacaccatgatgccgtgtccggcaccagtaggcaacatgtggcaaatgattacgccagacagctggcggctgggtggggcccttgcgaagttttgttgagtaacgccctggcaaggctcagaggctttaaagatcatttcacattttgtcaacagctcaacattagtatttgtccactcagtcagacggctgcccggttccaggtgattgtttacaaccctctgggcaggaaggtcaattggatggtgcggttgccagtgtctgagggtgttttcgtggtcaaagaccccaatggtcggactgtaccaagcgacgttgttatttttccctcgagtgacagtcaagcccatccgccggagctcctcttctctgcaagcttgcctgccctcggcttttcaacctactccgtggcacaggtcccaaggtggaagccccaggcaagggcaccacagccaatcccaagaagaagctggagtccagccctaactatcgaaaatgaacacattagagctacttttgaccccgacacagggctgctcatggaaattatgaacatgaatcagcagctgctgttgcccgtgcggcagaccttcttttggtacaatgcctctatcggcgataacgaatcagaccaagcaagtggtgcctacattttccgacctaaccagcagaagcctctacctgttagccgatgggcccaaattcacctggtgaagacgcctcttgtacaggaggttcaccaaaacttctccgcatggtgttcacaggtagtacggctgtatccgggccagcgccaccttgaattggagtggtcagtgggccctatccctgtgggggacacatggggcaaagaagtcatcagccgttttgacacaccgttagaaacaaagggccgcttctatactgattcaaacgggagagaaatcctcgaacgaaggcgcgactaccgccccacctggaagctgaatcagactgagccagtggctggcaattattatcctgttaatactcgtatatacatcacggacggcaatatgcaattgacagtcctgactgataggtcccaaggagggtcctccctgcgcgatggctcattggagctcatggtgcacagacggttgttgaaagatgacggcagaggagtgtccgagccgctgatggagaacggaagcggcgcctgggtccgtggcagacacctggtactgttggataccgcacaagcagcggctgccggacatcggctactggccgaacaggaggtgttagcacctcaggtggtgttagctcccggcgggggcgcagcgtacaatctgggagctcctccacgtactcagttttcagggctcagacgggatctgcccccatcggtgcatctccttacccttgcatcatggggccctgaaatggttctgctaagactagaacatcagtttgctgtgggcgaggatagcggacggaacctgagtgcccccgtaactctgaacctgagggatcttttttccacctttaccattacaagattgcaagagaccacccttgttgctaatcagttgcgcgaggctgcctctaggctgaagtggacgacaaacaccggccccaccccccatcagacaccataccagctcgaccctgcaaacattacactcgaacccatggaaatccggacattcctggcctctgtccagtggaaagaagtggacgggtag

SEQ ID NO: 68747 - DNA, 3033 bp, Artificial Sequence
  derived and/or modified sequence
atgggcgcctatgcccgggccagcggcgtgtgtgcccggggctgcctggacagcgctggcccctggaccatgagccgggccctgcggccccccctgccccccctgtgcttcttcctgctgctgctggccgctgctggggcccgggccggcggctatgagacctgccccaccgtgcagcccaacatgctgaatgtgcacctgctgccccacacccatgatgatgtgggctggctgaagacagtggaccagtacttctacggcatcaagaatgacatccagcacgccggcgtgcagtacatcctggacagcgtcatcagcgccctgctggccgaccccacccggcgcttcatctacgtggagatcgccttcttcagccgctggtggcaccagcagaccaatgccacccaggaggtggtgcgggacctggtgcggcagggccgcctggagtttgccaacggcggctgggtgatgaatgatgaagctgccacccactatggagccatcgtggaccagatgaccctgggcctgcgcttcctggaggacacctttggaaatgatggccggccccgggtggcctggcacatcgaccccttcggccacagccgggagcaggccagcctgtttgcccagatgggctttgatggcttcttcttcggccgcctggactaccaggacaagtgggtgaggatgcagaagctggagatggagcaggtgtggagggccagcaccagcctgaagcccccaacagctgacctcttcaccggggtgctgcccaacggctacaaccccccaagaaacctgtgctgggatgtgctgtgtgtggaccagcccctggtggaggaccccaggagccctgagtacaatgccaaggagctggtggactacttcctgaatgtggccacagcccagggccgctactaccgcaccaaccacacagtgatgaccatgggcagtgacttccagtatgaaaatgccaacatgtggttcaagaacctggacaagctgatccggctggtgaatgcccaggccaagggcagctctgtgcacgtgctgtacagcaccccagcctgctacctgtgggagctgaacaaggccaacctgacctggagcgtgaagcatgatgacttcttcccctatgcagatggcccccaccagttctggacaggctacttcagcagcaggcctgccctgaagagatatgaaaggctgagctacaacttcctgcaggtgtgcaaccagctggaggccctggtgggcctggccgccaacgtgggcccctacggcagcggggacagcgcccccctgaatgaggccatggctgtgctgcagcaccatgatgctgtgtctggcaccagccggcagcacgtggccaatgactatgcccggcagctggccgccggctggggcccctgtgaggtgctgctgagcaatgccctggcccggctgcggggcttcaaggaccacttcaccttctgccagcagctgaacatcagcatctgccccctgagccagacagctgcccgcttccaggtgattgtgtacaaccccctgggcaggaaggtgaactggatggtgcggctgcctgtgtctgagggcgtgtttgtggtgaaggaccccaacggccgcacagtgcccagtgatgtggtgatcttccccagcagtgacagccaggcccaccccccagagctgctcttcagcgccagcctgcctgccctgggcttcagcacctacagcgtggcccaggtgccccgctggaagccccaggcccgggccccccagcccatccccaggaggtcctggagccctgccctgaccattgaaaatgagcacatccgggccacctttgatcctgacaccggcctgctgatggagatcatgaacatgaaccagcagctgctgctgcctgtgcggcagaccttcttctggtacaatgccagcattggagacaatgaaagtgaccaggccagcggggcctacatcttccggcccaaccagcagaagcccctgcctgtgagccgctgggcccagatccacctggtgaagacccccctggtgcaggaggtgcaccagaacttcagcgcctggtgcagccaggtggtgcggctgtacccaggccagaggcacctggagctggagtggagcgtgggccccatccctgtgggggacacctggggcaaggaggtgatcagcagatttgacacccccctggagaccaagggccgcttctacacagacagcaatggccgggagatcctggagaggagaagagactaccggcccacctggaagctgaaccagacagagcctgtggccggcaactactaccctgtgaacacccgcatctacatcacagatggcaacatgcagctgactgtgctgacagacaggagccagggcggcagcagcctgagagatggcagcctggagctgatggtgcaccggcggctgctgaaggatgatggccggggcgtgtctgagcccctgatggagaatggaagtggggcctgggtgcggggccgccacctggtgctgctggacacagcccaggccgctgctgctggccaccggctgctggccgagcaggaggtgctggccccccaggtggtgctggcccctgggggcggggccgcctacaacctgggcgccccacccaggacccagttcagcggcctgcggcgggacctgccccccagcgtgcacctgctgaccctggcctcctggggccctgagatggtgctgctgcggctggagcaccagtttgctgtgggggaggacagcggcaggaacctgagcgcccctgtgaccctgaacctgcgggacctcttcagcaccttcaccatcacccggctgcaggagaccaccctggtggccaaccagctgcgggaggccgccagccggctgaagtggaccaccaacacaggccccaccccccaccagaccccctaccagctggaccctgccaacatcaccctggagcccatggagatccgcaccttcctggcctctgtgcagtggaaggaggtggatggatag

SEQ ID NO: 68748 - DNA, 3033 bp, Artificial Sequence
  derived and/or modified sequence
atgggcgcctacgcccgggccagcggcgtgtgcgcccggggctgcttagactccgcgggaccatggaccatgagtagagcactgcgacctcccctacctcctctatgtttctttcttctccttctcgccgcggctggtgctcgggccggcgggtacgagacatgcccgaccgtgcagcctaatatgctgaatgtacacctgctcccacatacccacgacgacgtgggatggctcaaaaccgttgaccaatacttctatggcatcaagaacgatatccaacacgctggtgtccaatacattctcgattctgtgatctcggccttgctggccgaccctacacgcaggttcatctacgtggaaatcgccttcttctcccggtggtggcaccaacagacgaatgccacgcaggaggtggtgcgggatctcgtgcgacagggccggttggagtttgccaacggaggttgggtcatgaatgacgaagccgcaactcactacggcgccatcgtcgaccagatgactctgggcctgagattcctggaagacacatttgggaacgatggcagaccaagggtagcatggcatatcgaccctttcggtcatagtagagaacaagcatcactcttcgctcagatgggttttgatggttttttcttcggccgcttggactatcaggacaagtgggttcgcatgcagaaattggaaatggagcaagtatggagagcctcaacctcattgaaacccccgactgctgacctgtttaccggcgtcttgccaaacggttataacccaccacgtaacctttgctgggacgtcctgtgtgtcgaccaacctctcgtagaagatcctcggtcaccggaatacaatgccaaagagcttgtggactacttcctgaacgtggccactgcccaaggacggtactacaggactaaccatactgtgatgactatgggtagcgatttccagtacgagaacgcaaacatgtggttcaaaaacctggacaagctgatccggctcgtcaatgctcaggccaaagggtcctctgtccacgttctgtatagtacccccgcttgctacttatgggaactgaataaggcgaacctgacttggtcagttaagcacgatgactttttcccttatgccgacggcccgcaccagttctggactggctacttcagtagcaggcccgcgcttaagcggtatgagagactgagttataactttttacaagtctgtaaccaactcgaggccttggtcggattggccgccaatgtcggaccttacggaagtggtgattccgcacccctgaatgaggccatggccgttcttcagcaccacgacgcggtgtccgggacgtccaggcagcatgtggcaaatgattacgcgcgccaactggcagccggctgggggccttgtgaggtcttattatccaacgcactggctagacttaggggcttcaaggatcacttcactttctgtcaacagcttaatatctcaatatgtcctttgtctcagaccgccgctcgcttccaggtgatcgtgtataatcctctaggacgtaaggtcaattggatggtacgactccctgtgagcgaaggagtgtttgttgtgaaagatcccaacggccggaccgtgccgtccgatgtagtgatttttccttcctctgactcgcaggcccatccccccgagctcctgtttagtgcctccttgcccgccttagggtttagtacctacagtgtcgcccaggtcccaagatggaagcctcaggctagggccccacaacccattccacgacggtcctggagcccagccctgactatagaaaatgaacatatccgggctacgttcgaccctgacaccggcctactgatggagattatgaacatgaaccaacaactgctgctgcctgtacgacaaacgttcttctggtataacgcctcaatcggagataatgaaagtgaccaggctagtggcgcttacatttttcgccccaatcaacaaaaacctctgcctgtgtctcggtgggcccaaatacacctggtcaaaactccattggtgcaggaggtgcaccaaaatttctccgcctggtgtagtcaggtggtcagattgtaccctggccagcggcacctggagctggaatggtccgtcgggcccataccagtcggggatacgtggggcaaggaggtgatctccaggttcgacaccccactggaaacaaaaggccggttctacaccgactccaacggaagagagatcctggaacgccggcgagactaccgcccgacctggaagcttaatcaaacagaaccagtcgccggaaattattacccagttaatacacgaatatacatcacagatgggaatatgcagctcacagttttgaccgaccgcagtcagggggggtctagcctgcgtgacggtagcctcgaactgatggttcacagaagactgttaaaggacgacgggagaggggtcagcgagccacttatggaaaatggatcaggggcatgggtgaggggccgccacctagttttgctggacacagcacaggctgcagccgctggccataggctgctcgccgaacaggaggtgcttgcaccacaggtggttttagctccaggcggcggcgctgcatacaatctgggggccccacctcggactcagtttagcggactgcggcgagacctcccccctagtgtacacctcctgacgcttgcaagctggggaccagagatggtgcttttgcgactcgaacatcagtttgctgtcggtgaggattcaggcaggaatttgtcagcccccgtgaccctgaacctgcgggacctgttcagcacgtttaccattaccaggctgcaagagaccactttggtggcgaaccagctccgggaggccgcctcgcgcctaaagtggacaaccaatactgggccgacgcctcatcagaccccgtatcagctggaccccgcgaacatcacattggaaccaatggagataaggacatttttagcgagcgttcagtggaaggaagtggatggatag

SEQ ID NO: 68749 - DNA, 3033 bp, Artificial Sequence
  derived and/or modified sequence
atgggagcctacgcacgcgctagcggggtgtgtgccagaggttgtctggactccgccggtccatggactatgtccagggccctgcgcccacccctgcctcccctgtgcttttttctgctactgcttgccgctgcgggagccagggccggtgggtatgagacttgcccaaccgttcaaccaaatatgttgaatgtgcacctcctgcctcatactcatgatgacgttggctggttgaagaccgtggaccagtatttctacggcattaagaatgatatccagcacgctggggtgcagtatattctcgactctgtgatttccgctctactggcagacccaaccagaaggtttatctatgtagagatcgccttcttctcacgctggtggcaccagcagacaaatgcgacgcaggaagtggtgagagatcttgtgagacaggggcgtttggagttcgccaatggcggttgggtaatgaacgatgaagccgcaactcactacggagccatcgtcgatcagatgacactaggccttaggtttctggaagacactttcggcaacgacggtcggcctagggtggcctggcatatagatccctttggccatagcagggaacaagctagtctgtttgcccagatgggcttcgatgggtttttcttcggaagactggactaccaagacaaatgggttcgcatgcaaaaattggagatggagcaagtgtggagggccagcacaagcctcaagccacctaccgccgatctgttcaccggcgtgcttccaaatggatacaacccccctagaaacctgtgttgggacgtgctctgcgttgatcagccactcgtggaggaccctcgtagtccagaatacaatgcgaaggaactcgtggattacttcctgaatgtcgctacagcgcaaggacgctactaccggaccaatcatacagttatgacgatggggagcgatttccagtatgagaacgccaacatgtggtttaagaatctcgataaattgattcggctggttaacgcccaagccaagggttccagtgtccatgtgttgtacagcacacctgcctgctacttatgggaattgaacaaggccaacctgacctggtcggtgaaacatgatgattttttcccctacgctgacgggccacatcagttctggacgggatacttctctagtcgccctgccctgaaacggtacgagaggctgagttataattttttacaagtgtgtaaccagttggaggcactggttgggttggccgcaaatgtgggaccctatgggtccggggactcagccccactcaacgaggctatggccgtactgcagcatcatgacgctgtaagcggcacaagtagacagcacgtggctaatgactatgcgagacaactcgcggcaggctggggtccctgcgaggtactgctgagcaacgctctcgctcgactgcgcggtttcaaagatcattttacgttctgccagcagctcaatatctcaatctgtccgttgtctcaaacagcggcaagattccaggtcatcgtttacaatcccctggggagaaaagttaactggatggtccgactgcctgtctcagaaggcgttttcgttgtgaaggacccaaatgggaggaccgtgcctagtgacgtggtcatcttcccttccagtgattcccaagctcacccccctgaacttctgttttccgcttctcttcctgcactggggtttagcacatattctgtggcacaggtccctcgctggaaaccacaagcaagagccccacagccaatcccacgtagaagctggtctccggctctcaccattgaaaatgagcatatcagagcaacctttgatcctgataccggacttctcatggagatcatgaacatgaaccagcaactgctgttgccagtgaggcagacattcttctggtataacgcctccattggagacaacgagagcgaccaggcttccggcgcatacatttttcgacctaatcagcagaaacctctgccagtgtctcggtgggcccagatccatctggtgaaaacaccacttgtgcaggaagtacaccagaatttctccgcctggtgctcacaagtggtgcgcctgtatcccggacaacggcatctggaactcgaatggagcgtcgggccaattcccgtgggagacacttggggtaaggaggttattagcagattcgatacacccctagagaccaagggccgtttctatacggactctaacggccgtgagatcctggaaagacggagagattatcgacccacctggaaactcaaccagactgaaccagtggctgggaactattaccccgtcaatacaaggatttacattacagatggaaacatgcagctcaccgtcctgaccgaccgctcccaggggggatcctctctgcgagatggctcgttggagttaatggtgcacagacgattgctgaaggacgatggtaggggtgtgagtgagccacttatggagaacggaagcggagcatgggttagaggccgacatttggttctcctggatacagctcaggccgctgctgcaggccaccggctgctcgcagagcaagaggtcctcgcaccccaagtcgtcctggcgcctgggggtggagccgcatataatttgggcgcaccacccagaacgcagttttccggcctgaggcgtgacctgccaccttccgtgcatctgctgacattggctagttggggacctgaaatggtgttgctgcgattagaacatcagtttgctgtaggagaggactccgggagaaacttgtccgcacccgtgaccttaaacttgagggatttattttctaccttcacaattaccaggcttcaagagacaaccctggtcgccaaccagttgagagaagccgcatcacggctcaaatggactactaatacagggcctactccgcaccagacaccctatcagctggaccccgcaaatatcacgctggaacccatggaaatccgcactttcctcgcgagcgtgcagtggaaggaggtggacggatag

SEQ ID NO: 68750 - protein, 210 aa, Artificial Sequence
  derived and/or modified sequence
MALGLKCFRMVHPTFRNYLAASIRPVSEVTLKTVHERQHGHRQYMAYSAVPVRHFATKKAKGSLDKIAVVTADGKLALNQISQISMKSPQLILVNMASFPECTAAAIKAIRESGMNLNPEVEGTLIRVPIPQVTREHREMLVKLAKQNTNKAKDSLRKVRTNSMNKLKKSKDTVSEDTIRLIEKQISQMADDTVAELDRHLAVKTKELLG

SEQ ID NO: 68751 - DNA, 633 bp, Artificial Sequence
  derived and/or modified sequence
atggccctgggcctgaagtgcttcagaatggtgcaccccaccttcagaaactacctggccgccagcatcagacccgtgagcgaggtgaccctgaagaccgtgcacgagagacagcacggccacagacagtacatggcctacagcgccgtgcccgtgagacacttcgccaccaagaaggccaagggcagcctggacaagatcgccgtggtgaccgccgacggcaagctggccctgaaccagatcagccagatcagcatgaagagcccccagctgatcctggtgaacatggccagcttccccgagtgcaccgccgccgccatcaaggccatcagagagagcggcatgaacctgaaccccgaggtggagggcaccctgatcagagtgcccatcccccaggtgaccagagagcacagagagatgctggtgaagctggccaagcagaacaccaacaaggccaaggacagcctgagaaaggtgagaaccaacagcatgaacaagctgaagaagagcaaggacaccgtgagcgaggacaccatcagactgatcgagaagcagatcagccagatggccgacgacaccgtggccgagctggacagacacctggccgtgaagaccaaggagctgctgggctag

SEQ ID NO: 68752 - DNA, 633 bp, Artificial Sequence
  derived and/or modified sequence
atggcgctgggccttaaatgcttcaggatggtacacccaacattccgcaattacctagccgcttcaattcggcctgtgtccgaggtgacactgaagactgtgcacgaacggcagcacggccaccggcagtatatggcatacagcgccgtccccgtgaggcacttcgcaactaaaaaagccaagggcagccttgacaagatcgccgttgtcacggccgacgggaaactggcattaaaccagatttctcagatatcaatgaagtccccccagctgatcttagtgaacatggccagcttcccggaatgtactgccgctgcaattaaagccatccgcgaatccgggatgaacctgaatccagaggtcgagggcactctgatcagagtccctattccacaggtgacccgggagcaccgcgaaatgctcgtcaagttggctaagcagaacacgaataaggccaaggatagtctgaggaaggtgcgcaccaactccatgaacaaactcaaaaaatccaaagataccgtgagtgaggacacaattcgtcttatagagaaacaaatcagccagatggcagacgacacagtggccgaattagacaggcacctcgccgtgaagaccaaagagctactgggctag

SEQ ID NO: 68753 - DNA, 633 bp, Artificial Sequence
  derived and/or modified sequence
atggccctgggcctgaagtgcttcaggatggtgcaccccaccttcaggaactacctggccgccagcatccggcctgtgtctgaggtgaccctgaagacagtgcatgagcggcagcacggccaccggcagtacatggcctacagcgctgtgcctgtgcgccactttgccaccaagaaggccaagggcagcctggacaagattgctgtggtgacagcagatggcaagctggccctgaaccagatcagccagatctccatgaagagcccccagctgatcctggtgaacatggccagcttcccagaatgtacagctgctgccatcaaggccatccgggagagcggcatgaacctgaaccctgaggtggagggcaccctcatccgggtgcccatcccccaggtgacccgggagcaccgggagatgctggtgaagctggccaagcagaacaccaacaaggccaaggacagcctgaggaaggtgaggaccaacagcatgaacaagctgaagaagagcaaggacacagtgtctgaggacaccatccgcctcatcgagaagcagatcagccagatggctgatgacacagtggccgagctggacagacacctggccgtgaagaccaaggagctgctgggctag

SEQ ID NO: 68754 - DNA, 1841 bp, Artificial Sequence
  derived and/or modified sequence
acaggacaatccggggcggggcctgagatgcagtcctgcgagggcggcctcctgtaagacctcttagcgggcccatcgctgaggtgcagggacatgtcgcggccgaactcacctcgtggcctcggcgtggtgctctcagctcatgcccggaaaccaggtcccgacgccgcggtcagacggacctctagacgcgtccgcctcaatgccgccagctgccaggccgcccgtgacgcgttaagcctgcgccgcctcctggcttcgtgacgtcacgacgtccgcgcagctgcggtcgccgccgtcgcacgagtctttccttagtaacctgggcgatagctgtggatgtttccaaggattgtcttcagtcatggccttgggattaaagtgcttccgcatggtccaccctacctttcgcaattatcttgcagcctctatcagacccgtttcagaagttacactgaagacagtgcatgaaagacaacatggccataggcaatacatggcctattcagctgtaccagtccgccattttgctaccaagaaagccaaaggatcccttgacaagattgctgtggtaactgctgacgggaagcttgctttaaaccagattagccagatctccatgaagtcgccacagctgattttggtgaatatggccagcttcccagagtgtacagctgcagctatcaaggctataagagaaagtggaatgaatctgaacccagaagtggaagggacgctaattcgggtacccattccccaagtaaccagagagcacagagaaatgctggtgaaactggccaaacagaacaccaacaaggccaaagactctttacggaaggttcgcaccaactcaatgaacaagctgaagaaatccaaggatacagtctcagaggacaccattaggctaatagagaaacagatcagccaaatggccgatgacacagtggcagaactggacaggcatctggcagtgaagaccaaagaactccttggatgaaagtccactggggccagcaatactccagagcccagtttctgctggatcccatgggtggcacattgggacttctctccctcccccatctacacagaagactgtcaccatgctgacagaagcctgtccttgtaaggcccagccttccaggggaacactcagacatgttcattctcttcctgcttctgctctgggccggtgggtggctctcagaaaatacttgctgctggcaaaaggcctgtactcaggcatttgctttgacttgatgttgccaagggactgaggccattggcaggcttagtaccacctgctcctcatcttaggagtctccttttcaaataattaggctctgttcccattttaaaactctgatattggccttcacctgtgactggacactttactagaggcccattttcactaaacaataaaatctaaataaattggaaggaataacaaccacaaaggaaagaatagagttggtctggattgatgatcactgaggatctgtatgtgaggcacccataacagtagttttgcctgtgagtcgtcttcacacatgctgttttctctgcctggctctctcttcccctccttacctggccagtcctgtttatcatcaggccttgtcttggatatcacgtcctctgggaagtcttcttttcccctctaacctaggaccctcattaccggctctcatagcacagtctactgctttgtacgaattctaagtattcttgttgcacttaattagcctgtatatcctcagaactttgtgtaatgcctggagcatagtaggcagtcatatgttgtatcgtgaataaattgcacatagtagctacccagc

SEQ ID NO: 68755 - DNA, 633 bp, Artificial Sequence
  derived and/or modified sequence
atggccctgggcctgaagtgcttccggatggtgcaccccaccttccgcaactatttagccgccagtattcgccctgtgagtgaagtgaccctcaagactgtgcatgagagacagcacgggcacaggcagtacatggcttatagcgcagtccccgtccgccacttcgctaccaagaaagctaaaggatcccttgataaaattgctgttgtcacagccgatgggaagctggctctcaatcagatctcgcagatttctatgaaatcgccccagttgattcttgtcaacatggcctcattccccgaatgcactgcagccgctattaaagctataagagaaagtggaatgaacctgaaccctgaggtggagggtacactgatccgcgttcccatcccacaagtcactcgagaacacagagagatgttggtgaagcttgctaaacagaacaccaataaggccaaggactctctgcgaaaagtccgcacgaatagtatgaataaactgaagaaaagtaaggacactgtgtctgaggacaccatccggctcattgaaaaacagatctcccaaatggctgatgacaccgtggccgaactggacaggcacctcgctgtcaaaaccaaggagctcttggggtag

SEQ ID NO: 68756 - DNA, 633 bp, Artificial Sequence
  derived and/or modified sequence
atggccctgggactgaagtgcttccgtatggtccacccgaccttcaggaactaccttgccgctagtattcggccagtgtccgaggtgactctcaagaccgtccatgaacggcagcacggacaccgacaatatatggcctactccgcagttcccgtgcgccacttcgcgactaaaaaagcaaaaggttcactggacaagatcgcggtggttaccgccgacggaaagctggctctcaatcaaatttcgcagatctctatgaagtccccccagctaatcctggtgaacatggcctcttttcctgaatgtaccgcagcagcaatcaaggccatccgggagagcggtatgaatttgaatcccgaagtggagggaacactgattcgggttcctataccacaagtgactagagagcaccgggagatgctggtgaaactggcgaagcagaacactaacaaggctaaagactcactcaggaaagtgcggaccaatagtatgaataagttgaagaagagcaaagacaccgtgtcagaggacactatcagattaattgaaaagcagatctcgcaaatggccgacgatacagttgctgaattggataggcacctcgcagtcaaaacaaaggagctactgggctag

SEQ ID NO: 68757 - protein, 41 aa, Artificial Sequence
  derived and/or modified sequence
GLTKQLLDDTIGIHPTCGEVFTTLEITKSSGLDITQKGCCG

SEQ ID NO: 68758 - protein, 644 aa, Artificial Sequence
  derived and/or modified sequence
VASEGSVRRPSGPVPAPQPPAFRFVSRPGRARSESETLERSPPQSPGPGKAGDAPNRRSGHVRGARVLSPPGRRARLSSPGPSRSSEAREELRRHLVGLIERSRVVIFSKSYCPHSTRVKELFSSLGVECNVLELDQVDDGARVQEVLSEITNQKTVPNIFVNKVHVGGCDQTFQAYQSGLLQKLLQEDLAYDYDLIIIGGGSGGLSCAKEAAILGKKVMVLDFVVPSPQGTSWGLGGTCVNVGCIPKKLMHQAALLGQALCDSRKFGWEYNQQVRHNWETMTKAIQNHISSLNWGYRLSLREKAVAYVNSYGEFVEHHKIKATNKKGQETYYTAAQFVIATGERPRYLGIQGDKEYCITSDDLFSLPYCPGKTLVVGASYVALECAGFLAGFGLDVTVMVRSILLRGFDQEMAEKVGSYMEQHGVKFLRKFIPVMVQQLEKGSPGKLKVLAKSTEGTETIEGVYNTVLLAIGRDSCTRKIGLEKIGVKINEKSGKIPVNDVEQTNVPYVYAVGDILEDKPELTPVAIQSGKLLAQRLFGASLEKIYHTLFWPLEWTVAGRENNTCYAKIICNKFDHDRVIGFHILGPNAGEVTQGFAAAMKCGLTKQLLDDTIGIHPTCGEVFTTLEITKSSGLDITQKGCCG

SEQ ID NO: 68759 - DNA, 126 bp, Artificial Sequence
  derived and/or modified sequence
ggcctgaccaagcagctgctggacgacaccatcggcatccaccccacctgcggcgaggtgttcaccaccctggagatcaccaagagcagcggcctggacatcacccagaagggctgctgaggctag

SEQ ID NO: 68760 - DNA, 1935 bp, Artificial Sequence
  derived and/or modified sequence
gtggccagcgagggcagcgtgagaagacccagcggccccgtgcccgccccccagccccccgccttcagattcgtgagcagacccggcagagccagaagcgagagcgagaccctggagagaagccccccccagagccccggccccggcaaggccggcgacgcccccaacagaagaagcggccacgtgagaggcgccagagtgctgagcccccccggcagaagagccagactgagcagccccggccccagcagaagcagcgaggccagagaggagctgagaagacacctggtgggcctgatcgagagaagcagagtggtgatcttcagcaagagctactgcccccacagcaccagagtgaaggagctgttcagcagcctgggcgtggagtgcaacgtgctggagctggaccaggtggacgacggcgccagagtgcaggaggtgctgagcgagatcaccaaccagaagaccgtgcccaacatcttcgtgaacaaggtgcacgtgggcggctgcgaccagaccttccaggcctaccagagcggcctgctgcagaagctgctgcaggaggacctggcctacgactacgacctgatcatcatcggcggcggcagcggcggcctgagctgcgccaaggaggccgccatcctgggcaagaaggtgatggtgctggacttcgtggtgcccagcccccagggcaccagctggggcctgggcggcacctgcgtgaacgtgggctgcatccccaagaagctgatgcaccaggccgccctgctgggccaggccctgtgcgacagcagaaagttcggctgggagtacaaccagcaggtgagacacaactgggagaccatgaccaaggccatccagaaccacatcagcagcctgaactggggctacagactgagcctgagagagaaggccgtggcctacgtgaacagctacggcgagttcgtggagcaccacaagatcaaggccaccaacaagaagggccaggagacctactacaccgccgcccagttcgtgatcgccaccggcgagagacccagatacctgggcatccagggcgacaaggagtactgcatcaccagcgacgacctgttcagcctgccctactgccccggcaagaccctggtggtgggcgccagctacgtggccctggagtgcgccggcttcctggccggcttcggcctggacgtgaccgtgatggtgagaagcatcctgctgagaggcttcgaccaggagatggccgagaaggtgggcagctacatggagcagcacggcgtgaagttcctgagaaagttcatccccgtgatggtgcagcagctggagaagggcagccccggcaagctgaaggtgctggccaagagcaccgagggcaccgagaccatcgagggcgtgtacaacaccgtgctgctggccatcggcagagacagctgcaccagaaagatcggcctggagaagatcggcgtgaagatcaacgagaagagcggcaagatccccgtgaacgacgtggagcagaccaacgtgccctacgtgtacgccgtgggcgacatcctggaggacaagcccgagctgacccccgtggccatccagagcggcaagctgctggcccagagactgttcggcgccagcctggagaagatctaccacaccctgttctggcccctggagtggaccgtggccggcagagagaacaacacctgctacgccaagatcatctgcaacaagttcgaccacgacagagtgatcggcttccacatcctgggccccaacgccggcgaggtgacccagggcttcgccgccgccatgaagtgcggcctgaccaagcagctgctggacgacaccatcggcatccaccccacctgcggcgaggtgttcaccaccctggagatcaccaagagcagcggcctggacatcacccagaagggctgctgaggctag

SEQ ID NO: 68761 - DNA, 126 bp, Artificial Sequence
  derived and/or modified sequence
ggcttgacaaagcagctcctcgatgacacaattggcattcaccctacctgcggagaagtgtttactaccctggagataaccaagagctcgggactggacatcacccagaagggctgctgagggtag

SEQ ID NO: 68762 - DNA, 1935 bp, Artificial Sequence
  derived and/or modified sequence
gttgccagtgaagggtctgtccgtcgtccctccggccccgtgcctgctccccaaccccctgcttttagattcgtgtctcgccctggacgcgcccggtccgaaagcgaaaccctggagagatcccccccccagtcaccagggcctggtaaagccggtgacgcacctaaccgccggagcggccacgtccgaggagcacgggtgttgtctcccccgggtcggagagctcgattgtccagccccggaccttctaggtcctcagaagctagagaggaactgcgccgccacctcgtcggccttatcgagaggagccgcgtcgtcatattctctaagagctactgtccccattctacaagggttaaggaacttttcagttcacttggggttgagtgcaatgttctggagctggaccaagtggatgatggcgcacgggtgcaagaagtactgagcgagattactaaccagaagaccgtgcccaacattttcgttaacaaggtgcatgttggaggctgcgatcagaccttccaggcatatcagtccggactgttacagaagctgcttcaggaggatctagcgtacgactatgatctgatcattattggaggggggtcaggaggactgtcatgtgccaaagaagcggcaatactgggtaagaaagtgatggtacttgacttcgtcgtcccaagcccccaggggacgagttggggcttgggggggacatgcgtaaacgtgggctgtatacctaaaaagctgatgcaccaggcggcgctcctcgggcaagccctatgcgacagtcgcaagtttggctgggaatataaccagcaggtcaggcataactgggaaacaatgacaaaggcaatccagaaccacattagctctctgaattggggttaccgacttagcctgcgcgagaaagctgtggcgtatgtgaattcgtacggagaattcgtggagcatcacaagataaaggcaacaaataagaaaggccaggaaacgtactataccgccgcccagttcgtcatcgcaaccggagaaaggcccaggtatctcggcattcagggagacaaggaatactgtatcacttccgatgatttattttctcttccctattgcccaggtaagacactcgtggtcggcgcaagctatgtcgctctggaatgtgcgggcttcctggcaggtttcgggctggatgttacagtaatggtgcggtccatcctgctccggggtttcgatcaggagatggctgaaaaggtcgggagctacatggagcagcacggtgtgaagtttctgaggaagtttatccccgtaatggtccagcaacttgagaagggctcacctggcaagctcaaggtgctcgccaagagtacagaaggcaccgagaccattgaaggggtgtataatactgttctgctcgcaattggcagggacagctgtaccaggaagatcgggctggagaagatcggcgttaaaattaacgagaaatcaggaaaaatccctgtcaatgacgtggagcagacaaatgtaccgtacgtgtatgctgtgggggacatcctcgaagacaaacctgagctgacacccgtggcgatccagtcaggtaaactactggcccagcgtttattcggagcctcccttgagaaaatttaccacactctgttctggccactggaatggactgtggctggtcgagagaacaatacctgttatgctaagataatctgtaataagttcgaccacgaccgagtcatcggctttcacatcctcggccccaacgcgggcgaggtgacgcagggcttcgccgctgccatgaagtgcggcctgacaaagcaactactcgatgacacgattggaatccatcccacgtgtggggaggtcttcacaactctggagattacaaagtcttcaggtctggatattacccagaaaggttgttgagggtag

SEQ ID NO: 68763 - DNA, 1929 bp, Artificial Sequence
  derived and/or modified sequence
gtggccagcgagggctctgtgcggcggcccagcggccctgtgcctgccccccagcccccagccttccgctttgtgtcccggcccggccgggcccggtctgagagcgagaccctggagaggagccccccccagagccctggccctgggaaggctggagatgcccccaacagaagaagtggccacgtgcggggggcccgggtgctgagccccccaggaagaagagcccggctgagcagccctggccccagccgcagcagcgaggcccgggaggagctgcggcggcacctggtgggcctcatcgagaggagccgggtggtgatcttcagcaagagctactgcccccacagcaccagggtgaaggagctgttcagcagcctgggcgtggagtgcaatgtgctggagctggaccaggtggatgatggagcccgggtgcaggaggtgctgtctgagatcaccaaccagaagacagtgcccaacatctttgtgaacaaggtgcacgtgggcggctgtgaccagaccttccaggcctaccagagcggcctgctgcagaagctgctgcaggaggacctggcctatgactatgacctgatcatcattggaggcggcagcggcggcctgagctgtgccaaggaggccgccatcctgggcaagaaggtgatggtgctggactttgtggtgcccagcccccagggcacctcctggggcctgggcggcacctgtgtgaatgtgggctgcatccccaagaagctgatgcaccaggccgccctgctgggccaggccctgtgtgacagcaggaagtttggctgggagtacaaccagcaggtgcgccacaactgggagaccatgaccaaggccatccagaaccacatcagcagcctgaactggggctaccgcctgagcctgcgggagaaggctgtggcctacgtgaacagctatggagaatttgtggagcaccacaagatcaaggccaccaacaagaagggccaggagacctactacacagctgcccagtttgtgattgccaccggggagcggccccgctacctgggcatccagggcgacaaggagtactgcatcaccagtgatgacctcttcagcctgccctactgccctgggaagaccctggtggtgggcgccagctatgtggccctggagtgtgccggcttcctggccggcttcggcctggatgtgacagtgatggtgcgcagcatcctgctgcggggctttgaccaggagatggccgagaaggtgggcagctacatggagcagcacggcgtgaagttcctgaggaagttcatccctgtgatggtgcagcagctggagaagggcagccctgggaagctgaaggtgctggccaagagcacagagggcacagagaccattgaaggagtgtacaacacagtgctgctggccatcggccgggacagctgcaccaggaagattggcctggagaagattggagtgaagatcaatgagaagagcggcaagatccctgtgaatgatgtggagcagaccaacgtgccctacgtgtatgctgtgggggacatcctggaggacaagccagagctgacccctgtggccatccagagcggcaagctgctggcccagaggctgtttggagccagcctggagaagatctaccacaccctcttctggcccctggagtggacagtggccggccgggagaacaacacctgctacgccaagatcatctgcaacaagtttgaccatgacagagtgattggcttccacatcctgggccccaatgctggggaggtgacccagggctttgctgctgccatgaagtgtggcctgaccaagcagctgctggatgacaccatcggcatccaccccacctgtggggaggtgttcaccaccctggagatcaccaagagcagcggcctggacatcacccagaagggctgctag

SEQ ID NO: 68764 - DNA, 126 bp, Artificial Sequence
  derived and/or modified sequence
ggcctgaccaagcagctgctggacgacaccatcggcatccaccccacgtgcggggaggtcttcactaccctggagattactaaaagttccggcctggatatcacccagaaagggtgttgaggctag

SEQ ID NO: 68765 - DNA, 1935 bp, Artificial Sequence
  derived and/or modified sequence
gtggccagcgagggcagcgtgcggcggcccagcggccccgtgcccgccccccagcctccggcctttcgcttcgtgagtaggcccggtagagcaaggtccgagagcgaaactctggagagatcaccaccacagagcccgggccctggaaaagctggggatgcaccaaacaggaggtcaggtcacgtccggggtgctcgggtcctgagcccaccaggcaggcgcgcccgcttgagctccccaggccctagtagaagctctgaggccagagaggaacttcggcggcacttagtggggctcatcgaaagatcccgagtggtgatcttctcaaaatcctattgcccccatagcacccgtgttaaggagcttttcagctccctgggggtagagtgtaacgtactggaattggatcaagtcgacgacggggcccgcgtgcaggaagttctgtcagaaattaccaatcagaagacggtgccaaatatcttcgttaataaggtgcatgtcggagggtgtgaccagacttttcaggcctatcagagcggcttgttgcagaaattactccaagaggacttggcatacgattatgatctgataatcatagggggcggctcaggggggctgtcttgcgcgaaggaagcagcaatactcgggaaaaaggtgatggtgcttgatttcgtggtgcctagtccacagggcacatcttgggggctcggcggaacatgcgtgaacgtgggctgcattccaaagaagctcatgcaccaggcggccctgttgggccaggcactgtgcgattctagaaagttcggatgggagtacaatcagcaagttaggcacaattgggagacgatgacgaaagccattcagaaccacatttcaagcctgaattggggctacagactgagtttaagggagaaggcggttgcgtatgtgaattcatacggcgagtttgtcgagcatcacaagattaaggccacgaataaaaagggccaggagacctattatacagccgcgcaatttgtgattgccacgggcgaacgccctcgatacttggggatccaaggagacaaggaatactgcatcacatcggacgatctgttttctctcccttactgcccaggaaagacactggtcgtcggggccagttatgtggcgctggagtgtgcagggtttctggctggattcggcctggatgtcaccgttatggtgagatcaatactattgaggggtttcgatcaagaaatggcagagaaggttgggtcatatatggagcagcacggggtcaaattcctgcggaaattcatcccagtaatggtgcagcagcttgaaaaagggagtcccggcaagctaaaggttctggcaaaatccacagaagggacagagactattgaaggcgtttataatactgtgctgttggccatcggcagagatagttgtacaagaaaaatcggcttggagaaaattggcgtcaagatcaacgagaagtccgggaaaatcccagttaatgacgtggaacagacaaatgtgccatatgtctacgccgttggtgatatcctggaagacaagcccgaactcaccccagtggcaattcagtcgggcaagctgttggcccagcgcctgtttggagccagcctagagaaaatctaccatactctcttttggccattagagtggacagtagccgggcgggaaaataatacctgctatgctaagatcatttgtaataagtttgatcacgaccgggtgatcgggttccatatattgggaccaaacgctggcgaagtcacacagggcttcgcagccgccatgaagtgcggcttgacgaaacagctgctggatgacaccattggaattcacccaacctgtggcgaggtgttcactacactggagattacaaagtcaagtggactcgacataactcagaaggggtgctgaggatag

SEQ ID NO: 68766 - DNA, 126 bp, Artificial Sequence
  derived and/or modified sequence
gggcttaccaagcaactcttggatgacaccatcggaatacatcccacttgtggggaagtgtttaccacactggagattacaaaatcaagcggccttgatattacacaaaaagggtgttgaggctag

SEQ ID NO: 68767 - DNA, 1935 bp, Artificial Sequence
  derived and/or modified sequence
gttgctagcgaggggagtgtgaggcgcccaagcgggccagtacccgcacctcagccacccgcttttcggtttgtgtcacgtccgggtcgtgcacggagcgagagtgagactctagaacgctccccaccacaaagccccggtcctgggaaggccggagacgctcctaatcgccgaagcgggcacgtgcgcggtgccagggtgctttccccccctggtcggagagcgcgactgagttctcctggcccaagccgcagctccgaggcccgagaagaactgcgacgccacttagtgggactcattgaaaggagcagggtcgtgatctttagtaagagttactgtcctcatagcactagggtcaaagagctttttagctccttgggagtcgaatgtaacgtgttagagctcgaccaggtggacgacggcgctcgggtgcaggaggtactgagcgagatcacaaatcagaaaacggtgcccaatattttcgtgaacaaggtacatgtgggcggttgcgatcagactttccaggcctaccagtcagggcttctccaaaagctgctgcaggaggatctcgcatacgattatgacctcataataatcggtggcggttctgggggactcagctgcgcgaaggaggccgcaatccttgggaaaaaggttatggtcctcgatttcgtagttccatccccccaaggcacctcttgggggctaggagggacatgcgtgaacgtgggctgcatcccaaagaaattgatgcaccaagcggcactcttgggtcaagccttatgcgactccagaaagttcgggtgggagtataaccagcaagtgcgccataactgggaaaccatgactaaagctatacagaaccacatctccagcctgaactggggatacagactttctctacgagagaaggccgttgcctatgtgaattcatacggcgaattcgtggaacaccacaagatcaaggcaaccaataaaaaggggcaggaaacatactacactgcagcccagttcgtgatagcaacaggtgaaagacccaggtatctgggtatacagggagacaaagaatactgcatcacctctgatgacttatttagtctgccatactgcccgggtaagaccctcgtggtgggcgcatcatacgtggcacttgagtgtgctgggtttctggccggattcggccttgatgtgacggtcatggtgagaagtatactccttcggggattcgatcaggagatggctgaaaaggtggggtcatatatggaacagcacggcgtaaaatttctgcgtaagttcattccagtaatggtgcaacaactggagaagggaagtccgggaaagctcaaagtcctggccaaaagcaccgaaggaaccgaaaccattgagggggtctataacactgttttgttggccattgggcgagactcttgcacgcgcaagattggcctggagaagatcggggtgaagatcaacgagaagagcgggaaaatccctgttaatgatgtggaacagaccaatgttccctatgtctatgctgtgggcgacatcttagaggacaagcctgagttgacacctgtggcgattcagagtgggaagctcctggctcagagactgttcggcgcatctctagagaagatttaccatacactattttggcctctggaatggaccgttgctggtcgagagaacaatacttgttatgccaaaattatttgcaacaaattcgaccatgatcgggtgataggctttcacatcctcggacccaacgcaggggaagttacccagggattcgccgcagcaatgaagtgtggcctgaccaaacagcttctggacgatacgattggcattcatcccacctgtggcgaggtatttacgacccttgagatcaccaaatcgtccggcctcgacataacgcagaaaggttgctgagggtag

SEQ ID NO: 68768 - DNA, 2329 bp, Artificial Sequence
  derived and/or modified sequence
gtggccagcgagggcagcgttcgccgcccctcaggccccgtcccggcgccgcagccgcctgcgtttcggtttgtgagcaggcccggccgggccaggagcgagagcgagactctggagcggtcgccgccgcagtcgcccgggccgggaaaggcgggcgatgcccccaaccgccgctcgggccatgtccgaggggcgcgcgtgttgtcgccgccggggcgccgtgcccgcctgtcgtcccccgggcccagccgctcgtccgaggcccgcgaggagctgcgccgccacctcgtgggcctcatcgagcgcagccgggtggtgatcttcagcaagagctactgtccccatagtactcgggtgaaagaactcttttcttctttgggagtcgaatgtaatgtcttggaacttgatcaagttgatgatggggccagggttcaagaagtgctgtcagaaatcactaatcagaaaactgtgcccaatattttcgtgaataaagtgcatgtaggtggatgtgaccaaactttccaggcatatcagagtggtttgttacagaagctccttcaggaagatttggcatatgattatgatctcatcatcatcggtggtggttctggaggcctttcatgtgcgaaggaagctgccattttgggaaagaaagttatggtgctagactttgttgtcccgtcacctcagggcacatcctggggtcttggtggcacttgtgtaaatgtaggttgtattcctaagaaattgatgcatcaggctgcccttttggggcaggcattatgtgactcaaggaaatttggctgggaatataatcaacaagtgaggcacaactgggagacaatgacaaaagcgattcagaaccacatcagctctctaaactggggctacaggttgtctctgagggaaaaggctgtggcctatgtcaattcctatggagaatttgttgaacatcataaaataaaggcaaccaataaaaaaggacaggagacttattatactgctgcacagtttgtcatagcaacgggtgaaaggccacggtatttaggaatccaaggagataaagaatactgtattactagtgatgaccttttttctctgccttattgccctggcaaaacattagtggtgggtgcctcttatgttgccctggagtgtgcagggtttctggctggctttggcctagatgtcacagttatggtacgctcaatccttctccgtggcttcgaccaagaaatggcagaaaaagtgggttcctacatggagcagcatggtgtgaagttcctacggaaattcatacctgtgatggttcaacagttggagaaaggttcacctggaaagctgaaagtgttggctaaatccactgaaggaacagaaacaattgaaggagtctataacacagttttgttagctattggtcgtgactcctgtacaaggaaaataggcttggagaagattggtgtcaaaattaatgagaagagtggaaaaatacctgtaaatgatgtggaacagaccaatgtgccatatgtctatgctgttggtgatattttggaggataagccagagctcactcctgtcgccatacagtcaggcaagctgctagctcagagactttttggggcctctttagaaaagatatatcatactttgttctggcctcttgaatggacagtagctggcagagagaacaacacttgttatgcaaagataatctgcaataaattcgaccatgatcgggtgataggatttcatattcttggaccaaacgccggtgaggttacccaaggatttgcagctgcaatgaaatgtgggctcacaaaacagctacttgatgacaccattggaattcaccccacatgtggggaggtgttcacgactttggaaatcacaaagtcgtcaggactagacatcactcagaaaggctgctgaggctaggcctgctgctgtttagttctccttgtcatattctcatttctctcaaagataagaatgctctcggataaaatgagcctgtgctcatgacagctgctctgttactcagggaccagtgcagggctgtcttacgacacttagatgagaaagtagacaaggaaagaggacagcagtgggcatctgccttgtggtcttgctgacagcgagaagcagtgggactgcttccttgacgccttagcttggagccccgttatgaggtgagccaaggctgactctcgcaagccaggactgagcttccctcggaaagacctttgagtggcaccattcacctaagttagcttttctggtcgctattgtttttatcccctttgctttgttgtttctgtgaaaatatatt

SEQ ID NO: 68769 - protein, 102 aa, Artificial Sequence
  derived and/or modified sequence
MGGLEPCSRLLLLPLLLAVSDCSCSTVSPGVLAGIVMGDLVLTVLIALAVYFLGRLVPRGRGAAEAATRKQRITETESPYQELQGQRSDVYSDLNTQRPYYK

SEQ ID NO: 68770 - DNA, 309 bp, Artificial Sequence
  derived and/or modified sequence
atgggcggcctggagccctgcagcagactgctgctgctgcccctgctgctggccgtgagcgactgcagctgcagcaccgtgagccccggcgtgctggccggcatcgtgatgggcgacctggtgctgaccgtgctgatcgccctggccgtgtacttcctgggcagactggtgcccagaggcagaggcgccgccgaggccgccaccagaaagcagagaatcaccgagaccgagagcccctaccaggagctgcagggccagagaagcgacgtgtacagcgacctgaacacccagagaccctactacaagtag

SEQ ID NO: 68771 - DNA, 309 bp, Artificial Sequence
  derived and/or modified sequence
atgggcgggctggaaccttgtagtcggttgctgttactaccactgcttctggctgtgagcgattgctcctgtagcacagtctcgcctggcgttctcgccggcatagtcatgggggacctggttctgacagttcttatagccctggccgtatatttcctgggtcgacttgtgccaagaggccggggtgcagccgaggccgcgacgcggaagcagcggatcaccgagacagagagtccatatcaggagctccaaggtcagcgatcagacgtttatagcgacctcaatactcagcggccatactataaatag

SEQ ID NO: 68772 - DNA, 309 bp, Artificial Sequence
  derived and/or modified sequence
atgggcggcctggagccctgcagccggctgctgctgctgcccctgctgctggccgtgtctgactgcagctgcagcacagtgtccccaggagtgctggccggcatcgtgatgggagacctggtgctgactgtgctgattgccctggccgtgtacttcctgggccgcctggtgccccggggcagaggagctgctgaggccgccaccaggaagcagaggatcacagaaacagagagcccctaccaggagctgcagggccagaggagtgatgtgtacagcgacctgaacacccagaggccctactacaagtag

SEQ ID NO: 68773 - DNA, 309 bp, Artificial Sequence
  derived and/or modified sequence
atgggcggcctggagccctgcagccggctgctgctgctgcccctgctcctcgcggtttcagactgcagttgctcgaccgtgagcccgggcgtgcttgccggcatcgtgatgggggacttagttttgactgtgctcatagctctggccgtttattttttggggcgcctggtgcctcggggccgcggtgcagccgaggcagctacaaggaaacaaaggataactgagactgagagcccataccaagagctgcagggccagcggagtgacgtttactccgacctaaatacccagagaccttactataaatag

SEQ ID NO: 68774 - DNA, 309 bp, Artificial Sequence
  derived and/or modified sequence
atgggaggtttagagccatgttcacggctgttgctacttcctctgctactggccgtgagcgattgtagctgttccactgtttcgcccggagtacttgccggtatagtaatgggcgacctggttttaacagtgctcatagcgctggccgtatactttctggggcgattagtgccccgtggccgtggggctgcggaggctgccaccaggaaacagaggattactgaaaccgagagcccataccaggagttgcagggacaaaggtccgacgtgtattctgacttaaacacccagcggccatactacaagtag

SEQ ID NO: 68775 - DNA, 549 bp, Artificial Sequence
  derived and/or modified sequence
agacttcctccttcacttgcctggacgctgcgccacatcccaccggcccttacactgtggtgtccagcagcatccggcttcatggggggacttgaaccctgcagcaggctcctgctcctgcctctcctgctggctgtaagtgattgcagttgctctacggtgagcccgggcgtgctggcagggatcgtgatgggagacctggtgctgacagtgctcattgccctggccgtgtacttcctgggccggctggtccctcgggggcgaggggctgcggaggcagcgacccggaaacagcgtatcactgagaccgagtcgccttatcaggagctccagggtcagaggtcggatgtctacagcgacctcaacacacagaggccgtattacaaatgagcccgaatcatgacagtcagcaacatgatacctggatccagccattcctgaagcccaccctgcacctcattccaactcctaccgcgatacagacccacagagtgccatccctgagagaccagaccgctccccaatactctcctaaaataaacatgaagc

SEQ ID NO: 68776 - protein, 1255 aa, Artificial Sequence
  derived and/or modified sequence
MLRMRTAGWARGWCLGCCLLLPLSLSLAAAKQLLRYRLAEEGPADVRIGNVASDLGIVTGSGEVTFSLESGSEYLKIDNLTGELSTSERRIDREKLPQCQMIFDENECFLDFEVSVIGPSQSWVDLFEGQVIVLDINDNTPTFPSPVLTLTVEENRPVGTLYLLPTATDRDFGRNGIERYELLQEPGGGGSGGESRRAGAADSAPYPGGGGNGASGGGSGGSKRRLDASEGGGGTNPGGRSSVFELQVADTPDGEKQPQLIVKGALDREQRDSYELTLRVRDGGDPPRSSQAILRVLITDVNDNSPRFEKSVYEADLAENSAPGTPILQLRAADLDVGVNGQIEYVFGAATESVRRLLRLDETSGWLSVLHRIDREEVNQLRFTVMARDRGQPPKTDKATVVLNIKDENDNVPSIEIRKIGRIPLKDGVANVAEDVLVDTPIALVQVSDRDQGENGVVTCTVVGDVPFQLKPASDTEGDQNKKKYFLHTSTPLDYEATREFNVVIVAVDSGSPSLSSNNSLIVKVGDTNDNPPMFGQSVVEVYFPENNIPGERVATVLATDADSGKNAEIAYSLDSSVMGIFAIDPDSGDILVNTVLDREQTDRYEFKVNAKDKGIPVLQGSTTVIVQVADKNDNDPKFMQDVFTFYVKENLQPNSPVGMVTVMDADKGRNAEMSLYIEENNNIFSIENDTGTIYSTMSFDREHQTTYTFRVKAVDGGDPPRSATATVSLFVMDENDNAPTVTLPKNISYTLLPPSSNVRTVVATVLATDSDDGINADLNYSIVGGNPFKLFEIDPTSGVVSLVGKLTQKHYGLHRLVVQVNDSGQPSQSTTTLVHVFVNESVSNATAIDSQIARSLHIPLTQDIAGDPSYEISKQRLSIVIGVVAGIMTVILIILIVVMARYCRSKNKNGYEAGKKDHEDFFTPQQHDKSKKPKKDKKNKKSKQPLYSSIVTVEASKPNGQRYDSVNEKLSDSPSMGRYRSVNGGPGSPDLARHYKSSSPLPTVQLHPQSPTAGKKHQAVQDLPPANTFVGAGDNISIGSDHCSEYSCQTNNKYSKQPFRRVTFSVVSQPQDPHQGSLQSCYDSGLEESETPSSKSSSGPRLGALPLPEDNYERTTPDGSVGEAEHMENDSRPLPDVALTGKCTRECDEYGHSDSCWMPVRTSPERKKSQPKLSTFMPVDERGSQEKLANGEAAIMGDRNRNLLNKKLTSSYETFSAASFSKNEEANPEDIPLTKTGEYKPSPVNTLTRREVYL

SEQ ID NO: 68777 - DNA, 3768 bp, Artificial Sequence
  derived and/or modified sequence
atgcttcgaatgcggacagctggttgggcccgtggctggtgcctcggatgctgccttttactgcctctgtctctgagccttgcggcggctaaacagttgttacgctaccgtctggccgaagaagggcccgccgacgtcagaatcggcaacgtggcaagtgacctcgggatcgtgacaggttcaggtgaggtgactttttcactggaaagcggatccgaatacctgaagattgacaatctgaccggcgagttgtccacgagcgaaaggcgcatagatagagaaaaattgccacagtgtcagatgatatttgacgaaaacgagtgcttcttggactttgaggtgagtgtaataggcccttcacagagctgggtcgatctctttgaaggccaggtcatcgttctggacatcaacgataatacacctactttcccatcccccgtgctaactcttaccgtggaggagaaccggcccgtgggcacactgtacctgctgcccactgcaactgatagggactttggtcggaatggcatcgagcggtacgagctgctgcaagaacctggtgggggtgggtctggcggagagagcagacgtgctggagccgcggacagcgccccttacccaggcggtggcggcaacggggcttccggcggggggtctggggggtcgaaacgacgattagatgctagtgaaggcgggggagggactaatcctggggggcggagctcagttttcgagctgcaggtggccgatacccctgacggggagaaacagcctcaactgatcgtcaagggagcgctggacagggagcaaagggattcttacgagttgacactgcgggtgcgagacggaggcgatcctcctcgcagcagccaggccatccttcgagtgctcatcaccgatgtgaacgacaactcgcctcgattcgagaagtctgtgtacgaagcagatttggcagaaaacagtgctccaggtactccaatcctgcagttgagggcagctgacctggatgtgggtgtgaacggacagattgaatacgtctttggtgccgccactgagagtgtgcgacggctgctgcgtctagatgagacttctggttggttgtccgttctacatcgaattgatagggaggaggtaaaccagttacgatttaccgtgatggctcgcgatcggggccagcctccaaaaactgacaaagcgacagtcgttttgaacattaaggacgaaaatgacaacgtgccttctattgagatccgcaaaatcggaaggatcccactgaaggacggtgtggctaacgtggccgaggatgtcttggtggacacccctatagcactggtgcaggtgtcagacagggatcaaggggaaaacggtgtggtcacttgtactgtggttggtgacgttcccttccagctgaaacctgcaagcgacacagaaggcgaccaaaataaaaaaaagtactttctgcacaccagcacaccactggattacgaagctactagagagttcaacgtggtgattgtcgccgtggattctggttccccaagtctaagctcaaataatagtctgatcgtgaaagtgggcgacacgaatgataaccctcctatgttcgggcaatcagttgtcgaagtgtactttccagaaaacaacatccctggtgagcgcgtggccacggttctcgctacagacgccgattctggcaagaatgcagaaatcgcctattcacttgattcttctgtgatgggcatctttgcaatcgatcccgactccggtgacatactggtgaataccgtactggaccgggagcagacggatcgctatgagttcaaagtgaatgcaaaagataaaggcatccccgtgttgcagggctctacgaccgtgattgtgcaagttgccgataagaatgacaacgatcccaaattcatgcaggacgtttttacgttttatgtgaaagagaaccttcagcctaactccccagtgggaatggttaccgtgatggacgctgacaagggacggaacgccgagatgagcctctacatagaggaaaataataacattttcagtatagaaaacgacacaggtaccatctactcaacaatgtccttcgaccgggagcaccaaacaacatatacgttcagggtgaaggcagtggacgggggggacccccctcgatccgccaccgctaccgtcagcttattcgtgatggatgaaaatgataacgcccccacagtgacgctgccaaaaaatatttcctacaccttgttgcccccatctagcaacgtacgcactgtcgtggccacggtgctggcaacagattccgacgatgggattaacgctgacctgaattactcaattgtggggggcaatccgttcaagttgttcgagattgatcctacatcaggggtcgtctcgttagtgggcaagctgactcaaaagcactacggactgcatcgcttagtggtgcaggtaaacgattccggccagccctctcagagtactactactctggtacacgtgttcgtgaacgagagtgtctccaacgccacagctatcgactcacagatcgcaagaagcttacacatacccctcacccaggacattgctggcgacccatcctatgagattagcaaacagaggttgtccatagttatcggcgtcgtggctgggattatgaccgtgatccttataatactaattgttgtgatggccaggtattgcaggagcaagaacaaaaatggttatgaggccgggaagaaggatcatgaagatttttttactccccagcagcacgacaagtccaagaaaccgaaaaaagataagaaaaataagaaatctaagcagccactgtatagctctatcgtcacagttgaggcatcaaagcccaacggccagagatacgacagcgtgaacgaaaaacttagtgactctccaagcatggggcgctatcgttcagttaacggtggacctggtagtccagacctcgcccggcactacaagtccagctcccccctgcccaccgtgcagctgcacccacagagcccaaccgccgggaaaaagcaccaggcagtgcaggatctcccaccggctaacacgtttgtgggggcgggcgacaatatctccatcgggtctgaccactgctccgaatactcatgtcaaacaaataataaatattcgaagcagcctttcagaagagtgaccttttctgtggtgtcacagccacaagatcctcatcaggggagtctgcagtcctgttacgatagcggcctggaagagtctgagacaccctccagcaaatcttcctccggcccccgacttggagccctacccttgccagaggataattacgagcgaactacccccgatggcagtgtgggggaagcagagcacatggagaatgacagccgtcctctgccagacgtagcactcaccgggaaatgcacccgagaatgtgacgaatacgggcattcggactcttgctggatgccagtacggacaagccccgagagaaagaagtctcaacccaaattatcaacgttcatgccagttgatgagaggggcagccaggagaaattggccaatggcgaagccgccatcatgggagatcggaacagaaatttgctgaacaagaagctcactagcagttacgaaaccttttcggcggcatcttttagcaaaaacgaagaagctaatcccgaggatattccactcacgaaaactggcgaatataagccaagcccggtcaacacgctcactaggcgagaggtgtatctttag

SEQ ID NO: 68778 - DNA, 3768 bp, Artificial Sequence
  derived and/or modified sequence
atgctgaggatgaggacagctggctgggcccggggctggtgcctgggctgctgcctgctgctgcccctgagcctgagcctggccgccgccaagcagctgctgcgctaccgcctggccgaggagggccctgcagatgtgagaattggaaatgtggccagtgacctgggcatcgtgactggaagtggagaggtgaccttcagcctggagagcggcagcgagtacctgaagattgacaacctgactggagagctgagcaccagcgagaggagaattgaccgggagaagctgccccagtgccagatgatctttgatgaaaatgaatgcttcctggactttgaggtgtctgtgattggccccagccagagctgggtggacctgtttgagggccaggtgattgtgctggacatcaatgacaacacccccaccttccccagccctgtgctgaccctgactgtggaggagaacagacctgtgggcaccctgtacctgctgcccacagccacagaccgggactttggaagaaatggaattgaaagatatgagctgctgcaggagcccggcggcggcggcagcggcggggagagccggcgggccggggctgctgacagcgccccctacccaggcggcggcggcaatggagccagcggcggcggcagcggcggcagcaagaggcggctggatgccagcgagggcggcggcggcaccaaccctgggggccgcagctctgtgtttgagctgcaggtggccgacaccccagatggagagaagcagccccagctgattgtgaagggggccctggaccgggagcagagggacagctatgagctgaccctgcgggtgagagatggaggagacccccccaggagcagccaggccatcctgcgggtgctgatcacagatgtgaatgacaacagccccaggtttgagaagtctgtgtatgaagctgacctggctgaaaattctgcccctggcacccccatcctgcagctgcgggctgctgacctggatgtgggcgtgaatggccagattgaatatgtgtttggagctgccacagaatctgtgcggcggctgctgcggctggatgagaccagcggctggctgtctgtgctgcacagaattgaccgggaggaggtgaaccagctgcgcttcaccgtgatggcccgggaccggggccagccccccaagacagacaaggccaccgtggtgctgaacatcaaggatgaaaatgacaacgtgcccagcattgagatcaggaagattggccgcatccccctgaaggatggagtggccaacgtggccgaggatgtgctggtggacacccccatcgccctggtgcaggtgtctgaccgggaccagggagaaaatggagtggtgacctgcaccgtggtgggagatgtgcccttccagctgaagccagccagtgacacagaaggagaccagaacaagaagaagtacttcctgcacaccagcacccccctggactatgaggccacccgggagttcaacgtggtgattgtggccgtggacagcggcagccccagcctgagcagcaacaacagcctcatcgtgaaggtgggggacaccaatgacaacccccccatgtttggccagagcgtggtggaggtgtacttccctgagaacaacatccctggagagcgggtggccaccgtgctggccacagatgctgacagcggcaagaatgctgagatcgcctacagcctggacagctctgtgatgggcatctttgccatcgaccctgacagcggggacatcctggtgaacacagtgctggaccgggagcagacagacagatatgagttcaaggtgaatgccaaggacaagggcatccctgtgctgcagggcagcaccaccgtcatcgtgcaggtggccgacaagaatgacaatgaccccaagttcatgcaggatgtgttcaccttctacgtgaaggagaacctgcagcccaacagccctgtgggcatggtgacagtgatggatgctgacaagggcagaaatgctgagatgagcctgtacatcgaggagaacaacaacatcttcagcattgaaaatgacaccggcaccatctacagcaccatgagctttgaccgggagcaccagaccacctacaccttccgggtgaaggctgtggatggaggagacccccccaggtctgccacagccaccgtgtccctgtttgtgatggatgaaaatgacaatgcccccaccgtgaccctgcccaagaacatctcctacaccctgctgccccccagcagcaatgtgaggacagtggtggccaccgtgctggccacagacagtgatgatggcatcaatgctgacctgaactacagcatcgtgggcggcaaccccttcaagctgtttgaaattgaccccaccagcggcgtggtgtccctggtgggcaagctgacccagaagcactacggcctgcaccggctggtggtgcaggtgaatgacagcggccagcccagccagagcaccaccaccctggtgcacgtgtttgtgaatgaatctgtgtccaatgccacagccatcgacagccagatcgcccggagcctgcacatccccctgacccaggacattgctggggaccccagctatgagatcagcaagcagaggctgagcatcgtcatcggcgtggtggccggcatcatgaccgtcatcctgatcatcctgattgtggtgatggcccgctactgccgcagcaagaacaagaatggctatgaggccggcaagaaggaccacgaggacttcttcaccccccagcagcacgacaagagcaagaagcccaagaaggacaagaagaacaagaagagcaagcagcccctgtacagcagcatcgtgacagtggaggccagcaagcccaacggccagagatatgacagcgtgaatgagaagctgagtgacagccccagcatgggccgctacagatctgtgaatggaggccctggcagcccagacctggcccggcactacaagagcagcagccccctgcccaccgtgcagctgcacccccagagccccacagctgggaagaagcaccaggccgtgcaggacctgcccccagccaacacctttgtgggcgctggggacaacatcagcattggaagtgaccactgcagcgagtacagctgccagaccaacaacaagtacagcaagcagcccttcagaagagtgaccttctctgtggtgtcccagccccaggacccccaccagggcagcctgcagagctgctatgattctggcctggaggagagcgagacccccagcagcaagagcagcagcggcccccggctgggcgccctgcccctgcctgaggacaactatgaaagaaccaccccagatggctctgtgggggaggccgagcacatggagaatgacagccggcccctgcctgatgtggccctgaccgggaagtgcaccagagaatgtgatgaatatggccacagcgacagctgctggatgcctgtgaggaccagccctgagaggaagaagagccagcccaagctgagcaccttcatgcctgtggatgagcggggcagccaggagaagctggccaatggagaggccgccatcatgggagacaggaacagaaacctgctgaacaagaagctgaccagcagctatgagaccttctctgctgccagcttcagcaagaatgaggaggccaaccctgaggacatccccctgaccaagacaggagagtacaagcccagccctgtgaacaccctgacccggcgggaggtgtacctgtag

SEQ ID NO: 68779 - DNA, 3768 bp, Artificial Sequence
  derived and/or modified sequence
atgctgcggatgcggaccgccggctgggcccggggctggtgcctggggtgttgcctgttgctgccactctcactgtctctggcagctgccaagcagctgctaagataccggctcgctgaagaggggccagccgatgttcgtattggcaacgtggcctccgatctgggcatcgtcacgggatctggggaagtgacattctctctcgaatctggctctgagtacctgaaaattgacaatctgaccggagagctgtctacttctgagagacgcattgaccgggaaaagctgccccaatgtcaaatgatattcgacgagaatgagtgtttcctcgattttgaagtaagtgttattggtcccagtcaaagttgggtcgacctatttgagggacaggtcattgtgttggatatcaacgacaatacacctaccttcccttcccccgtgctgacactgaccgtagaggagaaccgaccagtcggaacattatacttgctcccaacagcaacagatagagattttggtcgcaatgggattgaacgttatgagctgctgcaagagcctggcggtggcggcagtgggggggagtcgcggagggctggagccgcagactccgctccataccccggaggtggcggcaacggcgccagcggaggaggatccggcggatcgaagcgaaggctagatgcgtccgaagggggcggcggaaccaaccctggaggacgaagttcagttttcgaactgcaagtcgctgacacccctgacggagaaaagcagccacagctcatagtcaagggggcattggatcgggagcagcgcgatagctacgagctgacactacgcgtgcgggacggaggtgaccccccgcgctcctcccaagcgattctcagggtgctgatcactgacgtgaatgacaacagtccacgctttgagaaatcagtgtacgaagcagacctggccgagaactcagctccagggaccccaatcctgcagttgagagctgcagacctggacgtcggggttaatgggcagatagaatatgtctttggcgcggcaacagagtctgtgagaaggctactgcggctggacgagacctctgggtggcttagtgtgctgcaccgaatcgatcgagaggaggttaaccagctgagattcactgtgatggcacgcgataggggtcaacctcccaaaaccgacaaggcaacagtcgtgctgaatatcaaagacgagaatgacaatgttccgtctatcgagattaggaagataggccgtattcccttgaaagacggagtggctaacgtggccgaggacgttctggtggatactcccattgcgttagtgcaagttagtgaccgggatcagggagagaacggcgttgtgacatgcacagtagtgggagacgtgccgttccaacttaaaccagccagtgacactgagggtgaccagaataagaagaagtacttcctgcatacttctacccccctcgactatgaagcaacccgagagttcaacgtcgtaatcgtggctgtggattctggctctccttctctttcctctaataactcactaatcgtgaaggttggcgataccaacgataacccaccaatgtttggccagtcggttgtggaggtgtactttcctgaaaataatattcccggggaacgcgtcgcaaccgtgttggccacagatgccgacagcgggaaaaacgctgagatagcctacagtctagattcatctgtgatggggatcttcgctattgaccctgattccggtgacatcctggtgaacacggtgctcgacagagagcagacagataggtatgagttcaaggtgaacgccaaggataagggcatccctgttctgcagggttccactaccgtgatcgtccaagtggccgacaagaacgacaacgaccccaagttcatgcaggacgtgttcaccttctacgtgaaggagaatcttcagcccaacagccccgtgggcatggtgactgtaatggacgcggataaggggcggaacgcggaaatgagcctgtacatcgaagaaaataataatattttctcaatcgagaacgataccggtacaatctacagcaccatgtctttcgatagggaacaccaaacgacctatacatttagagtaaaggctgtggacggtggagacccgccgaggtccgctacagccactgtcagtctgtttgtgatggatgagaatgataacgcccctaccgtaaccctgccaaaaaatatctcgtacaccctcttgcctccatccagtaacgtgagaacggttgtggcaactgtgctcgcaactgatagcgacgacggcataaatgccgacttaaattattcaattgtcgggggcaatccgttcaagctttttgagattgatccaactagtggggtggtaagtctcgtgggtaagcttacacagaagcattatgggttgcatcgcttggtggtgcaggtcaatgatagtggtcagccttcccagagcacaactacactcgtgcacgttttcgtgaatgagtccgtatccaatgcgacagccatagattctcaaattgcgcgttccctccacatccccctgacgcaagatattgccggtgatccatcatacgaaataagcaagcagaggttgtctatcgtcataggcgtcgtcgcgggtatcatgacagtgatcctgataatcctgatcgtggtcatggctcgttactgccgctcgaaaaataaaaatgggtatgaggccgggaagaaggaccacgaggacttcttcacacctcagcagcacgacaagtccaagaagcccaaaaaggacaagaaaaacaagaaatctaagcaaccactatattcctcaattgtcaccgtcgaagcaagcaaaccaaatggacagcgctacgactctgttaacgagaagctgtctgattccccttccatggggcgttatcgcagcgttaatggcgggcccgggtcgcccgacctcgctaggcactataaatctagctccccactgcccacggtgcagctgcacccacagtcccctaccgcaggcaaaaagcatcaagccgtgcaggatcttccacccgctaatacttttgttggagcgggtgataacatttcaatcgggagtgaccattgctccgaatacagttgccaaacgaataacaagtactccaaacaacccttcaggcgcgtgaccttcagcgtggtcagccagccacaggacccgcaccagggcagcctgcagtcttgctatgattcgggactcgaagaaagtgagacaccctcaagtaaatctagtagtggcccccgtctgggagccctgcccttgccagaagataactatgaaaggaccacccctgacggctcagtgggcgaagccgaacatatggagaatgatagccgacccttgcctgatgtcgctctgaccggcaagtgcacgcgagagtgcgacgaatacggccactcagattcatgctggatgcctgtgagaacttcacctgaaaggaagaaatctcagcctaagctctcaaccttcatgccagtggacgagagaggaagtcaggaaaagctcgccaacggagaagccgctattatgggtgacaggaatcgaaatctcctgaacaagaagcttacttccagttacgaaaccttctctgccgcctcctttagtaagaacgaagaggcaaacccagaggacatccccctgactaaaaccggggaatacaaaccttcacctgtgaacacactgacccgcagggaggtgtacctgtag

SEQ ID NO: 68780 - DNA, 3768 bp, Artificial Sequence
  derived and/or modified sequence
atgcttaggatgcggacagctggttgggcacgtggctggtgcctaggctgttgccttctgcttcctttatcactttccctggctgccgctaagcagctattgaggtatcgtctcgccgaagagggacccgctgacgttcggatcggcaatgtcgcatcggatctgggaattgtcaccggcagcggagaggttacctttagtctagagtccgggtcggaatacttaaagatcgataatcttacaggggaactatctactagcgaaagacggattgacagagagaaactgccccagtgccagatgatcttcgacgaaaatgagtgcttccttgacttcgaggtaagcgttatagggcctagccaatcctgggtagacttgttcgagggtcaggtgatagtgttggacatcaatgataacacccctacgttcccaagccctgtgcttaccctgactgtggaggagaatcggcctgtggggacactataccttttgccaacagcgaccgaccgtgattttggcaggaatggtatagaaagatatgagctcctgcaggaacccggaggtggcggaagcgggggagagtcgcgcagggctggcgcagccgatagcgccccatatcccggaggaggcggaaacggcgcttccgggggagggagcgggggatcgaagcgcagactggacgcatcagaaggaggcggaggtacgaacccagggggaagatcttctgtgtttgagctgcaggtggctgacacccctgacggcgaaaaacaacctcagcttatagttaagggagctttggatcgagagcaacgtgactcctacgaactcacgttgagagtgcgcgacggcggagaccccccaaggtcctcgcaggcgatcttgcgagtcttaattacggacgtcaacgacaactccccacggttcgagaaaagcgtctacgaggcagacctggctgagaatagtgccccagggacacctatcctgcaactgcgggctgcagatctggatgtcggcgtcaacggtcagattgagtacgtctttggagccgctaccgagagtgttagacggcttcttagactcgatgaaacatcaggctggctctctgtgttgcatcggatcgaccgagaggaggtcaatcagctgcgattcacggttatggcacgggatcgaggccagccgccaaagaccgacaaggccaccgtagttctcaatatcaaggatgagaacgataacgtgccaagcattgaaatccgaaagattggacggattcctttaaaggacggggttgcgaacgttgctgaggatgtgttggtggacacccctatcgcgttagtccaagttagtgaccgagaccagggagagaatggcgttgttacctgcaccgtggtgggagatgtgccttttcagctgaagccagctagcgacactgagggagaccagaataagaaaaaatactttctgcacacgagcaccccgctggactacgaagccacacgtgagtttaacgtcgttatagtagcagtcgacagtggctccccgtccctgtcgtctaacaattccctgatcgtgaaagtcggcgacacaaatgacaacccgcctatgttcggacagagcgtggtcgaggtgtactttcctgagaataatatccctggtgaacgagttgcaaccgtgctggccacagacgccgactcaggaaaaaatgctgaaatcgcttactctctggactcgtctgtcatgggaatttttgctattgatcccgacagtggagatattttggtcaatacagtgctggatagggaacagaccgatcgctacgaatttaaagtcaacgccaaggataaaggaatacctgtccttcaggggtccactacagtaatcgttcaggttgcagacaaaaatgacaacgatccaaaatttatgcaggacgtgtttaccttttatgtaaaagagaacctgcaaccaaatagcccagtggggatggtgaccgtgatggacgcagacaaaggcagaaacgctgagatgagcctttatatcgaggagaataacaatattttttccatcgagaatgataccgggaccatctattcaactatgagcttcgacagggaacaccagacgacttacacctttagagttaaagcagtggatggcggagatcccccacgctccgccaccgccaccgtctcactctttgttatggacgagaacgacaacgccccaaccgtaacgttgcccaaaaacatttcctacactttgctgcctccctcatcaaatgtccgcactgtggtcgcgacggtccttgctacagacagcgacgatggcattaatgctgacctcaattacagtatcgtggggggtaatcctttcaaactgtttgaaatcgatcctactagcggtgtggttagtctggttggcaagctaacccaaaaacactatggtctccatcgtctagtcgtgcaggtcaatgattctgggcagccaagccagagtacgactactctcgtgcatgtttttgtgaatgagtctgtaagcaatgcaactgctatcgatagccagattgccaggtctctacatattccgttgacacaggatattgcaggtgacccttcatacgagataagcaaacagcggctgagcatagttatcggcgtggtagctggaattatgaccgtgatcctgatcatcctaatagtggtcatggcgagatattgcaggagtaagaacaaaaacggttacgaagctggtaagaaggaccacgaggatttctttactccacaacagcacgacaagtccaagaagcccaaaaaggacaaaaaaaataagaaatccaagcagcctttgtacagctccatcgtgaccgtggaggcatccaagccaaatggccagagatacgattcagtgaatgagaagttaagcgactcaccctccatgggccgatataggagcgtaaacggcggtcccggttcccctgacctcgcacgccattataagagctcatctcctctaccgacagtgcaattgcacccacaaagccctaccgccggaaaaaaacatcaggctgtgcaggacctaccccctgcaaatacctttgtgggcgctggcgacaacatctccatcgggagcgatcattgcagcgaatactcatgtcagacgaacaataagtattctaagcagccgtttcgacgggtgactttctcggtggtcagccagccccaggacccccaccagggctccctccagtcctgttacgattccggcctggaggagtctgaaacgccttcctccaaatcgtccagcggcccacggctgggtgccctgcctcttcctgaggataattacgaacgcactaccccggatggatctgttggagaagccgagcatatggagaatgatagccgcccactgcccgatgtagcactaactggaaaatgtacccgggagtgcgacgaatacggtcactcagactcgtgctggatgccagtgcggacatcccccgagcgcaagaagtctcagcccaaactttccacttttatgccggttgatgagagaggtagccaggagaagctggcaaacggcgaggccgctattatgggagataggaatagaaatctcttgaacaaaaaactcaccagtagttatgagacgttcagtgctgcctcctttagcaagaacgaggaggcaaacccggaggacattcctctgaccaagaccggggagtataagccgtcaccagtcaatacgcttacccgccgtgaagtttatctgtag

SEQ ID NO: 68781 - DNA, 3768 bp, Artificial Sequence
  derived and/or modified sequence
atgctgaggatgcggaccgcgggatgggcgcgcggctggtgcttgggctgctgcctcctcctgccgctctcgctcagcctggcggccgccaagcagctcctccggtaccggctggccgaggagggccccgccgacgtccgcatcggcaacgtggcttcagacctgggcatcgtgaccggatcgggtgaggtgactttcagcctggagtccggttccgagtacctgaagatcgacaacctcactggcgagctgagcacgagcgagcggcgcatcgaccgcgagaagctgccccagtgtcagatgatcttcgacgagaacgagtgcttcctggacttcgaggtgtcggtgatcgggccctcgcagagctgggtggacctgtttgagggtcaggtcatcgtgcttgacatcaacgacaacacgcccaccttcccgtcgcccgtgctcacgctcacggtggaggagaatcggccggtgggcacactttacctgctgcccacagccaccgaccgcgacttcggccgcaacggcatcgagcgctacgagctgctccaggagcccggaggcggcggcagcggcggcgagagccggcgcgccggggcggccgacagcgccccctaccccgggggcggcgggaacggcgcgagcggcggcggctcgggaggctccaagcggcggctggacgcatcagagggcggcggcggcaccaaccccggcggccgcagcagcgtgttcgagctgcaggtggcggacaccccggacggcgagaagcagccgcagctgatcgtgaagggggcgctggaccgcgagcagcgcgactcctacgagctgaccctgcgagtgcgcgacggcggcgacccgcctcgctcctcgcaggccatcctacgggtcctcatcaccgacgtgaacgacaacagcccccgcttcgagaagagcgtgtacgaggccgacttggctgagaacagcgccccggggacccccatcctgcaactgcgcgcagccgacttggacgtgggggtcaacgggcagatcgaatacgtgttcggggcggccaccgagtcggtgaggcggctgctgcgccttgacgagacgtccggctggctcagcgtcctgcaccggatcgaccgcgaggaggtgaaccagctgcgcttcacggtcatggcccgcgaccgcgggcagccccccaagaccgacaaggccaccgtggtccttaacatcaaagacgagaacgacaacgtgccgtccattgaaatccgcaagattgggcgcatccccctcaaggacggggtggccaacgtggccgaggacgttctggtcgacacccccatcgctctggtgcaggtgtccgaccgagaccaaggcgagaacggggtggtcacctgcaccgtggtgggcgacgtgcccttccagctcaagccagccagcgacaccgagggcgaccagaacaagaaaaagtacttcttgcacacctcgacccctctggactatgaggccacccgggagttcaacgtggtcatcgtggcggtggactcaggcagccccagcctctcgagcaacaactccctgattgtcaaggtgggagacaccaacgacaacccgcccatgttcggccagtcggtggtggaggtttacttccctgagaacaacatcccgggcgagagggtggccacggtgctggcgacagacgcagacagcggtaagaacgccgagatcgcctactcgctggactcctctgtgatggggatctttgccatcgatcccgattctggggacatcctggtcaataccgtgctggaccgcgagcagactgacaggtatgagtttaaagttaacgccaaagacaaaggcatccccgtgctgcagggcagcactacggtgattgtgcaggtggctgataaaaatgacaatgaccctaagtttatgcaggacgtcttcaccttttatgtgaaagaaaacttgcagcccaacagccctgtggggatggtcaccgtgatggatgctgacaaggggcggaatgcagagatgagcctgtacatagaggagaacaataacattttttctattgaaaatgacacggggaccatttactccacaatgtcttttgaccgggaacatcagaccacatacactttcagagtcaaggctgtggatgggggagatcctcccagatctgccacagctacagtctcgctttttgtgatggatgaaaatgacaatgctcccacagttacccttcccaaaaacatttcctacactttactgccaccttcgagtaatgtcaggacagtagtagctacagtgttggcaacagacagtgatgatggcatcaatgcagacctgaactacagcattgtgggaggaaatcccttcaagctgtttgaaattgatcccactagtggtgtggtttccttagtgggaaaactcacccaaaagcattatggcttgcacaggttggtggtgcaagtgaatgacagtgggcagccttcccagtccaccacgactctggtgcacgtgtttgtcaatgaaagtgtttctaatgcaactgcgattgactcccagatagctagaagtttgcacatcccactcacccaggatatagctggtgacccaagctatgaaattagcaaacagagactcagtattgtcattggcgtggttgctggcattatgacggtgattctaatcatcttaattgtagtgatggcaaggtactgcaggtccaaaaataaaaatggctatgaagccggcaaaaaagatcacgaagacttttttacaccccaacagcatgacaaatctaaaaagcctaaaaaggacaagaaaaacaaaaaatctaagcagcctctctacagcagcattgtcactgtggaggcttctaagccaaatggacagaggtatgatagtgtcaatgagaagctgtcagacagcccaagcatggggcgatacaggtccgttaatggtgggcccggcagtcctgacctggcaaggcattacaaatctagttccccattgcctactgttcagcttcatccccagtcaccaactgcaggaaaaaaacaccaggccgtacaagatctaccaccagccaacacatttgtgggagcaggagacaacatttcaattggatcagatcactgctctgagtacagctgtcaaaccaataacaagtacagcaaacagccatttcgtagagtgacgttttctgttgtgagtcagcctcaggacccacatcaggggtcactgcagagttgctatgacagcgggctggaggagtcagaaacaccaagcagtaagagttcatcagggccaagactgggtgcgcttccactcccagaggacaactatgaaaggaccacgccggatggcagtgttggtgaggcagagcatatggaaaatgattcaaggcctcttccagatgtagccctgactgggaagtgcactcgtgagtgtgatgagtatggccactcagactcctgctggatgccggtccgcacttctccggagaggaagaagagccagcctaaactgtccactttcatgcctgttgatgaacgaggaagccaggaaaagctggccaatggggaggccgccatcatgggtgaccgcaacagaaacctcctgaacaaaaagttgacctcatcctatgagaccttcagtgcagctagtttcagcaaaaatgaggaagccaaccctgaggatattccccttacaaaaacaggggaatataagccatctcctgtcaatactctcactagaagagaagtttacctgtag

SEQ ID NO: 68782 - DNA, 3768 bp, Artificial Sequence
  derived and/or modified sequence
atgctgagaatgagaaccgccggctgggccagaggctggtgcctgggctgctgcctgctgctgcccctgagcctgagcctggccgccgccaagcagctgctgagatacagactggccgaggagggccccgccgacgtgagaatcggcaacgtggccagcgacctgggcatcgtgaccggcagcggcgaggtgaccttcagcctggagagcggcagcgagtacctgaagatcgacaacctgaccggcgagctgagcaccagcgagagaagaatcgacagagagaagctgccccagtgccagatgatcttcgacgagaacgagtgcttcctggacttcgaggtgagcgtgatcggccccagccagagctgggtggacctgttcgagggccaggtgatcgtgctggacatcaacgacaacacccccaccttccccagccccgtgctgaccctgaccgtggaggagaacagacccgtgggcaccctgtacctgctgcccaccgccaccgacagagacttcggcagaaacggcatcgagagatacgagctgctgcaggagcccggcggcggcggcagcggcggcgagagcagaagagccggcgccgccgacagcgccccctaccccggcggcggcggcaacggcgccagcggcggcggcagcggcggcagcaagagaagactggacgccagcgagggcggcggcggcaccaaccccggcggcagaagcagcgtgttcgagctgcaggtggccgacacccccgacggcgagaagcagccccagctgatcgtgaagggcgccctggacagagagcagagagacagctacgagctgaccctgagagtgagagacggcggcgacccccccagaagcagccaggccatcctgagagtgctgatcaccgacgtgaacgacaacagccccagattcgagaagagcgtgtacgaggccgacctggccgagaacagcgcccccggcacccccatcctgcagctgagagccgccgacctggacgtgggcgtgaacggccagatcgagtacgtgttcggcgccgccaccgagagcgtgagaagactgctgagactggacgagaccagcggctggctgagcgtgctgcacagaatcgacagagaggaggtgaaccagctgagattcaccgtgatggccagagacagaggccagccccccaagaccgacaaggccaccgtggtgctgaacatcaaggacgagaacgacaacgtgcccagcatcgagatcagaaagatcggcagaatccccctgaaggacggcgtggccaacgtggccgaggacgtgctggtggacacccccatcgccctggtgcaggtgagcgacagagaccagggcgagaacggcgtggtgacctgcaccgtggtgggcgacgtgcccttccagctgaagcccgccagcgacaccgagggcgaccagaacaagaagaagtacttcctgcacaccagcacccccctggactacgaggccaccagagagttcaacgtggtgatcgtggccgtggacagcggcagccccagcctgagcagcaacaacagcctgatcgtgaaggtgggcgacaccaacgacaacccccccatgttcggccagagcgtggtggaggtgtacttccccgagaacaacatccccggcgagagagtggccaccgtgctggccaccgacgccgacagcggcaagaacgccgagatcgcctacagcctggacagcagcgtgatgggcatcttcgccatcgaccccgacagcggcgacatcctggtgaacaccgtgctggacagagagcagaccgacagatacgagttcaaggtgaacgccaaggacaagggcatccccgtgctgcagggcagcaccaccgtgatcgtgcaggtggccgacaagaacgacaacgaccccaagttcatgcaggacgtgttcaccttctacgtgaaggagaacctgcagcccaacagccccgtgggcatggtgaccgtgatggacgccgacaagggcagaaacgccgagatgagcctgtacatcgaggagaacaacaacatcttcagcatcgagaacgacaccggcaccatctacagcaccatgagcttcgacagagagcaccagaccacctacaccttcagagtgaaggccgtggacggcggcgacccccccagaagcgccaccgccaccgtgagcctgttcgtgatggacgagaacgacaacgcccccaccgtgaccctgcccaagaacatcagctacaccctgctgccccccagcagcaacgtgagaaccgtggtggccaccgtgctggccaccgacagcgacgacggcatcaacgccgacctgaactacagcatcgtgggcggcaaccccttcaagctgttcgagatcgaccccaccagcggcgtggtgagcctggtgggcaagctgacccagaagcactacggcctgcacagactggtggtgcaggtgaacgacagcggccagcccagccagagcaccaccaccctggtgcacgtgttcgtgaacgagagcgtgagcaacgccaccgccatcgacagccagatcgccagaagcctgcacatccccctgacccaggacatcgccggcgaccccagctacgagatcagcaagcagagactgagcatcgtgatcggcgtggtggccggcatcatgaccgtgatcctgatcatcctgatcgtggtgatggccagatactgcagaagcaagaacaagaacggctacgaggccggcaagaaggaccacgaggacttcttcaccccccagcagcacgacaagagcaagaagcccaagaaggacaagaagaacaagaagagcaagcagcccctgtacagcagcatcgtgaccgtggaggccagcaagcccaacggccagagatacgacagcgtgaacgagaagctgagcgacagccccagcatgggcagatacagaagcgtgaacggcggccccggcagccccgacctggccagacactacaagagcagcagccccctgcccaccgtgcagctgcacccccagagccccaccgccggcaagaagcaccaggccgtgcaggacctgccccccgccaacaccttcgtgggcgccggcgacaacatcagcatcggcagcgaccactgcagcgagtacagctgccagaccaacaacaagtacagcaagcagcccttcagaagagtgaccttcagcgtggtgagccagccccaggacccccaccagggcagcctgcagagctgctacgacagcggcctggaggagagcgagacccccagcagcaagagcagcagcggccccagactgggcgccctgcccctgcccgaggacaactacgagagaaccacccccgacggcagcgtgggcgaggccgagcacatggagaacgacagcagacccctgcccgacgtggccctgaccggcaagtgcaccagagagtgcgacgagtacggccacagcgacagctgctggatgcccgtgagaaccagccccgagagaaagaagagccagcccaagctgagcaccttcatgcccgtggacgagagaggcagccaggagaagctggccaacggcgaggccgccatcatgggcgacagaaacagaaacctgctgaacaagaagctgaccagcagctacgagaccttcagcgccgccagcttcagcaagaacgaggaggccaaccccgaggacatccccctgaccaagaccggcgagtacaagcccagccccgtgaacaccctgaccagaagagaggtgtacctgtag

SEQ ID NO: 68783 - protein, 538 aa, Artificial Sequence
  derived and/or modified sequence
MEESVNQMQPLNEKQIANSQDGYVWQVTDMNRLHRFLCFGSEGGTYYIKEQKLGLENAEALIRLIEDGRGCEVIQEIKSFSQEGRTTKQEPMLFALAICSQCSDISTKQAAFKAVSEVCRIPTHLFTFIQFKKDLKESMKCGMWGRALRKAIADWYNEKGGMALALAVTKYKQRNGWSHKDLLRLSHLKPSSEGLAIVTKYITKGWKEVHELYKEKALSVETEKLLKYLEAVEKVKRTRDELEVIHLIEEHRLVREHLLTNHLKSKEVWKALLQEMPLTALLRNLGKMTANSVLEPGNSEVSLVCEKLCNEKLLKKARIHPFHILIALETYKTGHGLRGKLKWRPDEEILKALDAAFYKTFKTVEPTGKRFLLAVDVSASMNQRVLGSILNASTVAAAMCMVVTRTEKDSYVVAFSDEMVPCPVTTDMTLQQVLMAMSQIPAGGTDCSLPMIWAQKTNTPADVFIVFTDNETFAGGVHPAIALREYRKKMDIPAKLIVCGMTSNGFTIADPDDRGMLDMCGFDTGALDVIRNFTLDMI

SEQ ID NO: 68784 - protein, 263 aa, Artificial Sequence
  derived and/or modified sequence
MPLTALLRNLGKMTANSVLEPGNSEVSLVCEKLCNEKLLKKARIHPFHILIALETYKTGHGLRGKLKWRPDEEILKALDAAFYKTFKTVEPTGKRFLLAVDVSASMNQRVLGSILNASTVAAAMCMVVTRTEKDSYVVAFSDEMVPCPVTTDMTLQQVLMAMSQIPAGGTDCSLPMIWAQKTNTPADVFIVFTDNETFAGGVHPAIALREYRKKMDIPAKLIVCGMTSNGFTIADPDDRGMLDMCGFDTGALDVIRNFTLDMI

SEQ ID NO: 68785 - DNA, 1617 bp, Artificial Sequence
  derived and/or modified sequence
atggaggagagcgtgaaccagatgcagcccctgaacgagaagcagatcgccaacagccaggacggctacgtgtggcaggtgaccgacatgaacagactgcacagattcctgtgcttcggcagcgagggcggcacctactacatcaaggagcagaagctgggcctggagaacgccgaggccctgatcagactgatcgaggacggcagaggctgcgaggtgatccaggagatcaagagcttcagccaggagggcagaaccaccaagcaggagcccatgctgttcgccctggccatctgcagccagtgcagcgacatcagcaccaagcaggccgccttcaaggccgtgagcgaggtgtgcagaatccccacccacctgttcaccttcatccagttcaagaaggacctgaaggagagcatgaagtgcggcatgtggggcagagccctgagaaaggccatcgccgactggtacaacgagaagggcggcatggccctggccctggccgtgaccaagtacaagcagagaaacggctggagccacaaggacctgctgagactgagccacctgaagcccagcagcgagggcctggccatcgtgaccaagtacatcaccaagggctggaaggaggtgcacgagctgtacaaggagaaggccctgagcgtggagaccgagaagctgctgaagtacctggaggccgtggagaaggtgaagagaaccagagacgagctggaggtgatccacctgatcgaggagcacagactggtgagagagcacctgctgaccaaccacctgaagagcaaggaggtgtggaaggccctgctgcaggagatgcccctgaccgccctgctgagaaacctgggcaagatgaccgccaacagcgtgctggagcccggcaacagcgaggtgagcctggtgtgcgagaagctgtgcaacgagaagctgctgaagaaggccagaatccaccccttccacatcctgatcgccctggagacctacaagaccggccacggcctgagaggcaagctgaagtggagacccgacgaggagatcctgaaggccctggacgccgccttctacaagaccttcaagaccgtggagcccaccggcaagagattcctgctggccgtggacgtgagcgccagcatgaaccagagagtgctgggcagcatcctgaacgccagcaccgtggccgccgccatgtgcatggtggtgaccagaaccgagaaggacagctacgtggtggccttcagcgacgagatggtgccctgccccgtgaccaccgacatgaccctgcagcaggtgctgatggccatgagccagatccccgccggcggcaccgactgcagcctgcccatgatctgggcccagaagaccaacacccccgccgacgtgttcatcgtgttcaccgacaacgagaccttcgccggcggcgtgcaccccgccatcgccctgagagagtacagaaagaagatggacatccccgccaagctgatcgtgtgcggcatgaccagcaacggcttcaccatcgccgaccccgacgacagaggcatgctggacatgtgcggcttcgacaccggcgccctggacgtgatcagaaacttcaccctggacatgatctag

SEQ ID NO: 68786 - DNA, 1617 bp, Artificial Sequence
  derived and/or modified sequence
atggaagagagtgtaaaccagatgcagcccctgaatgagaagcaaatcgccaattcccaggacggctacgtttggcaggttacagatatgaatagactccaccgatttttatgttttgggagtgaaggggggacctattacatcaaagaacagaagcttggcctggaaaacgctgaagccctcatccggctgatcgaagacggccgaggttgcgaggtgatccaggaaataaagtcattttcccaggaaggccgtaccactaagcaggaacccatgctattcgccctcgccatctgcagccagtgttctgacatttccacaaagcaggccgcttttaaggccgttagtgaggtatgtcgaatcccaacccacctgttcacttttatccaatttaaaaaggacctcaaagaaagtatgaagtgtgggatgtggggacgtgccctgagaaaagctatagccgattggtacaacgaaaagggcggcatggcacttgcactggctgtaaccaagtacaagcagcgtaacggatggagtcacaaagatctcctgagactaagtcatctgaaaccctcgagcgaaggactggctatagtgacaaaatacattaccaaaggctggaaagaagtgcacgaactctacaaggaaaaagctctgtccgttgagacagagaaattactcaagtatcttgaggcagtcgaaaaggttaaaaggacacgagatgagctggaagtgattcatttaatcgaggaacatcgcttggtaagagaacacttgcttaccaatcatctgaaaagcaaagaggtttggaaagctctgctacaggaaatgccactgactgctctattgcgcaatttgggaaagatgacagccaatagtgtactcgagcctggcaactctgaagtctccctggtctgcgagaagctctgcaatgaaaagctgcttaagaaggcgcggattcatccatttcatattctgatcgctcttgagacttacaaaaccggacatggactgagagggaaactaaaatggcgtcccgacgaggagattctgaaagcccttgatgctgctttctataagacattcaaaactgtggagcccaccggtaaaaggttcttactggctgtggatgtttccgcttcaatgaaccagagggtgctaggcagcatacttaatgcctcgaccgttgcagccgccatgtgtatggtggtgacacgtacagagaaagatagctatgttgtcgcattttccgacgagatggtcccctgtcctgtcactacggatatgacgcttcagcaggtcctgatggctatgagtcaaatcccggccggcgggacggattgctctctgcccatgatttgggctcagaagaccaatactcctgctgacgtcttcatcgtatttaccgacaacgaaaccttcgcaggtggagtgcatccggcaattgctctacgagaataccggaagaagatggacatcccggccaaattaattgtgtgtgggatgacctcgaatggcttcaccatagctgaccccgatgatcgtggcatgctggacatgtgcgggtttgatacgggggcccttgatgtgatcaggaatttcactctggacatgatctag

SEQ ID NO: 68787 - DNA, 1617 bp, Artificial Sequence
  derived and/or modified sequence
atggaggagtccgtgaatcagatgcagccactgaacgagaaacagattgctaactctcaggacggctacgtatggcaggtcacagacatgaatcggctccaccgatttctgtgctttggttctgaagggggaacctactacatcaaggagcaaaaactggggttggagaatgctgaagcgcttattaggctgatcgaggatgggaggggctgcgaggtgattcaagagatcaagagtttttctcaggagggtagaaccactaaacaggagcccatgcttttcgctcttgcaatctgtagtcagtgcagcgatatctcgacaaagcaagccgcatttaaggcagtgagtgaggtctgtagaatccccacccatttatttaccttcatccagttcaagaaggacctgaaggagtccatgaaatgtggcatgtggggcagggccctgagaaaggccatagccgactggtataatgaaaaggggggtatggcactggctctggctgttaccaagtacaaacagagaaatgggtggtcccacaaggatctcctaaggctcagccatctgaagcctagttccgaaggccttgctatcgttaccaagtatattacaaaggggtggaaggaggtccatgaactatacaaggagaaagcattatctgtcgagaccgagaaactcctaaagtaccttgaggcagtggaaaaggtcaagaggacaagagacgaactggaggtgatacatttgatcgaagagcatagactggttcgggagcatttgctcactaatcatcttaagtccaaggaggtgtggaaagccctgcttcaggagatgcccctaaccgccctgctcaggaacctgggaaaaatgaccgctaactccgtgctcgagcctggaaattctgaggtgtccctggtgtgcgagaaattatgcaacgagaagttactaaagaaggccaggattcatccctttcacattctcattgccttggagacctataagactgggcacggactgaggggaaagctgaaatggagacccgacgaagaaatcctgaaggccctggacgccgccttctacaagacattcaaaacagtcgagcccacaggcaaaagatttctgctagccgtagacgtgagtgcatctatgaaccagagagttctgggaagcatactcaatgcgtctacggtggccgccgctatgtgtatggtggttactaggactgagaaagattcatatgtggtggccttttcggatgaaatggtaccgtgcccagtaacgacggacatgacgctgcagcaggtccttatggcaatgagtcagatacccgcaggcggcaccgactgcagccttcccatgatttgggcacagaaaacaaatactcctgctgatgtgtttattgtctttaccgacaacgaaactttcgccgggggcgtccacccagccattgcacttcgagagtacaggaagaaaatggacattcccgctaagctgatcgtgtgcggaatgacttcgaacggcttcaccatagcggatcccgatgatcgaggtatgctggatatgtgtggcttcgataccggtgcgctggacgtcatccgcaattttactctcgatatgatttag

SEQ ID NO: 68788 - DNA, 1617 bp, Artificial Sequence
  derived and/or modified sequence
atggaggagtccgtcaaccagatgcagccactgaatgaaaagcagatagcaaattctcaggacggctatgtgtggcaggtcacagacatgaaccgcctccatcggttcctctgtttcggaagtgaaggcggtacatattatataaaggagcagaaacttggcctggaaaacgcagaggcactgatccggcttatcgaagatgggcggggttgcgaggtgatacaggagatcaagtccttcagtcaggagggccggaccacgaagcaggaaccaatgctttttgcgctggcaatttgttcccagtgcagtgatatctccaccaaacaagccgcattcaaggcggtgagcgaagtttgccggattccaacccacctattcacctttatccaatttaaaaaggacctgaaggagtccatgaaatgcggcatgtggggcagggccctcagaaaggctatcgctgactggtataacgagaaaggaggcatggctctggcgctggccgttaccaagtacaagcagagaaacggttggagccacaaagacttattaaggctcagccatttaaaaccatcttctgaggggctcgcgatagtgactaaatatataaccaaaggctggaaggaggtccatgaactctacaaagagaaggccctaagtgtggagaccgagaaactcctgaaatatcttgaggcagtagagaaggtcaaacgtactcgggatgaattggaagtgatccatctcattgaggagcatcgcctggtacgcgaacacctcctcacgaaccacttgaagtctaaagaagtgtggaaagcccttctccaggaaatgccattaacagccttactccggaatctgggtaaaatgacagcaaacagcgtgctggagcccggcaattctgaggttagcttagtgtgcgagaaactgtgtaacgaaaaattgctgaagaaagccaggattcatcctttccacatactgatcgcactggagacttacaagacagggcatgggcttagggggaaattgaaatggcgaccagatgaagaaattctgaaggctctcgacgctgcattctataaaacatttaaaacagtggaacccacaggcaaacgctttctcctggcagttgacgtctccgcgtccatgaaccagcgtgttctgggttccatcttaaacgcatctacagtcgccgcagcaatgtgcatggtcgtcactagaacggaaaaagactcttacgtcgtcgccttttccgacgagatggtcccatgccccgtgaccaccgacatgaccctccagcaagtgctgatggcgatgtctcaaattccagccggtggtactgattgcagcctccccatgatttgggcccagaagacaaatacccccgctgatgtcttcatcgttttcaccgataacgagaccttcgccgggggggtccatcctgccatcgctctgagagagtataggaaaaagatggatatcccagcgaagctgatagtgtgcgggatgaccagcaacggattcacaattgccgatcctgatgaccggggcatgttggacatgtgtggatttgataccggcgctcttgacgtgatccggaatttcaccctggacatgatctag

SEQ ID NO: 68789 - DNA, 1617 bp, Artificial Sequence
  derived and/or modified sequence
atggaggagagcgtgaaccagatgcagcccctgaatgagaagcagatcgccaacagccaggacggctacgtgtggcaggtgacagacatgaaccggctgcaccgcttcctgtgctttggaagtgaaggaggcacctactacatcaaggagcagaagctgggcctggagaatgctgaggccctgatccggctgattgaagatggccggggctgtgaggtgatccaggagatcaagagcttcagccaggagggccgcaccaccaagcaggagcccatgctgtttgccctggccatctgcagccagtgcagcgacatcagcaccaagcaggccgccttcaaggctgtgtctgaggtgtgccgcatccccacccacctgttcaccttcatccagttcaagaaggacctgaaggagagcatgaagtgtggcatgtggggccgggccctgaggaaggccatcgctgactggtacaatgaaaaaggaggcatggccctggccctggccgtgaccaagtacaagcagagaaatggctggagccacaaggacctgctgcggctgagccacctgaagcccagcagcgagggcctggccatcgtgaccaagtacatcaccaagggctggaaggaggtgcatgagctgtacaaggagaaggccctgtctgtggagacagagaagctgctgaagtacctggaggccgtggagaaggtgaagaggaccagagatgagctggaggtgatccacctgattgaggagcaccggctggtgcgggagcacctgctgaccaaccacctgaagagcaaggaggtgtggaaggccctgctgcaggagatgcccctgacagccctgctgaggaacctgggcaagatgacagccaacagcgtgctggagcccggcaacagcgaggtgtccctggtgtgtgagaagctgtgcaatgagaagctgctgaagaaggcccgcatccaccccttccacatcctgattgccctggagacctacaagacaggccacggcctgcggggcaagctgaagtggaggccagatgaggagatcctgaaggccctggatgctgccttctacaagaccttcaagacagtggagcccaccgggaagcgcttcctgctggccgtggatgtgtctgcctccatgaaccagagggtgctgggcagcatcctgaatgccagcacagtggccgccgccatgtgcatggtggtgaccaggacagagaaggacagctatgtggtggccttcagtgatgagatggtgccctgccctgtgaccacagacatgaccctgcagcaggtgctgatggccatgagccagatcccagctgggggcacagactgcagcctgcccatgatctgggcccagaagaccaacaccccagcagatgtgttcatcgtgttcacagacaatgagacctttgctgggggcgtgcacccagccatcgccctgcgggagtacaggaagaagatggacatcccagccaagctgattgtgtgtggcatgaccagcaatggcttcaccatcgctgaccctgatgaccggggcatgctggacatgtgtggctttgacaccggggccctggatgtgatccggaacttcaccctggacatgatctag

SEQ ID NO: 68790 - DNA, 1617 bp, Artificial Sequence
  derived and/or modified sequence
atggaggagagcgtgaaccagatgcagcccctgaacgagaagcagatcgccaatagccaggatggctacgtgtggcaggttaccgacatgaatcggctccacagattcttatgtttcggatccgagggtggtacttactatatcaaggagcaaaagctcggcctagagaatgcagaggcgctgattagacttatcgaggacgggcgtggttgcgaagtgatccaggagattaagtctttcagccaggagggtcggacgacaaaacaggaacccatgctcttcgcgctggccatctgctcccagtgctcagatattagcacaaagcaagctgcttttaaggccgtgtccgaagtgtgcagaatccccactcacctgtttaccttcatccagtttaagaaggacttaaaggaaagtatgaagtgtggcatgtgggggcgcgcactgagaaaggccatcgcagattggtataacgagaagggcggaatggcactggcactggctgtaaccaagtacaaacaacggaacggatggagccataaagacctcttgaggctgtctcatttgaagccaagctccgagggactggccattgtcaccaaatacattaccaaagggtggaaagaggtccatgaactctacaaggagaaggcattgagcgtagaaacggaaaaattgttaaaatacctggaagctgttgagaaggtgaagcgcacccgcgacgagcttgaggtcattcacctgatcgaggagcatagacttgttagagagcacctgctcactaatcatttaaagagtaaagaagtatggaaagcactactgcaggaaatgccactgactgccctgctacgcaatttgggcaaaatgacagcaaacagcgttctggagcctgggaactcagaggtttcgctcgtgtgtgagaagctgtgcaacgagaaactgcttaagaaggcgaggattcacccatttcatatcctcatagccctggagacttataagactggacacggactccgaggaaagctcaaatggcgaccagacgaggagatcctgaaggctttggatgccgccttttacaagaccttcaaaaccgtggaacctacgggaaagcggttcttacttgccgtggacgtgtcagcttctatgaaccagcgagtattgggcagcattctaaacgcctctactgttgcggccgccatgtgtatggtggtcacacgcaccgaaaaggatagctacgtggtggccttcagtgacgagatggtgccatgccccgtcacaactgatatgaccctgcagcaggtgcttatggcgatgagtcaaatcccagcaggaggcactgattgtagtctccctatgatttgggcccagaagaccaacacaccagccgacgtgtttatcgtttttacggacaacgagacctttgcagggggagtacatcccgccatcgccctgcgcgagtataggaagaaaatggatatccccgctaaattgatcgtgtgcgggatgacgagtaacgggttcactatcgccgaccctgacgaccggggaatgttagacatgtgcggattcgatacaggggcgctggacgttattagaaacttcacacttgacatgatatag

SEQ ID NO: 68791 - DNA, 1617 bp, Artificial Sequence
  derived and/or modified sequence
atggaggagagcgtgaaccagatgcagcccctgaacgagaagcagattgccaactcacaagatggatatgtttggcaggttactgacatgaatagactgcaccgattcctttgtttcggcagcgagggaggcacgtattacattaaggaacagaagcttggcctggaaaacgccgaagcccttataagactgatcgaagacgggcggggatgcgaagtgattcaggaaataaagtctttttctcaggagggccgcaccacgaagcaggaacccatgctctttgcacttgccatctgctcccagtgcagtgatatttctactaagcaagctgcattcaaagctgtgtccgaagtgtgccgcatccctacccacctatttactttcatccagttcaagaaagatttaaaggaaagcatgaaatgtgggatgtggggtagagccctgcgtaaagccatcgcagactggtataatgagaagggtgggatggcgttggccctggccgtaaccaaatataagcagaggaacggttggagccacaaggatctgctccggctgtcgcacctgaagccttctagtgagggtctggcgatcgtgacaaagtatataactaaaggctggaaagaagttcatgagctctacaaagaaaaggcactctccgtggaaaccgagaaattgctgaaatacctggaggccgttgagaaagtgaaacgcacccgcgatgagctggaggtgattcatctcattgaagagcataggctagtaagggaacacttgctgaccaatcatcttaagtccaaggaggtgtggaaggccctcctgcaggagatgccactgaccgccttgctgcgcaacctgggaaagatgactgctaattcagttttagaaccaggcaacagcgaagtttctctcgtgtgtgagaaattgtgcaacgaaaaattgctgaaaaaggcgcggattcatccttttcacatactgatcgctttggaaacctacaaaaccggacacggcctgcgaggaaagctgaagtggcgcccggatgaggagatcctgaaagccctcgatgcagccttttacaagacttttaaaacggtggagccaacggggaagagatttctactcgcagtggacgtgagcgcctccatgaaccaaagagttctcggatccattttgaacgcttccacagtcgccgcggccatgtgtatggtggtaaccagaactgagaaggattcctacgtggtggcctttagtgatgagatggttccgtgcccagtgacaaccgacatgacgctacagcaggttctgatggctatgagccagatcccagctggcggtacagactgtagcctgcctatgatttgggcccagaagaccaacacccccgccgacgtattcatagtcttcactgacaacgaaaccttcgctggaggggtgcaccctgcgatcgccctgcgagagtaccgcaaaaagatggatatccccgctaagctgatcgtttgtggcatgacgagcaatggattcaccatcgccgaccccgatgacagggggatgctagacatgtgtggcttcgacaccggagcactggatgtaatccgcaatttcactttggacatgatttag

SEQ ID NO: 68792 - DNA, 1617 bp, Artificial Sequence
  derived and/or modified sequence
atggaggagagcgtgaaccagatgcagcccctgaacgagaagcagatcgcgaacagtcaagacggttacgtgtggcaggtgaccgatatgaatcgcctgcatagatttctgtgcttcggctccgaaggagggacgtactacatcaaggagcagaagctgggtctcgaaaacgctgaggcattgattcggcttatagaggacgggcggggatgtgaggtgattcaggaaatcaaatcctttagtcaggaaggccgcaccaccaagcaggagcccatgctatttgccctggccatttgcagccagtgctcagacatcagcaccaaacaggctgcgttcaaggccgtgtctgaagtatgcagaattcccacacaccttttcacattcattcaatttaaaaaagatttgaaagagagcatgaagtgtggtatgtggggccgagcactccgcaaggcaattgccgattggtacaacgagaagggtggtatggccctggccctcgccgttactaagtataaacaacgaaacggatggagccataaagatcttttaaggctgtcgcatctgaaacctagctctgagggcctcgcaattgtgactaagtacatcactaagggttggaaagaggtgcacgaattatacaaggagaaggccctgagcgtggaaaccgaaaagctgctgaagtacctggaagccgtggaaaaagtcaaaaggacacgcgatgaacttgaagtaattcacttaatcgaggagcaccggcttgtgcgtgagcatctgctgacaaaccatctcaagtccaaagaagtgtggaaggccctgctgcaggaaatgcctctgacggcacttctacggaatttaggcaagatgactgcaaattctgtgctagaacctgggaacagcgaggtgagcctggtctgtgaaaagctctgcaatgaaaaactcttaaagaaagccagaatccatcccttccacatcctgattgccctagagacctacaaaacagggcatgggcttcgcggcaagctgaagtggagaccagacgaggagatactgaaggctcttgatgctgctttttacaagactttcaagactgtcgagcctactgggaagcgctttctcctagctgtggacgtatccgccagtatgaatcaacgcgtgctaggttccatcctcaacgcctctactgtcgctgccgccatgtgcatggtggtcacccgcaccgagaaggactcatacgttgttgcattttcggacgagatggtcccctgcccggtgaccaccgatatgaccctccagcaagttctcatggccatgagccagattccagcgggcggtacggactgcagcttacctatgatttgggctcagaagacaaatactcccgcagacgtttttattgtgtttactgataatgagacattcgcaggcggggttcatcccgcaatcgccttgcgggaatatcgcaaaaaaatggacatacccgcgaaactcattgtgtgcggaatgacaagcaatggattcaccatcgcggaccccgacgaccgggggatgttggacatgtgcggattcgacacaggagctcttgacgtgatcaggaactttaccctggacatgatatag

SEQ ID NO: 68793 - DNA, 1617 bp, Artificial Sequence
  derived and/or modified sequence
atggaagagtctgtcaaccagatgcagccgctgaatgagaagcagatcgcaaattcacaggacggctacgtatggcaagtgacggacatgaaccgcctgcacagattcctgtgcttcggaagtgaagggggaacgtactacatcaaagagcagaaattgggcttggagaatgcagaagcgctgattcgcctgatagaagatggcagaggatgcgaggtgatccaggaaatcaaatcgtttagccaggagggtaggaccacaaaacaggagccaatgctttttgctctcgcgatctgcagtcagtgcagcgatatctcaaccaagcaggccgctttcaaagctgtgtctgaggtgtgcagaatcccaacccatctgttcacattcatccagttcaaaaaagacctcaaggaaagtatgaaatgcggaatgtggggaagggccctgagaaaggcaatcgctgactggtataatgagaaggggggtatggccctcgcattagcagttactaaatataagcagagaaacggctggtcccacaaggatctacttaggctgagccacctgaaaccgagctccgagggcctggctatcgtcactaaatacatcaccaagggttggaaagaggtgcacgagttgtacaaggagaaggcgcttagtgtggaaactgagaaactgctaaaatacctggaggcagtcgaaaaggtgaagaggaccagggatgaactcgaggtcatccaccttattgaggaacaccggctggtgcgcgaacacctgctcactaatcaccttaagtcaaaggaagtctggaaggccctgctccaggagatgcctctcaccgctttactgcgtaacctcggtaaaatgacagccaactcggtcctggaaccaggcaactccgaagtaagtttggtgtgcgagaagttatgcaatgaaaagctcctgaagaaggccaggattcatcccttccatatccttatcgcactcgaaacctacaagaccggccacggtcttagaggaaagctgaaatggcgccctgatgaggaaatcctaaaggctctcgatgccgctttctacaagaccttcaagactgtcgagcccaccggaaagcgctttctgctcgcagtagacgtgagcgcgtcgatgaaccagagggttctggggtcaattctcaatgcgagtacagttgctgccgcaatgtgtatggttgtgactcggacagaaaaggattcgtacgtcgttgcattttctgacgagatggtcccgtgcccagtcacgactgacatgacgctgcagcaggttttaatggctatgagtcagatccctgcaggagggacggactgcagccttcccatgatctgggctcagaaaacgaacactcccgctgatgtgttcattgtcttcacagataatgagacttttgccggtggagttcaccccgctatcgcgttgagagagtaccggaagaaaatggacattccagctaaactcatcgtgtgcggtatgacttccaatgggttcactatcgcagaccctgatgatagggggatgctggatatgtgcgggttcgatacaggcgctcttgatgtgatcaggaactttacgctggacatgatctag

SEQ ID NO: 68794 - DNA, 1617 bp, Artificial Sequence
  derived and/or modified sequence
atggaggagtcagtgaatcaaatgcagcccctaaatgagaaacagatcgctaactctcaggatggctatgtgtggcaggtaacagacatgaacaggctgcaccggtttctatgtttcgggagtgaagggggtacatactacattaaagagcagaagcttggactcgaaaatgcagaagccctgatccggctcatcgaggacggaagggggtgcgaagtcatccaggagattaagagtttcagccaggagggaaggaccaccaagcaggagcccatgctgtttgccctggctatttgttctcagtgctctgacatcagcacgaagcaggctgcctttaaggccgtgtcagaggtgtgcaggattcctacacacctcttcacattcatacaattcaaaaaggacctaaaggagtctatgaaatgtggaatgtggggccgtgctctccgcaaggcaattgcagactggtataacgagaagggtggcatggccttggctctggctgttactaagtacaaacagcgaaatggctggtctcacaaagacctgcttcggctctcccatctcaagcctagctccgaagggctcgctatcgtgaccaaatacatcacgaaggggtggaaagaggtgcacgaactgtataaggagaaagcacttagcgtggaaacagagaagttgctgaagtaccttgaagctgttgagaaggtgaaaaggactcgcgacgagctggaggtgatccatttgattgaggaacaccgcctggtccgcgagcatcttctcacaaatcacctgaagagcaaggaggtgtggaaggcattactgcaggagatgccattgacggcactcctgcgtaaccttggcaaaatgacagccaattccgtcctggaaccgggaaacagcgaggtaagccttgtctgtgagaagctgtgcaacgaaaaattgctgaagaaagctcgcatccacccatttcacattctgatcgcgcttgagacctacaagactggtcatggtctgagagggaagttaaaatggcggcctgatgaggaaatcttgaaagctcttgatgccgcattctataaaacctttaaaactgtagagcccacaggtaagaggtttttactggctgtggatgtgagcgcgagtatgaaccagagagtactgggctcaatcctcaatgccagtactgtggccgctgcaatgtgcatggtggtcacaaggaccgaaaaggactcttacgtggtggccttctcggacgagatggtgccttgcccagtgacaaccgacatgacactgcaacaggtgcttatggctatgagccagatccccgcaggcggaaccgattgtagtctgcctatgatatgggctcagaaaaccaatacccccgctgacgtgtttattgtcttcactgacaacgaaacttttgcaggcggtgtgcaccctgctattgctctcagggagtataggaaaaaaatggacataccagcaaagctaatcgtttgcggtatgaccagtaacggattcaccattgcagatccagacgacagggggatgctcgatatgtgtgggttcgacaccggtgctctggatgtgattcgcaatttcacattggacatgatttag

SEQ ID NO: 68795 - DNA, 1617 bp, Artificial Sequence
  derived and/or modified sequence
atggaggagtctgttaatcagatgcagcccctgaacgaaaaacagatcgccaattcacaggatggatacgtctggcaggtgacggacatgaataggctgcaccgcttcctgtgttttggctccgagggcggtacctactacataaaagagcagaaactcggactcgagaatgcagaggcgctcattcggcttattgaggacggcagaggatgtgaagtgattcaagagatcaagtcattctctcaggagggtagaactaccaagcaggagcccatgctgttcgcgcttgctatttgctcgcagtgtagcgacatctctacaaaacaggccgcttttaaggccgtctccgaagtgtgcaggatccccactcatctcttcacattcatccagttcaaaaaggatctgaaggagtccatgaagtgtggcatgtggggaagagctttgcgaaaagcaatcgcggattggtataatgaaaaggggggaatggctctggccttggccgtaactaagtataagcagaggaacggatggtctcataaggacctgttacgtctctcacacctgaaaccttcttcagagggcctcgcaattgtgacaaaatacataactaagggatggaaggaagttcacgagctttataaagagaaggcactgagtgtggagaccgaaaaactgctgaaatatctcgaggccgtggaaaaggtgaagcggacgcgggacgagcttgaggttattcatcttattgaagagcatagactggtgcgggaacacctcttgacaaaccatcttaagagtaaggaagtctggaaagccttactccaagaaatgcccttgactgctctcctgagaaacctgggaaaaatgacggctaacagcgtgcttgaacccggtaatagcgaagtttctctggtctgcgagaaactgtgtaacgagaagttgctgaagaaggctaggattcatccctttcacatcctgatagcactggagacctataagactgggcacggcttaaggggcaaacttaaatggcggcctgatgaggagattctaaaggcacttgacgccgctttttacaaaacatttaagacagtggagccgactggcaagcgcttcctgcttgctgtggatgtcagcgcctctatgaaccagcgggtgctaggaagcattctgaacgcatcaactgtagcagccgctatgtgcatggtggtcacgagaacagaaaaggacagttacgtggtggcattttcagatgagatggtcccatgccctgtcactacggacatgactcttcaacaggtgctgatggcaatgtcccagatcccagctggaggcaccgattgttcgctgcccatgatctgggctcaaaagaccaacactcctgccgacgtttttattgtgttcacagataacgagacatttgccggtggcgtccacccggcaattgcactacgcgagtaccggaagaaaatggatatcccagcaaaactgatagtctgtgggatgacatcaaacggcttcaccatcgcggacccagatgacagaggaatgctcgacatgtgcggatttgacacgggagcccttgatgtgatacggaatttcaccctcgacatgatttag

SEQ ID NO: 68796 - DNA, 1791 bp, Artificial Sequence
  derived and/or modified sequence
attttgcctttttgttaggtttcctaaagacaaaaaaaaatggaggaatctgtaaaccaaatgcagccactgaatgagaagcagatagccaattctcaggatggatatgtatggcaagtcactgacatgaatcgactacaccggttcttatgtttcggttctgaaggtgggacttattatatcaaagaacagaagttgggccttgaaaatgctgaagctttaattagattgattgaagatggcagaggatgtgaagtgatacaagaaataaagtcatttagtcaagaaggcagaaccacaaagcaagagcctatgctctttgcacttgccatttgttcccagtgctccgacataagcacaaaacaagcagcatttaaagctgtttctgaagtttgtcgcattcctacccatctctttacttttatccagtttaagaaagatctgaaggaaagcatgaaatgtggcatgtggggtcgtgccctccggaaggctatagcggactggtacaatgagaaaggtggcatggcccttgctctggcagttacaaaatataaacagagaaatggctggtctcacaaagatctattaagattgtcacatcttaaaccttccagtgaaggacttgcaattgtgaccaaatatattacaaagggctggaaagaagttcatgaattgtataaagaaaaagcactctctgtggagactgaaaaattattaaagtatctggaggctgtagagaaagtgaagcgcacaagagatgagctagaagtcattcatctaatagaagaacatagattagttagagaacatcttttaacaaatcacttaaagtctaaagaggtatggaaggctttgttacaagaaatgccgcttactgcattactaaggaatctaggaaagatgactgctaattcagtacttgaaccaggaaattcagaagtatctttagtatgtgaaaaactgtgtaatgaaaaactattaaaaaaggctcgtatacatccatttcatattttgatcgcattagaaacttacaagacaggtcatggtctcagagggaaactgaagtggcgccctgatgaagaaattttgaaagcattggatgctgctttttataaaacatttaagacagttgaaccaactggaaaacgtttcttactagctgttgatgtcagtgcttctatgaaccaaagagttttgggtagtatactcaacgctagtacagttgctgcagcaatgtgcatggttgtcacacgaacagaaaaagattcttatgtagttgctttttccgatgaaatggtaccatgtccagtgactacagatatgaccttacaacaggttttaatggctatgagtcagatcccagcaggtggaactgattgctctcttccaatgatctgggctcagaagacaaacacacctgctgatgtcttcattgtattcactgataatgagacctttgctggaggtgtccatcctgctattgctctgagggagtatcgaaagaaaatggatattccagctaaattgattgtttgtggaatgacatcaaatggtttcaccattgcagacccagatgatagaggcatgttggatatgtgcggctttgatactggagctctggatgtaattcgaaatttcacattagatatgatttaaccataagcagcagcacgatccagagatccattgccatcagtgatctcactaaaaatatacagctacttcccagctaatctccacccaatgaatgatgatggtatagtatgtgcataatggaaagttaccttactg

SEQ ID NO: 68797 - DNA, 3081 bp, Artificial Sequence
  derived and/or modified sequence
tcctgcttgtcggcatcgctccccacaggccgacgtcgagagggcctgctttactcctcctctttctcctccttctcccgcggcttctgcgcggagaggcgtcgcccgggatctgggttttggaagaaggatctttgtgggaagacagggtgaatttatcacagaggaataacgagggagaggagaaaggtttcctaaagacaaaaaaaaatggaggaatctgtaaaccaaatgcagccactgaatgagaagcagatagccaattctcaggatggatatgtatggcaagtcactgacatgaatcgactacaccggttcttatgtttcggttctgaaggtgggacttattatatcaaagaacagaagttgggccttgaaaatgctgaagctttaattagattgattgaagatggcagaggatgtgaagtgatacaagaaataaagtcatttagtcaagaaggcagaaccacaaagcaagagcctatgctctttgcacttgccatttgttcccagtgctccgacataagcacaaaacaagcagcatttaaagctgtttctgaagtttgtcgcattcctacccatctctttacttttatccagtttaagaaagatctgaaggaaagcatgaaatgtggcatgtggggtcgtgccctccggaaggctatagcggactggtacaatgagaaaggtggcatggcccttgctctggcagttacaaaatataaacagagaaatggctggtctcacaaagatctattaagattgtcacatcttaaaccttccagtgaaggacttgcaattgtgaccaaatatattacaaagggctggaaagaagttcatgaattgtataaagaaaaagcactctctgtggagactgaaaaattattaaagtatctggaggctgtagagaaagtgaagcgcacaagagatgagctagaagtcattcatctaatagaagaacatagattagttagagaacatcttttaacaaatcacttaaagtctaaagaggtatggaaggctttgttacaagaaatgccgcttactgcattactaaggaatctaggaaagatgactgctaattcagtacttgaaccaggaaattcagaagtatctttagtatgtgaaaaactgtgtaatgaaaaactattaaaaaaggctcgtatacatccatttcatattttgatcgcattagaaacttacaagacaggtcatggtctcagagggaaactgaagtggcgccctgatgaagaaattttgaaagcattggatgctgctttttataaaacatttaagacagttgaaccaactggaaaacgtttcttactagctgttgatgtcagtgcttctatgaaccaaagagttttgggtagtatactcaacgctagtacagttgctgcagcaatgtgcatggttgtcacacgaacagaaaaagattcttatgtagttgctttttccgatgaaatggtaccatgtccagtgactacagatatgaccttacaacaggttttaatggctatgagtcagatcccagcaggtggaactgattgctctcttccaatgatctgggctcagaagacaaacacacctgctgatgtcttcattgtattcactgataatgagacctttgctggaggtgtccatcctgctattgctctgagggagtatcgaaagaaaatggatattccagctaaattgattgtttgtggaatgacatcaaatggtttcaccattgcagacccagatgatagaggcatgttggatatgtgcggctttgatactggagctctggatgtaattcgaaatttcacattagatatgatttaaccataagcagcagcacgatccagagatccattgccatcagtgatctcactaaaaatatacagctacttcccagctaatctccacccaatgaatgatgatggtatagtatgtgcataatggaaagttaccttactgaaaaaaaaaaaagaaggaaaaataagatgggcccaaaggtctatctactaaactagctcttggggaaatagcttcaggatactgtagtttcctctatctaatagagaactttttgttaacagacactgtaaaatagttttgctttgttgaataatacgtgtgtacctaaaagaggtaagagcaaaaagtgtaattccacatcatgttacttgagaagtgcttaacgttttcttaaatgttttcattgggaaaggacagctttgataatgtccaaatactctgaaatgcactagaccatataactgtgatgaaatatgaaactcatctgtaaacttttataccaagggggtaaaaaaaaaaactaaggcatttgattaaattatgaatgagttttacaaattcctttcagagttttactaagatcacacaaataacagctttcttattcagtgaaaaagatattttatttctgatgttttatttgcacttgtggaatatgttaccattaatcagaaacatcatggcaacccctaagaatagactaagtttgtgttggctgagggattctatttggtttgcttttttttttttgctttgttatattttattgctacaaggggtgtgacttgataatgatttcctctgaattataataacatagccagatgtagtctcacactgtttttcatactcttaagtgtaaataatataaaatgtttcaagcgcttaactccccctcattcacaaagtataacaattaaaatctcaactataaccagtttagctttttccttacttttaaaataaaattttttacttttaactatttttttagttaatatttttaaaagtatacatgtcaatggcctctttgtccattattcattttgtggcaaaatattcttctttgatagtgtaaacaaataataaagcaatctaggtcctttaggtttgaaaggcaatttttgagtagcatattaccagctagccagtcactaggaatttttttcagtattatttgtatgtattaaacttttcattacactaaagtgcattattttattgagcaagtatccttcattgtgaggtttaacattaaagcaatctgttgaaatgcca

SEQ ID NO: 68798 - DNA, 2143 bp, Artificial Sequence
  derived and/or modified sequence
gactgagcgcgggaggacgctctagccaccctagagacatcgaaactcttcccaggccttgcagcacccgtagcggattcggaagggctggggcctgagaagaaagggcggtgattcacagcgccgaggaggcaacatccgggatcctcgcccctctggggcggaggcggggcaaaagaagaggggcaggactcgttcccgggaaccgaacctggaatccccggcggcagtggggctgttgctgttgctgtggctgtcgctgcccgtcaggctgccttcttttgtcgtttcccagcgctgcgcaggacttctcctggcggcgctgcggatccagggggtcggctgccaggtacaggtttcctaaagacaaaaaaaaatggaggaatctgtaaaccaaatgcagccactgaatgagaagcagatagccaattctcaggatggatatgtatggcaagtcactgacatgaatcgactacaccggttcttatgtttcggttctgaaggtgggacttattatatcaaagaacagaagttgggccttgaaaatgctgaagctttaattagattgattgaagatggcagaggatgtgaagtgatacaagaaataaagtcatttagtcaagaaggcagaaccacaaagcaagagcctatgctctttgcacttgccatttgttcccagtgctccgacataagcacaaaacaagcagcatttaaagctgtttctgaagtttgtcgcattcctacccatctctttacttttatccagtttaagaaagatctgaaggaaagcatgaaatgtggcatgtggggtcgtgccctccggaaggctatagcggactggtacaatgagaaaggtggcatggcccttgctctggcagttacaaaatataaacagagaaatggctggtctcacaaagatctattaagattgtcacatcttaaaccttccagtgaaggacttgcaattgtgaccaaatatattacaaagggctggaaagaagttcatgaattgtataaagaaaaagcactctctgtggagactgaaaaattattaaagtatctggaggctgtagagaaagtgaagcgcacaagagatgagctagaagtcattcatctaatagaagaacatagattagttagagaacatcttttaacaaatcacttaaagtctaaagaggtatggaaggctttgttacaagaaatgccgcttactgcattactaaggaatctaggaaagatgactgctaattcagtacttgaaccaggaaattcagaagtatctttagtatgtgaaaaactgtgtaatgaaaaactattaaaaaaggctcgtatacatccatttcatattttgatcgcattagaaacttacaagacaggtcatggtctcagagggaaactgaagtggcgccctgatgaagaaattttgaaagcattggatgctgctttttataaaacatttaagacagttgaaccaactggaaaacgtttcttactagctgttgatgtcagtgcttctatgaaccaaagagttttgggtagtatactcaacgctagtacagttgctgcagcaatgtgcatggttgtcacacgaacagaaaaagattcttatgtagttgctttttccgatgaaatggtaccatgtccagtgactacagatatgaccttacaacaggttttaatggctatgagtcagatcccagcaggtggaactgattgctctcttccaatgatctgggctcagaagacaaacacacctgctgatgtcttcattgtattcactgataatgagacctttgctggaggtgtccatcctgctattgctctgagggagtatcgaaagaaaatggatattccagctaaattgattgtttgtggaatgacatcaaatggtttcaccattgcagacccagatgatagaggcatgttggatatgtgcggctttgatactggagctctggatgtaattcgaaatttcacattagatatgatttaaccataagcagcagcacgatccagagatccattgccatcagtgatctcactaaaaatatacagctacttcccagctaatctccacccaatgaatgatgatggtatagtatgtgcataatggaaagttaccttactgaaaaaaaaaaaagaa

SEQ ID NO: 68799 - DNA, 1987 bp, Artificial Sequence
  derived and/or modified sequence
gggttgaggctgggcaaacgccgcgaaactatcgctcttccccgtcccgcttccgcgcctgtccaccctgggtaacggaaccagcatcgcggtagggacatcctcgctaggcccggccggaccattcctcagggtgggccctttccgaagccgggaccgctcctgcttgtcggcatcgctccccacaggccgacgtcgagagggcctgctttactcctcctctttctcctccttctcccgcggcttctgcgcggagaggcgtcgcccgggatctgggttttggaagaaggatctttgtgggaagacagggtgaatttatcacagaggaataacgagggagaggagaaaggtttcctaaagacaaaaaaaaatggaggaatctgtaaaccaaatgcagccactgaatgagaagcagatagccaattctcaggatggatatgtatggcaagtcactgacatgaatcgactacaccggttcttatgtttcggttctgaaggtgggacttattatatcaaagaacagaagttgggccttgaaaatgctgaagctttaattagattgattgaagatggcagaggatgtgaagtgatacaagaaataaagtcatttagtcaagaaggcagaaccacaaagcaagagcctatgctctttgcacttgccatttgttcccagtgctccgacataagcacaaaacaagcagcatttaaagctgtttctgaagtttgtcgcattcctacccatctctttacttttatccagtttaagaaagatctgaaggaaagcatgaaatgtggcatgtggggtcgtgccctccggaaggctatagcggactggtacaatgagaaaggtggcatggcccttgctctggcagttacaaaatataaacagagaaatggctggtctcacaaagatctattaagattgtcacatcttaaaccttccagtgaaggacttgcaattgtgaccaaatatattacaaagggctggaaagaagttcatgaattgtataaagaaaaagcactctctgtggagactgaaaaattattaaagtatctggaggctgtagagaaagtgaagcgcacaagagatgagctagaagtcattcatctaatagaagaacatagattagttagagaacatcttttaacaaatcacttaaagtctaaagaggtatggaaggctttgttacaagaaatgccgcttactgcattactaaggaatctaggaaagatgactgctaattcagtacttgaaccaggaaattcagaagtatctttagtatgtgaaaaactgtgtaatgaaaaactattaaaaaaggctcgtatacatccatttcatattttgatcgcattagaaacttacaagacaggtcatggtctcagagggaaactgaagtggcgccctgatgaagaaattttgaaagcattggatgctgctttttataaaacatttaagacagttgaaccaactggaaaacgtttcttactagctgttgatgtcagtgcttctatgaaccaaagagttttgggtagtatactcaacgctagtacagttgctgcagcaatgtgcatggttgtcacacgaacagaaaaagattcttatgtagttgctttttccgatgaaatggtaccatgtccagtgactacagatatgaccttacaacaggttttaatggctatgagtcagatcccagcaggtggaactgattgctctcttccaatgatctgggctcagaagacaaacacacctgctgatgtcttcattgtattcactgataatgagacctttgctggaggtgtccatcctgctattgctctgagggagtatcgaaagaaaatggatattccagctaaattgattgtttgtggaatgacatcaaatggtttcaccattgcagacccagatgatagaggcatgttggatatgtgcggctttgatactggagctctggatgtaattcgaaatttcacattagatatgatttaa

SEQ ID NO: 68800 - protein, 518 aa, Artificial Sequence
  derived and/or modified sequence
MEESVNQMQPLNEKQIANSQDGYVWQVTDMNRLHRFLCFGSEGGTYYIKEQKLGLENAEALIRLIEDGRGCEVIQEIKSFSQEGRTTKQEPMLFALAICSQCSDISTKQAAFKAVSEVCRIPTHLFTFIQFKKDLKESMKCGMWGRALRKAIADWYNEKGGMALALAVTKYKQRNGWSHKDLLRLSHLKPSSEGLAIVTKYITKGWKEVHELYKEKALSVETEKLLKYLEAVEKVKRTRDELEVIHLIEEHRLVREHLLTNHLKSKEVWKALLQEMPLTALLRNLGKMTANSVLEPGNSEVSLVCEKLCNEKLLKKARIHPFHILIALETYKTGHGLRGKLKWRPDEEILKALDAAFYKTFKTVEPTGKRFLLAVDVSASMNQRVLGSILNASTVAAAMCMVVTRTEKDSYVVAFSDEMVPCPVTTDMTLQQVLMAMSQIPAGGTDCSLPMIWAQKTNTPADVFIVFTDNETFAGGVHPAIALREYRKKMDIPAKLIVCGMTSNGFTIADPDDRDTVK

SEQ ID NO: 68801 - DNA, 1557 bp, Artificial Sequence
  derived and/or modified sequence
atggaggagagcgtgaaccagatgcagcccctgaacgagaagcagatcgccaacagccaggacggctacgtgtggcaggtgaccgacatgaacagactgcacagattcctgtgcttcggcagcgagggcggcacctactacatcaaggagcagaagctgggcctggagaacgccgaggccctgatcagactgatcgaggacggcagaggctgcgaggtgatccaggagatcaagagcttcagccaggagggcagaaccaccaagcaggagcccatgctgttcgccctggccatctgcagccagtgcagcgacatcagcaccaagcaggccgccttcaaggccgtgagcgaggtgtgcagaatccccacccacctgttcaccttcatccagttcaagaaggacctgaaggagagcatgaagtgcggcatgtggggcagagccctgagaaaggccatcgccgactggtacaacgagaagggcggcatggccctggccctggccgtgaccaagtacaagcagagaaacggctggagccacaaggacctgctgagactgagccacctgaagcccagcagcgagggcctggccatcgtgaccaagtacatcaccaagggctggaaggaggtgcacgagctgtacaaggagaaggccctgagcgtggagaccgagaagctgctgaagtacctggaggccgtggagaaggtgaagagaaccagagacgagctggaggtgatccacctgatcgaggagcacagactggtgagagagcacctgctgaccaaccacctgaagagcaaggaggtgtggaaggccctgctgcaggagatgcccctgaccgccctgctgagaaacctgggcaagatgaccgccaacagcgtgctggagcccggcaacagcgaggtgagcctggtgtgcgagaagctgtgcaacgagaagctgctgaagaaggccagaatccaccccttccacatcctgatcgccctggagacctacaagaccggccacggcctgagaggcaagctgaagtggagacccgacgaggagatcctgaaggccctggacgccgccttctacaagaccttcaagaccgtggagcccaccggcaagagattcctgctggccgtggacgtgagcgccagcatgaaccagagagtgctgggcagcatcctgaacgccagcaccgtggccgccgccatgtgcatggtggtgaccagaaccgagaaggacagctacgtggtggccttcagcgacgagatggtgccctgccccgtgaccaccgacatgaccctgcagcaggtgctgatggccatgagccagatccccgccggcggcaccgactgcagcctgcccatgatctgggcccagaagaccaacacccccgccgacgtgttcatcgtgttcaccgacaacgagaccttcgccggcggcgtgcaccccgccatcgccctgagagagtacagaaagaagatggacatccccgccaagctgatcgtgtgcggcatgaccagcaacggcttcaccatcgccgaccccgacgacagagacaccgtgaagtag

SEQ ID NO: 68802 - DNA, 126 bp, Artificial Sequence
  derived and/or modified sequence
atggaggagagcgtgaaccagatgcagcccctgaacgagaagcagatcgccaacagccaggacggctacgtgtggcaggtgaccgacatgaacagactgcacagattcctgtgcttcggcagctag

SEQ ID NO: 68803 - DNA, 1557 bp, Artificial Sequence
  derived and/or modified sequence
atggaagaatccgtgaatcaaatgcagccacttaacgaaaaacagattgccaattcccaggatggctacgtgtggcaggttaccgatatgaatcgcctgcatagatttctgtgctttgggtcagagggtggcacatactacatcaaagaacagaagcttggactggaaaacgcagaggccttgatcaggcttattgaggacggaagaggatgcgaggtgatccaggagattaagagtttctctcaggagggtcgcactacaaagcaagaacctatgctcttcgcactggctatctgcagccagtgttctgacatttcgacaaagcaggccgctttcaaggccgtgtccgaggtctgcagaattcctactcatctttttacatttattcagttcaagaaggatctgaaggagtccatgaaatgcgggatgtggggacgcgccctgcgcaaggccatagccgattggtacaatgaaaaaggtggcatggcgctggctctcgcagttacgaagtataagcagcgcaatggctggtcccataaagaccttctgcgactcagtcacttgaaaccatcaagcgaaggattggctatcgtgacaaaatatatcacaaaggggtggaaagaagttcacgagctttacaaggaaaaggcgctgtccgtcgaaaccgagaaactgctgaaatatctggaagcggtggagaaggttaagcgcacgagagacgagctggaggtgattcacctcattgaggaacatagactggtaagagaacatctgttgaccaatcatctgaagtcgaaggaggtttggaaggccctgttgcaggagatgccactgacagctctgttgcgaaacctagggaagatgactgctaattccgtgcttgagccaggcaacagtgaggtgtctctggtctgcgaaaagctgtgcaacgagaagctgctgaagaaggctaggattcatccctttcacatattaatcgccctggaaacctacaagactggacatgggctcaggggtaagctcaagtggagacccgacgaggagattctaaaggctctcgacgccgccttctataaaacatttaaaaccgttgagccaacgggcaagcgctttctgctggccgttgatgtgtctgcctctatgaatcagagggtcttagggtccattctgaacgcgtccaccgtcgcagcagccatgtgtatggtggtaactcgaactgagaaggattcctacgtggtagccttttcagacgagatggtcccctgccccgtgacaacagacatgaccctacaacaagttctgatggcaatgagccagatcccggctggggggacagactgctcgctgcccatgatatgggctcaaaagacaaacaccccagctgacgtgttcatcgtcttcaccgacaacgagacctttgcaggcggggtgcaccctgctattgctttgagggagtataggaagaaaatggacattcccgccaaactcatagtgtgtgggatgaccagcaatggctttaccatcgccgaccccgacgatcgcgataccgttaaatag

SEQ ID NO: 68804 - DNA, 126 bp, Artificial Sequence
  derived and/or modified sequence
atggaggagagcgttaaccagatgcagccgctgaatgaaaagcagattgccaacagtcaggatggctatgtgtggcaggtaaccgatatgaacagattgcatcgtttcctctgtttcggatcttag

SEQ ID NO: 68805 - DNA, 1557 bp, Artificial Sequence
  derived and/or modified sequence
atggaggagagcgtgaaccagatgcagcccctgaatgagaagcagatcgccaacagccaggacggctacgtgtggcaggtgacagacatgaaccggctgcaccgcttcctgtgctttggaagtgaaggaggcacctactacatcaaggagcagaagctgggcctggagaatgctgaggccctgatccggctgattgaagatggccggggctgtgaggtgatccaggagatcaagagcttcagccaggagggccgcaccaccaagcaggagcccatgctgtttgccctggccatctgcagccagtgcagcgacatcagcaccaagcaggccgccttcaaggctgtgtctgaggtgtgccgcatccccacccacctgttcaccttcatccagttcaagaaggacctgaaggagagcatgaagtgtggcatgtggggccgggccctgaggaaggccatcgctgactggtacaatgaaaaaggaggcatggccctggccctggccgtgaccaagtacaagcagagaaatggctggagccacaaggacctgctgcggctgagccacctgaagcccagcagcgagggcctggccatcgtgaccaagtacatcaccaagggctggaaggaggtgcatgagctgtacaaggagaaggccctgtctgtggagacagagaagctgctgaagtacctggaggccgtggagaaggtgaagaggaccagagatgagctggaggtgatccacctgattgaggagcaccggctggtgcgggagcacctgctgaccaaccacctgaagagcaaggaggtgtggaaggccctgctgcaggagatgcccctgacagccctgctgaggaacctgggcaagatgacagccaacagcgtgctggagcccggcaacagcgaggtgtccctggtgtgtgagaagctgtgcaatgagaagctgctgaagaaggcccgcatccaccccttccacatcctgattgccctggagacctacaagacaggccacggcctgcggggcaagctgaagtggaggccagatgaggagatcctgaaggccctggatgctgccttctacaagaccttcaagacagtggagcccaccgggaagcgcttcctgctggccgtggatgtgtctgcctccatgaaccagagggtgctgggcagcatcctgaatgccagcacagtggccgccgccatgtgcatggtggtgaccaggacagagaaggacagctatgtggtggccttcagtgatgagatggtgccctgccctgtgaccacagacatgaccctgcagcaggtgctgatggccatgagccagatcccagctgggggcacagactgcagcctgcccatgatctgggcccagaagaccaacaccccagcagatgtgttcatcgtgttcacagacaatgagacctttgctgggggcgtgcacccagccatcgccctgcgggagtacaggaagaagatggacatcccagccaagctgattgtgtgtggcatgaccagcaatggcttcaccatcgctgaccctgatgaccgggacacagtgaagtag

SEQ ID NO: 68806 - DNA, 126 bp, Artificial Sequence
  derived and/or modified sequence
atggaggagagcgtgaaccagatgcagcccctgaatgagaagcagatcgccaacagccaggacggctacgtgtggcaggtgacagacatgaaccggctgcaccgcttcctgtgcttcggcagctag

SEQ ID NO: 68807 - DNA, 1557 bp, Artificial Sequence
  derived and/or modified sequence
atggaggagagcgtgaaccagatgcagcccctgaacgagaagcagatcgcaaacagccaagatggatatgtgtggcaggtgacagacatgaaccggctacaccgatttctttgtttcggctcagagggtggaacgtattatatcaaggaacaaaagcttgggctcgagaacgccgaagcgttgattagacttatagaagatgggagaggctgcgaggtaattcaggaaattaaaagtttttctcaggaaggacgcacaaccaaacaggaacctatgctcttcgcgctggcaatctgttcacagtgttccgatattagcaccaaacaggctgcattcaaggctgtgagcgaagtgtgccgcattcctacacatctttttacattcatacagtttaagaaggatctaaaagaatctatgaaatgcggcatgtggggccgtgccctgcgaaaagcgatcgccgattggtacaatgaaaaaggaggaatggctcttgccctggccgtgacaaagtacaaacagaggaacggctggtcacacaaagacctgctgaggttgagccacctgaagcccagctcagagggcctggcgatcgtaacaaaatacattactaaaggatggaaagaggttcacgagctttataaggaaaaggccttgtccgtcgaaacggagaagctcctgaaatatttagaggccgtcgaaaaagtgaaaagaacacgtgacgaactggaagtcattcatctgattgaagagcaccggctcgtgagggaacatttgttgacaaatcacctgaaaagtaaggaggtgtggaaagccctcctgcaggaaatgcctctgacggccctgctgcgtaatctgggcaagatgactgctaattccgtgctggagcccggtaactcagaggtctcactggtttgtgaaaaactatgcaatgaaaagctgcttaagaaagcacgaattcatccattccacattctcattgctctggagacttataagacaggtcatggcctgcgtggaaaactcaaatggcggcctgacgaggagatcctcaaagccctcgatgctgctttttataaaaccttcaaaacggtcgagcccactggcaaacgcttcctcttggccgtggacgtctctgctagcatgaatcaacgcgtgctgggaagcatcctcaacgcttctacagtggctgctgccatgtgtatggtggtgacaagaaccgagaaagactcgtacgtcgttgcattttcggacgagatggttccctgccccgtgacaacagatatgaccctgcagcaggtcttgatggccatgtcgcagattccagctggcggcaccgactgcagcctccccatgatctgggcgcagaagaccaataccccagccgacgtcttcattgtgtttaccgacaatgagaccttcgcaggcggcgtacatcccgccatagcactacgagaatataggaaaaagatggacatacccgcaaaacttattgtgtgtggtatgacttcaaacggattcacaattgccgatcctgatgaccgggacacagtcaaatag

SEQ ID NO: 68808 - DNA, 126 bp, Artificial Sequence
  derived and/or modified sequence
atggaggagagcgtgaaccagatgcagcccctgaacgagaagcagatagcgaattcccaagatgggtatgtgtggcaagtaaccgacatgaatcggcttcatcgatttttgtgtttcggctcatag

SEQ ID NO: 68809 - DNA, 1557 bp, Artificial Sequence
  derived and/or modified sequence
atggaggagtccgttaaccagatgcaacccctgaatgagaagcagatcgccaatagtcaggatggctacgtgtggcaggtgacagatatgaacaggctccataggttcctgtgctttgggagcgaaggcggtacctactacatcaaggagcagaaactaggactggaaaacgcggaagcactgatccgcctgatcgaggatggtaggggctgtgaggtgattcaggagatcaaaagttttagccaggaaggaagaaccacaaagcaggagcccatgctcttcgcactagctatatgttcacagtgctcagatatctctaccaaacaagccgcttttaaggccgtgagcgaagtatgtagaatccctacacacctgttcacgtttatccaattcaagaaagacctgaaggagtcgatgaagtgtggtatgtggggcagagcattacgcaaagcaattgctgattggtacaatgagaaaggcggtatggcactggcccttgcggttacaaagtacaagcaacgtaatgggtggagtcataaggacttgctgcgcctaagccacttgaaaccctcctccgaggggctggctatcgtgaccaaatatataactaagggctggaaggaggttcacgagctgtataaagaaaaggccctctccgtggaaaccgagaaactgctaaaatatctggaggctgtggagaaagtcaagagaactagagacgagctggaagtaatacatctcatcgaagaacatcgcttagtgcgagagcacctcctgactaatcacctgaagagtaaggaagtttggaaagccttgctgcaggagatgccgttaacagctctattaaggaatctggggaaaatgaccgccaacagcgtgctggaaccaggtaactccgaggtctcattagtttgcgagaaattgtgtaacgaaaagctcctgaaaaaggctaggatccatcccttccatattcttatcgcgctagagacctacaagactggacacggcctgcggggaaagctgaagtggagacccgacgaagaaatcctcaaagctctggacgctgcgttttataagacgtttaagactgtggagcctacagggaaacggtttctgctggctgtggatgtaagcgcttcaatgaaccagcgtgtgctcgggtccattttgaatgcatctacagttgctgccgctatgtgtatggtggtgacacggaccgaaaaggacagctacgtggtcgctttctccgacgaaatggtgccctgcccagtgacaaccgatatgactctccagcaagttttaatggccatgagtcagattcccgcaggcggaacagactgcagtctgcccatgatctgggctcagaagacaaatacccccgctgacgtcttcattgtattcacagacaatgaaactttcgccggtggagttcatcctgccattgcattgcgcgaataccgaaaaaagatggatattcctgccaagctgatcgtctgcggtatgaccagtaatggattcaccatcgcggatccggatgaccgtgatactgtgaagtag

SEQ ID NO: 68810 - DNA, 126 bp, Artificial Sequence
  derived and/or modified sequence
atggaggagtccgtgaatcaaatgcagccactgaatgagaagcagattgccaattcacaggacgggtacgtttggcaagtgacagacatgaaccggctgcatcgtttcctgtgttttggatcgtag

SEQ ID NO: 68811 - DNA, 1909 bp, Artificial Sequence
  derived and/or modified sequence
cacaggccgacgtcgagagggcctgctttactcctcctctttctcctccttctcccgcggcttctgcgcggagaggcgtcgcccgggatctgggttttggaagaaggatctttgtgggaagacagggtgaatttatcacagaggaataacgagggagaggagaaaggtttcctaaagacaaaaaaaaatggaggaatctgtaaaccaaatgcagccactgaatgagaagcagatagccaattctcaggatggatatgtatggcaagtcactgacatgaatcgactacaccggttcttatgtttcggttctgaaggtgggacttattatatcaaagaacagaagttgggccttgaaaatgctgaagctttaattagattgattgaagatggcagaggatgtgaagtgatacaagaaataaagtcatttagtcaagaaggcagaaccacaaagcaagagcctatgctctttgcacttgccatttgttcccagtgctccgacataagcacaaaacaagcagcatttaaagctgtttctgaagtttgtcgcattcctacccatctctttacttttatccagtttaagaaagatctgaaggaaagcatgaaatgtggcatgtggggtcgtgccctccggaaggctatagcggactggtacaatgagaaaggtggcatggcccttgctctggcagttacaaaatataaacagagaaatggctggtctcacaaagatctattaagattgtcacatcttaaaccttccagtgaaggacttgcaattgtgaccaaatatattacaaagggctggaaagaagttcatgaattgtataaagaaaaagcactctctgtggagactgaaaaattattaaagtatctggaggctgtagagaaagtgaagcgcacaagagatgagctagaagtcattcatctaatagaagaacatagattagttagagaacatcttttaacaaatcacttaaagtctaaagaggtatggaaggctttgttacaagaaatgccgcttactgcattactaaggaatctaggaaagatgactgctaattcagtacttgaaccaggaaattcagaagtatctttagtatgtgaaaaactgtgtaatgaaaaactattaaaaaaggctcgtatacatccatttcatattttgatcgcattagaaacttacaagacaggtcatggtctcagagggaaactgaagtggcgccctgatgaagaaattttgaaagcattggatgctgctttttataaaacatttaagacagttgaaccaactggaaaacgtttcttactagctgttgatgtcagtgcttctatgaaccaaagagttttgggtagtatactcaacgctagtacagttgctgcagcaatgtgcatggttgtcacacgaacagaaaaagattcttatgtagttgctttttccgatgaaatggtaccatgtccagtgactacagatatgaccttacaacaggttttaatggctatgagtcagatcccagcaggtggaactgattgctctcttccaatgatctgggctcagaagacaaacacacctgctgatgtcttcattgtattcactgataatgagacctttgctggaggtgtccatcctgctattgctctgagggagtatcgaaagaaaatggatattccagctaaattgattgtttgtggaatgacatcaaatggtttcaccattgcagacccagatgatagagacactgtaaaatagttttgctttgttgaataatacgtgtgtacctaaaagagccttgcaaaataccctactaaataaatcattttagacatggagtgcaggtggacactgtgtgaactgtttttggtcagttattgtagaaattgatagatgtaccaaataaactctatgcacattaaa

SEQ ID NO: 68812 - DNA, 613 bp, Artificial Sequence
  derived and/or modified sequence
gttgctgttgctgtggctgtcgctgcccgtcaggctgccttcttttgtcgtttcccagcgctgcgcaggacttctcctggcggcgctgcggatccagggggtcggctgccaggtacaggggttgaggctgggcaaacgccgcgaaactatcgctcttccccgtcccgcttccgcgcctgtccaccctgggtaacggaaccagcatcgcggtagggacatcctcgctaggcccggccggaccattcctcagggtgggccctttccgaagccgggaccgctcctgcttgtcggcatcgctccccacaggccgacgtcgagagggcctgctttactcctcctctttctcctccttctcccgcggcttctgcgcggagaggcgtcgcccgggatctgggttttggaagaaggatctttgtgggaagacagggtgaatttatcacagaggaataacgagggagaggagaaaggtttcctaaagacaaaaaaaaatggaggaatctgtaaaccaaatgcagccactgaatgagaagcagatagccaattctcaggatggatatgtatggcaagtcactgacatgaatcgactacaccggttcttatgtttcggttctga

SEQ ID NO: 68813 - protein, 509 aa, Artificial Sequence
  derived and/or modified sequence
MVPKADSGAFLLLFLLVLTVTEPLRPEVTGEVRPHHGKEAVDPRQGRARGGDPSHFHAVNVAQPVRFSSFLGKCPTGWHHYEGTASCYRVYLSGENYWDAAQTCQRLNGSLATFSTDQELRFVLAQEWDQPERSFGWKDQRKLWVGYQYVITGRNRSLEGRWEVAFKGSSEVFLPPDPIFASAMSENDNVFCAQLQCFHFPTLRHHDLHSWHAESCYEKSSFLCKRSQTCVDIKDNVVDEGFYFTPKGDDPCLSCTCHGGEPEMCVAALCERPQGCQQYRKDPKECCKFMCLDPDGNSLFDSMASGMRLVVSCISSFLILSLLLFMVHRLRQRRRERIESLIGANLHHFNLGRRIPGFDYGPDGFGTGLTPLHLSDDGEGGTFHFHDPPPPYTAYKYPDIGQPDDPPPPYEASIHPDSVFYDPADDDAFEPVEVSLPAPGDGGSEGALLRRLEQPLPTAGASLADLEDSADSSSALLVPPDPAQSGSTPAAEALPGGGRHSRSSLNTVV

SEQ ID NO: 68814 - DNA, 1530 bp, Artificial Sequence
  derived and/or modified sequence
atggtccccaaagcagacagcggcgctttcctgcttcttttcctgttagtgcttactgttaccgagccacttaggcccgaggtaaccggggaggtgcggccccaccatggcaaagaggccgtggatccacggcaaggtcgagctcgagggggagaccctagtcacttccatgcggtcaacgtggcccagcccgtgaggttctcaagtttcttgggcaagtgccccacgggatggcaccattatgagggtactgcaagctgctaccgggtgtatctgtccggggagaactactgggacgctgcacagacgtgccaaaggttaaacggctcacttgctacctttagtaccgaccaggaactgcgattcgtgctggcccaggaatgggatcagcctgaacgtagtttcgggtggaaagatcagcgcaaattgtgggtagggtaccagtacgtgatcactggcaggaacaggagcctggaggggcgctgggaagtggcattcaaagggtctagtgaagtattcctacctccggatccaatcttcgcaagcgcaatgtccgagaatgataacgtgttttgtgcccagttacaatgtttccactttccaacactgcgtcaccatgatctgcactcttggcatgccgaatcttgctacgaaaaatcttcattcctgtgcaaaaggagccagacttgtgttgacatcaaagataacgtagtggatgaaggcttctacttcacaccaaagggcgatgacccctgccttagttgtacttgccacggcggagagcccgaaatgtgcgtcgctgccttgtgcgagaggcctcaggggtgccagcagtacaggaaggatcccaaggaatgttgtaaatttatgtgcctggaccctgatggaaattcattgtttgattccatggctagtggaatgaggctggttgtgtcctgcattagttctttcctgatattatctcttcttctgtttatggtccatcgcctccgccagcgccgacgagaacgtatagagtccctcattggtgcaaatctccaccacttcaatctggggaggcgaattcctgggtttgattatggcccggatgggtttggtaccgggttgacaccactgcacctgagcgatgacggggaagggggtacatttcactttcacgatccaccccccccctacacagcttataagtatcccgacataggccagccagatgatcctccccccccgtacgaggcttccatccatcccgactcagtcttttatgacccagcagacgacgatgccttcgagcccgttgaagttagcctacctgcccccggagacggagggtctgaaggagcattactgcgcagacttgagcaacccctcccgacagcgggcgcttctttagctgatttagaggattctgcggacagctcaagcgccctgctggtacccccagaccctgcccaaagcgggtcgacccccgccgcagaggcgctgcctggaggcggtcgccactcaaggagtagcctcaacacggtggtctag

SEQ ID NO: 68815 - DNA, 1530 bp, Artificial Sequence
  derived and/or modified sequence
atggtgcccaaggctgacagcggggccttcctgctgctcttcctgctggtgctgactgtgacagagcccctgcggcctgaggtgactggagaggtgcggccccaccacggcaaggaggccgtggacccccggcagggccgggcccggggcggggaccccagccacttccacgctgtgaatgtggcccagcctgtgcgcttcagcagcttcctgggcaaatgtcccaccggctggcaccactatgagggcacagccagctgctacagagtgtacctgtctggagagaactactgggatgctgcccagacctgccagaggctgaatggcagcctggccaccttcagcacagaccaggagctgcgctttgtgctggcccaggagtgggaccagcctgagaggagctttggctggaaggaccagaggaagctgtgggtgggctaccagtatgtgatcaccggcaggaacagaagcctggagggccgctgggaggtggccttcaagggcagcagcgaggtgttcctgcccccagaccccatctttgccagcgccatgtctgaaaatgacaacgtgttctgtgcccagctgcagtgcttccacttccccaccctgcggcaccacgacctgcacagctggcatgctgagagctgctatgagaagagcagcttcctgtgcaagaggagccagacctgtgtggacatcaaggacaacgtggtggatgagggcttctacttcacccccaagggagatgacccctgcctgagctgcacctgccacggcggggagcctgagatgtgtgtggccgccctgtgtgagcggccccagggctgccagcagtacaggaaggaccccaaggagtgctgcaagttcatgtgcctggaccctgatggcaacagcctgtttgacagcatggccagcggcatgaggctggtggtgtcctgcatcagcagcttcctgatcctgagcctgctgctcttcatggtgcaccggctgcggcagaggcggcgggagcgcatcgagagcctcatcggggccaacctgcaccacttcaacctgggccgccgcatccctggctttgattatggcccagatggctttggaacaggcctgacccccctgcacctgagtgatgatggagagggcggcaccttccacttccatgaccccccaccaccctacacagcctacaagtacccagacatcggccagccagatgaccccccaccaccctatgaggccagcatccacccagacagcgtcttctatgaccctgcagatgatgatgcctttgagcctgtggaggtgtccctgcctgcccctggagatggcggcagcgagggcgccctgctgcggcggctggagcagcccctgcccacagctggggccagcctggccgacctggaggacagcgctgacagcagcagcgccctgctggtgcccccagaccctgcccagagcggcagcaccccagctgctgaggccctgcccggcggcggccgccacagccgcagcagcctgaacacagtggtgtag

SEQ ID NO: 68816 - DNA, 1530 bp, Artificial Sequence
  derived and/or modified sequence
atggtgcccaaggccgacagcggcgccttcctgctgctgttcctgctggtcctgaccgttacagagcctttacggcctgaggttactggcgaagtaaggccacaccatgggaaagaggctgtggacccccgccagggtcgtgcccggggcggcgatccttcacacttccatgccgtcaatgtcgcccagcctgtgcgattcagcagcttcctgggaaaatgtccaactggctggcaccactatgaaggcacagcaagctgctaccgcgtttatctgagcggtgaaaattattgggatgctgcccagacatgccagcgtctgaacggatcactcgctacgtttagcacagatcaagagttgcggtttgtgttagctcaggaatgggatcaaccggaacgatcctttggctggaaggaccagcggaaactgtgggtcggctatcaatatgtgataaccggccggaaccgctcgctggaggggagatgggaagtggcattcaagggcagtagtgaggttttccttcctccagatccaatttttgccagcgcaatgtccgagaacgataacgtgttctgtgctcagctacagtgttttcattttcctaccctaaggcaccacgatctgcactcctggcatgccgagtcttgctatgaaaaatccagtttcctgtgtaaacgctctcaaacttgtgttgacatcaaagataatgtggttgacgaaggcttctatttcaccccaaagggggatgatccgtgtctgtcttgcacctgccatggcggggagcctgagatgtgtgtggccgctctctgcgagcggccccaggggtgccagcaataccggaaggaccctaaagaatgctgtaagtttatgtgcctggatcctgacggtaacagcctgttcgatagcatggccagcgggatgcgcctggtcgtcagttgtatttcatcttttctcattctcagtctcctgcttttcatggtacacaggctgcggcaaaggcgccgtgagcgcattgaaagcttgatcggggccaacctgcaccacttcaacctcgggcgccggatccccggctttgattacggccccgatggttttggcactggactgaccccgcttcacctttcagacgacggtgagggtggcactttccactttcacgatcctcccccgccctataccgcctataagtacccggatattgggcaacccgatgacccccctcctccatacgaggcttcaatacatcccgacagcgtgttttacgatcccgcagacgacgacgcctttgaacccgtcgaggtgtcattgcccgcccccggcgacggtgggtccgagggggctctgctgaggagactggaacagccactgcccaccgccggagcctctctggccgacctcgaggattcggctgactccagttcagccctcctggtcccacctgatcccgcacaaagcggcagcacaccagcggcggaagccctgcctggaggtggacggcattctcgatcctccctgaatactgtggtgtag

SEQ ID NO: 68817 - DNA, 1530 bp, Artificial Sequence
  derived and/or modified sequence
atggtgcccaaagccgacagcggcgcatttttgttactctttctgctggtcctcacagtgaccgagcccctccggccagaggtcaccggggaagttaggccccatcatggcaaagaagctgttgatcctagacagggtcgggctagaggtggggaccccagccacttccacgctgtcaacgtggcgcagcccgtgcggttcagcagcttcctcggcaaatgtcccaccgggtggcaccattacgaagggacggccagttgctaccgagtgtatctctccggtgaaaattattgggatgctgcccagacctgccagcgtttgaatggcagccttgcaactttctctaccgatcaagaactcaggttcgtcctggctcaggagtgggatcagcctgaacgatcctttggatggaaagaccagaggaagctctgggttgggtatcaatacgtcataaccggtcgtaaccgatctctcgaaggtcgctgggaagtggccttcaagggaagctccgaagtgtttctgccaccggatcccatcttcgccagtgctatgtcagagaacgacaatgtgttctgcgctcagctgcaatgctttcacttccctacgctgagacaccatgatcttcatagctggcatgcggagtcatgttacgaaaagtctagtttcctttgtaagaggtctcaaacttgcgtcgacattaaagacaatgtcgtcgatgagggtttttactttacgccaaagggcgatgacccctgcctttcatgcacatgtcacggtggcgagccagaaatgtgcgttgcggcactgtgtgaacggccacaaggttgtcagcagtaccgcaaggaccccaaagagtgttgcaaattcatgtgcttagatcctgacggcaactcactgtttgactctatggcctcgggtatgcggctggtcgtcagctgcatttccagttttcttattctgagtctgttgctgttcatggtgcatcgcctaaggcagcgccgtcgggaaagaatcgaatcactgataggcgctaatctgcatcattttaatctcggtaggaggattccagggttcgattacgggcctgatgggtttggaacgggactcaccccattgcacctaagtgatgatggcgagggagggacatttcatttccacgacccaccacccccatacaccgcatataagtatccggacattggtcagcccgatgatcccccacctccatatgaagcctccattcatccagatagtgtgttttatgatcccgctgacgacgacgcgtttgaacccgttgaagtgtcactacctgctcccggtgatggcggatcggaaggggcattactgcgcaggctggaacaacctctgcctacagccggtgcctccctcgccgacctggaggacagcgctgactcctcctcagctctactggtcccccctgatcccgcacaatctgggtccacccctgctgccgaagcgttgccaggcggtggacgacatagccggtccagcttgaatacagtggtctag

SEQ ID NO: 68818 - DNA, 1530 bp, Artificial Sequence
  derived and/or modified sequence
atggtgcccaaggccgacagcggcgccttcctgctgctgttcctgctggtgctgaccgtgaccgagcccctgagacccgaggtgaccggcgaggtgagaccccaccacggcaaggaggccgtggaccccagacagggcagagccagaggcggcgaccccagccacttccacgccgtgaacgtggcccagcccgtgagattcagcagcttcctgggcaagtgccccaccggctggcaccactacgagggcaccgccagctgctacagagtgtacctgagcggcgagaactactgggacgccgcccagacctgccagagactgaacggcagcctggccaccttcagcaccgaccaggagctgagattcgtgctggcccaggagtgggaccagcccgagagaagcttcggctggaaggaccagagaaagctgtgggtgggctaccagtacgtgatcaccggcagaaacagaagcctggagggcagatgggaggtggccttcaagggcagcagcgaggtgttcctgccccccgaccccatcttcgccagcgccatgagcgagaacgacaacgtgttctgcgcccagctgcagtgcttccacttccccaccctgagacaccacgacctgcacagctggcacgccgagagctgctacgagaagagcagcttcctgtgcaagagaagccagacctgcgtggacatcaaggacaacgtggtggacgagggcttctacttcacccccaagggcgacgacccctgcctgagctgcacctgccacggcggcgagcccgagatgtgcgtggccgccctgtgcgagagaccccagggctgccagcagtacagaaaggaccccaaggagtgctgcaagttcatgtgcctggaccccgacggcaacagcctgttcgacagcatggccagcggcatgagactggtggtgagctgcatcagcagcttcctgatcctgagcctgctgctgttcatggtgcacagactgagacagagaagaagagagagaatcgagagcctgatcggcgccaacctgcaccacttcaacctgggcagaagaatccccggcttcgactacggccccgacggcttcggcaccggcctgacccccctgcacctgagcgacgacggcgagggcggcaccttccacttccacgaccccccccccccctacaccgcctacaagtaccccgacatcggccagcccgacgaccccccccccccctacgaggccagcatccaccccgacagcgtgttctacgaccccgccgacgacgacgccttcgagcccgtggaggtgagcctgcccgcccccggcgacggcggcagcgagggcgccctgctgagaagactggagcagcccctgcccaccgccggcgccagcctggccgacctggaggacagcgccgacagcagcagcgccctgctggtgccccccgaccccgcccagagcggcagcacccccgccgccgaggccctgcccggcggcggcagacacagcagaagcagcctgaacaccgtggtgtag

SEQ ID NO: 68819 - DNA, 4361 bp, Artificial Sequence
  derived and/or modified sequence
ggggcggggcggcgcggcgcggagccgagcaggacggccgccatcttgcgcgcagctggagtcggtgcctgaggttgcagccgagagtgtgcgccagcccgcggcccagccgaagctctttcccgccgcctctccgcgcctcgcccaggttcagctccgcctgaccctccgcttggcacggtcccctgaccctcagtccggcctggtccggccttccagccgccccggggacgatgaacggaggataaatggtgcccaaggcagacagcggcgccttcctgctgctcttcctgctcgtgctcactgtcaccgagccgctgcggccagaagtgaccggggaggtgcgtcctcatcatgggaaggaggctgtggatccgcggcaggggcgggccagaggaggcgacccttcgcacttccacgcggtgaacgtggcgcagcccgttcgcttcagcagtttcctagggaagtgcccgacagggtggcaccactacgaaggcacggccagctgctaccgggtctacctgagcggggagaactactgggatgccgcgcagacctgccagcgcctgaatggctctctcgccaccttctccactgaccaggagctgcgctttgtcctggcccaggaatgggaccagcccgagcggagctttggttggaaggaccagcgcaagttgtgggttggctatcagtatgttatcactggccggaaccgctccttggaaggtcgctgggaggtggcattcaaaggctcttcagaggtgttcctgcccccagaccccatctttgcctcggccatgtctgagaacgacaacgtgttctgtgcccagcttcagtgcttccatttccccaccctgcggcaccacgacctccacagctggcacgccgagagctgctacgagaagtcttcatttctgtgtaaaagaagtcaaacatgtgttgacatcaaggacaacgtggtggatgaagggttctacttcacccctaagggggacgacccatgcctgagctgcacctgccatggaggggagcctgagatgtgtgtggctgctctctgtgagaggccccagggctgccaacagtaccgcaaggaccccaaagagtgctgcaagttcatgtgtctggacccagatggcaacagtctgtttgactccatggccagcgggatgcgcctggtcgtcagctgcatctcctccttcctcatcctgtcactgctgctcttcatggtccaccggctgcgccagcggcgccgggagcgcatcgagtccctgattggagcaaacttgcaccacttcaacctcggccgcaggatccctggctttgattacggcccagacgggtttggcacgggcctcacgccgctgcatctttctgacgacggagagggtgggactttccatttccacgaccctccacctccctacacggcatacaagtacccggacatcggccagcccgacgaccctccgccgccctacgaggcctccatccacccggacagtgtgttctatgaccctgcagacgatgatgcttttgagcctgtggaggtcagcctgccagcccctggggatggtgggagtgaaggtgcattactccggcgcctggagcagcctctgcccactgcgggggcctctctggcagacctggaagactctgccgacagcagcagcgccctgctcgtgccccctgaccctgcccagagcgggagcaccccagctgcagaggcactgccagggggtggccgccacagccgcagctccctcaatactgtggtgtagacggcctggcctgtaccccaacggtctgggagcacctgtctgttgtagaaaacaccggtccctggggagacttgaaaggcccctgtcccagcctggacgccacgcactgccgcacgtcactggcgggctcgcgtgtgtacatagagaccacagcccgccttctgccaaaagaagtgatggcctgcaccgagcttccttgagggcttcagaaacatgcatagctttggatcactgtcttctcctttataaatggcagaagagtgacaaaattcattcagaccgcacatgttagaggcagggaatgaagaaggtactgtgggccatggccacacctgatgcgtttttggtgggcttacttggtgcagtgtgctgtccagagagacctgctgacccagtctgggacaggcacagtgggagctgccacagtgccccttgctggccgccctcaggagggggcctctggaccgtcagtgtggcgtaggcagtgggtctgcttcagggaggcagcctcttgactttgtcacaacggttgcactgaagatggcccccacaagcccagttgtgaatatcaaggtgaccctgcccctggctgggagctcccctggggctctggaacctgaagccctgagaaggagagcttggaaggaggttgagctcttcactgtgtctttccatctgggctctgcagcccagctctgtggcaggaggcctgaccccaccccatcagtccctctcccagcattgctgtgcatggctccctcaggaagaagctctggagtggggccgaggccccagatgctctgctggggtctggggactgagctgcctcctgtctctccactctggagccctgggctcttgcctcctgttgaattgcccctgggcctgcccccggccccatttgtgccataaagggttgcttcattgcaggaggggtggctgaaaccaccatcctgggctgcatctatctccttaaagtccactccttacatcaccgccactactgcagctcagtgcccagcggccgcatgcacacctcccggcccctcctcagcagcgcaggggctgggggcccttcctggcacccttttgcctgacggaccctgttgcctgctcctgggcagtggttttgttgcctgacacagggcctttaacatttctgaggtttggagattaagcgggttctgtgcgatttttagcacatccatatcttttctacgttgaatgtctggatctttcctttgtatgtttgtgtctctgtgtgtgtatgtggccaagcgtctgcaggtgagggtggcacatggaacttcacgggtcactgggggcccactcttccagggtcatcgatgcatcctgggctgtgctgaggcagtgctgtctcgctcagtctttccagaccagcggggcagcacctgggaggcctgtctgaagcatgcagttctgtggtgctgctcggggatggactccatgcacagtccacttcttgacacattctcacactgtggctggagacccattttttccatcccatgtggaatgagaatcttgagttgcccacagacagacttgacctttgtgccagaactgtccagagctgtgagttttgttactgaattgcctgtccctgagcttggcctgctggagcatgatgctggaggctgtgtgcgggcaggcttgtgctccccttggagaagggctgctacttaacaaggaagtcctggccacaggagtcccctactggctgcagaggacgaagcaggaagcatgccgtggatcccacatgcactggggcagggcagccaggttccagagcagcaggcatgtgcattatgggtgccaggtggccagtgagggcccgaggaccacgcagcagagtcccccacgggcctgagcctgagagctcagaggattcctgccaggcctcagaactgtgtgtgcgggacagggtggctggcacgagatgtgtgggactgggacgcttcctttggggaccagaggaacattaggggccggtcagacacgtagggggcagtgaggaaacggggtaaagtggaccatgcaggctgcagagggtgggccttgggctggccggggttgctgggtggccccttccccatgggcctccacaagcactcaggccactggcacgttgggccaggcagaaggtccacatggcagggctgcctggaacaccgctgccactgtggctccaggaggcccttgggagcatgaggagagctggactcgctcatctgttcttgcaccaccatccagaatgccccctttgcaaggcctgctgcagtccccagtctgaccagcaagtcccggggtcacccttgctgaaccttgtgctccaggggtcctcctcctctaggaccagcttgccacggtttctcagagcccaggtgccctctgacctgccatgcggaggtgggatttgatactgtacattgtcttgatgcctgtttttttatgttttcattaagggtttttagtttttggttgggttgacactaacttttcttaagatgctgtgagaatcatttcatccaaatgccaaataaacttgtgttccggaagagg

SEQ ID NO: 68820 - DNA, 4812 bp, Artificial Sequence
  derived and/or modified sequence
gcgcgcagctggagtcggtgcctgaggttgcagccgagagtgtgcgccagcccgcggcccagccgaagctctttcccgccgcctctccgcgcctcgcccaggttcagctccgcctgaccctccgcttggcacggtcccctgaccctcagtccggcctggtccggccttccagccgccccggggacgatgaacggaggataaatggtgcccaaggcagacagcggcgccttcctgctgctcttcctgctcgtgctcactgtcaccgagccgctgcggccagagctgcggtgcaaccctgggcagtttgcgtgtcgcagcggcaccatccagtgcatccccctcccctggcagtgtgacggctgggcgacttgcgaggatgagagcgacgaagccaactgtccagaagtgaccggggaggtgcgtcctcatcatgggaaggaggctgtggatccgcggcaggggcgggccagaggaggcgacccttcgcacttccacgcggtgaacgtggcgcagcccgttcgcttcagcaggaagtgcccgacagggtggcaccactacgaaggcacggccagctgctaccgggtctacctgagcggggagaactactgggatgccgcgcagacctgccagcgcctgaatggctctctcgccaccttctccactgaccaggagctgcgctttgtcctggcccaggaatgggaccagcccgagcggagctttggttggaaggaccagcgcaagttgtgggttggctatcagtatgttatcactggccggaaccgctccttggaaggtcgctgggaggtggcattcaaagattggggtgtgagtgataccatggtacatagacgcttactatgcccatgtgtcggtaccctgcacacacatttgaagttgggagctcgtttccgcagggttcctgtgcgccttggtggagcgctctccaggcgctcccccaggcccacaccagcctgtgagccccgcctgggggccaagaccctgcaggtttgacagcaccaggtcatgatgtgccctggagacagaactgccgctgctgctgccagaagacatgaggccaggatttctgtaacatttgtgcagaaaggttgaaaaagtacagatccttgtgtagggagaatcatccacaccgccccacgtgctgctcccagggccttcccgtcagcaccagcagtgtagcttctgtctggctcttcagaggtgttcctgcccccagaccccatctttgcctcggccatgtctgagaacgacaacgtgttctgtgcccagcttcagtgcttccatttccccaccctgcggcaccacgacctccacagctggcacgccgagagctgctacgagaagtcttcatttctgtgtaaaagaagtcaaacatgtgttgacatcaaggacaacgtggtggatgaagggttctacttcacccctaagggggacgacccatgcctgagctgcacctgccatggaggggagcctgagatgtgtgtggctgctctctgtgagaggccccagggctgccaacagtaccgcaaggaccccaaagagtgctgcaagttcatgtgtctggacccagatggcaacagtctgtttgactccatggccagcgggatgcgcctggtcgtcagctgcatctcctccttcctcatcctgtcactgctgctcttcatggtccaccggctgcgccagcggcgccgggagcgcatcgagtccctgattggagcaaacttgcaccacttcaacctcggccgcaggatccctggctttgattacggcccagacgggtttggcacgggcctcacgccgctgcatctttctgacgacggagagggtgggactttccatttccacgaccctccacctccctacacggcatacaagtacccggacatcggccagcccgacgaccctccgccgccctacgaggcctccatccacccggacagtgtgttctatgaccctgcagacgatgatgcttttgagcctgtggaggtcagcctgccagcccctggggatggtgggagtgaaggtgcattactccggcgcctggagcagcctctgcccactgcgggggcctctctggcagacctggaagactctgccgacagcagcagcgccctgctcgtgccccctgaccctgcccagagcgggagcaccccagctgcagaggcactgccagggggtggccgccacagccgcagctccctcaatactgtggtgtagacggcctggcctgtaccccaacggtctgggagcacctgtctgttgtagaaaacaccggtccctggggagacttgaaaggcccctgtcccagcctggacgccacgcactgccgcacgtcactggcgggctcgcgtgtgtacatagagaccacagcccgccttctgccaaaagaagtgatggcctgcaccgagcttccttgagggcttcagaaacatgcatagctttggatcactgtcttctcctttataaatggcagaagagtgacaaaattcattcagaccgcacatgttagaggcagggaatgaagaaggtactgtgggccatggccacacctgatgcgtttttggtgggcttacttggtgcagtgtgctgtccagagagacctgctgacccagtctgggacaggcacagtgggagctgccacagtgccccttgctggccgccctcaggagggggcctctggaccgtcagtgtggcgtaggcagtgggtctgcttcagggaggcagcctcttgactttgtcacaacggttgcactgaagatggcccccacaagcccagttgtgaatatcaaggtgaccctgcccctggctgggagctcccctggggctctggaacctgaagccctgagaaggagagcttggaaggaggttgagctcttcactgtgtctttccatctgggctctgcagcccagctctgtggcaggaggcctgaccccaccccatcagtccctctcccagcattgctgtgcatggctccctcaggaagaagctctggagtggggccgaggccccagatgctctgctggggtctggggactgagctgcctcctgtctctccactctggagccctgggctcttgcctcctgttgaattgcccctgggcctgcccccggccccatttgtgccataaagggttgcttcattgcaggaggggtggctgaaaccaccatcctgggctgcatctatctccttaaagtccactccttacatcaccgccactactgcagctcagtgcccagcggccgcatgcacacctcccggcccctcctcagcagcgcaggggctgggggcccttcctggcacccttttgcctgacggaccctgttgcctgctcctgggcagtggttttgttgcctgacacagggcctttaacatttctgaggtttggagattaagcgggttctgtgcgatttttagcacatccatatcttttctacgttgaatgtctggatctttcctttgtatgtttgtgtctctgtgtgtgtatgtggccaagcgtctgcaggtgagggtggcacatggaacttcacgggtcactgggggcccactcttccagggtcatcgatgcatcctgggctgtgctgaggcagtgctgtctcgctcagtctttccagaccagcggggcagcacctgggaggcctgtctgaagcatgcagttctgtggtgctgctcggggatggactccatgcacagtccacttcttgacacattctcacactgtggctggagacccattttttccatcccatgtggaatgagaatcttgagttgcccacagacagacttgacctttgtgccagaactgtccagagctgtgagttttgttactgaattgcctgtccctgagcttggcctgctggagcatgatgctggaggctgtgtgcgggcaggcttgtgctccccttggagaagggctgctacttaacaaggaagtcctggccacaggagtcccctactggctgcagaggacgaagcaggaagcatgccgtggatcccacatgcactggggcagggcagccaggttccagagcagcaggcatgtgcattatgggtgccaggtggccagtgagggcccgaggaccacgcagcagagtcccccacgggcctgagcctgagagctcagaggattcctgccaggcctcagaactgtgtgtgcgggacagggtggctggcacgagatgtgtgggactgggacgcttcctttggggaccagaggaacattaggggccggtcagacacgtagggggcagtgaggaaacggggtaaagtggaccatgcaggctgcagagggtgggccttgggctggccggggttgctgggtggccccttccccatgggcctccacaagcactcaggccactggcacgttgggccaggcagaaggtccacatggcagggctgcctggaacaccgctgccactgtggctccaggaggcccttgggagcatgaggagagctggactcgctcatctgttcttgcaccaccatccagaatgccccctttgcaaggcctgctgcagtccccagtctgaccagcaagtcccggggtcacccttgctgaaccttgtgctccaggggtcctcctcctctaggaccagcttgccacggtttctcagagcccaggtgccctctgacctgccatgcggaggtgggatttgatactgtacattgtcttgatgcctgtttttttatgttttcattaagggtttttagtttttggttgggttgacactaacttttcttaagatgctgtgagaatcatttcatccaaatgccaaataaacttgtgttccgg

SEQ ID NO: 68821 - protein, 118 aa, Artificial Sequence
  derived and/or modified sequence
MMSEHDLADVVQIAVEDLSPDHPVVLENHVVTDEDEPALKRQRLEINCQDPSIKSFLYSINQTICLRLDSIEAKLQALEATCKSLEEKLDLVTNKQHSPIQVPMVAGSPLGATQTCNK

SEQ ID NO: 68822 - protein, 123 aa, Artificial Sequence
  derived and/or modified sequence
MMSEHDLADVVQIAVEDLSPDHPVVLENHVVTDEDEPALKRQRLEINCQDPSIKSFLYSINQTICLRLDSIEAKLQALEATCKSLEEKLDLVTNKQHSPIQVPMVAGSPLGATQTCNKVRCVV

SEQ ID NO: 68823 - protein, 119 aa, Artificial Sequence
  derived and/or modified sequence
MMSEHDLADVVQIAVEDLSPDHPVVLENHVVTDEDEPALKRQRLEINCQDPSIKSFLYSINQTICLRLDSIEAKLQALEATCKSLEEKLDLVTNKQHSPIQVPMVAGSPLGATQTCNKV

SEQ ID NO: 68824 - protein, 250 aa, Artificial Sequence
  derived and/or modified sequence
MGSPEPTQGPRLSPILIPYSGRRYKVGRASGALCHQDSLPPILELGLTFLRASAGFSVPTSSSFALPEPLRSLCLGNGEGLGLSLTLTVLAWILGLSGTLGALVLFMVATGIFQEALWHLLLLSFSVEALPCFFFFPFFLLCRCLRAELQIQQRLDGTLSLDLMRLESDGETGCAAESSVLQGAQLIAVASSDPAAAGVDGSPLQGSDIQVQYVQLAPVSDHTAGAQTAEALQPTLQPEMQLEHGAIQIQ

SEQ ID NO: 68825 - DNA, 372 bp, Artificial Sequence
  derived and/or modified sequence
atgatgtccgaacacgacctggccgatgtggtccaaatcgcagtggaagatctgtccccagatcacccggtagtgctagagaaccatgtggtgaccgacgaagatgaacccgctctaaaaaggcagcgtctcgaaatcaactgccaggacccttctattaagagctttctctacagcattaaccaaaccatctgcctaaggcttgattccatcgaagccaagctacaggcattagaagctacctgcaagtccttagaggaaaagcttgatctggtgaccaataaacaacattcccccatacaggtgccaatggtggctgggtctccgttaggtgccacccagacttgtaacaaggtgaggtgcgtcgtgtag

SEQ ID NO: 68826 - DNA, 372 bp, Artificial Sequence
  derived and/or modified sequence
atgatgtctgaacatgacctggctgatgtggtgcagattgctgtggaggacctgagcccagaccaccctgtggtgctggagaaccacgtggtgacagatgaagatgagcccgccctgaagaggcagaggctggagatcaactgccaggaccccagcatcaagagcttcctgtacagcatcaaccagaccatctgcctgcggctggacagcattgaggccaagctgcaggccctggaggccacctgcaagagcctggaggagaagctggacctggtgaccaacaagcagcacagccccatccaggtgcccatggtggccggcagccccctgggcgccacccagacctgcaacaaggtgcgctgtgtggtgtag

SEQ ID NO: 68827 - DNA, 372 bp, Artificial Sequence
  derived and/or modified sequence
atgatgagcgagcacgacctggccgacgtggtgcagatcgccgtggaggacctgtccccggaccacccagttgtcttggagaaccacgttgtgaccgatgaagatgagcctgcactgaaaagacagcggctggaaatcaactgccaggatccatcgataaagtcctttttgtactctattaaccaaactatatgcctccgcctggacagtatcgaggcaaaactgcaggcgctggaggccacttgcaaaagtttggaagagaaactggatttggtcacaaataaacagcactccccgatacaggtacccatggttgctggctctcctcttggcgctacccagacatgtaataaagtcaggtgtgtagtatag

SEQ ID NO: 68828 - DNA, 372 bp, Artificial Sequence
  derived and/or modified sequence
atgatgtctgagcacgatctcgccgacgtcgtccaaatcgccgtggaggacttgtccccagaccaccccgtggtgctggagaaccacgtcgtaactgacgaggatgaacccgcattaaagagacagagattggagataaattgccaggatccctctatcaaatcatttttatacagcataaaccagactatttgcttacgtttagacagcattgaggcaaagctgcaagccctggaggcaacatgcaaatcgctggaagagaagctggaccttgtgacaaataagcagcacagtccaattcaagtgccgatggtggccggaagccccctcggagcaacccagacctgcaataaagttcgctgcgtggtctag

SEQ ID NO: 68829 - DNA, 560 bp, Artificial Sequence
  derived and/or modified sequence
agtattcttggggagaaagataacagggaagtgaggagggttcagctgtggaagtgctgggatggctgatccgagtgaccatggcctagacggggtttaaaccctggactgaagaaagtgccggtgaccaaaagccagccccactgtgagttgaactctttcgtgttgaccggccactctccgtgctctggatgatgtcggaacacgacctggccgatgtggttcagattgcagtggaagacctgagccctgaccacccagttgttttggagaatcatgtagtgacagatgaagacgaacctgctttgaaacgccagcgactagaaatcaattgccaggatccatctataaagtcattcctgtattccatcaaccagacaatctgcttgcggttggatagcattgaagccaaattgcaagccctggaggctacttgtaaatccttagaagaaaagctggatctggtcacgaacaagcagcacagccccatccaggtccccatggtggccggctcccctctcggggcaacccagacgtgcaacaaagtgcgatgcgtcgtc

SEQ ID NO: 68830 - DNA, 372 bp, Artificial Sequence
  derived and/or modified sequence
atgatgagcgagcacgacctggccgacgtggtgcagatcgccgtggaggacctgagccccgaccaccccgtggtgctggagaaccacgtggtgaccgacgaggacgagcccgccctgaagagacagagactggagatcaactgccaggaccccagcatcaagagcttcctgtacagcatcaaccagaccatctgcctgagactggacagcatcgaggccaagctgcaggccctggaggccacctgcaagagcctggaggagaagctggacctggtgaccaacaagcagcacagccccatccaggtgcccatggtggccggcagccccctgggcgccacccagacctgcaacaaggtgagatgcgtggtgtag

SEQ ID NO: 68831 - protein, 497 aa, Artificial Sequence
  derived and/or modified sequence
MMSEHDLADVVQIAVEDLSPDHPGTELWDIVLENHVVTDEDEPALKRQRLEINCQDPSIKSFLYSINQTICLRLDSIEAKLQALEATCKSLEEKLDLVTNKQHSPIQVPMVAGSPLGATQTCNKVRCAVPGRRQNTIVVKVPGQEDSHHEDGESGSEASDSVSSCGQAGSQSIGSNVTLITLNSEEDYPNGTWLGDENNPEMRVRCAIIPSDMLHISTNCRTAEKMALTLLDYLFHREVQAVSNLSGQGKHGKKQLDPLTIYGIRCHLFYKFGITESDWYRIKQSIDSKCRTAWRRKQRGQSLAVKSFSRRTPNSSSYCPSEPMMSTPPPASELPQPQPQPQALHYALANAQQVQIHQIGEDGQVQVIPQGHLHIAQVPQGEQVQITQDSEGNLQIHHVGQDGQLLEATRIPCLLAPSVFKASSGQVLQGAQLIAVASSDPAAAGVDGSPLQGSDIQVQYVQLAPVSDHTAGAQTAEALQPTLQPEMQLEHGAIQIQ

SEQ ID NO: 68832 - protein, 195 aa, Artificial Sequence
  derived and/or modified sequence
MMSEHDLADVVQIAVEDLSPDHPGTELWDIVLENHVVTDEDEPALKRQRLEINCQDPSIKSFLYSINQTICLRLDSIEAKLQALEATCKSLEEKLDLVTNKQHSPIQVPMVAGSPLGATQTCNKVRCAVPGRRQNTIVVKVPGQEDSHHEDGESGSEASDSVSSCGQAGSQSIGSNVTLITLNSEEDYPNGTWLG

SEQ ID NO: 68833 - DNA, 1494 bp, Artificial Sequence
  derived and/or modified sequence
atgatgagcgaacacgatttggctgatgtggtgcaaatagcagtggaagatctgtcaccggatcatccaggtactgaactttgggacattgtgctcgagaaccatgtggttaccgatgaggacgaaccggcactcaagaggcagaggctggaaatcaactgtcaggatccatcaattaagtcttttctgtattccatcaatcagacgatttgtctcaggctggactccatcgaggccaaattacaagctctggaagctacctgcaaatctcttgaggagaagctcgatctggtcaccaataaacaacactccccaatacaagtaccaatggtcgcgggttcccccctgggggccacccagacttgcaacaaagttaggtgcgcggtcccagggcgccggcagaatacaatcgttgtcaaggtgccaggacaggaggattcccaccacgaggatggagagagtgggagtgaagctagtgacagtgtgtcctcatgcggacaggccggctctcaaagcatcggaagcaacgtgaccctgatcacccttaactctgaggaagactatcctaacgggacctggttgggcgatgagaataaccccgaaatgagagtccgatgtgcgattattccctccgatatgctgcacatctcaaccaactgccggaccgccgagaagatggctttgaccttgctcgactatctgtttcatagggaggtacaggcggtgagcaatttatcagggcagggtaaacatgggaagaagcagctggatcccctgacaatttacgggattaggtgccatctgttttataagtttggaatcaccgagtctgactggtatcggataaagcaaagtattgattctaagtgccggacagcatggcgtcggaaacagaggggccagagcctggctgtgaaatctttttcacgccggacaccaaatagttcatcatattgtccgtcagaacccatgatgagcactccaccacccgcttctgagctgcctcagcctcaacctcaacctcaggcattgcattacgccctggcaaacgcgcaacaggtacagatccatcaaatcggggaagatggccaggtccaggtgatcccccaaggacatctccacatagcacaggttccgcagggagagcaggttcagatcacccaggactcagagggaaacctgcagattcaccacgtgggccaagatggccagctgcttgaggcaacacggattccgtgcttattggctcccagcgtgtttaaggcttcgagcggccaggtactgcagggggctcaactgattgccgtggcttcatcagaccccgccgcagctggagtggatggttcccctttacagggctctgatattcaggttcaatacgtgcagctcgctccagtttccgatcacacagcgggcgctcaaaccgccgaagctttgcagcccaccctccagcccgagatgcagctagagcatggagcaattcaaattcagtag

SEQ ID NO: 68834 - DNA, 588 bp, Artificial Sequence
  derived and/or modified sequence
atgatgagcgaacatgacttagctgacgttgttcagatcgcagtggaagatctcagtcccgaccaccccggcaccgagctttgggatattgtactggagaaccacgtcgtgacagacgaggacgagcctgccctcaaacgccagcgactcgaaataaactgccaagacccatcaatcaagtcgtttctgtacagtatcaatcagacaatatgcctcaggctggatagtattgaggctaagctgcaggccttggaggccacatgcaaatcacttgaggaaaagctcgatttggtgacaaataaacagcactcacctatccaggtcccaatggtcgcgggcagcccattgggcgccactcagacttgcaacaaggtgaggtgtgcagtgcccggccgtaggcagaataccatcgtggtgaaagtgccaggccaagaagacagccatcatgaagatggcgagagcggctcagaagcttctgacagcgtgtcatcctgcgggcaggctgggagccagtctatcggtagcaacgtgaccctcatcactctcaactccgaagaggactatcctaacggtacatggctcgggtag

SEQ ID NO: 68835 - DNA, 1494 bp, Artificial Sequence
  derived and/or modified sequence
atgatgtctgaacatgacctggctgatgtggtgcagattgctgtggaggacctgagcccagaccaccctggaacagagctgtgggacatcgtgctggagaaccacgtggtgacagatgaagatgagcccgccctgaagaggcagaggctggagatcaactgccaggaccccagcatcaagagcttcctgtacagcatcaaccagaccatctgcctgcggctggacagcattgaggccaagctgcaggccctggaggccacctgcaagagcctggaggagaagctggacctggtgaccaacaagcagcacagccccatccaggtgcccatggtggccggcagccccctgggcgccacccagacctgcaacaaggtgcgctgtgctgtgcccggccggcggcagaacaccatcgtggtgaaggtgcccggccaggaggacagccaccatgaagatggagagagcggcagcgaggccagtgacagcgtgagcagctgtggccaggccggcagccagagcatcggcagcaatgtgaccctcatcaccctgaacagcgaggaggactaccccaacggcacctggctgggagatgagaacaaccctgagatgagggtgcgctgtgccatcatccccagcgacatgctgcacatcagcaccaactgcaggacagctgagaagatggccctgaccctgctggactacctgttccaccgggaggtgcaggccgtgagcaacctgagcggccagggcaagcacggcaagaagcagctggaccccctgaccatctacggcatccgctgccacctgttctacaagtttggcatcacagaaagtgactggtaccgcatcaagcagagcattgacagcaaatgtagaacagcctggaggaggaagcagaggggccagagcctggccgtgaagagcttcagcaggaggacccccaacagcagcagctactgccccagcgagcccatgatgagcaccccacctccagccagcgagctgccccagccccagccccagccccaggccctgcactacgccctggccaatgcccagcaggtgcagatccaccagattggagaagatggccaggtgcaggtgatcccccagggccacctgcacatcgcccaggtgccccagggcgagcaggtgcagatcacccaggacagcgagggcaacctgcagatccaccacgtgggccaggacggccagctgctggaggccacccgcatcccctgcctgctggcccccagcgtcttcaaggccagcagcggccaggtgctgcagggcgcccagctgattgctgtggccagcagtgaccctgctgctgctggggtggatggcagccccctgcagggcagtgacatccaggtgcagtatgtgcagctggcccctgtgtctgaccacacagctggggcccagacagctgaggccctgcagcccaccctgcagcctgagatgcagctggagcacggggccatccagatccagtag

SEQ ID NO: 68836 - DNA, 588 bp, Artificial Sequence
  derived and/or modified sequence
atgatgtctgaacatgacctggctgatgtggtgcagattgctgtggaggacctgagcccagaccaccctggaacagagctgtgggacatcgtgctggagaaccacgtggtgacagatgaagatgagcccgccctgaagaggcagaggctggagatcaactgccaggaccccagcatcaagagcttcctgtacagcatcaaccagaccatctgcctgcggctggacagcattgaggccaagctgcaggccctggaggccacctgcaagagcctggaggagaagctggacctggtgaccaacaagcagcacagccccatccaggtgcccatggtggccggcagccccctgggcgccacccagacctgcaacaaggtgcgctgtgctgtgcccggccggcggcagaacaccatcgtggtgaaggtgcccggccaggaggacagccaccatgaagatggagagagcggcagcgaggccagtgacagcgtgagcagctgtggccaggccggcagccagagcatcggcagcaatgtgaccctcatcaccctgaacagcgaggaggactaccccaacggcacctggctgggctag

SEQ ID NO: 68837 - DNA, 1494 bp, Artificial Sequence
  derived and/or modified sequence
atgatgagcgagcacgacctggccgacgtggtgcagatcgccgtggaagacctgtcacccgaccatcccggaaccgagctctgggatatcgtgttggagaatcacgtggttactgacgaagatgaacctgcactgaagcgccagcgtctagagattaactgtcaagacccatctataaagagctttctgtatagcattaaccagacaatatgtctgcggttggactccatcgaagcgaaactgcaagctcttgaagccacttgtaagagtctggaagagaaattggacttggtcactaataagcaacatagtcctatccaggtaccaatggtagccgggtccccactcggtgccacccagacttgcaacaaagttcgctgtgccgttcctggccgacgccagaacacaattgtggtgaaggtacctggccaggaagattcccaccacgaggatggcgagtccgggagcgaagcctcagattcagtatcttcctgcggacaggccgggtcccagtcgattggttccaatgtgacactcatcacactgaactctgaagaggattatcccaacgggacctggcttggggatgaaaacaaccccgaaatgcgagtgcggtgcgcgatcatccctagtgacatgctgcatatctccaccaattgccgcacggcggagaaaatggcattaacgctgctggattatctgtttcacagggaggtccaggccgtgagtaacctctctggccaggggaaacacggcaagaagcagctggatcctcttacaatttatggcattaggtgccacctgttctataagttcggtatcacagaatcagattggtatcgcataaaacagtccatagattccaagtgcaggactgcatggaggaggaagcaaaggggacaatctttggccgtgaagtccttttcgaggagaaccccaaatagctcttcttattgtcctagtgaaccgatgatgtctaccccgcctcctgcatccgaacttccccaaccccagccccagccacaggccctacactatgcactggcaaatgctcaacaagtgcagattcaccagatcggtgaagacgggcaggttcaggtaattcctcagggtcatctccacatcgctcaagtcccacagggcgaacaggtgcagatcacccaagattcagagggcaacctgcagattcatcacgtagggcaggatggccagctgctggaggctactcgaatcccatgcttacttgctccatcagtatttaaagcctcttcaggccaggtgctccagggtgctcagctgatcgccgtagcttcaagcgatcctgctgcagccggagttgacggctctccactccagggtagtgacattcaggtgcagtatgtgcagcttgcaccagtctcggaccacaccgccggcgcgcagacagctgaggcactgcaacccactttgcagccggagatgcagttggagcacggagctatccagatccaatag

SEQ ID NO: 68838 - DNA, 588 bp, Artificial Sequence
  derived and/or modified sequence
atgatgagcgagcacgacctggccgacgtggtgcagatcgccgtggaggacttgagtcccgaccaccccggcacagagctgtgggacatcgtactggaaaatcacgtggtgacggacgaggacgaacccgccctgaaacgtcagcgcctggaaataaattgccaggacccatctattaagtccttcctttatagcattaatcagacaatctgcctgagactggatagtattgaggctaaactccaagcccttgaagctacttgcaagtctctcgaggaaaagttagatctagtgaccaacaagcagcactctccgattcaggtgccaatggtggctggctccccgctgggggccacccagacctgtaataaggttcgttgcgctgtccccggacggcgtcagaatacgatcgtggttaaagtgccaggtcaggaggactcccaccacgaggatggcgaaagtggaagtgaagcatccgatagcgtgtcaagctgtggacaggccggcagtcaaagtatcggtagcaatgtgactcttattacgttaaatagcgaggaggattatccaaacggaacatggctcggatag

SEQ ID NO: 68839 - DNA, 1494 bp, Artificial Sequence
  derived and/or modified sequence
atgatgagcgagcatgatctggctgacgtggttcaaatcgccgttgaggacttaagccccgatcatcctggcaccgagctttgggatattgttctggaaaatcacgtcgtgaccgatgaggacgaaccagccctgaaaaggcagaggctcgaaataaattgccaggatccttccatcaagagtttcctgtactcaattaaccagactatttgtctgcgcctcgacagcattgaggctaagctgcaagcactggaggcaacctgcaagtccttggaggagaagttggacttagtaactaataaacagcactccccaattcaagtgcctatggtggctggttctccactgggagcaacccagacatgcaacaaagtccgctgtgcggtgcccggtagaagacagaacactattgtggtcaaggtaccgggtcaagaggattctcatcacgaagacggcgaatcaggaagcgaggccagtgattctgtctcctcctgcggccaggctggtagccagtccatcggaagtaatgttacattaattacactgaattccgaggaggactacccgaatggcacttggcttggagacgaaaacaacccagagatgagagtgaggtgcgctatcattcccagtgatatgctgcacatctccaccaattgccgcacagcagagaaaatggccctgaccctgttggactatctgttccaccgggaggtgcaggcggtgtcgaacctgagcggccaggggaaacatggtaagaagcaattagaccccctgacaatttatggcatacggtgtcacttgttttacaaatttggcatcactgagtcagactggtaccgcatcaaacagtcaattgatagcaaatgccggacagcctggaggcgtaagcagcggggtcagtctcttgctgtgaaaagtttttcccgcaggacccctaacagctcctcatattgccctagcgaaccaatgatgtctacgcctccgcctgcctcagagttaccacagcctcagcctcaaccacaggctttacactacgctttggctaatgcacagcaagtgcagattcatcagatcggtgaagacggacaagtgcaggtgattccccagggtcacctccacattgcccaggttccccagggcgaacaggtgcagatcacccaggacagcgaaggcaacctgcagattcaccacgtgggacaagacggccagcttctcgaagcaacacggattccctgcctcctagctccctcagtgttcaaagctagttccggtcaggtattacagggtgctcagctcatcgccgtagcctcttctgatcctgcagcagccggtgtcgatggttcgcccctacagggcagcgacatccaggtccagtatgttcagctggcccctgtaagcgatcacactgcaggcgctcagactgccgaggctctgcagcctactctgcagcctgagatgcagcttgagcatggtgccatccagatccaatag

SEQ ID NO: 68840 - DNA, 588 bp, Artificial Sequence
  derived and/or modified sequence
atgatgagcgagcatgatcttgccgacgtggtccaaatagcagtggaagatctgtcgcccgaccacccgggaactgaactttgggatatcgttttggagaaccacgtggtaactgatgaggacgagcccgctctaaaacgccagcggctcgagattaactgtcaggatcccagcataaaatcatttctgtacagcatcaatcagacaatctgtctcaggttggattccatcgaagccaagctgcaggcactcgaagccacctgtaagtccctggaagaaaaattggaccttgtgaccaacaaacagcacagcccaatacaggtgccaatggtggctggcagcccccttggagccactcagacatgtaataaagtgcgatgcgctgttccgggtcgaaggcagaacactattgtggtaaaggtccctggacaggaagacagccatcatgaggatggagagtccggatctgaggcctctgactctgtttcttcttgcgggcaggcagggtcacagtctatcggtagcaacgtcacgttgatcacccttaacagtgaagaggactaccccaacggtacttggttaggatag

SEQ ID NO: 68841 - DNA, 2300 bp, Artificial Sequence
  derived and/or modified sequence
gcagagcggcggcttctctcgcgaggacggacgccattatcgcatctccccgacaaacaccacgagaattccgcagcccacacggtgaccaaaagccagccccactgtgagttgaactctttcgtgttgaccggccactctccgtgctctggatgatgtcggaacacgacctggccgatgtggttcagattgcagtggaagacctgagccctgaccacccaggtacagagctgtgggacattgttttggagaatcatgtagtgacagatgaagacgaacctgctttgaaacgccagcgactagaaatcaattgccaggatccatctataaagtcattcctgtattccatcaaccagacaatctgcttgcggttggatagcattgaagccaaattgcaagccctggaggctacttgtaaatccttagaagaaaagctggatctggtcacgaacaagcagcacagccccatccaggtccccatggtggccggctcccctctcggggcaacccagacgtgcaacaaagtgcgatgcgctgtgcctgggcgtcggcagaacaccattgtggtgaaggtgccgggccaagaagacagccaccacgaggacggggagagcggctcggaggccagcgactctgtgtccagctgtgggcaggcgggcagtcagagcatcgggagcaacgtcacgctcatcaccctgaactcggaagaggactaccccaatggcacctggctgggcgacgagaacaaccccgagatgcgggtacgctgcgccatcatcccctccgacatgctgcacatcagcaccaactgccgcacggccgagaagatggcgctcacgctgctggactacctcttccaccgcgaggtgcaggctgtgtccaacctctcggggcagggcaagcacgggaagaagcagctggacccgctcaccatctacggcatccggtgtcaccttttctataaatttggcatcacagaatccgactggtaccgaatcaagcagagcatcgactccaagtgccgcacggcgtggcggcgcaagcagcggggccagagcctggcggtcaagagcttctcgcggagaacgcccaactcgtcctcctactgcccttcagagccgatgatgagcaccccacctcctgccagcgagctcccgcagccacagccgcagccgcaggccctgcactacgcgctggccaacgcacagcaggtgcagatccaccagatcggagaagacggacaggtgcaagtaatcccacagggacacctccacatcgcccaggtgccgcagggggagcaagtccagatcacgcaggacagcgagggcaacctccagatccatcacgtggggcaggacggtcagcttctagaggccacccgcatcccctgcctcctggccccatccgtcttcaaagccagcagtggccaggtgctgcagggtgcacagctgatcgccgtggcctcctcggaccccgcggcggcgggcgtggatgggtcgccactccagggcagcgacatccaggttcagtacgtgcagctggcgccagtgagtgaccacacggccggggcacagacggccgaagccctgcagcccacgctacagccggagatgcagctcgagcacggggccatccagattcagtgagcggtgcccatggcaccaggagcccctcgccggctccgcctacggcccggcccccacgcgccctgctctcacggcctcggcacaggcagcggctgcacgtgttctgctgaagtgcgtctgaaggccgctgcctccgcggggaacagcatcctatcaactgaaagagcagccgccgccgcccccagccggagacccctttcgtttgagtcctgctgttggtgtcggagcacgaggggaggcacggtgcggagagcgtcgcatatgcgcgggaaatcaagaactatgatatttttctgtttaaacagctttttttaatttgctatggtgtttataacaaaaaagaaaatttgaaaaaaaaaatcccaggggagtagcaggagccctttgctgtgtgctctgtccagtgtcatgagacgggagccctttgctgtgtgctctgtccagtgtcatgagacgggagccctttgctgtgtgctctgtccagtgtcatgagacgggagccctttgctgtgtgctctgtccagtgtcatgaggcaggtgtttgcaaagccagctctcggttccgatggggtattgctgacctacttttctaggggaaatgctcttaaacactgtaattatgcatttctaatgaaataaaatgtatttatgacc

SEQ ID NO: 68842 - DNA, 736 bp, Artificial Sequence
  derived and/or modified sequence
gcagagcggcggcttctctcgcgaggacggacgccattatcgcatctccccgacaaacaccacgagaattccgcagcccacacggtgaccaaaagccagccccactgtgagttgaactctttcgtgttgaccggccactctccgtgctctggatgatgtcggaacacgacctggccgatgtggttcagattgcagtggaagacctgagccctgaccacccaggtacagagctgtgggacattgttttggagaatcatgtagtgacagatgaagacgaacctgctttgaaacgccagcgactagaaatcaattgccaggatccatctataaagtcattcctgtattccatcaaccagacaatctgcttgcggttggatagcattgaagccaaattgcaagccctggaggctacttgtaaatccttagaagaaaagctggatctggtcacgaacaagcagcacagccccatccaggtccccatggtggccggctcccctctcggggcaacccagacgtgcaacaaagtgcgatgcgctgtgcctgggcgtcggcagaacaccattgtggtgaaggtgccgggccaagaagacagccaccacgaggacggggagagcggctcggaggccagcgactctgtgtccagctgtgggcaggcgggcagtcagagcatcgggagcaacgtcacgctcatcaccctgaactcggaagaggactaccccaatggcacctggctggg

SEQ ID NO: 68843 - DNA, 1494 bp, Artificial Sequence
  derived and/or modified sequence
atgatgagcgagcacgacctggccgacgtggtgcagatcgccgtggaggacctgagccccgaccaccccggcaccgagctgtgggacatcgtgctggagaaccacgtggtgaccgacgaggacgagcccgccctgaagagacagagactggagatcaactgccaggaccccagcatcaagagcttcctgtacagcatcaaccagaccatctgcctgagactggacagcatcgaggccaagctgcaggccctggaggccacctgcaagagcctggaggagaagctggacctggtgaccaacaagcagcacagccccatccaggtgcccatggtggccggcagccccctgggcgccacccagacctgcaacaaggtgagatgcgccgtgcccggcagaagacagaacaccatcgtggtgaaggtgcccggccaggaggacagccaccacgaggacggcgagagcggcagcgaggccagcgacagcgtgagcagctgcggccaggccggcagccagagcatcggcagcaacgtgaccctgatcaccctgaacagcgaggaggactaccccaacggcacctggctgggcgacgagaacaaccccgagatgagagtgagatgcgccatcatccccagcgacatgctgcacatcagcaccaactgcagaaccgccgagaagatggccctgaccctgctggactacctgttccacagagaggtgcaggccgtgagcaacctgagcggccagggcaagcacggcaagaagcagctggaccccctgaccatctacggcatcagatgccacctgttctacaagttcggcatcaccgagagcgactggtacagaatcaagcagagcatcgacagcaagtgcagaaccgcctggagaagaaagcagagaggccagagcctggccgtgaagagcttcagcagaagaacccccaacagcagcagctactgccccagcgagcccatgatgagcacccccccccccgccagcgagctgccccagccccagccccagccccaggccctgcactacgccctggccaacgcccagcaggtgcagatccaccagatcggcgaggacggccaggtgcaggtgatcccccagggccacctgcacatcgcccaggtgccccagggcgagcaggtgcagatcacccaggacagcgagggcaacctgcagatccaccacgtgggccaggacggccagctgctggaggccaccagaatcccctgcctgctggcccccagcgtgttcaaggccagcagcggccaggtgctgcagggcgcccagctgatcgccgtggccagcagcgaccccgccgccgccggcgtggacggcagccccctgcagggcagcgacatccaggtgcagtacgtgcagctggcccccgtgagcgaccacaccgccggcgcccagaccgccgaggccctgcagcccaccctgcagcccgagatgcagctggagcacggcgccatccagatccagtag

SEQ ID NO: 68844 - DNA, 588 bp, Artificial Sequence
  derived and/or modified sequence
atgatgagcgagcacgacctggccgacgtggtgcagatcgccgtggaggacctgagccccgaccaccccggcaccgagctgtgggacatcgtgctggagaaccacgtggtgaccgacgaggacgagcccgccctgaagagacagagactggagatcaactgccaggaccccagcatcaagagcttcctgtacagcatcaaccagaccatctgcctgagactggacagcatcgaggccaagctgcaggccctggaggccacctgcaagagcctggaggagaagctggacctggtgaccaacaagcagcacagccccatccaggtgcccatggtggccggcagccccctgggcgccacccagacctgcaacaaggtgagatgcgccgtgcccggcagaagacagaacaccatcgtggtgaaggtgcccggccaggaggacagccaccacgaggacggcgagagcggcagcgaggccagcgacagcgtgagcagctgcggccaggccggcagccagagcatcggcagcaacgtgaccctgatcaccctgaacagcgaggaggactaccccaacggcacctggctgggctag

SEQ ID NO: 68845 - protein, 466 aa, Artificial Sequence
  derived and/or modified sequence
MMSEHDLADVVQIAVEDLSPDHPVVLENHVVTDEDEPALKRQRLEINCQDPSIKSFLYSINQTICLRLDSIEAKLQALEATCKSLEEKLDLVTNKQHSPIQVPMVAGSPLGATQTCNKVRCAVPGRRQNTIVVKVPGQEDSHHEDGESGSEASDSVSSCGQAGSQSIGSNVTLITLNSEEDYPNGTWLGDENNPEMRVRCAIIPSDMLHISTNCRTAEKMALTLLDYLFHREVQAVSNLSGQGKHGKKQLDPLTIYGIRCHLFYKFGITESDWYRIKQSIDSKCRTAWRRKQRGQSLAVKSFSRRTPNSSSYCPSEPMMSTPPPASELPQPQPQPQALHYALANAQQVQIHQIGEDGQVQVGHLHIAQVPQGEQVQITQDSEGNLQIHHVGQDGQVLQGAQLIAVASSDPAAAGVDGSPLQGSDIQVQYVQLAPVSDHTAGAQTAEALQPTLQPEMQLEHGAIQIQ

SEQ ID NO: 68846 - DNA, 357 bp, Artificial Sequence
  derived and/or modified sequence
atgatgtctgagcacgaccttgccgatgtagtacaaatagcggtagaagacctgagccctgatcaccccgttgtgctggagaaccatgtggtgacagatgaagacgaacctgctctcaaacgccagagattggagatcaattgccaagatccaagcattaagagtttcctttactccatcaatcaaaccatttgtctgcgactggattctatcgaggccaaactccaggctctggaggctacgtgcaaaagtctcgaagaaaagcttgatttggtcacgaacaagcaacattccccaatccaagtgcccatggtggctggctcacctctgggcgccacacaaacttgcaataagtag

SEQ ID NO: 68847 - DNA, 288 bp, Artificial Sequence
  derived and/or modified sequence
atgatgtctgagcacgaccttgcggacgtcgtgcagatcgcagtcgaggacctgtcacctgaccatccagtggtactggagaaccacgtggtcactgacgaagatgaacctgccttgaaacgacagcggctggagatcaattgtcaagacccttcaatcaagtcttttctttactctattaatcaaaccatctgtctgcgcctggactccattgaggccaagttgcaggccctggaagcaacctgcaaatctctcgaggaaaagcttgacctcgtcactaataaatag

SEQ ID NO: 68848 - DNA, 360 bp, Artificial Sequence
  derived and/or modified sequence
atgatgagcgagcatgaccttgccgatgtggtgcagattgccgtcgaggacctgtccccagatcaccctgtagtcctcgaaaatcatgtcgtgaccgacgaggacgagcctgctttgaagaggcaacgactcgagatcaactgccaggacccctccatcaagtcttttctttacagtattaatcaaactatttgcctgaggctggactcgatcgaggcaaagctgcaggcgctcgaggctacttgtaaatcactagaagaaaagctggacctggtgaccaataaacagcattcgcccatccaggtgccaatggttgccgggtctcccctaggcgccacgcaaacctgcaataaggtgtag

SEQ ID NO: 68849 - DNA, 1401 bp, Artificial Sequence
  derived and/or modified sequence
atgatgtccgaacatgacctggcagatgtcgtccaaattgcagtggaagatttgtccccagaccatcctgtagttctggagaaccacgtcgttaccgatgaagatgagcccgcacttaagcgccagcgtctggagattaattgccaggatccctcaatcaagagtttcctgtactccattaaccagactatctgcctccgactcgattcgattgaggcaaagctacaggctcttgaggccacatgcaaaagcctggaagaaaagctggaccttgttaccaataaacagcacagcccaatccaggttccgatggttgctggatcacctctgggtgctacccaaacatgtaataaggtccgatgtgctgtgcctggcagacggcaaaacacgattgttgtgaaagtgccagggcaagaggacagccaccatgaggacggcgagtcaggaagcgaggcctccgatagtgtatccagctgcggccaagcaggatctcaaagcatcgggtccaatgtgactctgatcacattgaactctgaagaggattaccctaatggcacctggctcggagatgagaacaatcctgagatgagggtgaggtgtgccattatccctagtgacatgctacatatatcaacaaactgcaggactgctgagaaaatggcactgacgcttttggattatctgtttcatagagaggtccaggctgtgtctaatctctccggtcagggaaaacacggaaagaaacaattggaccccttgaccatatacggtatccgctgtcacttgttctataaattcggaatcactgaatcggattggtatcgaatcaaacaatctattgattccaagtgtcggaccgcatggaggcggaagcagcgcggacagtccctggccgtaaagtccttttcgcgcaggaccccaaactcctcctcctattgcccttcagagccaatgatgagtactccgcccccagcctctgagctgccccagcctcagccacagccccaagctctccactacgctctcgcaaacgcacaacaggtccagatacatcagattggagaggatggacaggtgcaagtgggccacttgcacatcgcccaagtgcctcagggagagcaggtccaaatcacccaagacagcgaaggtaatctgcagatccatcacgtgggccaagacgggcaggtgctgcagggggcacagctgatagccgtggccagtagtgatcccgctgctgcgggggtggacggctcccccctgcaggggtctgacattcaggtccagtacgtgcagctcgcccctgtatctgaccacaccgcgggagcccagaccgctgaagcactccagcccaccctccagcccgaaatgcagcttgagcatggcgccatacagatacagtag

SEQ ID NO: 68850 - DNA, 357 bp, Artificial Sequence
  derived and/or modified sequence
atgatgtctgaacatgacctggctgatgtggtgcagattgctgtggaggacctgagcccagaccaccctgtggtgctggagaaccacgtggtgacagatgaagatgagcccgccctgaagaggcagaggctggagatcaactgccaggaccccagcatcaagagcttcctgtacagcatcaaccagaccatctgcctgcggctggacagcattgaggccaagctgcaggccctggaggccacctgcaagagcctggaggagaagctggacctggtgaccaacaagcagcacagccccatccaggtgcccatggtggccggcagccccctgggcgccacccagacctgcaacaagtag

SEQ ID NO: 68851 - DNA, 288 bp, Artificial Sequence
  derived and/or modified sequence
atgatgtctgaacatgacctggctgatgtggtgcagattgctgtggaggacctgagcccagaccaccctgtggtgctggagaaccacgtggtgacagatgaagatgagcccgccctgaagaggcagaggctggagatcaactgccaggaccccagcatcaagagcttcctgtacagcatcaaccagaccatctgcctgcggctggacagcattgaggccaagctgcaggccctggaggccacctgcaagagcctggaggagaagctggacctggtgaccaacaagtag

SEQ ID NO: 68852 - DNA, 360 bp, Artificial Sequence
  derived and/or modified sequence
atgatgtctgaacatgacctggctgatgtggtgcagattgctgtggaggacctgagcccagaccaccctgtggtgctggagaaccacgtggtgacagatgaagatgagcccgccctgaagaggcagaggctggagatcaactgccaggaccccagcatcaagagcttcctgtacagcatcaaccagaccatctgcctgcggctggacagcattgaggccaagctgcaggccctggaggccacctgcaagagcctggaggagaagctggacctggtgaccaacaagcagcacagccccatccaggtgcccatggtggccggcagccccctgggcgccacccagacctgcaacaaggtgtag

SEQ ID NO: 68853 - DNA, 1401 bp, Artificial Sequence
  derived and/or modified sequence
atgatgtctgaacatgacctggctgatgtggtgcagattgctgtggaggacctgagcccagaccaccctgtggtgctggagaaccacgtggtgacagatgaagatgagcccgccctgaagaggcagaggctggagatcaactgccaggaccccagcatcaagagcttcctgtacagcatcaaccagaccatctgcctgcggctggacagcattgaggccaagctgcaggccctggaggccacctgcaagagcctggaggagaagctggacctggtgaccaacaagcagcacagccccatccaggtgcccatggtggccggcagccccctgggcgccacccagacctgcaacaaggtgcgctgtgctgtgcccggccggcggcagaacaccatcgtggtgaaggtgcccggccaggaggacagccaccatgaagatggagagagcggcagcgaggccagtgacagcgtgagcagctgtggccaggccggcagccagagcatcggcagcaatgtgaccctcatcaccctgaacagcgaggaggactaccccaacggcacctggctgggagatgagaacaaccctgagatgagggtgcgctgtgccatcatccccagcgacatgctgcacatcagcaccaactgcaggacagctgagaagatggccctgaccctgctggactacctgttccaccgggaggtgcaggccgtgagcaacctgagcggccagggcaagcacggcaagaagcagctggaccccctgaccatctacggcatccgctgccacctgttctacaagtttggcatcacagaaagtgactggtaccgcatcaagcagagcattgacagcaaatgtagaacagcctggaggaggaagcagaggggccagagcctggccgtgaagagcttcagcaggaggacccccaacagcagcagctactgccccagcgagcccatgatgagcaccccacctccagccagcgagctgccccagccccagccccagccccaggccctgcactacgccctggccaatgcccagcaggtgcagatccaccagattggagaagatggccaggtgcaggtgggccacctgcacatcgcccaggtgccccagggcgagcaggtgcagatcacccaggacagcgagggcaacctgcagatccaccacgtgggccaggacggccaggtgctgcagggcgcccagctgattgctgtggccagcagtgaccctgctgctgctggggtggatggcagccccctgcagggcagtgacatccaggtgcagtatgtgcagctggcccctgtgtctgaccacacagctggggcccagacagctgaggccctgcagcccaccctgcagcctgagatgcagctggagcacggggccatccagatccagtag

SEQ ID NO: 68854 - DNA, 357 bp, Artificial Sequence
  derived and/or modified sequence
atgatgagcgagcacgacctggccgacgtggtgcagatcgccgtggaggaccttagccctgaccaccccgttgttctggaaaaccatgtagtcacagacgaggatgagccagctctaaagcgccagaggctggagattaactgccaagatccaagtatcaagtcatttttatactcgataaaccaaacaatttgcttacgcttggacagcatagaggctaagttacaggccctggaagcgacctgcaaatcacttgaagaaaagctcgatctcgtgacaaataaacagcactccccaattcaggtcccgatggtggccggatcgccattgggagctacacagacctgtaacaagtag

SEQ ID NO: 68855 - DNA, 288 bp, Artificial Sequence
  derived and/or modified sequence
atgatgagcgagcacgacctggccgacgtggtgcagatcgccgtggaagatctcagcccagaccaccccgtagtcctcgagaatcatgttgtgacagacgaagacgagcctgccctgaaacgtcagaggttagagataaattgtcaggaccccagtatcaaatcttttctctacagcatcaatcagacaatttgcctgcgactggactctatcgaagccaagctgcaagccctggaggcaacatgcaagtccctggaggagaagcttgatctggtcacaaataagtag

SEQ ID NO: 68856 - DNA, 360 bp, Artificial Sequence
  derived and/or modified sequence
atgatgagcgagcacgacctggccgacgtggtgcagatcgccgtggaggatctatcccctgatcaccctgtggtcttggagaaccacgtcgtgaccgacgaggatgagccagccttaaaaagacagagactggaaattaactgtcaggacccgagtattaaatcctttctgtattcaatcaatcaaactatatgtcttaggctggattccatcgaggccaagcttcaagctctggaagccacctgcaagtctttggaggagaaactagatttagtcaccaataaacagcatagccctattcaggtgcccatggtggccggttcaccactaggagcaactcagacatgcaacaaagtgtag

SEQ ID NO: 68857 - DNA, 1401 bp, Artificial Sequence
  derived and/or modified sequence
atgatgagcgagcacgacctggccgacgtggtgcagatcgccgtggaggatctctcaccggatcacccagtagttctagagaatcatgtggtgaccgatgaggacgagccagcccttaagagacagcgccttgaaattaactgccaggatccaagcattaaatcctttctgtactccataaatcagacaatctgcctgcgattggattccatcgaagctaagcttcaagctctcgaagctacttgcaagagtctggaggaaaaattagacttggtcaccaataaacagcatagtccaatccaggtcccaatggtggccgggagccctctgggcgcaacccagacatgtaacaaggtgaggtgcgctgtaccaggtcgacgtcaaaacaccatcgttgtgaaagtgccagggcaggaggactcgcaccatgaagacggcgagtccggttctgaggccagcgatagcgtaagttcctgtgggcaagcaggatcacaatccatagggtccaatgttaccctgataacgctgaacagcgaggaggattatcccaacggaacttggctgggcgatgaaaataatccagagatgcgcgtccgatgtgctatcattccctcagatatgttacacatatcaaccaactgcaggactgctgagaagatggctctgactttactcgattacctgtttcacagggaggtgcaagctgtatccaacctgtctgggcagggtaagcatggaaagaaacagctggatcctctgaccatctacggcattaggtgtcacctgttttataaattcggcatcacagaatccgactggtacagaattaagcaaagcatcgatagtaagtgtcgcactgcatggcgtaggaaacagaggggccagtccttggccgtcaagagctttagccggcgaacacccaatagttcgtcatactgtcctagcgagcctatgatgtcgaccccaccaccagcctctgagctaccacagccacagccgcagcctcaggctctgcactatgcactagcgaacgcccagcaggtgcagatccaccaaattggcgaagacgggcaggttcaggtaggacatctccacattgcccaggtgccccagggcgagcaagtgcagatcacacaagattcagaaggaaatctccagatccaccatgtgggtcaggatggacaggtcctgcagggtgctcagctcattgccgtggcaagcagtgatccagccgctgccggggtcgatggctctcccttacagggatccgatattcaggtgcagtacgtgcagttggcgcctgtgagtgatcacaccgctggcgctcagaccgccgaagccctacagcccacgctccaaccagaaatgcagctggaacacggtgcaatccagatccagtag

SEQ ID NO: 68858 - DNA, 357 bp, Artificial Sequence
  derived and/or modified sequence
atgatgagtgaacacgatctcgctgatgtagttcagattgccgtggaggacctatctcctgatcatccagtggttcttgagaatcacgtggtcaccgacgaggatgaacccgcattgaagcggcagagattagaaattaattgtcaggatcccagtataaagtcttttctgtacagtattaaccaaactatctgccttcggctggactccattgaggccaaactccaggctcttgaagccacttgcaaatccctggaggagaaattggatctggtcaccaacaagcaacattcccctattcaggtgcctatggtggcgggtagccctctaggcgcaacgcagacctgtaataagtag

SEQ ID NO: 68859 - DNA, 288 bp, Artificial Sequence
  derived and/or modified sequence
atgatgagtgagcatgacctagcagatgtggtgcagatcgccgtcgaggacctgtcacccgaccaccctgtggtgttagaaaaccatgttgttactgatgaggatgaacccgctctgaaacgccagcgtctcgagataaactgtcaggacccatccataaaaagctttctctactcaatcaatcaaacgatctgtcttcgccttgactctatagaggctaaactccaggctttggaggccacgtgtaaatccttggaagaaaagctggacttagtaacaaataagtag

SEQ ID NO: 68860 - DNA, 360 bp, Artificial Sequence
  derived and/or modified sequence
atgatgtccgagcatgatctggcggatgttgtacagatcgctgtggaagacctcagccccgatcatcccgtggtcctggaaaaccacgttgtgaccgacgaggacgagcccgcactgaagcgacaacgccttgagatcaactgtcaggaccccagtattaagtccttcttatacagcataaaccaaacgatttgcctgaggctcgattccattgaggctaagctccaggctctcgaggcaacatgtaagagtctggaggaaaaactggatcttgttactaacaagcagcactcgcccatacaggtgcctatggtagcagggagcccccttggggctacacagacatgtaataaagtctag

SEQ ID NO: 68861 - DNA, 1401 bp, Artificial Sequence
  derived and/or modified sequence
atgatgtctgaacacgaccttgcagacgtagtccagatcgctgtcgaggacctcagccccgaccatcctgtggtgctggaaaatcacgtggtgaccgacgaggatgagcccgctctaaaaaggcagcgactagaaataaattgtcaggatccaagcatcaaaagctttctgtactccatcaaccagaccatctgcctccggttggattcaatagaggctaaactgcaagccttggaagcaacttgtaagtccctggaggaaaaactagatcttgttactaacaaacagcactcgcccatacaggtgccaatggttgctggttctcctctgggggcaactcagacctgcaataaggtcaggtgtgccgtgcccggacggaggcagaacactattgtggtcaaagttcccggtcaggaggacagtcaccacgaggacggcgaatctgggagcgaggcatccgattcagtgtcatcctgcggtcaggccggtagtcagtcgattgggtccaatgttactttgatcacattgaacagcgaggaagactatcccaatggcacttggctgggtgatgagaataaccctgaaatgcgggtacgatgcgcaattatacccagtgacatgctgcatatatctacgaactgccgtactgctgagaagatggcgctgacactgctggactacttattccacagggaggtacaggcagtgagtaatttgagcggtcagggcaaacacgggaaaaaacagctcgaccccctgaccatttacggcatccgatgccacctgttttataagtttgggattaccgagtccgattggtatcgcattaagcagtcgatagacagcaaatgccgcactgcgtggcggaggaagcagcgtggacagagcctggccgtcaagtcattctctcggcgaacgccgaatagttcttcctactgtccctcagagccgatgatgagcacgccaccacctgcctcggagctgccacagccccagccgcagccacaggccctgcattacgctttggctaacgcgcagcaagttcaaattcatcagatcggcgaagatgggcaggtgcaggttggacacctgcatattgcacaagtgccacagggagagcaggtgcagattactcaggattcggagggaaacctgcagatccaccacgttgggcaggacggtcaggtccttcagggcgcacagctcatcgcagtggcatccagcgacccggcagctgccggagtggacggatccccattgcagggatccgacattcaggtccaatacgtgcagctcgccccagtatccgaccatactgccggtgcccaaacagccgaagcactgcaacctaccttacagccagaaatgcagttagaacacggtgctattcaaatccagtag

SEQ ID NO: 68862 - DNA, 586 bp, Artificial Sequence
  derived and/or modified sequence
ttctctcgcgaggacggacgccattatcgcatctccccgacaaacaccacgagaattccgcagcccacacggatgcagaaagtagatgacattccatccacactgtgtgagcaaattggagagattgccttgatagaggactgatgtttttcactgatgagatggtgaccaaaagccagccccactgtgagttgaactctttcgtgttgaccggccactctccgtgctctggatgatgtcggaacacgacctggccgatgtggttcagattgcagtggaagacctgagccctgaccacccagttgttttggagaatcatgtagtgacagatgaagacgaacctgctttgaaacgccagcgactagaaatcaattgccaggatccatctataaagtcattcctgtattccatcaaccagacaatctgcttgcggttggatagcattgaagccaaattgcaagccctggaggctacttgtaaatccttagaagaaaagctggatctggtcacgaacaagcagcacagccccatccaggtccccatggtggccggctcccctctcggggcaacccagacgtgcaacaaa

SEQ ID NO: 68863 - DNA, 455 bp, Artificial Sequence
  derived and/or modified sequence
catctgtaaagtgaggtaggccccttcaagacatgtaaggagtatctatggctgtggaatgcatctttttagactggccgctctgcatggatctgatcacgggtgaccaaaagccagccccactgtgagttgaactctttcgtgttgaccggccactctccgtgctctggatgatgtcggaacacgacctggccgatgtggttcagattgcagtggaagacctgagccctgaccacccagttgttttggagaatcatgtagtgacagatgaagacgaacctgctttgaaacgccagcgactagaaatcaattgccaggatccatctataaagtcattcctgtattccatcaaccagacaatctgcttgcggttggatagcattgaagccaaattgcaagccctggaggctacttgtaaatccttagaagaaaagctggatctggtcacgaacaag

SEQ ID NO: 68864 - DNA, 566 bp, Artificial Sequence
  derived and/or modified sequence
atttccactggccccttaagagaggcaggagtttaacctggactctctggacccggggctgtttgtggaagggcctcggcatgtccttgggtttagtctggctgcacgtggtgggctccagaataccctgttttgaaccaggtgaccaaaagccagccccactgtgagttgaactctttcgtgttgaccggccactctccgtgctctggatgatgtcggaacacgacctggccgatgtggttcagattgcagtggaagacctgagccctgaccacccagttgttttggagaatcatgtagtgacagatgaagacgaacctgctttgaaacgccagcgactagaaatcaattgccaggatccatctataaagtcattcctgtattccatcaaccagacaatctgcttgcggttggatagcattgaagccaaattgcaagccctggaggctacttgtaaatccttagaagaaaagctggatctggtcacgaacaagcagcacagccccatccaggtccccatggtggccggctcccctctcggggcaacccagacgtgcaacaaagtg

SEQ ID NO: 68865 - DNA, 1551 bp, Artificial Sequence
  derived and/or modified sequence
agagcggcggcttctctcgcgaggacggacgccattatcgcatctccccgacaaacaccacgagaattccgcagcccacacggtgaccaaaagccagccccactgtgagttgaactctttcgtgttgaccggccactctccgtgctctggatgatgtcggaacacgacctggccgatgtggttcagattgcagtggaagacctgagccctgaccacccagttgttttggagaatcatgtagtgacagatgaagacgaacctgctttgaaacgccagcgactagaaatcaattgccaggatccatctataaagtcattcctgtattccatcaaccagacaatctgcttgcggttggatagcattgaagccaaattgcaagccctggaggctacttgtaaatccttagaagaaaagctggatctggtcacgaacaagcagcacagccccatccaggtccccatggtggccggctcccctctcggggcaacccagacgtgcaacaaagtgcgatgcgctgtgcctgggcgtcggcagaacaccattgtggtgaaggtgccgggccaagaagacagccaccacgaggacggggagagcggctcggaggccagcgactctgtgtccagctgtgggcaggcgggcagtcagagcatcgggagcaacgtcacgctcatcaccctgaactcggaagaggactaccccaatggcacctggctgggcgacgagaacaaccccgagatgcgggtacgctgcgccatcatcccctccgacatgctgcacatcagcaccaactgccgcacggccgagaagatggcgctcacgctgctggactacctcttccaccgcgaggtgcaggctgtgtccaacctctcggggcagggcaagcacgggaagaagcagctggacccgctcaccatctacggcatccggtgtcaccttttctataaatttggcatcacagaatccgactggtaccgaatcaagcagagcatcgactccaagtgccgcacggcgtggcggcgcaagcagcggggccagagcctggcggtcaagagcttctcgcggagaacgcccaactcgtcctcctactgcccttcagagccgatgatgagcaccccacctcctgccagcgagctcccgcagccacagccgcagccgcaggccctgcactacgcgctggccaacgcacagcaggtgcagatccaccagatcggagaagacggacaggtgcaagtaggacacctccacatcgcccaggtgccgcagggggagcaagtccagatcacgcaggacagcgagggcaacctccagatccatcacgtggggcaggacggtcaggtgctgcagggtgcacagctgatcgccgtggcctcctcggaccccgcggcggcgggcgtggatgggtcgccactccagggcagcgacatccaggttcagtacgtgcagctggcgccagtgagtgaccacacggccggggcacagacggccgaagccctgcagcccacgctacagccggagatgcagctcgagcacggggccatccagattcagtga

SEQ ID NO: 68866 - DNA, 357 bp, Artificial Sequence
  derived and/or modified sequence
atgatgagcgagcacgacctggccgacgtggtgcagatcgccgtggaggacctgagccccgaccaccccgtggtgctggagaaccacgtggtgaccgacgaggacgagcccgccctgaagagacagagactggagatcaactgccaggaccccagcatcaagagcttcctgtacagcatcaaccagaccatctgcctgagactggacagcatcgaggccaagctgcaggccctggaggccacctgcaagagcctggaggagaagctggacctggtgaccaacaagcagcacagccccatccaggtgcccatggtggccggcagccccctgggcgccacccagacctgcaacaagtag

SEQ ID NO: 68867 - DNA, 288 bp, Artificial Sequence
  derived and/or modified sequence
atgatgagcgagcacgacctggccgacgtggtgcagatcgccgtggaggacctgagccccgaccaccccgtggtgctggagaaccacgtggtgaccgacgaggacgagcccgccctgaagagacagagactggagatcaactgccaggaccccagcatcaagagcttcctgtacagcatcaaccagaccatctgcctgagactggacagcatcgaggccaagctgcaggccctggaggccacctgcaagagcctggaggagaagctggacctggtgaccaacaagtag

SEQ ID NO: 68868 - DNA, 360 bp, Artificial Sequence
  derived and/or modified sequence
atgatgagcgagcacgacctggccgacgtggtgcagatcgccgtggaggacctgagccccgaccaccccgtggtgctggagaaccacgtggtgaccgacgaggacgagcccgccctgaagagacagagactggagatcaactgccaggaccccagcatcaagagcttcctgtacagcatcaaccagaccatctgcctgagactggacagcatcgaggccaagctgcaggccctggaggccacctgcaagagcctggaggagaagctggacctggtgaccaacaagcagcacagccccatccaggtgcccatggtggccggcagccccctgggcgccacccagacctgcaacaaggtgtag

SEQ ID NO: 68869 - DNA, 1401 bp, Artificial Sequence
  derived and/or modified sequence
atgatgagcgagcacgacctggccgacgtggtgcagatcgccgtggaggacctgagccccgaccaccccgtggtgctggagaaccacgtggtgaccgacgaggacgagcccgccctgaagagacagagactggagatcaactgccaggaccccagcatcaagagcttcctgtacagcatcaaccagaccatctgcctgagactggacagcatcgaggccaagctgcaggccctggaggccacctgcaagagcctggaggagaagctggacctggtgaccaacaagcagcacagccccatccaggtgcccatggtggccggcagccccctgggcgccacccagacctgcaacaaggtgagatgcgccgtgcccggcagaagacagaacaccatcgtggtgaaggtgcccggccaggaggacagccaccacgaggacggcgagagcggcagcgaggccagcgacagcgtgagcagctgcggccaggccggcagccagagcatcggcagcaacgtgaccctgatcaccctgaacagcgaggaggactaccccaacggcacctggctgggcgacgagaacaaccccgagatgagagtgagatgcgccatcatccccagcgacatgctgcacatcagcaccaactgcagaaccgccgagaagatggccctgaccctgctggactacctgttccacagagaggtgcaggccgtgagcaacctgagcggccagggcaagcacggcaagaagcagctggaccccctgaccatctacggcatcagatgccacctgttctacaagttcggcatcaccgagagcgactggtacagaatcaagcagagcatcgacagcaagtgcagaaccgcctggagaagaaagcagagaggccagagcctggccgtgaagagcttcagcagaagaacccccaacagcagcagctactgccccagcgagcccatgatgagcacccccccccccgccagcgagctgccccagccccagccccagccccaggccctgcactacgccctggccaacgcccagcaggtgcagatccaccagatcggcgaggacggccaggtgcaggtgggccacctgcacatcgcccaggtgccccagggcgagcaggtgcagatcacccaggacagcgagggcaacctgcagatccaccacgtgggccaggacggccaggtgctgcagggcgcccagctgatcgccgtggccagcagcgaccccgccgccgccggcgtggacggcagccccctgcagggcagcgacatccaggtgcagtacgtgcagctggcccccgtgagcgaccacaccgccggcgcccagaccgccgaggccctgcagcccaccctgcagcccgagatgcagctggagcacggcgccatccagatccagtag

SEQ ID NO: 68870 - protein, 519 aa, Artificial Sequence
  derived and/or modified sequence
MMSEHDLADVVQIAVEDLSPDHPVVLENHVVTDEDEPALKRQRLEINCQDPSIKTICLRLDSIEAKLQALEATCKSLEEKLDLVTNKQHSPIQVPMVAGSPLGATQTCNKVRCVVPQTTVILNNDRQNAIVAKMEDPLSNRAPDSLENVISNAVPGRRQNTIVVKVPGQEDSHHEDGESGSEASDSVSSCGQAGSQSIGSNVTLITLNSEEDYPNGTWLGDENNPEMRVRCAIIPSDMLHISTNCRTAEKMALTLLDYLFHREVQAVSNLSGQGKHGKKQLDPLTIYGIRCHLFYKFGITESDWYRIKQSIDSKCRTAWRRKQRGQSLAVKSFSRRTPNSSSYCPSEPMMSTPPPASELPQPQPQPQALHYALANAQQVQIHQIGEDGQVQVGHLHIAQVPQGEQVQITQDSEGNLQIHHVGQDGQLLEATRIPCLLAPSVFKASSGQVLQGAQLIAVASSDPAAAGVDGSPLQGSDIQVQYVQLAPVSDHTAGAQTAEALQPTLQPEMQLEHGAIQIQ

SEQ ID NO: 68871 - DNA, 1560 bp, Artificial Sequence
  derived and/or modified sequence
atgatgagtgagcacgacctggcggacgtcgtgcagatagctgtggaggatctctctcctgaccaccccgtcgtattggagaaccacgtcgttaccgacgaggatgaacctgccctgaagagacagcgattagaaatcaattgccaagatccttccatcaagaccatttgcctcaggttggattcaatcgaagctaagttgcaagccctggaagccacttgcaagagccttgaagagaagttggatctcgtaacaaataagcagcactccccgatccaagtgccaatggtggctggaagtcctttgggtgcaacacagacctgtaataaggtcagatgtgtagtgccacagacaaccgtgatcctcaataatgaccgacagaacgcaatcgtcgccaaaatggaggatcccctctccaatagggcgcctgatagcctggaaaacgtgatttcaaatgccgtgcctggccggcggcagaacactatcgtggtgaaggtccccggccaggaggattcacaccacgaggacggggaatctggctcagaggcctcagattctgtttcctcatgtgggcaggctggatcccagtccatcggatctaatgtgacactgattaccctgaattcagaggaggattaccccaacggcacctggctcggcgatgaaaacaaccccgagatgcgagtgcgttgcgcgattatcccaagtgacatgttgcacattagcaccaattgccgcacagccgagaagatggccctgactctgctcgactacctctttcaccgggaggttcaagccgtgtcaaatctgtcaggccagggtaaacacggcaagaagcagttggatcctctgacgatctacggtatccggtgtcacttattctacaaatttggaatcactgagagtgactggtaccggattaagcagtcgattgattccaagtgccgaacagcctggagacgaaagcagaggggtcagagtctcgcggtgaaatctttttcccgacgcactccgaattccagttcctattgtccctctgagccaatgatgagcacacctccccccgcctccgagctcccccaaccgcagccccaacctcaggctctccactatgccctggccaacgcccagcaagtccaaatccaccaaattggcgaggatggacaggtgcaggtagggcatctgcacatcgcccaggtgccacagggcgaacaggtccagatcacccaggattccgaaggcaatctgcagattcatcacgtcggacaagatggccaactactagaggctaccaggattccctgcctgcttgctccatcagtgtttaaggccagctctgggcaagtcctgcagggggcacagcttatcgctgttgcttcttctgatccagccgccgccggagtggacggttctccgctccagggctccgatatccaagtccagtacgtccaactcgcccctgtgtcagatcacacagctggcgctcagaccgcggaagctttacagcccactctgcaacccgaaatgcagttggagcacggagcaatccaaattcagtag

SEQ ID NO: 68872 - DNA, 1560 bp, Artificial Sequence
  derived and/or modified sequence
atgatgtccgagcatgacctggctgacgtagtgcagatcgctgtcgaggacctgagccctgatcaccctgtggtgctcgagaatcacgtcgtgaccgacgaggacgagcccgcccttaaacgccagcgtctggagattaactgtcaggatcctagcattaaaacaatatgcctacgcctcgactccatcgaagcaaagctgcaagccttggaagccacctgcaaatctctcgaggaaaagctggatttggtgactaataaacagcattccccaatccaagtgccaatggttgccggctcccctctcggagccacccagacatgcaacaaagtgcggtgtgtcgtgcctcagactaccgtgattctgaataatgacaggcaaaatgccatagtcgcgaagatggaggatcccctctcgaacagggcccccgattccctggagaatgtgataagcaacgcagtccccgggagacgtcaaaacactattgtggtaaaagtgccaggacaggaggactctcaccatgaggatggagagagtggctctgaagccagcgatagtgtgtcgagttgcggacaggccgggtcacaatctattgggtctaacgtgacgctgatcacccttaatagcgaggaagattatcctaacggaacctggcttggcgacgagaacaatcccgaaatgagggttcgatgtgcaatcataccaagcgatatgctccatatcagcactaactgcagaacagctgaaaagatggcactgacgctattggattacctgtttcacagagaagtgcaagcagtcagcaatctgtccgggcaggggaagcacggtaaaaaacagctagacccactaaccatttatggcatccggtgccatttgttttataagttcggcatcactgaatcagactggtatcggatcaagcagagcatcgacagcaagtgcagaacggcctggcggagaaagcagcggggacagagcctggctgtaaagagcttctcaaggaggaccccaaatagcagcagctattgtcccagtgagcccatgatgtctacacctccccctgcatctgaattgccccagccacagccacagccccaggccctccattacgcactggccaacgcccaacaggtgcagatccatcagattggcgaggacgggcaggttcaggttggccacctgcacatcgcgcaggtaccccagggggagcaggtccagattacacaggacagcgaggggaatctgcagatccaccacgtgggccaggacggccagctgcttgaggctaccaggatcccatgtttattagcccctagcgtgttcaaagctagctccggacaggtgctccagggtgctcaattaatagcggtagccagcagcgacccagccgctgctggagtcgatggatccccgctgcagggatcggatatccaggttcaatacgtgcaacttgctcctgtgtccgaccacacggccggtgctcagacagccgaggccctccagcccaccctgcaaccggaaatgcaactcgagcacggggcaatccagattcagtag

SEQ ID NO: 68873 - DNA, 1560 bp, Artificial Sequence
  derived and/or modified sequence
atgatgtctgaacatgacctggctgatgtggtgcagattgctgtggaggacctgagcccagaccaccctgtggtgctggagaaccacgtggtgacagatgaagatgagcccgccctgaagaggcagaggctggagatcaactgccaggaccccagcatcaagaccatctgcctgcggctggacagcattgaggccaagctgcaggccctggaggccacctgcaagagcctggaggagaagctggacctggtgaccaacaagcagcacagccccatccaggtgcccatggtggccggcagccccctgggcgccacccagacctgcaacaaggtgcgctgtgtggtgccccagaccaccgtcatcctgaacaatgaccggcagaatgccatcgtggccaagatggaggaccccctgagcaacagagccccagacagcctggagaatgtcatcagcaatgctgtgcctggaagacggcagaacaccatcgtggtgaaggtgcccggccaggaggacagccaccatgaagatggagagagcggcagcgaggccagtgacagcgtgagcagctgtggccaggccggcagccagagcatcggcagcaatgtgaccctcatcaccctgaacagcgaggaggactacccaaatggcacctggctgggagatgagaacaaccctgagatgagggtgcgctgtgccatcatccccagcgacatgctgcacatcagcaccaactgcaggacagctgagaagatggccctgaccctgctggactacctgttccaccgggaggtgcaggccgtgagcaacctgagcggccagggcaagcacggcaagaagcagctggaccccctgaccatctacggcatccgctgccacctgttctacaagtttggcatcacagaaagtgactggtaccgcatcaagcagagcattgacagcaagtgcaggacagcctggaggaggaagcagaggggccagagcctggccgtgaagagcttcagcaggaggacccccaacagcagcagctactgccccagcgagcccatgatgagcaccccacctccagccagcgagctgccccagccccagccccagccccaggccctgcactacgccctggccaatgcccagcaggtgcagatccaccagatcggggaggatggccaggtgcaggtgggccacctgcacatcgcccaggtgccccagggcgagcaggtgcagatcacccaggacagcgagggcaacctgcagatccaccacgtgggccaggacggccagctgctggaggccacccgcatcccctgcctgctggcccccagcgtcttcaaggccagcagcggccaggtgctgcagggcgcccagctgattgctgtggccagcagtgaccctgctgctgctggggtggatggcagccccctgcagggcagtgacatccaggtgcagtatgtgcagctggcccctgtgtctgaccacacagctggggcccagacagctgaggccctgcagcccaccctgcagcctgagatgcagctggagcacggggccatccagatccagtag

SEQ ID NO: 68874 - DNA, 1560 bp, Artificial Sequence
  derived and/or modified sequence
atgatgagcgagcacgacctggccgacgtggtgcagatcgccgtggaagacctttcacccgatcaccctgttgtgttagagaatcacgtggtaacagacgaagacgaaccagctctcaaacggcagcggttggagattaactgccaagacccttcaatcaagactatttgcctgagactcgattcgattgaggctaaacttcaggccctcgaggcaacctgcaagagtctggaggagaaactggatttagtcactaacaagcagcactccccgattcaggtgcccatggtggccggcagcccactaggagcaacccagacgtgcaacaaagtgagatgcgtagtacctcagaccacagtcatcctgaacaacgacaggcagaacgcaatagtggccaagatggaggaccccttgagtaatagggccccagactcactcgagaacgtgatctccaacgccgtcccaggcaggagacaaaacactattgtggttaaggtgccaggccaggaggactcacatcacgaagacggcgaaagcgggagtgaggcctctgattcagtatctagttgcgggcaggctgggtctcaaagcatcgggagcaacgtcacactaattacactgaattccgaggaggattacccaaatgggacatggctaggcgacgagaataatccagaaatgcgagtgcgatgtgccattatcccgtcggatatgttgcacataagcactaattgccgaaccgccgagaagatggccctgactctcttggattatctcttccacagggaggtgcaggctgtatctaacctgtctggtcaggggaagcacggtaaaaagcagctcgaccctctcacaatttacgggatccgttgtcacctgttttacaagtttggaatcacagaaagcgattggtatagaatcaaacaatcgattgacagcaagtgtcggactgcctggaggagaaagcagcggggccaatcattggcggtgaagtcattttctcgtcgtacgcccaacagtagctcatactgcccctcggagccaatgatgtctaccccgccccctgcctccgagttgccgcagccccagccccaaccgcaggccttacactacgctctggccaatgctcaacaggtgcagattcatcagatcggggaggatggacaggtgcaggtcgggcacctccacatcgctcaagtcccacaaggagaacaggtgcagattacacaggattccgaggggaacctgcagatccaccatgttggccaagacggacagttattggaagccacgcggattccctgtcttttagcaccttctgtttttaaggcatcttccggccaggtcctgcagggtgctcaactcatcgcggtggcttccagtgatccagcagctgccggagtggatggcagcccactccaggggtctgatattcaggtgcagtatgtacagctggcaccagtgtccgaccacacggccggagctcagaccgctgaggctctgcagcctaccttgcaaccagagatgcagctggagcatggcgcaatccagatacagtag

SEQ ID NO: 68875 - DNA, 1560 bp, Artificial Sequence
  derived and/or modified sequence
atgatgagcgagcacgacctggccgacgtggtgcagatcgccgtggaggacctcagtccagaccatccagtcgtcttagagaatcatgttgtcaccgacgaggatgagcctgcactgaagcggcagaggctggagatcaactgtcaagacccaagcatcaagaccatttgtctgcgccttgattccatagaggctaagctccaagctctggaggccacttgtaagagcttagaagaaaagctcgaccttgtgacaaataaacaacatagccccatccaagtgcccatggtcgccggtagcccccttggggcaactcagacgtgtaacaaagtccgatgcgttgtgccacaaacaacggtaatcctgaataatgaccggcagaatgccatcgtcgccaaaatggaagacccccttagtaatcgtgcaccggattcgctcgagaatgtgatttcaaatgccgtgccaggtcgccgacagaacacaatcgtcgtgaaggtgccaggtcaggaagactctcaccatgaggatggagagtctggcagcgaagcttccgactctgtgagcagttgcggccaggcagggagccagtcaattgggtctaatgtgactctgattaccttgaacagcgaggaggactatcctaatgggacctggttgggcgacgaaaataatcccgagatgcgtgtgagatgtgcaatcatccccagcgacatgttgcatataagcactaattgccggaccgcagagaagatggcgcttactttgctggactatttgtttcacagagaggtgcaggccgtgtccaatttgtccgggcagggaaagcacggcaagaaacagctggatccactgacaatctacgggatccgatgtcatctgttttataagttcggcatcactgagagcgactggtaccgaatcaagcagagtatcgacagtaagtgtcgaaccgcctggagacggaaacagagagggcagtcacttgccgtaaaatccttctctcggaggacaccaaactcatcgagttattgtccaagcgaaccgatgatgagtaccccgcccccagcatctgaacttcctcagccacaacctcagccacaggccctacactatgcgttggctaatgcccagcaggtgcagatccaccaaatcggagaagacggacaggtacaggtgggccacctgcatatcgcacaggtgccgcagggtgaacaggtccaaatcacccaagactcggaagggaaccttcaaattcaccacgtggggcaagacgggcagcttctcgaagcgacccgcattccttgcttgctcgcaccatccgtcttcaaagcaagcagtggccaggtgctgcagggcgcccagctgatcgctgtcgcctcctccgaccctgccgcggccggggtggacgggtccccccttcaaggctccgatattcaggttcagtacgtccagctagccccggtgagcgaccatacagccggcgcccaaacagcagaagccttgcagccaacactgcaacctgagatgcagcttgaacacggtgcaatccagatccagtag

SEQ ID NO: 68876 - DNA, 1560 bp, Artificial Sequence
  derived and/or modified sequence
atgatgtcagagcacgacctcgcggatgtggtgcagatagcagtggaggatttaagcccggaccacccagtcgtgcttgaaaatcatgtcgtgactgacgaagacgagcctgctcttaaaagacaacgactcgagatcaactgccaggatcctagcattaagacaatttgtctgcgcctcgactcaatcgaagctaagctacaggctttggaagccacctgtaagagtttggaagagaaactcgatctggtaactaataagcagcatagcccaattcaggtgcccatggtggctggctcacccctcggagctactcagacatgcaataaggtgcgctgcgtggttccgcagactacggtgattcttaacaacgataggcaaaacgcgattgtcgctaaaatggaggatccattgtctaaccgcgctcccgattccctggaaaatgtcatctccaacgcggttccgggtcggaggcagaacactatcgttgtgaaggtgccaggtcaggaagattcgcatcacgaagacggtgagtcgggcagtgaagcatccgacagcgtctcttcctgtggacaggccggaagccagagcattggatccaacgttaccctcattacactgaattctgaggaggactacccaaacggcacctggctcggcgacgagaataatcccgagatgagagtccggtgtgccattatccccagcgatatgttgcacatttctacaaattgtcgcacagctgaaaaaatggcattgaccctgctggattacctctttcacagggaggttcaggccgtgtcgaatctctcgggccagggaaagcatggcaagaagcagcttgacccgttgactatctacgggatcaggtgccacttgttttacaagtttggtatcactgagagtgactggtatagaatcaagcagtccattgattccaaatgccggaccgcttggaggagaaagcagagaggacagtcacttgctgtgaaatccttttccaggcgcacaccgaactccagctcatattgcccttcagaacctatgatgtctacaccccctcctgccagcgagcttccccagccccagcctcagccccaggccctgcactacgcactcgccaacgcgcaacaggtgcagatacatcagattggggaagacgggcaagttcaagttggacacttgcacatcgcacaggtgccccagggggaacaggtccagatcacgcaggactccgaagggaatctgcagatccaccatgtgggacaggatggtcagctgctggaggcaacaagaatcccttgtctgctggccccatccgtctttaaggcctcgtcggggcaggtgctgcagggcgcacaattgatcgccgtcgccagctcagaccctgcagccgctggcgtcgatggaagtcccctacagggcagtgacatccaggtacaatacgttcagctggccccagtttctgatcacactgcaggtgcccagacagccgaggccttacaaccgactctgcagccagagatgcagcttgagcacggagccattcagattcagtag

SEQ ID NO: 68877 - DNA, 1560 bp, Artificial Sequence
  derived and/or modified sequence
atgatgagcgaacatgatcttgctgacgtggtgcagatcgctgtggaggatctgtcaccagaccatcctgtggtcttggagaaccacgtggtgaccgatgaagacgagccggctttgaaacgccaaaggttggaaatcaattgccaggatccttctatcaagacgatttgtttgagactcgacagtattgaggctaagctacaagcactcgaagcaacctgtaagagccttgaagaaaaactggatttggtgaccaacaagcagcacagccccattcaggtgccaatggttgctggcagtcccctgggagctacccagacctgtaataaagtccggtgtgtggtgccgcagaccactgttatactcaacaatgatcgccagaatgccattgtggccaaaatggaagaccccctctcaaatcgagcccctgattcactcgagaatgtaatttccaacgcggtcccgggtaggcggcagaacaccatcgtagttaaagtgccagggcaagaggactcccatcacgaggacggggaaagcggctccgaggcttcggattctgtgagcagctgcggacaggcgggatcacaaagcatcggttccaatgtgacgctgattactctgaattccgaagaggattatcccaatggtacctggttgggagacgaaaataaccctgaaatgagagtacgatgtgccataatcccctccgatatgttgcacatttccaccaactgccgcaccgctgagaaaatggctctcactctcctcgactatctcttccatcgcgaggtgcaagcagtgtctaatctgtctggtcagggcaaacacggaaagaagcagctggatccacttactatttatggcattagatgtcacctgttttacaagtttggaatcacagagagcgactggtacagaattaaacaaagcatcgatagcaagtgcagaactgcctggagaagaaaacagagagggcagtccctggcggtgaagtcattcagtcggagaacacccaattcatcatcctattgtccctcggaacctatgatgagcacccctccaccagcttctgaattgccacagccacagccccaaccccaagctctgcattacgccttggcaaacgcccaacaggtccagattcaccagatcggagaggacggtcaagtgcaggtgggccacttacacattgcccaagtgccgcagggcgagcaggtacagattacacaggactccgagggtaacctacaaattcaccatgtgggccaggatgggcagctgttggaagccactcgaattccatgtctgcttgctccgtctgtgtttaaggcctccagcgggcaggtcttgcagggcgctcagctgatcgctgtggccagcagtgacccagctgctgcaggagttgacggctcaccccttcagggatcagatattcaggttcagtacgtgcagctagccccagtgtcagaccacaccgcaggagcccaaactgctgaggccctccagccaacgttgcagcctgagatgcagttggagcacggggcaatacaaatacaatag

SEQ ID NO: 68878 - DNA, 2366 bp, Artificial Sequence
  derived and/or modified sequence
gcagagcggcggcttctctcgcgaggacggacgccattatcgcatctccccgacaaacaccacgagaattccgcagcccacacggtgaccaaaagccagccccactgtgagttgaactctttcgtgttgaccggccactctccgtgctctggatgatgtcggaacacgacctggccgatgtggttcagattgcagtggaagacctgagccctgaccacccagttgttttggagaatcatgtagtgacagatgaagacgaacctgctttgaaacgccagcgactagaaatcaattgccaggatccatctataaagacaatctgcttgcggttggatagcattgaagccaaattgcaagccctggaggctacttgtaaatccttagaagaaaagctggatctggtcacgaacaagcagcacagccccatccaggtccccatggtggccggctcccctctcggggcaacccagacgtgcaacaaagtgcgatgcgtcgtcccccagactacagtaatactcaacaatgatcggcagaacgccattgtagccaagatggaagaccccttgagcaacagggcaccggattccctggaaaatgtcattagcaacgctgtgcctgggcgtcggcagaacaccattgtggtgaaggtgccgggccaagaagacagccaccacgaggacggggagagcggctcggaggccagcgactctgtgtccagctgtgggcaggcgggcagtcagagcatcgggagcaacgtcacgctcatcaccctgaactcggaagaggactaccccaatggcacctggctgggcgacgagaacaaccccgagatgcgggtacgctgcgccatcatcccctccgacatgctgcacatcagcaccaactgccgcacggccgagaagatggcgctcacgctgctggactacctcttccaccgcgaggtgcaggctgtgtccaacctctcggggcagggcaagcacgggaagaagcagctggacccgctcaccatctacggcatccggtgtcaccttttctataaatttggcatcacagaatccgactggtaccgaatcaagcagagcatcgactccaagtgccgcacggcgtggcggcgcaagcagcggggccagagcctggcggtcaagagcttctcgcggagaacgcccaactcgtcctcctactgcccttcagagccgatgatgagcaccccacctcctgccagcgagctcccgcagccacagccgcagccgcaggccctgcactacgcgctggccaacgcacagcaggtgcagatccaccagatcggagaagacggacaggtgcaagtaggacacctccacatcgcccaggtgccgcagggggagcaagtccagatcacgcaggacagcgagggcaacctccagatccatcacgtggggcaggacggtcagcttctagaggccacccgcatcccctgcctcctggccccatccgtcttcaaagccagcagtggccaggtgctgcagggtgcacagctgatcgccgtggcctcctcggaccccgcggcggcgggcgtggatgggtcgccactccagggcagcgacatccaggttcagtacgtgcagctggcgccagtgagtgaccacacggccggggcacagacggccgaagccctgcagcccacgctacagccggagatgcagctcgagcacggggccatccagattcagtgagcggtgcccatggcaccaggagcccctcgccggctccgcctacggcccggcccccacgcgccctgctctcacggcctcggcacaggcagcggctgcacgtgttctgctgaagtgcgtctgaaggccgctgcctccgcggggaacagcatcctatcaactgaaagagcagccgccgccgcccccagccggagacccctttcgtttgagtcctgctgttggtgtcggagcacgaggggaggcacggtgcggagagcgtcgcatatgcgcgggaaatcaagaactatgatatttttctgtttaaacagctttttttaatttgctatggtgtttataacaaaaaagaaaatttgaaaaaaaaaatcccaggggagtagcaggagccctttgctgtgtgctctgtccagtgtcatgagacgggagccctttgctgtgtgctctgtccagtgtcatgagacgggagccctttgctgtgtgctctgtccagtgtcatgagacgggagccctttgctgtgtgctctgtccagtgtcatgaggcaggtgtttgcaaagccagctctcggttccgatggggtattgctgacctacttttctaggggaaatgctcttaaacactgtaattatgcatttctaatgaaataaaatgtatttatgacc

SEQ ID NO: 68879 - DNA, 2438 bp, Artificial Sequence
  derived and/or modified sequence
ctttctcagcctccttagtagctgggattacaggcatgtgccaccataccctgctaattttcgtatttttagtagagatggggttttgccacattggccaggctgacaggtgatccacccgccttggccttccaaagtgctgggatgacagatgtgaccaaaagccagccccactgtgagttgaactctttcgtgttgaccggccactctccgtgctctggatgatgtcggaacacgacctggccgatgtggttcagattgcagtggaagacctgagccctgaccacccagttgttttggagaatcatgtagtgacagatgaagacgaacctgctttgaaacgccagcgactagaaatcaattgccaggatccatctataaagacaatctgcttgcggttggatagcattgaagccaaattgcaagccctggaggctacttgtaaatccttagaagaaaagctggatctggtcacgaacaagcagcacagccccatccaggtccccatggtggccggctcccctctcggggcaacccagacgtgcaacaaagtgcgatgcgtcgtcccccagactacagtaatactcaacaatgatcggcagaacgccattgtagccaagatggaagaccccttgagcaacagggcaccggattccctggaaaatgtcattagcaacgctgtgcctgggcgtcggcagaacaccattgtggtgaaggtgccgggccaagaagacagccaccacgaggacggggagagcggctcggaggccagcgactctgtgtccagctgtgggcaggcgggcagtcagagcatcgggagcaacgtcacgctcatcaccctgaactcggaagaggactaccccaatggcacctggctgggcgacgagaacaaccccgagatgcgggtacgctgcgccatcatcccctccgacatgctgcacatcagcaccaactgccgcacggccgagaagatggcgctcacgctgctggactacctcttccaccgcgaggtgcaggctgtgtccaacctctcggggcagggcaagcacgggaagaagcagctggacccgctcaccatctacggcatccggtgtcaccttttctataaatttggcatcacagaatccgactggtaccgaatcaagcagagcatcgactccaagtgccgcacggcgtggcggcgcaagcagcggggccagagcctggcggtcaagagcttctcgcggagaacgcccaactcgtcctcctactgcccttcagagccgatgatgagcaccccacctcctgccagcgagctcccgcagccacagccgcagccgcaggccctgcactacgcgctggccaacgcacagcaggtgcagatccaccagatcggagaagacggacaggtgcaagtaggacacctccacatcgcccaggtgccgcagggggagcaagtccagatcacgcaggacagcgagggcaacctccagatccatcacgtggggcaggacggtcagcttctagaggccacccgcatcccctgcctcctggccccatccgtcttcaaagccagcagtggccaggtgctgcagggtgcacagctgatcgccgtggcctcctcggaccccgcggcggcgggcgtggatgggtcgccactccagggcagcgacatccaggttcagtacgtgcagctggcgccagtgagtgaccacacggccggggcacagacggccgaagccctgcagcccacgctacagccggagatgcagctcgagcacggggccatccagattcagtgagcggtgcccatggcaccaggagcccctcgccggctccgcctacggcccggcccccacgcgccctgctctcacggcctcggcacaggcagcggctgcacgtgttctgctgaagtgcgtctgaaggccgctgcctccgcggggaacagcatcctatcaactgaaagagcagccgccgccgcccccagccggagacccctttcgtttgagtcctgctgttggtgtcggagcacgaggggaggcacggtgcggagagcgtcgcatatgcgcgggaaatcaagaactatgatatttttctgtttaaacagctttttttaatttgctatggtgtttataacaaaaaagaaaatttgaaaaaaaaaatcccaggggagtagcaggagccctttgctgtgtgctctgtccagtgtcatgagacgggagccctttgctgtgtgctctgtccagtgtcatgagacgggagccctttgctgtgtgctctgtccagtgtcatgagacgggagccctttgctgtgtgctctgtccagtgtcatgaggcaggtgtttgcaaagccagctctcggttccgatggggtattgctgacctacttttctaggggaaatgctcttaaacactgtaattatgcatttctaatgaaataaaatgtatttatgaccaca

SEQ ID NO: 68880 - DNA, 1560 bp, Artificial Sequence
  derived and/or modified sequence
atgatgagcgagcacgacctggccgacgtggtgcagatcgccgtggaggacctgagccccgaccaccccgtggtgctggagaaccacgtggtgaccgacgaggacgagcccgccctgaagagacagagactggagatcaactgccaggaccccagcatcaagaccatctgcctgagactggacagcatcgaggccaagctgcaggccctggaggccacctgcaagagcctggaggagaagctggacctggtgaccaacaagcagcacagccccatccaggtgcccatggtggccggcagccccctgggcgccacccagacctgcaacaaggtgagatgcgtggtgccccagaccaccgtgatcctgaacaacgacagacagaacgccatcgtggccaagatggaggaccccctgagcaacagagcccccgacagcctggagaacgtgatcagcaacgccgtgcccggcagaagacagaacaccatcgtggtgaaggtgcccggccaggaggacagccaccacgaggacggcgagagcggcagcgaggccagcgacagcgtgagcagctgcggccaggccggcagccagagcatcggcagcaacgtgaccctgatcaccctgaacagcgaggaggactaccccaacggcacctggctgggcgacgagaacaaccccgagatgagagtgagatgcgccatcatccccagcgacatgctgcacatcagcaccaactgcagaaccgccgagaagatggccctgaccctgctggactacctgttccacagagaggtgcaggccgtgagcaacctgagcggccagggcaagcacggcaagaagcagctggaccccctgaccatctacggcatcagatgccacctgttctacaagttcggcatcaccgagagcgactggtacagaatcaagcagagcatcgacagcaagtgcagaaccgcctggagaagaaagcagagaggccagagcctggccgtgaagagcttcagcagaagaacccccaacagcagcagctactgccccagcgagcccatgatgagcacccccccccccgccagcgagctgccccagccccagccccagccccaggccctgcactacgccctggccaacgcccagcaggtgcagatccaccagatcggcgaggacggccaggtgcaggtgggccacctgcacatcgcccaggtgccccagggcgagcaggtgcagatcacccaggacagcgagggcaacctgcagatccaccacgtgggccaggacggccagctgctggaggccaccagaatcccctgcctgctggcccccagcgtgttcaaggccagcagcggccaggtgctgcagggcgcccagctgatcgccgtggccagcagcgaccccgccgccgccggcgtggacggcagccccctgcagggcagcgacatccaggtgcagtacgtgcagctggcccccgtgagcgaccacaccgccggcgcccagaccgccgaggccctgcagcccaccctgcagcccgagatgcagctggagcacggcgccatccagatccagtag

SEQ ID NO: 68881 - protein, 435 aa, Artificial Sequence
  derived and/or modified sequence
MDPDSDQPLNSLDVKPLRKPRIPMETFRKVGIPIIIALLSLASIIIVVVLIKVILDKYYFLCGQPLHFIPRKQLCDGELDCPLGEDEEHCVKSFPEGPAVAVRLSKDRSTLQVLDSATGNWFSACFDNFTEALAETACRQMGYSSKPTFRAVEIGPDQDLDVVEITENSQELRMRNSSGPCLSGSLVSLHCLACGKSLKTPRVVGVEEASVDSWPWQVSIQYDKQHVCGGSILDPHWVLTAAHCFRKHTDVFNWKVRAGSDKLGSFPSLAVAKIIIIEFNPMYPKDNDIALMKLQFPLTFSGTVRPICLPFFDEELTPATPLWIIGWGFTKQNGGKMSDILLQASVQVIDSTRCNADDAYQGEVTEKMMCAGIPEGGVDTCQGDSGGPLMYQSDQWHVVGIVSWGYGCGGPSTPGVYTKVSAYLNWIYNVWKAEL

SEQ ID NO: 68882 - DNA, 1308 bp, Artificial Sequence
  derived and/or modified sequence
atggaccccgacagcgaccagcccctgaacagcctggacgtgaagcccctgagaaagcccagaatccccatggagaccttcagaaaggtgggcatccccatcatcatcgccctgctgagcctggccagcatcatcatcgtggtggtgctgatcaaggtgatcctggacaagtactacttcctgtgcggccagcccctgcacttcatccccagaaagcagctgtgcgacggcgagctggactgccccctgggcgaggacgaggagcactgcgtgaagagcttccccgagggccccgccgtggccgtgagactgagcaaggacagaagcaccctgcaggtgctggacagcgccaccggcaactggttcagcgcctgcttcgacaacttcaccgaggccctggccgagaccgcctgcagacagatgggctacagcagcaagcccaccttcagagccgtggagatcggccccgaccaggacctggacgtggtggagatcaccgagaacagccaggagctgagaatgagaaacagcagcggcccctgcctgagcggcagcctggtgagcctgcactgcctggcctgcggcaagagcctgaagacccccagagtggtgggcgtggaggaggccagcgtggacagctggccctggcaggtgagcatccagtacgacaagcagcacgtgtgcggcggcagcatcctggacccccactgggtgctgaccgccgcccactgcttcagaaagcacaccgacgtgttcaactggaaggtgagagccggcagcgacaagctgggcagcttccccagcctggccgtggccaagatcatcatcatcgagttcaaccccatgtaccccaaggacaacgacatcgccctgatgaagctgcagttccccctgaccttcagcggcaccgtgagacccatctgcctgcccttcttcgacgaggagctgacccccgccacccccctgtggatcatcggctggggcttcaccaagcagaacggcggcaagatgagcgacatcctgctgcaggccagcgtgcaggtgatcgacagcaccagatgcaacgccgacgacgcctaccagggcgaggtgaccgagaagatgatgtgcgccggcatccccgagggcggcgtggacacctgccagggcgacagcggcggccccctgatgtaccagagcgaccagtggcacgtggtgggcatcgtgagctggggctacggctgcggcggccccagcacccccggcgtgtacaccaaggtgagcgcctacctgaactggatctacaacgtgtggaaggccgagctgtag

SEQ ID NO: 68883 - DNA, 1308 bp, Artificial Sequence
  derived and/or modified sequence
atggaccctgattccgatcaaccactgaatagcctggatgtgaaaccccttcggaagccccgtatccctatggagacattccgcaaagtcggaatccccatcattatcgctttactatccctagctagcattattatagtggtggtactgataaaggtaatcctcgataaatactactttctttgtggacagccccttcactttatcccccgtaagcagctgtgcgacggggagttagactgtccactaggggaggatgaagagcactgcgtaaagagtttccccgaggggcctgccgtggcggttcggttgtcaaaagatcggagcaccctccaagtgctggactccgcgacaggcaattggtttagcgcctgttttgacaacttcactgaagccctggccgagacggcctgccgccagatgggctatagctctaaacctactttccgggctgtcgagattggccctgaccaggacctggatgttgtggagattaccgaaaactcccaggagctcaggatgaggaactcatctgggccatgcctgagcggcagcctggtatctctccactgtctggcatgtggcaagtcccttaagacccccagggtcgtaggtgtggaggaagccagtgtcgattcctggccgtggcaagttagtatccagtatgataagcagcacgtatgcggggggagcattcttgacccacactgggtcctgactgccgcccactgctttcgcaagcataccgatgtgtttaactggaaggtccgcgcagggagcgacaaattgggttcgtttccgagcctcgcagttgctaagattatcattatcgagttcaacccaatgtaccccaaggacaacgacatcgcacttatgaaactacagtttcctctgacctttagtggcactgtccggcccatatgtctgcccttttttgacgaggaactcacccctgccaccccgctgtggatcataggctgggggttcactaagcaaaacggcggcaaaatgagtgacattttactccaggctagcgttcaggtcattgacagcacccgctgcaacgctgatgacgcatatcagggagaagttaccgaaaagatgatgtgtgccggaatccccgaaggtggagttgatacctgtcagggggacagtggaggaccactgatgtatcaatccgaccagtggcacgtcgttgggattgttagctggggctatggttgtgggggtccttccaccccgggagtatacactaaagtctccgcctatcttaattggatatataacgtatggaaagcagagctgtag

SEQ ID NO: 68884 - DNA, 1308 bp, Artificial Sequence
  derived and/or modified sequence
atggaccctgacagcgaccagcccctgaacagcctggatgtgaagcccctgaggaagccccgcatccccatggagaccttcaggaaggtgggcatccccatcatcatcgccctgctgagcctggccagcatcatcatcgtggtggtgctgatcaaggtgatcctggacaagtactacttcctgtgtggccagcccctgcacttcatccccaggaagcagctgtgtgatggagagctggactgccccctgggagaagatgaggagcactgtgtgaagagcttccctgagggccctgctgtggccgtgcggctgagcaaggacaggagcaccctgcaggtgctggacagcgccaccggcaactggttcagcgcctgctttgacaacttcacagaggccctggccgagacagcctgccggcagatgggctacagcagcaagcccaccttccgggctgtggagatcggccctgaccaggacctggatgtggtggagatcacagagaacagccaggagctgaggatgaggaacagcagcggcccctgcctgagcggcagcctggtgtccctgcactgcctggcctgtgggaagagcctgaagaccccccgggtggtgggcgtggaggaggcctctgtggacagctggccctggcaggtgtccatccagtatgacaagcagcacgtgtgtggcggcagcatcctggacccccactgggtgctgacagctgcccactgcttcaggaagcacacagatgtgttcaactggaaggtgcgggccggcagtgacaagctgggcagcttccccagcctggccgtggccaagatcatcatcatcgagttcaaccccatgtaccccaaggacaatgacatcgccctgatgaagctgcagttccccctgaccttctctggaacagtgcggcccatctgcctgcccttctttgatgaggagctgaccccagccacccccctgtggatcatcggctggggcttcaccaagcagaatggaggcaagatgtctgacatcctgctgcaggcctctgtgcaggtgattgacagcacccgctgcaatgctgatgatgcctaccagggcgaggtgacagagaagatgatgtgtgccggcatccctgagggcggcgtggacacctgccagggcgacagcggcggccccctgatgtaccagagcgaccagtggcacgtggtgggcatcgtgtcctggggctacggctgcggcggccccagcaccccaggagtgtacaccaaggtgtctgcctacctgaactggatctacaacgtgtggaaggccgagctgtag

SEQ ID NO: 68885 - DNA, 1308 bp, Artificial Sequence
  derived and/or modified sequence
atggaccccgacagcgaccagcccctgaacagcctggacgtgaagcctctcagaaaaccgaggatccctatggagacatttcgcaaggtgggaattcctattattatagcactactgagtcttgcatcaatcattatcgtcgtggtgctcattaaggtaattcttgacaagtactattttctctgcggtcaaccactgcattttatcccacgcaagcaactatgcgatggagaactggattgtccattgggagaggatgaagaacactgtgttaaaagcttccctgaaggccccgccgtggcagtacggctgtctaaagacagatctacactgcaggttctggattccgccaccggcaactggtttagcgcatgtttcgacaattttaccgaagccttggctgagaccgcatgtcggcagatgggttatagttctaagcctaccttccgcgccgtcgaaatcggaccagaccaggatctcgacgttgtggagattacagaaaattctcaggagttgcgaatgaggaactcctccggcccttgcctgtcgggaagcctcgtgagcctccactgtctggcctgcggcaagagcttgaaaactcccagggttgtgggagtcgaagaagctagcgtcgatagctggccttggcaggtgtccattcagtatgacaagcaacacgtttgcgggggatccattttggatccccattgggtgctgactgctgcacactgtttcaggaagcacaccgacgtatttaactggaaggtccgcgcaggctccgataagttaggatctttcccctcccttgctgtggcgaaaattatcattatcgagttcaatcctatgtaccctaaagataacgatattgccctcatgaaactgcaattcccgctgacattcagcggcacagtgcggccaatctgtttgccattcttcgacgaggaactgacccctgccacacctctctggatcattggatggggattcaccaagcagaatggggggaaaatgagtgacattcttctccaggcgtctgtccaagtgattgacagcacgcgttgcaatgccgatgacgcttatcagggcgaggtgaccgagaaaatgatgtgtgctggaattcctgagggcggtgtggatacatgtcagggagactcaggaggacctcttatgtaccaatcggatcagtggcacgttgttgggattgtgtcctggggctacggttgtggtggaccctccactccaggcgtgtacaccaaagtgagtgcctatctgaattggatctacaacgtttggaaggctgaattgtag

SEQ ID NO: 68886 - DNA, 1308 bp, Artificial Sequence
  derived and/or modified sequence
atggaccccgacagcgaccagccacttaactcactggacgtaaaaccattacggaaacccagaataccaatggaaacatttcgtaaagtaggaatccccattattatcgcgctcctgtcgctggcttccataattatcgtggtggttctgataaaagtgatccttgacaaatattacttcctgtgtggccagcccctgcactttatacctagaaaacaattatgtgatggcgaacttgattgccctctgggcgaggacgaggaacactgcgtaaagagttttccagagggccctgccgtggctgtgagactatccaaagacagaagtacactgcaggtgctggatagcgccacaggcaactggttttcagcatgtttcgacaacttcactgaggccttagccgaaactgcctgcagacaaatgggatactctagcaagccaacgtttagggcagtcgagatcgggccagaccaagatcttgacgtggtagagatcactgaaaacagtcaagaactcaggatgcgcaatagcagcggaccatgtctgtcgggaagcctcgtgtcactgcattgccttgcctgtggaaagtctctgaaaactcccagggtggtgggggtcgaagaggcctccgtagattcgtggccctggcaggtttccatccaatacgataaacagcatgtgtgcgggggatcaattctggaccctcattgggtcttgaccgccgctcactgttttcggaagcacaccgacgtgttcaattggaaggtgcgagccggaagtgataagctcggatctttcccctcgttggccgtggctaagataattatcatcgagttcaacccgatgtatccaaaggataatgatattgctttgatgaaactccagttccctctgactttcagtggtaccgtaagaccaatttgcctgccattctttgacgaggagcttactcctgccactcccctgtggataatcgggtggggatttaccaaacagaacggcggaaagatgtccgatattttgttgcaggcgtcggtgcaggtgattgactctacccggtgtaacgcagatgatgcctaccaaggggaagtgactgagaaaatgatgtgtgccggtatccccgagggcggtgtggacacttgccagggtgatagcgggggtcccctcatgtatcagtccgaccagtggcacgtggtgggcatcgtgtcttggggttacggctgcggaggtccctccacacctggagtctacaccaaagtgagcgcataccttaactggatatataatgtttggaaagccgagctgtag

SEQ ID NO: 68887 - DNA, 5550 bp, Artificial Sequence
  derived and/or modified sequence
gtagggctgttttaatcaagctgcccaaagtcccccaatcactcctggaatacacagagagaggcagcagcttgctcagcggacaaggatgctgggcgtgagggaccaaggcctgccctgcactcgggcctcctccagccagtgctgaccagggacttctgacctgctggccagccaggacctgtgtggggaggccctcctgctgccttggggtgacaatctcagctccaggctacagggagaccgggaggatcacagagccagcatggatcctgacagtgatcaacctctgaacagcctcgatgtcaaacccctgcgcaaaccccgtatccccatggagaccttcagaaaggtggggatccccatcatcatagcactactgagcctggcgagtatcatcattgtggttgtcctcatcaaggtgattctggataaatactacttcctctgcgggcagcctctccacttcatcccgaggaagcagctgtgtgacggagagctggactgtcccttgggggaggacgaggagcactgtgtcaagagcttccccgaagggcctgcagtggcagtccgcctctccaaggaccgatccacactgcaggtgctggactcggccacagggaactggttctctgcctgtttcgacaacttcacagaagctctcgctgagacagcctgtaggcagatgggctacagcagcaaacccactttcagagctgtggagattggcccagaccaggatctggatgttgttgaaatcacagaaaacagccaggagcttcgcatgcggaactcaagtgggccctgtctctcaggctccctggtctccctgcactgtcttgcctgtgggaagagcctgaagaccccccgtgtggtgggtgtggaggaggcctctgtggattcttggccttggcaggtcagcatccagtacgacaaacagcacgtctgtggagggagcatcctggacccccactgggtcctcacggcagcccactgcttcaggaaacataccgatgtgttcaactggaaggtgcgggcaggctcagacaaactgggcagcttcccatccctggctgtggccaagatcatcatcattgaattcaaccccatgtaccccaaagacaatgacatcgccctcatgaagctgcagttcccactcactttctcaggcacagtcaggcccatctgtctgcccttctttgatgaggagctcactccagccaccccactctggatcattggatggggctttacgaagcagaatggagggaagatgtctgacatactgctgcaggcgtcagtccaggtcattgacagcacacggtgcaatgcagacgatgcgtaccagggggaagtcaccgagaagatgatgtgtgcaggcatcccggaagggggtgtggacacctgccagggtgacagtggtgggcccctgatgtaccaatctgaccagtggcatgtggtgggcatcgttagttggggctatggctgcgggggcccgagcaccccaggagtatacaccaaggtctcagcctatctcaactggatctacaatgtctggaaggctgagctgtaatgctgctgcccctttgcagtgctgggagccgcttccttcctgccctgcccacctggggatcccccaaagtcagacacagagcaagagtccccttgggtacacccctctgcccacagcctcagcatttcttggagcagcaaagggcctcaattcctataagagaccctcgcagcccagaggcgcccagaggaagtcagcagccctagctcggccacacttggtgctcccagcatcccagggagagacacagcccactgaacaaggtctcaggggtattgctaagccaagaaggaactttcccacactactgaatggaagcaggctgtcttgtaaaagcccagatcactgtgggctggagaggagaaggaaagggtctgcgccagccctgtccgtcttcacccatccccaagcctactagagcaagaaaccagttgtaatataaaatgcactgccctactgttggtatgactaccgttacctactgttgtcattgttattacagctatggccactattattaaagagctgtgtaacatctctggcataggctagctggaatgcttgataagaactgagctgggatgattgaactttcattctttggcttggggagaaaagaagtcctggggaagcaattgagtctcaaagtagaggcaggggaaaaaagagttagggagaccagatctgctgagtggcagcaagagtgagctgcagattacagaaaccagggtgagcaagtttgagtcccacacagggccttctccctttgcctctttccctccctccctgcctgtgataatcagccaggagccagggataacctatgacttgggaaagagatgagttaggcagtcaagggtgacattcaatcagggatccacaagtggctggaaagaaatgctggtcctgtgtcctaactttttccgcctggagagccctcagtgtggcttcttacatttaaaaaacaaaaaggatcagctgccaggtgtgaggcagtccccaagctgagttgtgaggatgtaagcatgaataagtccctgcactcaaaatggtcaaagaattaaaccccatggacttttttggcatctgtatgaaagcttgggttttctgaggactgtcttgctatagttaagtcagatcctagatgaaatatacttgttcatactgtactaggttcttaggaaacaacagaattcctcaaatgccaaaaacaaagaaaatagaaacccagaaaacaaaacaaaataaaacaaaaccatcagaactgtgagtggaaactaaggtgatgatctgggagcaatacactaaaatcttgggtcgagacctatatgaaggctggcagtggagctaaacctggacacactgaagacaagggagctgaaccagggctcctacatgaagcagggataactgatggcagtaaatgtggtctcaaattgcagatggtctggaggaaaatttcccaaatttagagcctcaggattcccaaagatcctccaaatatgagctcacaatcaaagatcagagacgttgaaaaataaaaaacaccttaagtgggcagcataaaaaacagctaatttagaaccccaaaggcttcagatgtcagaatattagagacttatgataataagcaatatttgcagagtatttgtatgtgccagacactattgtaagtgcttcatcatgtactgattcatttaatactcacagaaatctgtgagatgggtattattcttatcctcactctatggattaaaaaaactaaggcacaaagtggttaagctccttgcctgagattatagactgtaagttgaacgtgagcacttggaatacagagttcatgctgtaaactaccacactatagggcctccaatatgataatttataaaatatttgaataaaaaatgaatactagttccacattttaaaatcatgtttaactgtggtcaaatgcacataacacaagttgccatcttcaccatttttaggtgtatagttcagtggtgttatgtacattcacactattgtgcagtcatcaccaccatccatctccagaacagaaactcagtacccatcaaacaactctccatttccccctcctcccaatctctggcaaccaccattgtgctttcagtctctgtgaactggattactctgggtacctcatttaagtgaagtcatgcagtattggtctttttgtacttgttttatttcacttcacattgtgtcttcaagtttcacccatgttgtagcatgtgtcagaatttcttccctttttagactaaataatattctattgtttatacgaacattcaggttacttctatcttttggctattgtgaattatgctgctgtgaacatgggtgtacaagtatctctttgaggccctgctttcaattctcttgggtatattcccagaagtggaattgctggatcatatggtaattctattttgaattttttgaggaactgatatattgctttccatagagactgcaccattttacattcccatcaacagtttgcaggagttactatttctccatatcccccctaacacttgctattttctgttaaaaatggatatcttaataatcaagcaaaaataacaggcagatttgaaaaagaactgaatacagcttttagaaataaaaactataattataaaaataaaaaactaagtggatggggtaaataacaattaaaacaccaattaagagagaacaaatgaactggaagataaattgaagaagtgactaggcttaacagcagagagagataaggagattaaaaatatgaaaacaaggccaggagcaatgaagcctagaatggtaaattctaacatatccagaatcccagaaagagagaatcaagacaatgagagagagacagtaccaaagagataagagctgagaatgttccagaattgataaaaggtgtgaatccacagaacatacaccaccatagtgtacacgcatacaaccaaggtggaaaaattagaataaatccacacctatgtacattataatgaaactgcagaacaccaaagacaaaaagaaactccttatagcagcagagagaaaacccagaccacccacagtaccacaaatctaccacaattagactgacaacaggctttcccacagcaataaaggagctagaagtcagtggaagtatatctccagcatgccaaaagataacaatcaatcagggattgtgaaccctacaaaactatctttcaagaataaaggcattttcaagaaaacaaaaacagactttaccatcaacaaaccttctctaaaagaatatataaagcatttactttaggaagaaggaaaatgatcctaaaaggaagaaccaagaagcaagtagcaatagtgaggcaattgtgaaaatgtaggtaagtctaaacacactctgtctacttcttcttcttcttcttcttcttcttcttcttattttgagactgagtcttgccctgtcacccagactggagtgcagtggcaggatcttggctcactgctatctccacctcccaggttcaagtgattcttctgcctcagcctcccgagtagctgggattacatgcacatgccaccatatccggctaatttttgaatttttagtagagatggggtttcactgtgttggccaggccggtctcaaactcccgacctcaagtgatccccccgcctcggcctcccaaagtgctgggattacaggcgtgtctacatattattaaaataacaataatatttattttgtgggttaattttttttgaaacagatattgaatttattggttggctatgagtagaaaaatacatcagtaaagaaaaaagaccctgtatataaatataatactagctagttaaaatttgaccaagaagtttccattgtgggttaatttttaaaggcctaactgaaatatggagtaaccacagcatgcagcatgtaaattaaaggggatagctgg

SEQ ID NO: 68888 - protein, 397 aa, Artificial Sequence
  derived and/or modified sequence
MDPDSDQPLNSLVKVILDKYYFLCGQPLHFIPRKQLCDGELDCPLGEDEEHCVKSFPEGPAVAVRLSKDRSTLQVLDSATGNWFSACFDNFTEALAETACRQMGYSSKPTFRAVEIGPDQDLDVVEITENSQELRMRNSSGPCLSGSLVSLHCLACGKSLKTPRVVGVEEASVDSWPWQVSIQYDKQHVCGGSILDPHWVLTAAHCFRKHTDVFNWKVRAGSDKLGSFPSLAVAKIIIIEFNPMYPKDNDIALMKLQFPLTFSGTVRPICLPFFDEELTPATPLWIIGWGFTKQNGGKMSDILLQASVQVIDSTRCNADDAYQGEVTEKMMCAGIPEGGVDTCQGDSGGPLMYQSDQWHVVGIVSWGYGCGGPSTPGVYTKVSAYLNWIYNVWKAEL

SEQ ID NO: 68889 - DNA, 1194 bp, Artificial Sequence
  derived and/or modified sequence
atggaccccgacagcgaccagcccctgaacagcctggtgaaggtgatcctggacaagtactacttcctgtgcggccagcccctgcacttcatccccagaaagcagctgtgcgacggcgagctggactgccccctgggcgaggacgaggagcactgcgtgaagagcttccccgagggccccgccgtggccgtgagactgagcaaggacagaagcaccctgcaggtgctggacagcgccaccggcaactggttcagcgcctgcttcgacaacttcaccgaggccctggccgagaccgcctgcagacagatgggctacagcagcaagcccaccttcagagccgtggagatcggccccgaccaggacctggacgtggtggagatcaccgagaacagccaggagctgagaatgagaaacagcagcggcccctgcctgagcggcagcctggtgagcctgcactgcctggcctgcggcaagagcctgaagacccccagagtggtgggcgtggaggaggccagcgtggacagctggccctggcaggtgagcatccagtacgacaagcagcacgtgtgcggcggcagcatcctggacccccactgggtgctgaccgccgcccactgcttcagaaagcacaccgacgtgttcaactggaaggtgagagccggcagcgacaagctgggcagcttccccagcctggccgtggccaagatcatcatcatcgagttcaaccccatgtaccccaaggacaacgacatcgccctgatgaagctgcagttccccctgaccttcagcggcaccgtgagacccatctgcctgcccttcttcgacgaggagctgacccccgccacccccctgtggatcatcggctggggcttcaccaagcagaacggcggcaagatgagcgacatcctgctgcaggccagcgtgcaggtgatcgacagcaccagatgcaacgccgacgacgcctaccagggcgaggtgaccgagaagatgatgtgcgccggcatccccgagggcggcgtggacacctgccagggcgacagcggcggccccctgatgtaccagagcgaccagtggcacgtggtgggcatcgtgagctggggctacggctgcggcggccccagcacccccggcgtgtacaccaaggtgagcgcctacctgaactggatctacaacgtgtggaaggccgagctgtag

SEQ ID NO: 68890 - DNA, 1194 bp, Artificial Sequence
  derived and/or modified sequence
atggaccctgattcagaccagccacttaattcactcgtgaaggtgatattggataagtattactttctatgtggccagcccttacatttcattccccggaaacagctgtgcgatggcgagctggactgtcccctcggcgaggatgaggagcactgcgtgaaaagctttccagaaggacccgccgtcgcagtgcggctgtccaaggatcggagcacgcttcaggtcctggatagcgcaaccgggaactggttctcagcttgttttgataactttactgaggctcttgctgagacagcatgtcggcaaatgggctactctagcaaaccgaccttccgagccgtcgagatcggcccagatcaggaccttgacgtggtagagattacggaaaacagtcaggagctgcgtatgaggaacagcagcggaccttgtttaagtggcagtctcgtgtcacttcactgcctggcctgtggcaaatccctgaaaacgccccgcgtggtgggggtcgaggaggcctcagtagacagctggccgtggcaagtttccatccagtatgacaaacagcacgtttgcgggggaagtattctggatccacattgggtgctcacagccgcccactgctttcggaaacataccgatgtctttaattggaaggtccgcgccggctcagataaactcggatccttcccaagcctggccgtggccaaaatcataatcatcgaattcaatcctatgtaccctaaggacaacgacatcgccttaatgaagctgcagttccccttgaccttcagcgggaccgtacgccctatctgccttccattcttcgatgaggagcttacacccgcaaccccgctgtggatcatcgggtggggattcaccaaacaaaatggtggtaaaatgtcggatatactgctacaggctagcgttcaagttattgactcgaccaggtgcaatgctgacgatgcctaccagggtgaggttaccgagaagatgatgtgtgcaggcattcctgagggaggcgtggatacatgtcagggtgacagtggcgggcctctgatgtaccagagtgatcagtggcacgtcgtcggcattgtctcttggggatacggatgcggggggccttccactcctggtgtatataccaaagtgtccgcctaccttaactggatctataatgtttggaaagccgagctgtag

SEQ ID NO: 68891 - DNA, 1194 bp, Artificial Sequence
  derived and/or modified sequence
atggaccctgacagcgaccagcccctgaacagcctggtgaaggtgatcctggacaagtactacttcctgtgtggccagcccctgcacttcatccccaggaagcagctgtgtgatggagagctggactgccccctgggagaagatgaggagcactgtgtgaagagcttccctgagggccctgctgtggccgtgcggctgagcaaggacaggagcaccctgcaggtgctggacagcgccaccggcaactggttcagcgcctgctttgacaacttcacagaggccctggccgagacagcctgccggcagatgggctacagcagcaagcccaccttccgggctgtggagatcggccctgaccaggacctggatgtggtggagatcacagagaacagccaggagctgaggatgaggaacagcagcggcccctgcctgagcggcagcctggtgtccctgcactgcctggcctgtgggaagagcctgaagaccccccgggtggtgggcgtggaggaggcctctgtggacagctggccctggcaggtgtccatccagtatgacaagcagcacgtgtgtggcggcagcatcctggacccccactgggtgctgacagctgcccactgcttcaggaagcacacagatgtgttcaactggaaggtgcgggccggcagtgacaagctgggcagcttccccagcctggccgtggccaagatcatcatcatcgagttcaaccccatgtaccccaaggacaatgacatcgccctgatgaagctgcagttccccctgaccttctctggaacagtgcggcccatctgcctgcccttctttgatgaggagctgaccccagccacccccctgtggatcatcggctggggcttcaccaagcagaatggaggcaagatgtctgacatcctgctgcaggcctctgtgcaggtgattgacagcacccgctgcaatgctgatgatgcctaccagggcgaggtgacagagaagatgatgtgtgccggcatccctgagggcggcgtggacacctgccagggcgacagcggcggccccctgatgtaccagagcgaccagtggcacgtggtgggcatcgtgtcctggggctacggctgcggcggccccagcaccccaggagtgtacaccaaggtgtctgcctacctgaactggatctacaacgtgtggaaggccgagctgtag

SEQ ID NO: 68892 - DNA, 1194 bp, Artificial Sequence
  derived and/or modified sequence
atggaccccgacagcgaccagcccctgaacagcctggtgaaggtgattcttgataagtactattttctgtgcgggcagccactccattttatcccaagaaagcagctgtgcgatggtgaattggactgcccgctgggggaagacgaagaacactgcgtcaaatcttttcctgagggacctgctgttgctgtgagactgtcaaaagacaggtccaccctgcaggtactggactctgccaccggtaattggttttctgcctgcttcgataatttcacagaagccttggccgaaaccgcttgccggcagatgggctattcatccaagcctacattcagggccgtcgaaatcggtccagaccaggacctggatgtggtcgagatcacggagaatagccaagaactaagaatgagaaatagctcaggtccttgcctgtccgggtcgcttgtgtctcttcactgccttgcttgtgggaagtcccttaaaactcctagggtagtcggcgtagaggaggcgtcggtggatagttggccttggcaggtttccatccagtacgacaagcagcacgtctgtggcggatccatactcgatcctcattgggtgctaaccgccgcccattgcttcagaaagcacacagatgtgttcaattggaaggtcagagcaggaagcgataaactcggttcatttcccagtctggctgtggctaaaataattatcatagagttcaaccccatgtatccgaaggataacgatatcgccctgatgaagctgcaattccctctgacgtttagcggcacggtgcgccctatttgtctgccctttttcgatgaagagctaaccccagctaccccactctggattatcgggtgggggttcactaaacagaacggcggcaaaatgtcggacatcctcctccaggcaagcgtccaggtcattgactccacacggtgtaacgcggatgacgcataccagggcgaggtgacagaaaaaatgatgtgtgccgggattcccgagggcggagttgatacatgccagggagattctgggggtccactgatgtatcagagtgaccagtggcatgtagtcggaattgtgtcttgggggtacggatgcgggggtccatccactccgggcgtgtataccaaggtgtctgcctacctcaactggatatacaacgtctggaaggctgaactgtag

SEQ ID NO: 68893 - DNA, 1194 bp, Artificial Sequence
  derived and/or modified sequence
atggatcccgacagtgatcagcctttgaacagtctggtgaaggtgattctggacaagtactactttctgtgtgggcagcctctgcactttatcccacgcaaacagctctgtgatggagagctcgattgccccctcggagaagatgaggaacactgtgtcaagagctttcccgaaggccctgcagtggccgttaggttgagtaaggatcgctctacgctgcaggtcctcgattcagcaacaggcaactggtttagtgcatgctttgacaactttacagaagcacttgccgagaccgcttgtagacaaatgggctattcctcaaagcctactttccgcgctgtggagataggaccagaccaggatttggatgtggtagagataacggagaactctcaagagctaagaatgcggaactcctctggcccttgtctctccgggagtttggtatcacttcactgcttggcttgtggtaaaagccttaagaccccccgagtcgtgggagtggaggaggcaagtgttgattcttggccttggcaggtctcgatccagtacgataagcaacatgtttgcgggggatccattctggaccctcactgggtgctcaccgccgcacactgctttagaaagcacacagacgtttttaactggaaggtgcgggcaggatcagataagttaggatcgttcccatctctggctgttgcaaaaatcataataatagagttcaaccctatgtatcctaaagataatgacatagctctaatgaagctacaattcccacttacatttagtgggacagtcagaccaatttgcctgcctttctttgatgaagagttaacaccagctactcctctgtggatcatcggctggggctttactaaacaaaatggaggcaagatgtccgatattctgctgcaggcgtcagtgcaggtgattgactccactcggtgtaacgctgacgacgcctaccagggagaggtcaccgagaaaatgatgtgtgctgggatcccagagggcggtgttgatacgtgccagggagactccggtggccctttgatgtatcagtcagatcagtggcacgtagtggggatcgtgagttggggatacggctgtggcggtccatccactccgggtgtatacacgaaagtttcagcctatttaaattggatttataacgtatggaaggctgagttatag

SEQ ID NO: 68894 - DNA, 1689 bp, Artificial Sequence
  derived and/or modified sequence
cactcctggaatacacagagagaggcagcagcttgctcagcggacaaggatgctgggcgtgagggaccaaggcctgccctgcactcgggcctcctccagccagtgctgaccagggacttctgacctgctggccagccaggacctgtgtggggaggccctcctgctgccttggggtgacaatctcagctccaggctacagggagaccgggaggatcacagagccagcatggatcctgacagtgatcaacctctgaacagcctcgtcaaggtgattctggataaatactacttcctctgcgggcagcctctccacttcatcccgaggaagcagctgtgtgacggagagctggactgtcccttgggggaggacgaggagcactgtgtcaagagcttccccgaagggcctgcagtggcagtccgcctctccaaggaccgatccacactgcaggtgctggactcggccacagggaactggttctctgcctgtttcgacaacttcacagaagctctcgctgagacagcctgtaggcagatgggctacagcagcaaacccactttcagagctgtggagattggcccagaccaggatctggatgttgttgaaatcacagaaaacagccaggagcttcgcatgcggaactcaagtgggccctgtctctcaggctccctggtctccctgcactgtcttgcctgtgggaagagcctgaagaccccccgtgtggtgggtgtggaggaggcctctgtggattcttggccttggcaggtcagcatccagtacgacaaacagcacgtctgtggagggagcatcctggacccccactgggtcctcacggcagcccactgcttcaggaaacataccgatgtgttcaactggaaggtgcgggcaggctcagacaaactgggcagcttcccatccctggctgtggccaagatcatcatcattgaattcaaccccatgtaccccaaagacaatgacatcgccctcatgaagctgcagttcccactcactttctcaggcacagtcaggcccatctgtctgcccttctttgatgaggagctcactccagccaccccactctggatcattggatggggctttacgaagcagaatggagggaagatgtctgacatactgctgcaggcgtcagtccaggtcattgacagcacacggtgcaatgcagacgatgcgtaccagggggaagtcaccgagaagatgatgtgtgcaggcatcccggaagggggtgtggacacctgccagggtgacagtggtgggcccctgatgtaccaatctgaccagtggcatgtggtgggcatcgttagttggggctatggctgcgggggcccgagcaccccaggagtatacaccaaggtctcagcctatctcaactggatctacaatgtctggaaggctgagctgtaatgctgctgcccctttgcagtgctgggagccgcttccttcctgccctgcccacctggggatcccccaaagtcagacacagagcaagagtccccttgggtacacccctctgcccacagcctcagcatttcttggagcagcaaagggcctcaattcctataagagaccctcgcagcccagaggcgcccagaggaagtcagcagccctagctcggccacacttggtgctcccagcatcccagggagagacacagcccactgaacaaggtctca

SEQ ID NO: 68895 - protein, 531 aa, Artificial Sequence
  derived and/or modified sequence
MCQLLESTVIQPQGDSPVAVLCVCDLSPAQCDINCCCDPDCSSVDFSVFSACSVPVVTGDSQFCSQKAVIYSLNFTANPPQRVFELVDQINPSIFCIHITNYKPALSFINPEVPDENNFDTLMKTSDGFTLNAESYVSFTTKLDIPTAAKYEYGVPLQTSDSFLRFPSSLTSSLCTDNNPAAFLVNQAVKCTRKINLEQCEEIEALSMAFYSSPEILRVPDSRKKVPITVQSIVIQSLNKTLTRREDTDVLQPTLVNAGHFSLCVNVVLEVKYSLTYTDAGEVTKADLSFVLGTVSSVVVPLQQKFEIHFLQENTQPVPLSGNPGYVVGLPLAAGFQPHKMSGIIQTTNRYGQLTILHSTTEQDCLALEGVRTPVLFGYTMQSGCKLRLTGALPCQLVAQKVKSLLWGQGFPDYVAPFGNSQAQDMLDWVPIHFITQSFNRKDSCQLPGALVIEVKWTKYGSLLNPQAKIVNVTANLISSSFPEANSGNERTILISTAVTFVDVSAPAEAGFRAPPAINARLPFNFFFPFV

SEQ ID NO: 68896 - DNA, 1680 bp, Artificial Sequence
  derived and/or modified sequence
atgtgccagctcctggagtccacagtgatccaacctcaaggggacagccccgttgctgttctctgtgtctgtgacttatccccagcacagtgtgacatcaactgctgctgtgatcccgactgcagctccgtggatttcagtgtcttttctgcctgctcagttccagttgtcacgggcgacagccagttttgtagtcaaaaagcagtcatctattcattgaattttacagcaaacccacctcaaagagtatttgaacttgttgaccagattaatccatctattttctgcattcatattacaaactataaacctgcattatcctttattaatccagaagtacctgatgaaaacaattttgatacattgatgaaaacatctgatggttttacattgaatgctgaatcatatgtttccttcacaaccaaactggatattcctactgctgctaaatatgagtatggggttcctctgcagacttcagattcgtttctgagatttccttcgtccctgacatcatctctgtgcactgataataaccctgcagcgtttctggtgaaccaggctgttaagtgcaccagaaaaataaatttagaacagtgtgaagaaattgaagccctcagcatggctttttacagcagcccggaaattctgagggtacctgattcaagaaaaaaggtccctatcactgttcagtccatcgtcattcagtctctaaataaaacgctcacccgacgggaggacactgatgtgctgcagccgactctcgtcaacgctggacactttagcctttgcgtgaatgttgttcttgaggtaaagtacagcctcacatacacagatgcaggtgaagtcaccaaagctgatctctcattcgttctggggacagttagcagcgtagtggtcccactgcagcaaaagtttgaaattcattttcttcaggaaaatacccagccagtccctctcagtggaaaccctggttatgtcgtggggctcccattagctgctggattccagcctcataagatgtctgggattattcagaccacaaatagatatggacagcttactattcttcatagcacaactgagcaagactgcttagcactggagggggtccggaccccagtattatttggttacactatgcaatctggctgtaaactaagactgactggagctctcccgtgtcagctcgtagcacagaaggtgaagagcctgctgtggggccagggcttcccagattacgtggccccttttggaaattcccaggcccaggacatgctggactgggtgcccatccacttcatcacccagtcattcaacaggaaggattcctgccagctcccaggggctttggttatagaagtgaagtggactaaatacggatccctgctgaatccacaggccaaaatagtcaatgtaactgcaaatctaatttcatcctcctttcctgaggccaactcaggaaatgaaaggacgattcttatttccactgcggttacttttgtggatgtgtctgcacctgcagaggcaggcttcagagctccaccagccatcaatgccaggctgccctttaacttcttcttcccgtttgtttgacaatgctcagatgcatcagttccttaatatacacgtgaaatttgaaaactgtacattcggtgagattaaattttatatacaact

SEQ ID NO: 68897 - DNA, 2042 bp, Artificial Sequence
  derived and/or modified sequence
ctcgctgggactccctgggagatgaggccgcgaggtctcccgccgctcctggtggtgctcctgggctgctgggcctccgtgagcgcccagaccgatgccaccccggcggtgacgacagagggcctcaactccaccgaggcagccctggccaccttcggaactttcccgtcgaccaggccccccgggactcccagggctccagggccctcctccggccccaggcctaccccagtcacggacgttgctgttctctgtgtctgtgacttatccccagcacagtgtgacatcaactgctgctgtgatcccgactgcagctccgtggatttcagtgtcttttctgcctgctcagttccagttgtcacgggcgacagccagttttgtagtcaaaaagcagtcatctattcattgaattttacagcaaacccacctcaaagagtatttgaacttgttgaccagattaatccatctattttctgcattcatattacaaactcacattttactccaggactttcacggtggctgtgtgagagtagaagtcggattctttcattcccatagccatccggagagagcttctccttacaggttgatacagcaaactcatcagtccaggggctagagaaatagacggattattattggcttctgttgtgctgtttacttataaacctgcattatcctttattaatccagaagtacctgatgaaaacaattttgatacattgatgaaaacatctgatggttttacattgaatgctgaatcatatgtttccttcacaaccaaactggatattcctactgctgctaaatatgagtatggggttcctctgcagacttcagattcgtttctgagatttccttcgtccctgacatcatctctgtgcactgataataaccctgcagcgtttctggtgaaccaggctgttaagtgcaccagaaaaataaatttagaacagtgtgaagaaattgaagccctcagcatggctttttacagcagcccggaaattctgagggtacctgattcaagaaaaaaggtccctatcactgttcagtccatcgtcattcagtctctaaataaaacgctcacccgacgggaggacactgatgtgctgcagccgactctcgtcaacgctggacactttagcctttgcgtgaatgttgttcttgaggtaaagtacagcctcacatacacagatgcaggtgaagtcaccaaagctgatctctcattcgttctggggacagttagcagcgtagtggtcccactgcagcaaaagtttgaaattcattttcttcaggaaaatacccagccagtccctctcagtggaaaccctggttatgtcgtggggctcccattagctgctggattccagcctcataaggggtctgggattattcagaccacaaatagatatggacagcttactattcttcatagcacaactgagcaagactgcttagcactggagggggtccggaccccagtattatttggttacactatgcaatctggctgtaaactaagactgactggagctctcccgtgtcagctcgtagcacagaaggtgaagagcctgctgtggggccagggcttcccagattacgtggccccttttggaaattcccaggcccaggacatgctggactgggtgcccatccacttcatcacccagtcattcaacaggaaggattcctgccagctcccaggggctttggttatagaagtgaagtggactaaatacggatccctgctgaatccacaggccaaaatagtcaatgtaactgcaaatctaatttcatcctcctttcctgaggccaactcaggaaatgaaaggacgattcttatttccactgcggttacttttgtggatgtgtctgcacctgcagaggcaggcttcagagctccaccagccatcaatgccaggctgccctttaacttcttcttcccgtttgtttgacaatgctcagatgcatcagttccttaatatacacgtgaaatttgaaaactgtacattcggtgagattaaattttatatacaact

SEQ ID NO: 68898 - DNA, 1596 bp, Artificial Sequence
  derived and/or modified sequence
atgtgtcaactcctggagagcactgtcatacaacctcaaggcgattctcccgttgcagtcctgtgcgtttgcgatctgtcccccgctcaatgtgacatcaattgctgctgtgaccctgattgttcatctgtcgattttagcgtgttcagcgcatgtagcgttccagttgtgactggtgactctcagttctgtagtcaaaaagctgtgatctactctctgaatttcaccgcaaatccccctcagagagtgttcgaactcgtggatcaaattaatccttccattttctgtattcacatcacaaactacaagcctgccctctctttcattaaccccgaagtgcctgacgagaataatttcgataccctgatgaaaacttccgatggcttcacccttaatgccgaatcatacgtttcattcaccacaaagctcgatatccccaccgcagccaagtatgagtatggcgtgccactgcagacctccgattccttcttgcgcttcccgtcctctcttacttccagcttatgcaccgacaataatccagcagccttccttgtaaatcaagctgtcaagtgtacacgcaaaatcaacctagagcagtgcgaagaaattgaagctctgtctatggcgttttattctagccccgagatcctgcgggttcctgattcacggaaaaaggtgccaatcaccgtgcaatccatcgttatccagagtttaaataaaaccctgaccaggcgagaggatactgacgtcttgcagccgactttggtgaatgcgggacattttagtctttgcgtaaacgtggttttggaagtaaagtactctcttacctacacagatgcaggagaggtgacaaaagccgatttaagctttgtgctggggaccgttagttcagttgtggtgcctttgcagcagaagttcgagattcactttctccaggaaaatacgcagcctgtgcctttatcaggaaatccaggctacgttgtgggactgcccttggctgcagggttccagccgcataaaatgtccggcatcatacagacaaccaatcgatatggccaactcaccatactgcatagtaccaccgagcaagactgtcttgctcttgagggcgtgcgaactcctgtactcttcggctacactatgcagtctggatgcaaactgcgactgaccggggcactcccctgccagcttgttgcccagaaggtaaagtccctgttatggggccagggatttccagattacgtggctccattcggaaactcccaggcacaagacatgctagattgggtgcccatacacttcattacacagtctttcaataggaaagactcatgccagcttcctggcgctctggtcattgaggtcaaatggaccaagtatggatcactgttaaatcctcaagctaaaattgtgaacgtaacagctaaccttattagctcgtccttccccgaagccaatagcggtaacgaacgcactatattgatctcaaccgccgtcacctttgtggacgtcagcgcccctgcagaggctggctttagggccccaccagccataaatgcaagacttcccttcaattttttcttccctttcgtatag

SEQ ID NO: 68899 - DNA, 1596 bp, Artificial Sequence
  derived and/or modified sequence
atgtgtcagctgctggagagcaccgtgatccagccacagggtgattcccccgtcgcagttctatgcgtctgcgacttgagccccgcacagtgtgatataaattgctgttgcgaccctgactgtagctcagtggatttctcagttttctccgcttgttctgtccccgtagtcacaggtgactcacagttctgttctcagaaggccgttatctactccctcaacttcactgcaaatcccccccagcgggtattcgaattggtggaccagatcaacccttcaattttttgcatacatataaccaactataagcctgccctgagttttattaaccccgaggtccctgacgaaaataactttgacacactgatgaagacttccgatggctttacactcaacgcagaaagttacgtgtcctttacgaccaagctggatatcccaactgctgccaagtatgaatatggcgtcccattacaaacgtctgacagcttcctgagattcccgtcctctctgactagttcgctgtgcacagacaacaatcccgccgcttttctggtgaaccaagctgtcaagtgtacccgaaaaattaacctcgaacagtgcgaagagatcgaggcactatctatggctttttatagtagtccagagatactgcgggtgcctgacagtcgcaaaaaagtacccattactgtccagtcaatcgtcattcaatccttgaacaagaccctcacaagaagggaagatacggatgtcctccagccaaccctggtgaatgctgggcacttcagcctttgtgtcaatgtcgtgctggaggtgaaatactcccttacctatacagacgctggggaagttactaaggccgaccttagttttgtgttagggaccgtgagttctgtagttgtgccacttcagcaaaaatttgaaattcattttctgcaggagaatacacagccagtacctcttagcgggaaccccggatacgtggtcggactcccactcgctgctgggttccaaccccataagatgagcgggatcatacagaccaccaaccgttacggacagctgacaatccttcactccaccacagaacaggactgccttgccctggagggagtgcgaacgccagtcctgtttggctacactatgcagtccggttgcaaactgaggcttaccggtgcattgccctgtcagttggtggcccaaaaagtcaagtccctgctttggggccaaggcttccccgattacgtggcaccttttggcaactcccaagcacaggacatgctggactgggtgcccatccattttatcacccaaagttttaaccgcaaggactcttgtcagcttccaggcgccctagttattgaagtgaagtggaccaaatacgggagcctgcttaacccacaagccaaaatcgttaacgtgaccgcaaatctaatctcctcctcttttcctgaagcaaactccggaaatgaacgaaccattctgatatcaactgccgtgacattcgtcgacgtcagtgcccctgccgaagccggattccgggctccccccgctatcaacgccagacttcctttcaacttctttttcccttttgtgtag

SEQ ID NO: 68900 - DNA, 1596 bp, Artificial Sequence
  derived and/or modified sequence
atgtgccagctgctagagagtacagtcatccaacctcaaggagattcccccgtcgcggtgctttgtgtgtgtgatctttccccagcacagtgcgatatcaattgttgctgcgacccggactgttcctctgtcgatttctctgtgttctcagcctgctctgtacctgtggtcaccggcgactcccagttctgctcacagaaggcagttatctattctcttaacttcactgccaatcccccacagcgcgtgttcgagcttgttgatcagattaacccttccatcttctgcattcatatcaccaattataagcccgcccttagctttattaaccccgaagtgccagacgagaataattttgatacacttatgaagacatccgatggcttcacactcaacgccgaatcctatgtaagctttactacaaaattagatatccccaccgcagcaaaatatgagtacggggttcccctgcagactagtgatagcttcctgcggttcccctcctccctcacctcctcattgtgcaccgataacaaccctgccgcctttctggtaaatcaggccgtgaagtgcaccagaaaaatcaacctcgaacagtgcgaggaaattgaagcacttagcatggctttctattcatcacctgaaatccttcgtgtgccagactctagaaagaaagttcccattacggtccaatcaatagttattcagtccctaaacaagacccttacccgccgagaggacactgacgtcctgcaacctaccctagtcaacgctggacatttctctttatgcgtaaatgtagtgctggaggtcaagtactccctgacctatacagatgcaggggaagtgactaaagccgacttaagtttcgtcttgggaacggtctcctctgtggtagtacctctccaacaaaaattcgagatacatttcctacaagaaaatacacaaccggtgcctctcagtggcaaccctggctatgtggtaggtttgccgctggctgcaggctttcagcctcataaaatgtccgggattatccaaaccaccaaccgttacggccagttgactattctccacagtacaaccgaacaggactgtctagcgctcgagggtgtcaggacccctgtattatttgggtatactatgcagtcaggttgcaaactaaggctaaccggtgccctcccttgccagcttgttgcccaaaaagtgaaatctctactctggggccagggcttccccgactacgtcgctccgttcggcaactctcaggcacaagacatgctggactgggtccctatacattttattacgcagagcttcaaccgtaaagactcgtgccaacttcctggtgcccttgtcattgaagtcaagtggacaaaatacggctctctactcaacccacaggctaagattgtgaacgtgaccgcaaacctcatcagctcctcctttccagaagcaaattctggcaacgaacgcacgatcctgattagcacagcggtaacctttgtggatgtatctgctccagccgaggccggttttcgcgccccccccgctattaacgccaggctcccattcaattttttctttccctttgtctag

SEQ ID NO: 68901 - DNA, 1988 bp, Artificial Sequence
  derived and/or modified sequence
tgccccgcgcctggctgtcgcggttgccgggcaacgcgctgtccatgtcgcgggcctcgctgggactccctgggagatgaggccgcgaggtctcccgccgctcctggtggtgctcctgggctgctgggcctccgtgagcgcccagaccgatgccaccccggcggtgacgacagagggcctcaactccaccgaggcagccctggccaccttcggaactttcccgtcgaccaggccccccgggactcccagggctccagggccctcctccggccccaggcctaccccagtcacggacggtgggtaccatgtgccagctcctggagtccacagtgatccaacctcaaggggacagccccgttgctgttctctgtgtctgtgacttatccccagcacagtgtgacatcaactgctgctgtgatcccgactgcagctccgtggatttcagtgtcttttctgcctgctcagttccagttgtcacgggcgacagccagttttgtagtcaaaaagcagtcatctattcattgaattttacagcaaacccacctcaaagagtatttgaacttgttgaccagattaatccatctattttctgcattcatattacaaactataaacctgcattatcctttattaatccagaagtacctgatgaaaacaattttgatacattgatgaaaacatctgatggttttacattgaatgctgaatcatatgtttccttcacaaccaaactggatattcctactgctgctaaatatgagtatggggttcctctgcagacttcagattcgtttctgagatttccttcgtccctgacatcatctctgtgcactgataataaccctgcagcgtttctggtgaaccaggctgttaagtgcaccagaaaaataaatttagaacagtgtgaagaaattgaagccctcagcatggctttttacagcagcccggaaattctgagggtacctgattcaagaaaaaaggtccctatcactgttcagtccatcgtcattcagtctctaaataaaacgctcacccgacgggaggacactgatgtgctgcagccgactctcgtcaacgctggacactttagcctttgcgtgaatgttgttcttgaggtaaagtacagcctcacatacacagatgcaggtgaagtcaccaaagctgatctctcattcgttctggggacagttagcagcgtagtggtcccactgcagcaaaagtttgaaattcattttcttcaggaaaatacccagccagtccctctcagtggaaaccctggttatgtcgtggggctcccattagctgctggattccagcctcataaggggtctgggattattcagaccacaaatagatatggacagcttactattcttcatagcacaactgagcaagactgcttagcactggagggggtccggaccccagtattatttggttacactatgcaatctggctgtaaactaagactgactggagctctcccgtgtcagctcgtagcacagaaggtgaagagcctgctgtggggccagggcttcccagattacgtggccccttttggaaattcccaggcccaggacatgctggactgggtgcccatccacttcatcacccagtcattcaacaggaaggattcctgccagctcccaggggctttggttatagaagtgaagtggactaaatacggatccctgctgaatccacaggccaaaatagtcaatgtaactgcaaatctaatttcatcctcctttcctgaggccaactcaggaaatgaaaggacgattcttatttccactgcggttacttttgtggatgtgtctgcacctgcagaggcaggcttcagagctccaccagccatcaatgccaggctgccctttaacttcttcttcccgtttgtttgacaatgctcagatgcatcagttccttaatatacacgtgaaatttgaaaactgtacattcggtgagattaaattttatatacaactagc

SEQ ID NO: 68902 - DNA, 1596 bp, Artificial Sequence
  derived and/or modified sequence
atgtgccagctgctggagagcaccgtgatccagccccagggcgacagccccgtggccgtgctgtgcgtgtgcgacctgagccccgcccagtgcgacatcaactgctgctgcgaccccgactgcagcagcgtggacttcagcgtgttcagcgcctgcagcgtgcccgtggtgaccggcgacagccagttctgcagccagaaggccgtgatctacagcctgaacttcaccgccaaccccccccagagagtgttcgagctggtggaccagatcaaccccagcatcttctgcatccacatcaccaactacaagcccgccctgagcttcatcaaccccgaggtgcccgacgagaacaacttcgacaccctgatgaagaccagcgacggcttcaccctgaacgccgagagctacgtgagcttcaccaccaagctggacatccccaccgccgccaagtacgagtacggcgtgcccctgcagaccagcgacagcttcctgagattccccagcagcctgaccagcagcctgtgcaccgacaacaaccccgccgccttcctggtgaaccaggccgtgaagtgcaccagaaagatcaacctggagcagtgcgaggagatcgaggccctgagcatggccttctacagcagccccgagatcctgagagtgcccgacagcagaaagaaggtgcccatcaccgtgcagagcatcgtgatccagagcctgaacaagaccctgaccagaagagaggacaccgacgtgctgcagcccaccctggtgaacgccggccacttcagcctgtgcgtgaacgtggtgctggaggtgaagtacagcctgacctacaccgacgccggcgaggtgaccaaggccgacctgagcttcgtgctgggcaccgtgagcagcgtggtggtgcccctgcagcagaagttcgagatccacttcctgcaggagaacacccagcccgtgcccctgagcggcaaccccggctacgtggtgggcctgcccctggccgccggcttccagccccacaagatgagcggcatcatccagaccaccaacagatacggccagctgaccatcctgcacagcaccaccgagcaggactgcctggccctggagggcgtgagaacccccgtgctgttcggctacaccatgcagagcggctgcaagctgagactgaccggcgccctgccctgccagctggtggcccagaaggtgaagagcctgctgtggggccagggcttccccgactacgtggcccccttcggcaacagccaggcccaggacatgctggactgggtgcccatccacttcatcacccagagcttcaacagaaaggacagctgccagctgcccggcgccctggtgatcgaggtgaagtggaccaagtacggcagcctgctgaacccccaggccaagatcgtgaacgtgaccgccaacctgatcagcagcagcttccccgaggccaacagcggcaacgagagaaccatcctgatcagcaccgccgtgaccttcgtggacgtgagcgcccccgccgaggccggcttcagagccccccccgccatcaacgccagactgcccttcaacttcttcttccccttcgtgtag

SEQ ID NO: 68903 - DNA, 1596 bp, Artificial Sequence
  derived and/or modified sequence
atgtgtcagcttctcgagagtacggtcattcaaccccagggagacagcccagtggccgtgctgtgcgtttgcgatctgtctcctgcccagtgcgacatcaactgttgctgtgacccggattgtagtagtgtagacttctccgtgtttagtgcatgttcggtgccggtggtgacaggcgatagccagttttgtagccaaaaggccgttatctactcgctgaattttaccgccaacccacctcagcgtgtttttgaactggtggatcagataaatccttctatcttctgcattcacatcacaaactataaaccagccctgtcatttattaatcccgaggttccggacgaaaataattttgatacccttatgaaaactagcgacggctttacactcaatgctgagagctacgtcagcttcacaacaaaactggacattccgactgcagccaagtatgagtacggggtcccattgcagacttccgatagctttttaaggttccctagctctctgacctcatccctgtgtaccgataacaacccggccgcatttctggtcaatcaggctgtgaagtgtaccagaaagattaatctggagcagtgtgaagaaatagaagcacttagcatggccttttacagttctccggaaattctgcgtgtgccagatagtagaaagaaagtccccattacagtgcagagtatcgtaatacaaagcctgaataagacgctcacgcgtcgggaagatacagatgtgctacagcccactctggtaaacgcgggccacttttcattatgcgtgaacgttgtgctcgaagtaaaatactcattgacctacactgatgcaggggaagtgactaaggccgatctgtcattcgtgcttggcactgtatcttctgtagtggtacctctgcagcagaaattcgaaatacattttttacaagagaacacccagccagtgccgttgtccggcaaccccggctacgtggtcggcttacccctcgcagcgggctttcagccacataagatgagtggcatcatccagactacaaacagatatggccagctgacaattctacatagcacaacagagcaggattgcctggcgttagaaggcgtgaggacacccgtgttgttcggctacacaatgcaatctggctgtaaactcaggcttacaggagcccttccatgccagctggtggctcagaaggtgaaaagtttactttggggccagggcttcccagattatgttgcacctttcggcaatagtcaggcccaggacatgttggattgggtgccaatccacttcatcactcagtcttttaacagaaaagactcctgccaacttcccggtgccctcgtgattgaggtaaagtggacaaaatatggcagcttattgaacccacaggcgaagatcgtcaacgtcaccgcaaaccttatctcatcttcctttccagaggccaattctggcaatgaacgcacaatcctcatcagtacagccgtaacatttgtcgacgtgtccgcaccagcggaagctggattcagagccccacccgccattaacgctagacttcctttcaatttttttttcccctttgtgtag

SEQ ID NO: 68904 - DNA, 1596 bp, Artificial Sequence
  derived and/or modified sequence
atgtgccagctgctggagagcaccgtcatccagccccagggcgacagccctgtggccgtgctgtgtgtgtgtgacctgagccctgcccagtgtgacatcaactgctgctgtgaccctgactgcagctctgtggacttctctgtgttcagcgcctgcagcgtgcctgtggtgactggagacagccagttctgcagccagaaggccgtcatctacagcctgaacttcaccgccaaccccccccagagggtgtttgagctggtggaccagatcaaccccagcatcttctgcatccacatcaccaactacaagccagccctgtccttcatcaaccctgaggtgcctgatgagaacaactttgacaccctgatgaagaccagtgatggcttcaccctgaatgctgagagctatgtgtccttcaccaccaagctggacatccccacagctgccaagtatgaatatggagtgcccctgcagaccagtgacagcttcctgcgcttccccagcagcctgaccagcagcctgtgcacagacaacaacccagctgccttcctggtgaaccaggccgtgaagtgcaccaggaagatcaacctggagcagtgtgaggagattgaggccctgtccatggccttctacagcagccctgagatcctgcgggtgcctgacagcaggaagaaggtgcccatcaccgtgcagagcatcgtcatccagagcctgaacaagaccctgacccggcgggaggacacagatgtgctgcagcccaccctggtgaatgccggccacttcagcctgtgtgtgaatgtggtgctggaggtgaagtacagcctgacctacacagatgctggggaggtgaccaaggctgacctgagctttgtgctgggcaccgtgtcctctgtggtggtgcccctgcagcagaagtttgagatccacttcctgcaggagaacacccagcctgtgcccctgagcggcaaccctggctacgtggtgggcctgcccctggccgccggcttccagccccacaagatgagcggcatcatccagaccaccaacagatatggccagctgaccatcctgcacagcaccacagagcaggactgcctggccctggagggcgtgaggacccctgtgctgtttggctacaccatgcagagcggctgcaagctgcggctgaccggggccctgccctgccagctggtggcccagaaggtgaagagcctgctgtggggccagggcttcccagactatgtggcccccttcggcaacagccaggcccaggacatgctggactgggtgcccatccacttcatcacccagagcttcaacaggaaggacagctgccagctgcccggggccctggtgattgaggtgaagtggaccaagtatggcagcctgctgaacccccaggccaagatcgtgaatgtgacagccaacctgatcagcagcagcttccctgaggccaacagcggaaatgaaagaaccatcctgatcagcacagctgtgacctttgtggatgtgtctgccccagctgaggccggcttccgggcccccccagccatcaatgcccggctgcccttcaacttcttcttcccctttgtgtag

SEQ ID NO: 68905 - DNA, 1596 bp, Artificial Sequence
  derived and/or modified sequence
atgtgccagctgctggagagcaccgtgatccagccccagggcgactcccccgtagcagttctgtgcgtgtgcgacctatctccggcccagtgtgatatcaattgttgctgcgaccctgactgttcttctgtggatttcagcgtgttctctgcatgttcggtacccgtggtcaccggagattcccagttttgtagccagaaagccgtaatatatagcctcaattttacagccaatcccccacagcgagtgttcgaacttgtagatcaaatcaatccttcaatcttctgtattcacattacgaactacaagcccgcacttagcttcataaatcccgaagttcccgacgagaacaatttcgatactctgatgaaaacctcagatgggttcactctgaatgccgagtcttatgtttcttttactacaaagctcgatattccgacagcagctaaatatgaatacggggtgcccctccagactagcgattcgtttctgcggtttcctagcagcctgacaagctcgctctgtacggacaacaacccagccgcgtttctggtgaaccaggccgttaaatgtacacgcaagattaatctagagcagtgcgaagagattgaggctttgtctatggcattttatagctcccctgagatccttcgggtgcccgacagccgtaagaaagtccctataactgttcagtccatagtgatccaatcgttgaacaagacactgacaagacgcgaggacaccgacgtcctccaacccaccttggtgaacgctggccatttctctctctgcgtgaatgtggtgctggaggtgaaatactccttgacttacacagatgcgggcgaggtgacaaaagcagatctttcttttgtgctggggactgtgagttcagttgtcgtcccactgcagcagaagtttgaaatccatttcctgcaggagaatactcagcctgtcccactgagtggtaacccaggatacgtcgtgggactgcccctggctgccggatttcagcctcacaaaatgagtgggattatccagacaactaatcgctatggtcagcttacaattctgcattctacaactgaacaagattgcctcgctttagagggtgtgcgtacccctgtgctgtttggctacacgatgcagtctggctgcaaattaagactaactggggctctgccctgccaacttgtggcgcagaaagtgaagtctcttctatggggccaaggcttccccgattatgtggctccatttggcaacagtcaggcacaagatatgcttgattgggtgccgattcattttattacccagagctttaatagaaaggactcctgtcagctcccaggcgccctagtgatcgaagtgaagtggaccaagtatggatccctcctgaatccccaagcgaagatcgtgaatgtgaccgccaatctgatctcttcatccttcccggaagcgaactcaggaaacgaaagaactatcctcatctctaccgctgtaactttcgtcgatgtgtcagcccctgcggaggcgggtttccgtgcaccccctgccatcaacgcaagactgccgttcaactttttttttccattcgtgtag

SEQ ID NO: 68906 - RNA, 1596 nt, Artificial Sequence
  derived and/or modified sequence
augugucagcugcuggagagcaccgugauccagccacagggugauucccccgucgcaguucuaugcgucugcgacuugagccccgcacagugugauauaaauugcuguugcgacccugacuguagcucaguggauuucucaguuuucuccgcuuguucuguccccguagucacaggugacucacaguucuguucucagaaggccguuaucuacucccucaacuucacugcaaaucccccccagcggguauucgaauugguggaccagaucaacccuucaauuuuuugcauacauauaaccaacuauaagccugcccugaguuuuauuaaccccgaggucccugacgaaaauaacuuugacacacugaugaagacuuccgauggcuuuacacucaacgcagaaaguuacguguccuuuacgaccaagcuggauaucccaacugcugccaaguaugaauauggcgucccauuacaaacgucugacagcuuccugagauucccguccucucugacuaguucgcugugcacagacaacaaucccgccgcuuuucuggugaaccaagcugucaaguguacccgaaaaauuaaccucgaacagugcgaagagaucgaggcacuaucuauggcuuuuuauaguaguccagagauacugcgggugccugacagucgcaaaaaaguacccauuacuguccagucaaucgucauucaauccuugaacaagacccucacaagaagggaagauacggauguccuccagccaacccuggugaaugcugggcacuucagccuuugugucaaugucgugcuggaggugaaauacucccuuaccuauacagacgcuggggaaguuacuaaggccgaccuuaguuuuguguuagggaccgugaguucuguaguugugccacuucagcaaaaauuugaaauucauuuucugcaggagaauacacagccaguaccucuuagcgggaaccccggauacguggucggacucccacucgcugcuggguuccaaccccauaagaugagcgggaucauacagaccaccaaccguuacggacagcugacaauccuucacuccaccacagaacaggacugccuugcccuggagggagugcgaacgccaguccuguuuggcuacacuaugcaguccgguugcaaacugaggcuuaccggugcauugcccugucaguugguggcccaaaaagucaagucccugcuuuggggccaaggcuuccccgauuacguggcaccuuuuggcaacucccaagcacaggacaugcuggacugggugcccauccauuuuaucacccaaaguuuuaaccgcaaggacucuugucagcuuccaggcgcccuaguuauugaagugaaguggaccaaauacgggagccugcuuaacccacaagccaaaaucguuaacgugaccgcaaaucuaaucuccuccucuuuuccugaagcaaacuccggaaaugaacgaaccauucugauaucaacugccgugacauucgucgacgucagugccccugccgaagccggauuccgggcuccccccgcuaucaacgccagacuuccuuucaacuucuuuuucccuuuuguguag

SEQ ID NO: 68907 - RNA, 1596 nt, Artificial Sequence
  derived and/or modified sequence
augugccagcugcuagagaguacagucauccaaccucaaggagauucccccgucgcggugcuuugugugugugaucuuuccccagcacagugcgauaucaauuguugcugcgacccggacuguuccucugucgauuucucuguguucucagccugcucuguaccuguggucaccggcgacucccaguucugcucacagaaggcaguuaucuauucucuuaacuucacugccaaucccccacagcgcguguucgagcuuguugaucagauuaacccuuccaucuucugcauucauaucaccaauuauaagcccgcccuuagcuuuauuaaccccgaagugccagacgagaauaauuuugauacacuuaugaagacauccgauggcuucacacucaacgccgaauccuauguaagcuuuacuacaaaauuagauauccccaccgcagcaaaauaugaguacgggguuccccugcagacuagugauagcuuccugcgguuccccuccucccucaccuccucauugugcaccgauaacaacccugccgccuuucugguaaaucaggccgugaagugcaccagaaaaaucaaccucgaacagugcgaggaaauugaagcacuuagcauggcuuucuauucaucaccugaaauccuucgugugccagacucuagaaagaaaguucccauuacgguccaaucaauaguuauucagucccuaaacaagacccuuacccgccgagaggacacugacguccugcaaccuacccuagucaacgcuggacauuucucuuuaugcguaaauguagugcuggaggucaaguacucccugaccuauacagaugcaggggaagugacuaaagccgacuuaaguuucgucuugggaacggucuccucugugguaguaccucuccaacaaaaauucgagauacauuuccuacaagaaaauacacaaccggugccucucaguggcaacccuggcuaugugguagguuugccgcuggcugcaggcuuucagccucauaaaauguccgggauuauccaaaccaccaaccguuacggccaguugacuauucuccacaguacaaccgaacaggacugucuagcgcucgagggugucaggaccccuguauuauuuggguauacuaugcagucagguugcaaacuaaggcuaaccggugcccucccuugccagcuuguugcccaaaaagugaaaucucuacucuggggccagggcuuccccgacuacgucgcuccguucggcaacucucaggcacaagacaugcuggacugggucccuauacauuuuauuacgcagagcuucaaccguaaagacucgugccaacuuccuggugcccuugucauugaagucaaguggacaaaauacggcucucuacucaacccacaggcuaagauugugaacgugaccgcaaaccucaucagcuccuccuuuccagaagcaaauucuggcaacgaacgcacgauccugauuagcacagcgguaaccuuuguggauguaucugcuccagccgaggccgguuuucgcgccccccccgcuauuaacgccaggcucccauucaauuuuuucuuucccuuugucuag

SEQ ID NO: 68908 - protein, 483 aa, Artificial Sequence [sequence omitted]

SEQ ID NO: 68909 - DNA, 1951 bp, Artificial Sequence
  derived and/or modified sequence
atccgccccctgcctcatccaggcttcgccccagtcagtctccggcagcttctcgcggcttcgcaagccccttcccgtgatgccccgcgcctggctgtcgcggttgccgggcaacgcgctgtccatgtcgcgggcctcgctgggactccctgggagatgaggccgcgaggtctcccgccgctcctggtggtgctcctgggctgctgggcctccgtgagcgcccagaccgatgccaccccggcggtgacgacagagggcctcaactccaccgaggcagccctggccaccttcggaactttcccgtcgaccaggccccccgggactcccagggctccagggccctcctccggccccaggcctaccccagtcacggacgggtctcactctgtcactcaggctggagtatagtggcatgatcacagctcactgcagcctcgacctcctaggctcagttgctgttctctgtgtctgtgacttatccccagcacagtgtgacatcaactgctgctgtgatcccgactgcagctccgtggatttcagtgtcttttctgcctgctcagttccagttgtcacgggcgacagccagttttgtagtcaaaaagcagtcatctattcattgaattttacagcaaacccacctcaaagagtatttgaacttgttgaccagattaatccatctattttctgcattcatattacaaactataaacctgcattatcctttattaatccagaagtacctgatgaaaacaattttgatacattgatgaaaacatctgatggttttacattgaatgctgaatcatatgtttccttcacaaccaaactggatattcctactgctgctaaatatgagtatggggttcctctgcagacttcagattcgtttctgagatttccttcgtccctgacatcatctctgtgcactgataataaccctgcagcgtttctggtgaaccaggctgttaagtgcaccagaaaaataaatttagaacagtgtgaagaaattgaagccctcagcatggctttttacagcagcccggaaattctgagggtacctgattcaagaaaaaaggtccctatcactgttcagtccatcgtcattcagtctctaaataaaacgctcacccgacgggaggacactgatgtgctgcagccgactctcgtcaacgctggacactttagcctttgcgtgaatgttgttcttgaggtaaagtacagcctcacatacacagatgcaggtgaagtcaccaaagctgatctctcattcgttctggggacagttagcagcgtagtggtcccactgcagcaaaagtttgaaattcattttcttcaggaaaatacccagccagtccctctcagtggaaaccctggttatgtcgtggggctcccattagctgctggattccagcctcataagactggagctctcccgtgtcagctcgtagcacagaaggtgaagagcctgctgtggggccagggcttcccagattacgtggccccttttggaaattcccaggcccaggacatgctggactgggtgcccatccacttcatcacccagtcattcaacaggaagcattttgttttgcaggattcctgccagctcccaggggctttggttatagaagtgaagtggactaaatacggatccctgctgaatccacaggccaaaatagtcaatgtaactgcaaatctaatttcatcctcctttcctgaggccaactcaggaaatgaaaggacgattcttatttccactgcggttacttttgtggatgtgtctgcacctgcagaggcaggcttcagagctccaccagccatcaatgccaggctgccctttaacttcttcttcccgtttgtttgacaatgctcagatgcatcagttccttaatatacacgtgaaatttgaaaactgtacattcggtgagattaaattttatatacaactagc

SEQ ID NO: 68910 - DNA, 1452 bp, Artificial Sequence
  derived and/or modified sequence
atgattacagcacattgcagcctggatcttcttggctctgtagctgtactttgcgtgtgtgacctgtccccagcacaatgtgatataaactgttgttgcgatcctgattgtagctccgtcgatttctccgttttctccgcctgcagtgtccccgtggtcacaggagatagccagttttgctcgcagaaagctgtgatctactccttgaactttaccgccaaccctcctcagagggttttcgagctggtagaccagatcaacccctcaattttttgtatccatatcacaaactataagcctgccctgtctttcattaaccctgaggtgccagatgaaaacaattttgacacactgatgaagaccagcgacggattcaccctcaatgccgagtcctatgtcagcttcacaaccaagctggatatcccaacagctgccaagtacgaatatggagtgcccttacagacaagcgattctttccttagattcccctcctccttgacatcctccttgtgcaccgataacaatcctgccgcttttctggtgaatcaggctgtgaagtgcactcgcaaaataaacctggagcagtgcgaagaaatagaagccctctccatggcgttttatagctcccccgagatactacgagtgcccgatagcagaaagaaggtgcccatcactgtgcagtccatcgtaatccagtcgcttaataaaaccctgactaggagggaggacactgacgtcttgcaacctacactggtgaacgctgggcattttagcttgtgcgttaatgtggtcttagaagtaaagtatagcctgacttataccgatgctggcgaggtaacaaaggctgatctgtcatttgtgctagggacggtaagttcagtcgtggtgcctctccagcaaaagttcgagattcattttctccaggagaatacacagccggtgcccctttctggtaaccccggttacgtcgttggcctccctctggctgccggtttccaacctcataagactggtgctctgccttgccagctggtggctcaaaaggtgaaatctctcctgtggggtcaggggttccccgattatgttgccccattcggaaattcccaggcgcaggacatgctagactgggtgcccatacacttcataacgcagagctttaacaggaaacatttcgttctgcaggacagctgccagttgccaggcgcactcgtgatcgaagtgaagtggacaaaatacggaagtctgttgaatccacaagccaagatagtaaatgtgacagcgaaccttatatcctcctcattcccagaggcaaatagtggcaatgagcggaccatattgatttcaacagccgtcacattcgtggatgtgtccgctcccgcagaggctggatttcgggctccccctgctatcaatgctcgactgccttttaacttcttctttcccttcgtgtag

SEQ ID NO: 68911 - DNA, 1452 bp, Artificial Sequence
  derived and/or modified sequence
atgatcaccgcccattgctcattggatctgctgggatctgtagctgttctatgcgtttgcgacttatccccggcccagtgcgatattaattgctgctgcgatccagactgttctagcgtcgacttttcagtattttccgcctgctctgtgccagtggtgacaggggactctcagttctgcagccagaaagctgtaatttactctttgaactttacagcaaatcccccccagcgcgtgttcgaattagtggaccagattaatccttcaattttttgcattcacattaccaattacaagccagctctctcgttcattaaccccgaggtccccgatgaaaacaatttcgacactctcatgaagacctcagacggctttaccttgaacgcagaaagttacgtttcttttactaccaaactcgatataccaacagccgctaagtacgagtatggagtgcctcttcaaacctccgattcatttcttcgattcccgtcaagtcttacctccagtctgtgtaccgacaataatcccgccgcattcctggtgaatcaggccgtaaagtgcacccgcaagatcaacctggagcaatgtgaagaaattgaagccctgtcaatggctttctattcatccccggaaatcctcagggtacccgactcccgcaaaaaggttccgataaccgttcaatcgatcgtgatccagagtcttaataagaccctaacccggagagaagatacagatgtcctgcagcctacactagttaacgcaggtcacttctctctatgtgtcaacgtcgtgctggaggtcaaatattctcttacatatacagacgctggggaagttactaaggcagacctgagctttgtgctaggaacagtttcctcagtggtcgttccattacagcagaagtttgagatccactttctgcaagagaacacccaacccgttcctttgagcggaaacccaggatatgtcgtaggattgcctttagccgccggctttcaaccccataaaacgggagcattgccctgccaattggtagcacagaaggtaaaaagcctgctctggggacagggcttccctgattatgttgcccccttcggcaacagccaggcccaagacatgctcgattgggtaccgatccatttcataacccagagctttaaccggaaacactttgtcttgcaggattcatgccaactgccgggggccttagtaattgaggttaagtggactaagtatgggtctttgctcaacccccaggcaaagattgtgaatgtgactgctaatctcatctcttcctcatttccagaggcaaacagcggcaacgagcggacgatcctaatcagtaccgctgtcacttttgtggacgtcagtgctccagccgaagccggtttccgcgcaccacctgctatcaacgcccggctccccttcaacttcttctttcccttcgtgtag

SEQ ID NO: 68912 - DNA, 1452 bp, Artificial Sequence
  derived and/or modified sequence
atgataaccgcccattgttcactcgatcttctcggctccgttgccgttttatgcgtgtgtgacctctccccagctcaatgtgacataaactgttgttgtgatcctgactgttcaagtgtcgacttcagtgttttcagtgcttgcagcgtccctgtcgttacaggagattctcagttttgctctcagaaagcagtaatttactccctgaatttcaccgccaacccccctcagcgggtgttcgaactggtcgaccagattaatccatcaattttctgcatccatattacaaattataagcctgcactgtcctttatcaatccagaagttcccgatgaaaataattttgatacacttatgaaaacctccgatggttttactctcaacgccgagtcctatgtaagcttcaccacaaaactggatattcctactgcggccaagtacgagtatggggtcccccttcagaccagtgattcctttctgcggtttcctagctccttaactagttctctgtgtaccgacaataatcccgccgccttcctcgtcaatcaggcagtaaaatgcacgcgcaaaatcaatctagaacaatgcgaagagatagaagcactgtctatggcattttactcatcacctgaaatcctgagagtgccggactccagaaaaaaagtccctatcacagttcagtctattgttattcaatccctcaacaagacactcacccggcgcgaggataccgatgttctgcagcctacactggtgaatgctggccatttctcactgtgcgtgaatgttgtgcttgaggtcaaatattcactaacctacaccgacgctggcgaagtgaccaaagctgacttatcttttgtactgggaaccgtctcatctgtggtcgtgccgctacagcagaaatttgagatccacttcctgcaggaaaatacacagccagtacctctaagcggcaacccagggtacgtggtggggcttcctttggcagctggattccaaccgcacaaaacaggcgccctcccttgccagctcgtcgcgcagaaagtcaaaagcctcctgtggggacaagggttccccgactacgttgcaccatttgggaattcacaagctcaagatatgctggattgggtaccgattcacttcatcactcaaagcttcaaccgaaagcactttgtactccaggatagttgccaattacctggagcacttgttatcgaggttaaatggactaaatacggtagcctgttgaatcctcaggccaaaattgtgaatgtgacagctaatttaatcagttcatccttccccgaggcaaactccggcaacgagcgcactattcttatctccaccgccgtaacttttgtcgatgtctccgcgccagcagaggctggattcagagcacccccagctattaacgcacgattgcccttcaattttttcttcccttttgtgtag

SEQ ID NO: 68913 - DNA, 1874 bp, Artificial Sequence
  derived and/or modified sequence
cgtgatgccccgcgcctggctgtcgcggttgccgggcaacgcgctgtccatgtcgcgggcctcgctgggactccctgggagatgaggccgcgaggtctcccgccgctcctggtggtgctcctgggctgctgggcctccgtgagcgcccagaccgatgccaccccggcggtgacgacagagggcctcaactccaccgaggcagccctggccaccttcggaactttcccgtcgaccaggccccccgggactcccagggctccagggccctcctccggccccaggcctaccccagtcacggacgggtctcactctgtcactcaggctggagtatagtggcatgatcacagctcactgcagcctcgacctcctaggctcagttgctgttctctgtgtctgtgacttatccccagcacagtgtgacatcaactgctgctgtgatcccgactgcagctccgtggatttcagtgtcttttctgcctgctcagttccagttgtcacgggcgacagccagttttgtagtcaaaaagcagtcatctattcattgaattttacagcaaacccacctcaaagagtatttgaacttgttgaccagattaatccatctattttctgcattcatattacaaactataaacctgcattatcctttattaatccagaagtacctgatgaaaacaattttgatacattgatgaaaacatctgatggttttacattgaatgctgaatcatatgtttccttcacaaccaaactggatattcctactgctgctaaatatgagtatggggttcctctgcagacttcagattcgtttctgagatttccttcgtccctgacatcatctctgtgcactgataataaccctgcagcgtttctggtgaaccaggctgttaagtgcaccagaaaaataaatttagaacagtgtgaagaaattgaagccctcagcatggctttttacagcagcccggaaattctgagggtacctgattcaagaaaaaaggtccctatcactgttcagtccatcgtcattcagtctctaaataaaacgctcacccgacgggaggacactgatgtgctgcagccgactctcgtcaacgctggacactttagcctttgcgtgaatgttgttcttgaggtaaagtacagcctcacatacacagatgcaggtgaagtcaccaaagctgatctctcattcgttctggggacagttagcagcgtagtggtcccactgcagcaaaagtttgaaattcattttcttcaggaaaatacccagccagtccctctcagtggaaaccctggttatgtcgtggggctcccattagctgctggattccagcctcataagggtggagctctcccgtgtcagctcgtagcacagaaggtgaagagcctgctgtggggccagggcttcccagattacgtggccccttttggaaattcccaggcccaggacatgctggactgggtgcccatccacttcatcacccagtcattcaacaggaagcattttgttttgcaggattcctgccagctcccaggggctttggttatagaagtgaagtggactaaatacggatccctgctgaatccacaggccaaaatagtcaatgtaactgcaaatctaatttcatcctcctttcctgaggccaactcaggaaatgaaaggacgattcttatttccactgcggttacttttgtggatgtgtctgcacctgcagaggcaggcttcagagctccaccagccatcaatgccaggctgccctttaacttcttcttcccgtttgtttgacaatgctcagatgcatcagttccttaatatacacgtgaaatttgaaaactgtacattcggtgagattaaattttatatacaacta

SEQ ID NO: 68914 - DNA, 1452 bp, Artificial Sequence
  derived and/or modified sequence
atgatcaccgcccactgcagcctggacctgctgggcagcgtggccgtgctgtgcgtgtgcgacctgagccccgcccagtgcgacatcaactgctgctgcgaccccgactgcagcagcgtggacttcagcgtgttcagcgcctgcagcgtgcccgtggtgaccggcgacagccagttctgcagccagaaggccgtgatctacagcctgaacttcaccgccaaccccccccagagagtgttcgagctggtggaccagatcaaccccagcatcttctgcatccacatcaccaactacaagcccgccctgagcttcatcaaccccgaggtgcccgacgagaacaacttcgacaccctgatgaagaccagcgacggcttcaccctgaacgccgagagctacgtgagcttcaccaccaagctggacatccccaccgccgccaagtacgagtacggcgtgcccctgcagaccagcgacagcttcctgagattccccagcagcctgaccagcagcctgtgcaccgacaacaaccccgccgccttcctggtgaaccaggccgtgaagtgcaccagaaagatcaacctggagcagtgcgaggagatcgaggccctgagcatggccttctacagcagccccgagatcctgagagtgcccgacagcagaaagaaggtgcccatcaccgtgcagagcatcgtgatccagagcctgaacaagaccctgaccagaagagaggacaccgacgtgctgcagcccaccctggtgaacgccggccacttcagcctgtgcgtgaacgtggtgctggaggtgaagtacagcctgacctacaccgacgccggcgaggtgaccaaggccgacctgagcttcgtgctgggcaccgtgagcagcgtggtggtgcccctgcagcagaagttcgagatccacttcctgcaggagaacacccagcccgtgcccctgagcggcaaccccggctacgtggtgggcctgcccctggccgccggcttccagccccacaagaccggcgccctgccctgccagctggtggcccagaaggtgaagagcctgctgtggggccagggcttccccgactacgtggcccccttcggcaacagccaggcccaggacatgctggactgggtgcccatccacttcatcacccagagcttcaacagaaagcacttcgtgctgcaggacagctgccagctgcccggcgccctggtgatcgaggtgaagtggaccaagtacggcagcctgctgaacccccaggccaagatcgtgaacgtgaccgccaacctgatcagcagcagcttccccgaggccaacagcggcaacgagagaaccatcctgatcagcaccgccgtgaccttcgtggacgtgagcgcccccgccgaggccggcttcagagccccccccgccatcaacgccagactgcccttcaacttcttcttccccttcgtgtag

SEQ ID NO: 68915 - DNA, 1452 bp, Artificial Sequence
  derived and/or modified sequence
atgattacagcccactgttcactcgatttactgggaagcgttgcagtactgtgtgtgtgcgacctgagccccgctcaatgcgatatcaactgttgctgcgaccccgactgtagcagcgtggacttttccgtgttctcagcttgttcggtgccagtggttacaggtgactctcaattttgctctcagaaagcagtaatctacagtctgaacttcaccgcaaatcccccccagcgtgttttcgagctggttgatcagatcaatccctctattttttgtattcacatcactaactacaaaccagcgctgtcgttcatcaatcccgaagtgccggatgaaaataatttcgacacgttgatgaagaccagcgatggattcacactgaatgccgagtcctacgtgtccttcactaccaaactcgatataccaactgctgccaagtatgaatatggtgtgcctttgcagacttctgacagcttcttaagatttccgtcttcgttaacaagcagcctgtgtaccgacaataacccagccgcttttctcgtgaatcaggctgtcaaatgcactagaaagattaatctcgaacagtgtgaagaaatcgaagcccttagtatggcgttttacagttccccagaaattctgcgggtccccgactctcgtaaaaaagtgccaatcactgtgcagtctatcgtgatccagtctctgaacaagaccctgacacggagagaagacactgacgtgctgcagcctacgcttgtgaatgcggggcacttcagcctctgcgtgaacgttgtgctggaggtaaaatactctctgacatacacagatgcaggggaggtgacgaaggccgaccttagttttgtacttggcactgtctcatctgtggtggtgccacttcagcagaaattcgaaatacacttcttacaggaaaatacccagcctgtacctttgtcaggaaatccaggttatgtggtgggtctacccctggccgctgggttccagcctcacaaaaccggggccctcccatgccaactggtggcacagaaggtgaagtccctgctctggggccaaggttttcccgactacgtagcccctttcggcaactcacaggctcaagatatgctggattgggtgccaatccacttcatcacacagtcctttaatcggaaacattttgttttgcaagactcctgtcagcttccaggcgccctcgtgatcgaagtgaagtggactaagtacggcagcctgttgaacccccaagctaagatcgttaatgtgaccgccaatttgataagttctagttttcctgaggcaaactcaggaaacgaaagaacaattctaatctcaactgcagtaactttcgtcgatgtatccgccccagccgaagcgggcttccgcgctcctccagccatcaacgccaggctgcctttcaactttttctttccctttgtatag

SEQ ID NO: 68916 - DNA, 1452 bp, Artificial Sequence
  derived and/or modified sequence
atgatcacagcccactgcagcctggacctgctgggctctgtggccgtgctgtgtgtgtgtgacctgagccctgcccagtgtgacatcaactgctgctgtgaccctgactgcagctctgtggacttctctgtgttcagcgcctgcagcgtgcctgtggtgactggagacagccagttctgcagccagaaggccgtcatctacagcctgaacttcaccgccaaccccccccagagggtgtttgagctggtggaccagatcaaccccagcatcttctgcatccacatcaccaactacaagccagccctgtccttcatcaaccctgaggtgcctgatgagaacaactttgacaccctgatgaagaccagtgatggcttcaccctgaatgctgagagctatgtgtccttcaccaccaagctggacatccccacagctgccaagtatgaatatggagtgcccctgcagaccagtgacagcttcctgcgcttccccagcagcctgaccagcagcctgtgcacagacaacaacccagctgccttcctggtgaaccaggccgtgaagtgcaccaggaagatcaacctggagcagtgtgaggagattgaggccctgtccatggccttctacagcagccctgagatcctgcgggtgcctgacagcaggaagaaggtgcccatcaccgtgcagagcatcgtcatccagagcctgaacaagaccctgacccggcgggaggacacagatgtgctgcagcccaccctggtgaatgccggccacttcagcctgtgtgtgaatgtggtgctggaggtgaagtacagcctgacctacacagatgctggggaggtgaccaaggctgacctgagctttgtgctgggcaccgtgtcctctgtggtggtgcccctgcagcagaagtttgagatccacttcctgcaggagaacacccagcctgtgcccctgagcggcaaccctggctacgtggtgggcctgcccctggccgccggcttccagccccacaagacaggagccctgccctgccagctggtggcccagaaggtgaagagcctgctgtggggccagggcttcccagactatgtggccccctttggaaacagccaggcccaggacatgctggactgggtgcccatccacttcatcacccagagcttcaacaggaagcactttgtgctgcaggacagctgccagctgcccggggccctggtgattgaggtgaagtggaccaagtatggcagcctgctgaacccccaggccaagatcgtgaatgtgacagccaacctgatcagcagcagcttccctgaggccaacagcggaaatgaaagaaccatcctgatcagcacagctgtgacctttgtggatgtgtctgccccagctgaggccggcttccgggcccccccagccatcaatgcccggctgcccttcaacttcttcttcccctttgtgtag

SEQ ID NO: 68917 - DNA, 1452 bp, Artificial Sequence
  derived and/or modified sequence
atgatcaccgcccactgcagcctggacctgctgggcagcgtggccgttctatgcgtgtgcgatcttagccctgcgcagtgcgacataaactgctgctgcgatccggattgctcaagcgtggactttagtgtattctctgcgtgttctgtgccagttgtgaccggcgattcccagttctgttctcaaaaggcagtgatctactcacttaattttaccgccaacccaccgcagcgagtgttcgagttagtggatcagattaatccatctatattctgcatccatattacaaactacaaacccgcgttgtccttcatcaatccagaagttcccgacgagaacaatttcgatacccttatgaaaacttctgatggctttaccctgaatgctgagagctatgtctccttcactacgaagcttgatattcctactgctgccaagtatgagtacggcgtgccgcttcaaacgtctgattctttccttagattcccctcttctctgacctcctccttgtgtaccgacaataaccctgctgcattcttagtgaatcaggcagtgaagtgcacgcgtaagatcaatctcgaacagtgtgaagaaatagaagcattatcaatggctttttactcgagtcctgaaattctacgggtccccgattccaggaaaaaagttcccataactgtccagagcattgtaattcagagcctgaataaaaccctgacccgccgcgaggatactgatgtcttacagcctacactcgttaatgctggacacttcagtttgtgtgttaatgtggtgctggaagtgaagtactccctgacatacacggacgcaggagaagtcaccaaggcggacctcagtttcgtcctgggtactgtctctagtgtggtcgttcccctgcaacaaaagtttgaaatacacttcctccaagagaacacccagcccgtgccactgtctggaaaccctggctacgttgtcggattgcctcttgctgcaggcttccagccgcacaaaactggtgccttaccttgccagcttgtggctcagaaggtcaagtcgctcctctggggccagggttttccggactacgtggcacctttcggaaactcccaggcgcaagacatgctggattgggtgccaattcactttattacacagagcttcaaccgcaaacattttgtgctacaggactcgtgccaactccccggggcactggtcattgaagttaaatggacaaagtacggtagcctgcttaacccccaggcgaagattgttaacgtcacagcaaaccttatctcctcctcctttcccgaggcaaatagcggcaacgagcggaccattttaatatctactgctgttacattcgtggacgtgagtgcacctgctgaagctggcttcagagcccctccggcaatcaacgcacgacttccattcaatttcttcttccctttcgtgtag

SEQ ID NO: 68918 - RNA, 1452 nt, Artificial Sequence
  derived and/or modified sequence
augaucaccgcccauugcucauuggaucugcugggaucuguagcuguucuaugcguuugcgacuuauccccggcccagugcgauauuaauugcugcugcgauccagacuguucuagcgucgacuuuucaguauuuuccgccugcucugugccaguggugacaggggacucucaguucugcagccagaaagcuguaauuuacucuuugaacuuuacagcaaaucccccccagcgcguguucgaauuaguggaccagauuaauccuucaauuuuuugcauucacauuaccaauuacaagccagcucucucguucauuaaccccgagguccccgaugaaaacaauuucgacacucucaugaagaccucagacggcuuuaccuugaacgcagaaaguuacguuucuuuuacuaccaaacucgauauaccaacagccgcuaaguacgaguauggagugccucuucaaaccuccgauucauuucuucgauucccgucaagucuuaccuccagucuguguaccgacaauaaucccgccgcauuccuggugaaucaggccguaaagugcacccgcaagaucaaccuggagcaaugugaagaaauugaagcccugucaauggcuuucuauucauccccggaaauccucaggguacccgacucccgcaaaaagguuccgauaaccguucaaucgaucgugauccagagucuuaauaagacccuaacccggagagaagauacagauguccugcagccuacacuaguuaacgcaggucacuucucucuaugugucaacgucgugcuggaggucaaauauucucuuacauauacagacgcuggggaaguuacuaaggcagaccugagcuuugugcuaggaacaguuuccucaguggucguuccauuacagcagaaguuugagauccacuuucugcaagagaacacccaacccguuccuuugagcggaaacccaggauaugucguaggauugccuuuagccgccggcuuucaaccccauaaaacgggagcauugcccugccaauugguagcacagaagguaaaaagccugcucuggggacagggcuucccugauuauguugcccccuucggcaacagccaggcccaagacaugcucgauuggguaccgauccauuucauaacccagagcuuuaaccggaaacacuuugucuugcaggauucaugccaacugccgggggccuuaguaauugagguuaaguggacuaaguaugggucuuugcucaacccccaggcaaagauugugaaugugacugcuaaucucaucucuuccucauuuccagaggcaaacagcggcaacgagcggacgauccuaaucaguaccgcugucacuuuuguggacgucagugcuccagccgaagccgguuuccgcgcaccaccugcuaucaacgcccggcuccccuucaacuucuucuuucccuucguguag

SEQ ID NO: 68919 - RNA, 1452 nt, Artificial Sequence
  derived and/or modified sequence
augauaaccgcccauuguucacucgaucuucucggcuccguugccguuuuaugcgugugugaccucuccccagcucaaugugacauaaacuguuguugugauccugacuguucaagugucgacuucaguguuuucagugcuugcagcgucccugucguuacaggagauucucaguuuugcucucagaaagcaguaauuuacucccugaauuucaccgccaaccccccucagcggguguucgaacuggucgaccagauuaauccaucaauuuucugcauccauauuacaaauuauaagccugcacuguccuuuaucaauccagaaguucccgaugaaaauaauuuugauacacuuaugaaaaccuccgaugguuuuacucucaacgccgaguccuauguaagcuucaccacaaaacuggauauuccuacugcggccaaguacgaguauggggucccccuucagaccagugauuccuuucugcgguuuccuagcuccuuaacuaguucucuguguaccgacaauaaucccgccgccuuccucgucaaucaggcaguaaaaugcacgcgcaaaaucaaucuagaacaaugcgaagagauagaagcacugucuauggcauuuuacucaucaccugaaauccugagagugccggacuccagaaaaaaagucccuaucacaguucagucuauuguuauucaaucccucaacaagacacucacccggcgcgaggauaccgauguucugcagccuacacuggugaaugcuggccauuucucacugugcgugaauguugugcuugaggucaaauauucacuaaccuacaccgacgcuggcgaagugaccaaagcugacuuaucuuuuguacugggaaccgucucaucuguggucgugccgcuacagcagaaauuugagauccacuuccugcaggaaaauacacagccaguaccucuaagcggcaacccaggguacgugguggggcuuccuuuggcagcuggauuccaaccgcacaaaacaggcgcccucccuugccagcucgucgcgcagaaagucaaaagccuccuguggggacaaggguuccccgacuacguugcaccauuugggaauucacaagcucaagauaugcuggauuggguaccgauucacuucaucacucaaagcuucaaccgaaagcacuuuguacuccaggauaguugccaauuaccuggagcacuuguuaucgagguuaaauggacuaaauacgguagccuguugaauccucaggccaaaauugugaaugugacagcuaauuuaaucaguucauccuuccccgaggcaaacuccggcaacgagcgcacuauucuuaucuccaccgccguaacuuuugucgaugucuccgcgccagcagaggcuggauucagagcacccccagcuauuaacgcacgauugcccuucaauuuuuucuucccuuuuguguag

SEQ ID NO: 68920 - protein, 1326 aa, Artificial Sequence
  derived and/or modified sequence
MTEESSDVPRELIESIKDVIGRKIKISVKKKVKLEVKGDKVENKVLVLTSCRAFLVTARIPTKLELTFSYLEIHGVVCSKSAQMIVETEKCSISMKMASPEDVSEVLAHIGTCLRKIFPGLSPVRIMKKVSMEPSERLASLQALWDSQTVAEQGPCGGFSQMYACVCDWLGFSYREEVQWDVDTIYLTQDTRELNLQDFSHLDHRDLIPIIAALEYNQWFTKLSSKDLKLSTDVCEQILRVVSRSNRLEELVLENAGLRTDFAQKLASALAHNPNSGLHTINLAGNPLEDRGVSSLSIQFAKLPKGLKHLNLSKTSLSPKGVNSLSQSLSANPLTASTLVHLDLSGNVLRGDDLSHMYNFLAQPNAIVHLDLSNTECSLDMVCGALLRGCLQYLAVLNLSRTVFSHRKGKEVPPSFKQFFSSSLALMHINLSGTKLSPEPLKALLLGLACNHNLKGVSLDLSNCELRSGGAQVLEGCIAEIHNITSLDISDNGLESDLSTLIVWLSKNRSIQHLALGKNFNNMKSKNLTPVLDNLVQMIQDEESPLQSLSLADSKLKTEVTIIINALGSNTSLTKVDISGNGMGDMGAKMLAKALQINTKLRTVIWDKNNITAQGFQDIAVAMEKNYTLRFMPIPMYDASQALKTNPEKTEDALQKIENYLLRNHETRKYLQEQAYRLQQGIVTSTTQQMIDRICVKVQDHLNSLRNCGGDAIQEDLKSAERLMRDAKNSKTLLPNLYHVGGASWAGASGLLSSPIQETLESMAGEVTRVVDEQLKALLESMVDAAENLCPNVMKKAHIRQDLIHASTEKISIPRTFVKNVLLEQSGIDILNKISEVKLTVASFLSDRIVDEILDALSHCHHKLADHFSRRGKTLPQQESLEIELAEEKPVKRSIITVEELTEIERLEDLDTCMMTPKSKRKSIHSRMLRPVSRAFEMEFDLDKALEEVPIHIEDPPFPSLRQEKRSSGFISELPSEEGKKLEHFTKLRPKRNKKQQPTQAAVCAANIVSQDGEQNGLMGRVDEGVDEFFTKKVTKMDSKKWSTRGSESHELNEGGDEKKKRDSRKSSGFLNLIKSRSKSERPPTILMTEEPSSPKGAVRSPPVDCPRKDTKAAEHNGNSERIEEIKTPDSFEESQGEEIGKVERSDSKSSPQAGRRYGVQVMGSGLLAEMKAKQENRFGLGTPEKNTKAEPKAEAGSRSRSSSSTPTSPKPLLQSPKPSLAARPVIPQKPRTASRPDDIPDSPSSPKVALLPPVLKKVPSDKERDGQSSPQPSPRTFSQEVSRRSWGQQAQEYQEQKQRSSSKDGHQGSKSNDSGEEAEKEFIFV

SEQ ID NO: 68921 - DNA, 3981 bp, Artificial Sequence
  derived and/or modified sequence
atgaccgaagagagttctgatgtgccaagggaactgatcgagtcgatcaaagatgttattgggcgcaagataaagatttccgtcaagaaaaaagtgaaattggaggtcaaaggtgataaggttgaaaataaggtcctcgtcctgacttcctgcagagccttccttgttactgcacgaatcccaacaaagttagaactcaccttttcctacctggaaattcatggggttgtctgctcaaagtctgctcaaatgatcgtggaaaccgaaaagtgcagcatttccatgaaaatggcctctcccgaggatgtaagcgaggtgctggcgcatatcggcacttgcctgagaaagatcttcccgggtctgtcaccagtacgcattatgaagaaagtgtcaatggaaccgagcgagcgtctcgcatctctacaggccctgtgggattcccaaacagtggcagaacagggaccttgtggcggttttagccagatgtacgcttgtgtatgtgactggttgggcttcagctaccgagaggaggtccagtgggatgttgacaccatctatttgacccaggacaccagagaattgaacctgcaggatttttcgcaccttgatcaccgggacttgattcctattatcgccgcattagagtataaccaatggttcaccaagctgtctagcaaggacctgaaattgagcactgatgtctgcgaacagatactccgtgtggtgtctagatcaaatcggctcgaggagctggttctcgagaacgcgggcctgcggaccgatttcgcgcagaaattggcgagtgccctcgcgcacaatcctaattccggccttcatacaataaatcttgctggcaatcctcttgaggatcggggagtgtcttctttgtccattcagttcgctaagcttcctaaagggttaaaacacctcaatctcagcaaaacttcactgagccccaaaggggtgaacagtctctcacaatccttgagcgctaatcctctgaccgctagcaccttggtgcatctcgacctcagtggaaatgtcctgaggggcgacgacctgagccacatgtacaactttttggcacagccgaatgctatcgtgcacttggatttatcaaacactgagtgtagcctggacatggtgtgtggagctttactcaggggctgtctgcaatacttagccgtcctcaatctgtctcgaacggttttttcacataggaaggggaaggaggtgcccccttccttcaagcagttcttttcatcatccctcgctttaatgcatatcaatctctctggcaccaaactgtcacctgaaccattaaaagctctgcttctcgggttggcttgtaaccacaatctcaaaggggtgtccctggacctgtccaactgcgagttgcggtcaggaggtgcccaggtattggaagggtgtattgctgagatccataatataacgtccctcgatatcagcgataatggactggaatccgatctgagcacacttattgtatggctgtccaaaaaccgttcaattcagcatcttgcgcttgggaaaaattttaacaatatgaaatcgaaaaatcttacacccgtgctggataacttggttcaaatgatacaagacgaggaatctcctctacagagccttagtctggccgactcgaagctgaagaccgaagtgaccataatcatcaatgcattgggctccaacactagtctgactaaggtggacattagtgggaatggcatgggcgatatgggagccaagatgctagctaaagcactgcagataaacaccaagctcagaaccgtaatttgggataagaacaacattaccgcacagggcttccaggacatcgctgtggcaatggagaaaaattacactctgcgcttcatgcctattccgatgtatgacgcttcgcaggcgctcaaaacaaatcccgaaaagaccgaagatgctttgcagaagatcgagaactatctgctccgtaaccacgagaccaggaaatatttgcaggagcaggcatatcgcttacagcaggggattgtgacttccacaacccaacagatgattgatcggatttgcgtgaaagtgcaggaccatctgaattccctgcgcaactgtgggggtgatgcaattcaagaagatctgaagtccgctgaacgactcatgcgggacgccaagaattctaagaccttacttccaaatctctatcatgtcggcggggcaagctgggccggggcatctggactcctgagttccccaatccaggaaaccctggaatccatggccggggaagtgacgcgcgttgtcgacgaacaattaaaagccctgctggaaagcatggtcgacgccgccgagaatctttgcccgaacgtgatgaaaaaggcacacattcgacaggatctcatccatgcctccacagagaagatctctatccctaggacgttcgtgaaaaacgtacttctggagcagagcggaatagatatactcaacaagattagcgaagtgaaactgaccgtagcatctttcctgtcagaccgaatcgtggatgagatcctggacgccttgtcacactgtcaccataagctggccgaccatttttctagacgcggcaaaaccttgcctcagcaggaaagcctggagatcgaattagctgaagagaaacccgtcaagagaagtattataacagttgaggagttgacagagatagaaagactagaggatctcgacacctgtatgatgactccaaagtctaaaagaaaaagtatacacagcaggatgttgcgtccagtctcaagggcctttgagatggagtttgacctagacaaggctctcgaagaggtcccgatccacattgaagatcctccgttcccgagcttgaggcaggaaaagagatcatccgggtttatttctgaactccctagtgaagagggaaagaaacttgaacatttcaccaagcttcgaccaaaacgaaataagaagcaacagccaacgcaggcagctgtttgcgcggcgaatatcgtcagccaggacggagaacagaatggattaatgggacgggttgacgaaggcgtggatgagttcttcactaagaaggttactaagatggatagtaagaagtggagcacaagggggtccgagagccatgaacttaacgaaggaggggatgaaaagaagaaacgagatagccgtaagtcctccggttttctcaatctgattaaatccaggtcaaaatctgagcggccacccacaatcctgatgacagaggaaccatccagtcctaagggcgcagttaggtccccccctgtggattgtcctcgtaaggatactaaagccgctgagcataatggaaacagcgaacgaatagaggaaatcaagacacccgacagttttgaagagtcccagggcgaggagataggaaaagtagaaagaagtgactctaagtccagcccccaggccggccggcgttacggtgtccaggttatgggttccggcctgctagcggagatgaaggcgaaacaagagaaccgatttggacttggaactccagaaaagaatacaaaggccgagccaaaggcggaggccgggagccgctcacgatcaagttcaagtactcccactagccccaagccgctcctgcaaagccctaaaccaagcctggccgctcggccggtgatcccacaaaagcctcgtaccgcctctcgcccggacgatatacccgattccccctcatctccaaaggttgcactcctgccgccagtgctaaaaaaggtgccatcggataaagagcgcgacgggcagtctagcccacagccttctcccagaacgttctcccaagaagtctcccgaaggtcatggggccagcaggcccaggaatatcaggaacagaaacagagatcctcctccaaagatgggcatcaggggtccaagagcaacgattcgggtgaagaggcagagaaggaatttatattcgtctag

SEQ ID NO: 68922 - DNA, 3981 bp, Artificial Sequence
  derived and/or modified sequence
atgacagaggagagcagtgatgtgccccgggagctgattgagagcatcaaggatgtgattggaaggaagatcaagatctctgtgaagaagaaggtgaagctggaggtgaagggggacaaggtggagaacaaggtgctggtgctgaccagctgccgggccttcctggtgacagcccgcatccccaccaagctggagctgaccttctcctacctggagatccacggcgtggtgtgcagcaagagcgcccagatgattgtggagacagagaagtgcagcatctccatgaagatggccagcccagaagatgtgtctgaggtgctggcccacatcggcacctgcctgaggaagatcttccctggcctgagccctgtgcgcatcatgaagaaggtgtccatggagcccagcgagcggctggccagcctgcaggccctgtgggacagccagacagtggccgagcagggcccctgtggcggcttcagccagatgtatgcctgtgtgtgtgactggctgggcttctcctaccgggaggaggtgcagtgggatgtggacaccatctacctgacccaggacacccgggagctgaacctgcaggacttcagccacctggaccaccgggacctgatccccatcatcgccgccctggagtacaaccagtggttcaccaagctgagcagcaaggacctgaagctgagcacagatgtgtgtgagcagatcctgcgggtggtgagccgcagcaaccggctggaggagctggtgctggagaatgccggcctgaggacagactttgcccagaagctggccagcgccctggcccacaaccccaacagcggcctgcacaccatcaacctggccggcaaccccctggaggaccggggcgtgagcagcctgagcatccagtttgccaagctgcccaagggcctgaagcacctgaacctgagcaagaccagcctgagccccaagggcgtgaacagcctgagccagagcctgagcgccaaccccctgacagccagcaccctggtgcacctggacctgtctggaaatgtgctgcggggagatgacctgagccacatgtacaacttcctggcccagcccaatgccatcgtgcacctggacctgagcaacacagagtgcagcctggacatggtgtgtggggccctgctgcggggctgcctgcagtacctggccgtgctgaacctgagcaggacagtgttcagccacaggaagggcaaggaggtgcccccatccttcaagcagttcttcagcagcagcctggccctgatgcacatcaacctgagcggcaccaagctgagccctgagcccctgaaggccctgctgctgggcctggcctgcaaccacaacctgaagggcgtgtccctggacctgagcaactgtgagctgcggagcggcggggcccaggtgctggagggctgcatcgccgagatccacaacatcaccagcctggacatcagtgacaatggcctggagagtgacctgagcaccctcatcgtgtggctgagcaagaacagaagcatccagcacctggccctgggcaagaacttcaacaacatgaagagcaagaacctgacccctgtgctggacaacctggtgcagatgatccaggatgaggagagccccctgcagagcctgagcctggccgacagcaagctgaagacagaggtgaccatcatcatcaatgccctgggcagcaacaccagcctgaccaaggtggacatctctggaaatggcatgggagacatgggcgccaagatgctggccaaggccctgcagatcaacaccaagctgaggacagtcatctgggacaagaacaacatcacagcccagggcttccaggacattgctgtggccatggagaagaactacaccctgcgcttcatgcccatccccatgtatgatgccagccaggccctgaagaccaaccctgagaagacagaagatgccctgcagaagattgagaactacctgctgagaaatcatgagaccaggaagtacctgcaggagcaggcctaccgcctgcagcagggcatcgtgaccagcaccacccagcagatgattgaccgcatctgtgtgaaggtgcaggaccacctgaacagcctgaggaactgtggaggagatgccatccaggaggacctgaagtctgctgagcggctgatgagagatgccaagaacagcaagaccctgctgcccaacctgtaccacgtgggcggggcctcctgggccggggccagcggcctgctgagcagccccatccaggagaccctggagagcatggccggggaggtgaccagggtggtggatgagcagctgaaggccctgctggagagcatggtggatgctgctgagaacctgtgccccaacgtgatgaagaaggcccacatccggcaggacctgattcatgccagcacagagaagatcagcatccccaggacctttgtgaagaatgtgctgctggagcagagcggcatcgacatcctgaacaagatcagcgaggtgaagctgactgtggccagcttcctgagtgacagaattgtggatgagatcctggatgccctgagccactgccaccacaagctggccgaccacttcagccggcggggcaagaccctgccccagcaggagagcctggagattgagctggccgaggagaagcctgtgaagaggagcatcatcaccgtggaggagctgacagaaattgaaaggctggaggacctggacacctgcatgatgacccccaagagcaagaggaagagcatccacagcaggatgctgcggcctgtgtcccgggcctttgagatggagtttgacctggacaaggccctggaggaggtgcccatccacatcgaggacccccccttccccagcctgcggcaggagaagaggagcagcggcttcatcagcgagctgcccagcgaggagggcaagaagctggagcacttcaccaagctgcggcccaagaggaacaagaagcagcagcccacccaggccgctgtgtgtgccgccaacatcgtgtcccaggatggagagcagaatggcctgatgggccgggtggatgaaggagtggatgagttcttcaccaagaaggtgaccaagatggacagcaagaagtggagcacccggggcagcgagagccatgagctgaatgaaggaggagatgagaagaagaagagggacagcaggaagagcagcggcttcctgaacctgatcaagagccgcagcaagtctgagaggcctcccaccatcctgatgacagaggagcccagcagccccaagggagctgtgcgcagcccccctgtggactgccccaggaaggacaccaaggctgctgagcacaatggaaacagcgagagaattgaggagatcaagaccccagacagctttgaggagagccagggcgaggagatcggcaaggtggagaggagtgacagcaagagcagcccccaggccggccgccgctatggagtgcaggtgatgggcagcggcctgctggccgagatgaaggccaagcaggagaacagatttggcctgggcaccccagagaagaacaccaaggccgagcccaaggccgaggccggcagccgcagccgcagcagcagcagcacccccaccagccccaagcccctgctgcagagccccaagcccagcctggccgcccggcctgtgatcccccagaagcccaggacagccagcaggccagatgacatcccagacagccccagcagccccaaggtggccctgctgccccctgtgctgaagaaggtgcccagcgacaaggagagagatggccagagcagcccccagcccagccccaggaccttcagccaggaggtgagccgccgctcctggggccagcaggcccaggagtaccaggagcagaagcagaggagcagcagcaaggatggccaccagggcagcaagagcaatgattctggagaggaggccgagaaggagttcatctttgtgtag

SEQ ID NO: 68923 - DNA, 5296 bp, Artificial Sequence
  derived and/or modified sequence
tgggcgggagctacgccggcccaagccccgccggggaccagcgagccgggaggaggagcaggcgccacagccgccccgcgccccgcgcccgcttgtaatccggtccgctccttattcagccgccgggaactgcgaggaggcgtcatgtagcagcagcagcaaatccgcctcgcatttgcaactcttttttttttttttggtggggcggggggcgcgcggcaaaattctgtctccgcccccccttttcttgcccacttccatttgcaagctgcatctgcctctctaaaaaaattgaggagttcggggaagggcagggggccataaatcagagttggacctgcaataacccccacacctacagggcaaccatgaccgaggagagctctgacgttcccagggagttgatagaaagcataaaggatgttattggcagaaagataaaaatttcagtgaagaagaaagtaaagttggaagttaagggagacaaagttgaaaacaaagtgctggtccttacatcatgccgagccttccttgtaacagcgcgaatccccaccaagctcgagttaaccttcagctacttggagattcatggcgtcgtttgcagcaagtcagctcagatgattgtggaaactgagaagtgcagcatttccatgaagatggcgtcacccgaggacgtgagtgaggtgctggctcacataggcacctgcctgaggaagatatttcctggcctctctccagtgagaatcatgaaaaaagtctccatggagccatctgagcgcctggctagtctccaggcgctgtgggacagccagaccgtggctgagcagggcccctgtggtggattttctcagatgtatgcctgtgtttgtgactggcttggattttcatacagggaagaagtacaatgggatgtggatacaatttatcttacccaagacaccagggaattgaatttacaagattttagtcatcttgaccacagggacctaatacctatcattgctgctctggaatataatcagtggttcacaaaactgtcctctaaggatctaaaactgtccactgatgtctgtgaacagatcttgagggtggtgagtaggtccaatcgactggaagaattggtgttggaaaatgctggacttagaacagattttgcacaaaaactggccagtgctctagcacataatcccaactcaggactccacacaattaaccttgctggcaacccactggaggatagaggtgtgtcctctttaagtattcaatttgccaaactcccaaagggattaaagcacttaaatttatctaaaacctcattatcacctaaaggggtgaacagcctttctcagtcactcagtgccaatccattgaccgcctctacccttgtccacctcgacctctcagggaacgtccttcgtggagatgacctctcacacatgtataattttttggcccagccaaatgccattgttcatctggatttatccaatacagaatgttccctggacatggtctgtggagctcttctccgtggatgccttcaatatttagctgtgctcaacctctccagaactgtcttctctcaccggaaaggaaaagaagtacctccatctttcaagcaattttttagtagttctctggctttgatgcacatcaacctttcaggcacaaaactgtctcctgagcccttaaaagcactgttattgggcctggcttgtaatcataacttgaaaggggtttctctggatctcagcaactgtgagctgagatcaggaggtgctcaagtattagaaggttgcattgctgaaatacacaacatcaccagcttagacatctctgacaatggtttagaatctgacctatctaccttaatagtgtggctcagtaaaaacagatcaatacaacacctggcgttaggcaaaaattttaataatatgaaatccaaaaatctgacacctgtattggacaacttagtacagatgattcaagatgaagaatcacctctgcagtccttgtccctggctgactcgaaactcaagactgaggtcaccatcatcatcaatgccctgggaagcaacacctccctgaccaaagtggacattagcggcaacggaatgggggacatgggagcgaagatgctggccaaagcactgcagatcaacactaagctcaggactgtaatatgggacaagaacaacatcactgcacaaggctttcaggatatagctgttgctatggaaaagaactacacattaagatttatgccaattcctatgtatgatgcttctcaagccctaaaaacaaaccctgaaaaaacagaagacgctctgcaaaagatagaaaactacctgctacgaaatcacgagactagaaaataccttcaagagcaggcctaccgcctgcagcagggtattgtcaccagcaccacccagcagatgattgacagaatatgtgtgaaagtacaagatcatctcaactccttacgaaattgtgggggagacgctatccaggaagatttaaaatcagcagagcggctcatgcgtgatgctaagaactctaaaacgttgttaccaaatttataccatgttggtggtgcatcttgggcgggagccagtggcttactatccagtccaattcaggagaccctggaatcaatggctggagaagttacaagagtagtagatgaacaactaaaggcgttgcttgagtccatggttgatgctgctgagaatctttgtcccaatgtgatgaaaaaagcccacattcgacaagacttgattcatgccagcaccgaaaagatttctattccacgtacctttgttaaaaatgtcctgttggagcagtctggaattgatatccttaacaaaattagtgaagtaaaattgacagtggcctcgttcctgtctgatagaattgtggatgaaatcctggatgcactctcacattgccatcataaactggctgaccatttcagcagacgtggcaagacccttcctcaacaagaatccttagagatcgagctggctgaggagaagccagttaaacgttccatcatcacagtggaggagctaacagagatagagcgtttggaagatctggatacctgtatgatgacccctaaatccaaaaggaagagtatccatagccgaatgctgcggcctgtttctagggcttttgaaatggagtttgatctagataaagcgctggaagaggtaccaattcacatcgaagacccgcccttcccatccctcagacaggagaagcggagctcgggatttatctctgagttgccctctgaagaggggaagaagctggaacactttaccaagttaaggccaaaaaggaataagaagcagcaacccacccaagcagcggtctgtgctgccaacatagtctcacaagatggtgaacagaatggtctcatggggagagtggatgaaggtgtagatgaattttttaccaagaaggtgaccaaaatggattccaagaaatggtcaacaagaggctcagagtcccatgagcttaatgaaggaggagatgaaaagaaaaagcgagattctcggaaaagtagtggctttctcaatttaatcaaatcccggtccaaatccgagcgaccaccaacgatcttgatgacagaagaaccctcctcaccaaaaggggcagtcagaagtccacctgtggactgtcccaggaaggacacaaaggccgccgagcacaatggcaattctgaacggatagaggagataaaaacacctgactcctttgaagagagtcaaggggaagaaatagggaaggtggaacggagtgacagcaagagcagcccacaggcagggcggaggtatggggtccaggtgatgggcagtggtctgctggcagagatgaaagccaagcaagagaaccgctttggtttgggaacaccagaaaagaataccaaagcagaacccaaagcggaagcaggctccaggtctcggagctcatccagcacacctacgagcccgaagcccctcctgcagtcccccaaacccagtctggcagcacggcccgtcatcccgcagaaaccaagaaccgcctcacggcctgatgacattccagactctccatctagcccgaaagttgcccttcttccacctgtcctgaaaaaagttccttcagacaaagagagagatggccagagtagcccccagcccagccccaggacattttcacaggaagtttcaaggagaagctggggccagcaggcccaggagtatcaagaacaaaagcaacggtcctccagtaaagatggccatcaaggcagcaaatctaatgactccggggaagaagcagaaaaagagtttatttttgtgtaaaggtcacccacgcagaagtcttcctgtgcagggtgctttggtagccatcagagaggaaccaagggcaacatcttttcttcccaggcgttcttctctgggtgctttattctcttctttttctttatttcgcccccacccccatcccctgccttttttttttttttttttttttttttttgtatagaaacagatccatttcttggtaatcaaagcacatttgtttggtcttcctccaaccctttgcatttgatttctaaacattccttcatatgcctttaatgaaagccagcaattatcccatgggccctacttgaatttatctgaggcagctacagattgccctgcaagatgagtttttggagataaatgaaataactggacacacactcacacaagtaacaccacagcagacctcggagtactgctaagtgtacctgtgtcaaatccgcacaggactcaatatagcaatttattcttgatgtatgcaattgcacattgtaattatattaacagagcacactaataatttgtatagattatatatattagatcttgggtatggtttttaccttctcccatggggaacttcttccttcctgatgtggaattgtacatttaaagcttggtcggtgacctttgcataccatcaacgagcacagctaagaacagagtgagagaggcccatggctgattttaccatgtgcccagattaatgtatatagttgattggaatgaggttttatgaatattcatgtttttgaaggcctttaatttctgtctgcatattagcttttaatgtgtgattttaagagagaatactttgacacctgtaaaaatcaaaatactactctttataagacatttcacaaatattcacttacattacaggctggaagtattttattcatatgtatatttataccaataaaatgattttacaagtggaa

SEQ ID NO: 68924 - DNA, 3981 bp, Artificial Sequence
  derived and/or modified sequence
atgaccgaggagagcagcgacgtgccccgggagctgatcgagagcatcaaggacgtaatcggacggaaaatcaaaatctctgtaaaaaagaaggtgaagctagaggtgaagggggacaaagtcgaaaataaggtgctggtgttaacttcgtgtagagcatttctggtcactgcgaggattcccaccaagctggaacttacgttcagctacctggaaattcacggcgtggtttgttctaaatcggctcagatgattgttgaaaccgaaaaatgcagcatctccatgaagatggccagccctgaggacgtgtccgaagtcctggcgcatattggaacatgccttcgtaagatttttcccggcttatctcctgtacgtatcatgaaaaaggtttctatggagccctccgaaaggttggcttcactccaagctttatgggattcccagaccgtggcagagcagggcccctgtggtgggttctcacaaatgtatgcgtgcgtatgtgactggctcggtttctcctatcgcgaggaagtccagtgggacgtagacaccatctacttaacccaggacacacgggaacttaacctccaagatttttctcacctcgatcaccgggacttgattccgatcattgccgccctcgagtacaaccaatggttcacaaagctgtcaagcaaagacctgaagttatcaaccgacgtgtgtgagcagatcctgagagttgtgagccgttccaacaggctcgaagaacttgtgctcgaaaacgctgggctgagaacggattttgcgcagaagctggcaagcgctctggcgcacaaccccaattcgggcctgcataccatcaacctggctggcaacccccttgaagatagaggagtaagttctctatccatacagtttgcgaaactccccaagggactgaagcacctcaatctgagtaagacatctctgtcacccaagggagtcaatagcttaagtcaatcactgtctgcgaacccactaacagctagcacactggtgcatctggacctgtccggaaatgtgctgcgcggtgatgacctgtcacatatgtataacttcctggcccaacctaatgccattgtgcacctggacctgagcaataccgagtgcagccttgatatggtctgcggcgcccttttgcggggatgtctccaatacctcgctgtgctgaacttgtctcgaacagtgttcagccatcgaaagggcaaagaggtgcctccttctttcaagcaattctttagtagtagcctcgccctcatgcacatcaatctctctggcactaagctctcccccgagcctctgaaggccctgctgctgggcctggcgtgtaatcacaatctgaaaggcgtaagcctcgatctgtcaaactgcgagctgagatccggcggtgctcaggtgctggaggggtgtatcgccgagattcataatatcacttctctggatatcagcgataatgggctggagtccgatctgagtacattaatcgtgtggctgtccaaaaaccggtctatccagcacttagccttggggaaaaattttaacaatatgaaatccaaaaaccttaccccagttctggataacctcgttcagatgatacaagatgaggaaagccctctccagtccttaagcctagccgactcaaaacttaaaaccgaggtgaccattatcataaatgccctcggaagtaatacaagccttacaaaagtggacatcagtggcaacgggatgggggacatgggggccaaaatgctggccaaggctttgcagattaacactaaactaagaacagtgatttgggacaaaaacaacataacagcacagggtttccaggacatcgcggttgctatggaaaaaaactacacattgaggtttatgccaattcctatgtatgacgcaagtcaggccctgaaaacaaacccagaaaaaaccgaggatgcactccagaagatagaaaactaccttttgcgaaaccacgaaactcggaagtatctgcaagagcaggcctatcgccttcagcagggcatcgtgacttctacgacccagcagatgattgataggatatgcgtgaaggtccaagaccacctgaactccctccgcaattgcggcggggatgcaattcaggaagacctgaagagcgccgagaggttgatgcgcgatgcaaaaaattctaagacactgctgcccaatctgtaccacgtcggtggcgcaagttgggccggggcatctggcttactgagtagtcctattcaggaaaccctggagagtatggcgggagaggtgactcgcgtggtggatgaacagcttaaagccctgctagagagcatggtggatgctgcagagaacctctgtccaaacgtcatgaagaaggcccacatcaggcaggatcttattcatgcttcaaccgagaagatctctatccctagaacgttcgtgaagaacgtactgctagagcagtcaggcattgacattctgaacaagatcagcgaagtaaaacttaccgtggcttcctttctgtccgatcggatcgtcgacgagattctggatgccctcagtcactgccatcataagttagcagatcacttttcacgacgcggtaagactcttcctcagcaggagtctctggagattgaacttgctgaggaaaaacccgtaaaaagatcaatcattacggtcgaggagctgactgaaattgagagactggaagacctggacacatgtatgatgaccccaaaaagcaaacgcaaatccatccattctcggatgctgcggccagtgagtcgggcctttgagatggaattcgacctggataaggcactggaggaagtccccatacatatagaagaccccccctttccctcattacgccaggaaaagagatcatccggcttcatttctgagctgccaagtgaagaaggcaaaaagctggagcacttcaccaaactacggcccaagcgaaacaaaaaacagcaaccgactcaggctgcagtgtgcgcggcaaacattgtctctcaggatggagaacagaatggccttatgggccgagttgacgaaggggtggatgaattctttaccaagaaggttacgaagatggatagcaagaaatggtcaacacgcggctccgagtcccatgagcttaacgagggcggtgacgagaagaaaaagagagactcgcgaaaatcaagtggatttctcaaccttataaaatcccggagcaaaagtgagaggccacccactatcctgatgacagaggaaccgagcagtcctaagggtgcggtgaggtctccacctgtcgactgccctcggaaagataccaaggccgctgagcacaatggcaatagcgaacggatcgaagaaatcaagactccggactccttcgaagaaagccagggtgaagaaatcgggaaagtagagaggtctgatagcaagtcctcacctcaagccgggcgacgatatggggttcaggtcatgggctcaggattactagccgaaatgaaagcaaagcaggagaaccgttttggactggggacaccagagaagaatactaaggcagaacccaaggccgaggctggttctcgatcaagatcaagctcttcaaccccaacttctccaaaacccctactgcagtcccccaagccaagcctggcagctcgaccagtcatcccacagaagcccaggaccgcctcgcgtccagacgatatccccgattctccaagctctccaaaagttgcactattgccacccgttttgaagaaggtgccgagcgataaggagagagacggacagagttccccgcaaccaagcccaagaacgttctcccaggaggtgagtagacgctcctggggccagcaggcgcaggagtatcaggagcagaagcagcgaagcagcagtaaagatggccatcagggatcaaaatctaatgattctggggaagaagctgaaaaggagtttattttcgtgtag

SEQ ID NO: 68925 - DNA, 3981 bp, Artificial Sequence
  derived and/or modified sequence
atgacagaggaatcaagcgatgttcctagagagctgatcgagtccatcaaggatgtgatcggtcggaaaatcaagatctcagtgaaaaaaaaggtgaagctcgaggtcaagggagataaggtagagaacaaagttctcgtgctaactagttgtcgcgctttcttggttactgcacggattccgactaagctcgaactgacgttcagctacctcgagattcacggcgtggtgtgtagtaagagcgctcagatgatcgtggaaaccgaaaagtgctccatttccatgaaaatggcgagtccagaggacgtgtccgaagtgctggcccacataggaacatgtctgcgcaagattttccccggattgagtcctgttagaattatgaaaaaggtatctatggaaccatcagagcggctggcttccctccaagccctttgggattcgcagactgtggcagagcagggcccatgcgggggattctctcaaatgtatgcttgcgtatgcgattggctcggctttagctatcgagaggaggtgcagtgggacgtggatacaatctacctgacacaggacactcgcgaactgaatctacaggatttctcacacctagatcacagagatttgatccccatcatagcagccctggaatataaccaatggtttactaaattatcgtcgaaagatctgaagctgtccactgacgtgtgcgagcagattcttagagtcgtgagcagatccaataggctggaggagctggtactggagaacgcgggattgcgtactgatttcgcccaaaaacttgcatcagccctcgctcacaatcctaacagtggactgcatacaatcaacctggctgggaacccacttgaggatcgcggagtcagttctctttccattcagttcgctaaactgcccaaggggctcaagcacttaaacttgtctaagacctcactgtctcctaagggcgtaaattcactgtcccagtcactgagtgcgaaccccctgaccgcaagcacgctggttcatcttgatctgtctgggaatgtgctgcgcggagacgatttgagccacatgtacaacttcctggctcagcccaatgccatcgtccatctggacctttctaatactgagtgttctcttgacatggtctgtggcgcactcctgcggggatgcctccaataccttgccgtgctcaatctgtcccgtaccgttttctcccatagaaagggaaaggaggtgcctcccagtttcaaacagtttttttcgtcctcgctggccttgatgcatataaatctcagcgggaccaaattatcaccagaacccctgaaagccctgctgttggggctggcatgtaaccacaacttgaagggtgtgagcctagacctgtctaactgtgaactcagatctggcggagctcaagtgttggaaggatgcatcgcagaaatccataacatcacctccttggatatcagtgacaacggcctcgaatcagacctgtcgacactgatcgtgtggctgagcaagaaccgctccatccaacacttagccctaggcaagaacttcaacaacatgaagtctaagaatctgacaccagtactggataatctagtacagatgatacaggacgaggagagcccgctgcagagcctgagcttggccgatagcaagttgaagacagaggtaacaatcataataaatgccctcgggtccaacacgagccttactaaggtagacattagtggcaacggaatgggtgatatgggagccaagatgttggcaaaggctctgcagattaatactaagttaaggactgtcatatgggacaaaaataatataaccgcccagggattccaggatattgcggtcgcaatggaaaaaaattacacactgcgctttatgccaatccctatgtacgatgccagtcaggcgctgaagaccaaccctgagaagacggaggacgctctacagaagattgagaactacctactgcgcaaccacgagaccaggaaatatttgcaggagcaggcctaccggctgcagcaggggatcgttacttcgactacccagcagatgatcgatagaatatgtgtgaaggttcaggatcatttaaattctcttcgaaattgtggaggtgacgccatccaggaagacttaaagtccgcggaacggctgatgcgggacgcgaagaactctaagacccttttacctaacctttaccatgtcggcggagcgtcatgggcaggagcttctggcctcctgtccagcccaatccaggagactctggaatcaatggctggggaagttacccgggttgtagatgagcagcttaaggcactgctcgagtctatggtagatgctgcagagaatctctgccctaatgtgatgaagaaggctcatatacgacaggacctcatccacgcctcaactgagaaaattagcattccaagaaccttcgtcaagaatgtactgctggagcaaagtgggatcgatatccttaacaagatcagtgaggttaagctgacagtggccagtttcctgagtgaccgcatcgtggacgagatattggatgcactgtctcactgtcatcacaagctggccgatcacttttcccgaagggggaagactttaccccagcaagaaagtttggaaatcgagcttgcagaagaaaaacccgtcaagagatccatcattactgtggaagaactgactgagatcgaacggctcgaagatctggatacctgtatgatgacgcctaagagtaagaggaaatcaatccactcacgcatgttgcgacctgtaagcagggccttcgagatggaattcgatttggacaaggcccttgaagaggttccaatccatatcgaggaccccccattccccagcctgaggcaggagaaacggagctcgggctttatttcagagctgcccagcgaggaggggaaaaagctagagcacttcaccaaactccgccctaaacgaaacaagaagcagcaacctacacaggctgccgtgtgtgcggctaacattgtcagtcaggacggggagcagaatgggttgatgggcagagtcgatgagggcgtggatgaatttttcacaaagaaagtgaccaagatggatagcaagaagtggtccacaaggggaagtgagagccatgaactgaatgaagggggtgatgagaagaagaaacgagactcccgcaagagtagtgggttccttaacctgattaagagtcgctctaaatccgaaaggcctccaactatcctgatgaccgaagaaccttcttccccaaagggcgctgtgagatccccaccggtggattgtccccgtaaggacactaaagctgctgagcacaacgggaactctgagagaatcgaggagatcaagacgccagatagctttgaagagtcccagggagaggagattgggaaagtggaacggtcagatagtaagtctagcccccaggctggacggcgttatggcgtgcaggtgatggggtctggacttttggcagaaatgaaggcaaagcaggaaaatagatttgggctgggaacaccagagaagaatacgaaggcagagcctaaggccgaggcagggtccagatcacgctcttctagtagcaccccgacctctccaaagccactactacaatcaccaaagccttccctagccgctcgtccggtcatcccccagaagcccagaactgcgtctagaccagacgatattcctgactcaccaagctctcccaaagtggccctgctgcctccagtgctgaagaaggtccctagtgacaaggaaagggacggacaaagttcacctcagcctagccccagaacgttttctcaggaggtctctcgcagaagttggggacagcaagcccaggagtaccaggaacagaagcaaaggagttcttcaaaagatggacatcagggcagcaaatctaacgactcaggggaagaggctgaaaaggagttcatcttcgtctag

SEQ ID NO: 68926 - DNA, 3981 bp, Artificial Sequence
  derived and/or modified sequence
atgaccgaggagagcagcgacgtgcccagagagctgatcgagagcatcaaggacgtgatcggcagaaagatcaagatcagcgtgaagaagaaggtgaagctggaggtgaagggcgacaaggtggagaacaaggtgctggtgctgaccagctgcagagccttcctggtgaccgccagaatccccaccaagctggagctgaccttcagctacctggagatccacggcgtggtgtgcagcaagagcgcccagatgatcgtggagaccgagaagtgcagcatcagcatgaagatggccagccccgaggacgtgagcgaggtgctggcccacatcggcacctgcctgagaaagatcttccccggcctgagccccgtgagaatcatgaagaaggtgagcatggagcccagcgagagactggccagcctgcaggccctgtgggacagccagaccgtggccgagcagggcccctgcggcggcttcagccagatgtacgcctgcgtgtgcgactggctgggcttcagctacagagaggaggtgcagtgggacgtggacaccatctacctgacccaggacaccagagagctgaacctgcaggacttcagccacctggaccacagagacctgatccccatcatcgccgccctggagtacaaccagtggttcaccaagctgagcagcaaggacctgaagctgagcaccgacgtgtgcgagcagatcctgagagtggtgagcagaagcaacagactggaggagctggtgctggagaacgccggcctgagaaccgacttcgcccagaagctggccagcgccctggcccacaaccccaacagcggcctgcacaccatcaacctggccggcaaccccctggaggacagaggcgtgagcagcctgagcatccagttcgccaagctgcccaagggcctgaagcacctgaacctgagcaagaccagcctgagccccaagggcgtgaacagcctgagccagagcctgagcgccaaccccctgaccgccagcaccctggtgcacctggacctgagcggcaacgtgctgagaggcgacgacctgagccacatgtacaacttcctggcccagcccaacgccatcgtgcacctggacctgagcaacaccgagtgcagcctggacatggtgtgcggcgccctgctgagaggctgcctgcagtacctggccgtgctgaacctgagcagaaccgtgttcagccacagaaagggcaaggaggtgccccccagcttcaagcagttcttcagcagcagcctggccctgatgcacatcaacctgagcggcaccaagctgagccccgagcccctgaaggccctgctgctgggcctggcctgcaaccacaacctgaagggcgtgagcctggacctgagcaactgcgagctgagaagcggcggcgcccaggtgctggagggctgcatcgccgagatccacaacatcaccagcctggacatcagcgacaacggcctggagagcgacctgagcaccctgatcgtgtggctgagcaagaacagaagcatccagcacctggccctgggcaagaacttcaacaacatgaagagcaagaacctgacccccgtgctggacaacctggtgcagatgatccaggacgaggagagccccctgcagagcctgagcctggccgacagcaagctgaagaccgaggtgaccatcatcatcaacgccctgggcagcaacaccagcctgaccaaggtggacatcagcggcaacggcatgggcgacatgggcgccaagatgctggccaaggccctgcagatcaacaccaagctgagaaccgtgatctgggacaagaacaacatcaccgcccagggcttccaggacatcgccgtggccatggagaagaactacaccctgagattcatgcccatccccatgtacgacgccagccaggccctgaagaccaaccccgagaagaccgaggacgccctgcagaagatcgagaactacctgctgagaaaccacgagaccagaaagtacctgcaggagcaggcctacagactgcagcagggcatcgtgaccagcaccacccagcagatgatcgacagaatctgcgtgaaggtgcaggaccacctgaacagcctgagaaactgcggcggcgacgccatccaggaggacctgaagagcgccgagagactgatgagagacgccaagaacagcaagaccctgctgcccaacctgtaccacgtgggcggcgccagctgggccggcgccagcggcctgctgagcagccccatccaggagaccctggagagcatggccggcgaggtgaccagagtggtggacgagcagctgaaggccctgctggagagcatggtggacgccgccgagaacctgtgccccaacgtgatgaagaaggcccacatcagacaggacctgatccacgccagcaccgagaagatcagcatccccagaaccttcgtgaagaacgtgctgctggagcagagcggcatcgacatcctgaacaagatcagcgaggtgaagctgaccgtggccagcttcctgagcgacagaatcgtggacgagatcctggacgccctgagccactgccaccacaagctggccgaccacttcagcagaagaggcaagaccctgccccagcaggagagcctggagatcgagctggccgaggagaagcccgtgaagagaagcatcatcaccgtggaggagctgaccgagatcgagagactggaggacctggacacctgcatgatgacccccaagagcaagagaaagagcatccacagcagaatgctgagacccgtgagcagagccttcgagatggagttcgacctggacaaggccctggaggaggtgcccatccacatcgaggacccccccttccccagcctgagacaggagaagagaagcagcggcttcatcagcgagctgcccagcgaggagggcaagaagctggagcacttcaccaagctgagacccaagagaaacaagaagcagcagcccacccaggccgccgtgtgcgccgccaacatcgtgagccaggacggcgagcagaacggcctgatgggcagagtggacgagggcgtggacgagttcttcaccaagaaggtgaccaagatggacagcaagaagtggagcaccagaggcagcgagagccacgagctgaacgagggcggcgacgagaagaagaagagagacagcagaaagagcagcggcttcctgaacctgatcaagagcagaagcaagagcgagagaccccccaccatcctgatgaccgaggagcccagcagccccaagggcgccgtgagaagcccccccgtggactgccccagaaaggacaccaaggccgccgagcacaacggcaacagcgagagaatcgaggagatcaagacccccgacagcttcgaggagagccagggcgaggagatcggcaaggtggagagaagcgacagcaagagcagcccccaggccggcagaagatacggcgtgcaggtgatgggcagcggcctgctggccgagatgaaggccaagcaggagaacagattcggcctgggcacccccgagaagaacaccaaggccgagcccaaggccgaggccggcagcagaagcagaagcagcagcagcacccccaccagccccaagcccctgctgcagagccccaagcccagcctggccgccagacccgtgatcccccagaagcccagaaccgccagcagacccgacgacatccccgacagccccagcagccccaaggtggccctgctgccccccgtgctgaagaaggtgcccagcgacaaggagagagacggccagagcagcccccagcccagccccagaaccttcagccaggaggtgagcagaagaagctggggccagcaggcccaggagtaccaggagcagaagcagagaagcagcagcaaggacggccaccagggcagcaagagcaacgacagcggcgaggaggccgagaaggagttcatcttcgtgtag

SEQ ID NO: 68927 - protein, 347 aa, Artificial Sequence
  derived and/or modified sequence
MKPALLEVMRMNRICRMVLATCLGSFILVIFYFQIMRRNPFGVDICCRKGSRSPLQELYNPIQLELSNTAVLHQMRRDQVTDTCRANSATSRKRRVLTPNDLKHLVVDEDHELIYCYVPKVACTNWKRLMMVLTGRGKYSDPMEIPANEAHVSANLKTLNQYSIPEINHRLKSYMKFLFVREPFERLVSAYRNKFTQKYNISFHKRYGTKIIKRQRKNATQEALRKGDDVKFEEFVAYLIDPHTQREEPFNEHWQTVYSLCHPCHIHYDLVGKYETLEEDSNYVLQLAGVGSYLKFPTYAKSTRTTDEMTTEFFQNISSEHQTQLYEVYKLDFLMFNYSVPSYLKLE

SEQ ID NO: 68928 - DNA, 1044 bp, Artificial Sequence
  derived and/or modified sequence
atgaagcccgccctgctggaggtgatgagaatgaacagaatctgcagaatggtgctggccacctgcctgggcagcttcatcctggtgatcttctacttccagatcatgagaagaaaccccttcggcgtggacatctgctgcagaaagggcagcagaagccccctgcaggagctgtacaaccccatccagctggagctgagcaacaccgccgtgctgcaccagatgagaagagaccaggtgaccgacacctgcagagccaacagcgccaccagcagaaagagaagagtgctgacccccaacgacctgaagcacctggtggtggacgaggaccacgagctgatctactgctacgtgcccaaggtggcctgcaccaactggaagagactgatgatggtgctgaccggcagaggcaagtacagcgaccccatggagatccccgccaacgaggcccacgtgagcgccaacctgaagaccctgaaccagtacagcatccccgagatcaaccacagactgaagagctacatgaagttcctgttcgtgagagagcccttcgagagactggtgagcgcctacagaaacaagttcacccagaagtacaacatcagcttccacaagagatacggcaccaagatcatcaagagacagagaaagaacgccacccaggaggccctgagaaagggcgacgacgtgaagttcgaggagttcgtggcctacctgatcgacccccacacccagagagaggagcccttcaacgagcactggcagaccgtgtacagcctgtgccacccctgccacatccactacgacctggtgggcaagtacgagaccctggaggaggacagcaactacgtgctgcagctggccggcgtgggcagctacctgaagttccccacctacgccaagagcaccagaaccaccgacgagatgaccaccgagttcttccagaacatcagcagcgagcaccagacccagctgtacgaggtgtacaagctggacttcctgatgttcaactacagcgtgcccagctacctgaagctggagtag

SEQ ID NO: 68929 - DNA, 1044 bp, Artificial Sequence
  derived and/or modified sequence
atgaagccggctctgctcgaggtgatgcgcatgaataggatttgtcgcatggtgctcgcaacttgcctcggcagctttatcctggtcatcttctactttcaaatcatgcgacggaacccttttggagtggatatctgctgcagaaagggcagtcgcagcccgctacaagagctgtacaacccaattcagttagaactctcaaacactgcagtgttgcatcaaatgcgtcgggatcaggtgaccgacacctgtagggccaactcggccacttctcgaaaaagaagagtcctgacaccaaatgacctaaaacatctcgtggttgacgaagaccacgagttaatttattgttacgttccgaaggtggcttgtacaaattggaagcggctaatgatggtgctcactggaagaggaaagtactcggatcccatggagatccctgcaaatgaagctcacgtgagcgcgaacctgaagaccctgaatcagtattcaataccggagataaatcacagactgaagtcctacatgaagtttctcttcgtgagagaaccttttgagagacttgtatccgcatacagaaacaagtttacccagaaatataatatctctttccacaagcggtatgggactaagatcataaagagacagcgcaagaatgctactcaggaagccctccggaaaggagacgatgtgaagttcgaggaatttgtcgcatacctgattgatccccatactcagagagaagagccattcaatgagcattggcagacggtctactctctgtgccacccatgtcatattcactacgatctcgtcggcaagtacgaaaccttagaagaggactccaactacgtcctccagctcgctggcgtcggaagttatctcaagtttcctacgtacgcaaagagcacaagaacaacagatgagatgacaacagaattctttcaaaacatttcaagtgagcatcaaactcaactttacgaggtttacaagctggacttcctaatgtttaactactccgtccccagctacctgaaattggaatag

SEQ ID NO: 68930 - DNA, 1044 bp, Artificial Sequence
  derived and/or modified sequence
atgaagccagccctgctggaggtgatgaggatgaaccgcatctgcaggatggtgctggccacctgcctgggcagcttcatcctggtgatcttctacttccagatcatgagaagaaacccctttggagtggacatctgctgcaggaagggcagccgcagccccctgcaggagctgtacaaccccatccagctggagctgagcaacacagctgtgctgcaccagatgaggcgggaccaggtgacagacacctgccgggccaacagcgccaccagcaggaagagaagagtgctgaccccaaatgacctgaagcacctggtggtggatgaagatcatgagctgatctactgctacgtgcccaaggtggcctgcaccaactggaagaggctgatgatggtgctgaccggccggggcaagtacagcgaccccatggagatcccagccaatgaggcccacgtgtctgccaacctgaagaccctgaaccagtacagcatccctgagatcaaccaccggctgaagagctacatgaagttcctgtttgtgcgggagccctttgagcggctggtgtctgcctacagaaacaagttcacccagaagtacaacatctccttccacaagagatatggcaccaagatcatcaagaggcagaggaagaatgccacccaggaggccctgaggaaaggagatgatgtgaagtttgaggagtttgtggcctacctgattgacccccacacccagcgggaggagcccttcaatgagcactggcagacagtgtacagcctgtgccacccctgccacatccactatgacctggtgggcaagtatgagaccctggaggaggacagcaactacgtgctgcagctggccggcgtgggcagctacctgaagttccccacctacgccaagagcaccaggaccacagatgagatgaccacagagttcttccagaacatcagcagcgagcaccagacccagctgtatgaggtgtacaagctggacttcctgatgttcaactacagcgtgcccagctacctgaagctggagtag

SEQ ID NO: 68931 - DNA, 1044 bp, Artificial Sequence
  derived and/or modified sequence
atgaagcccgccctgctggaggtgatgcggatgaaccggatctgccgaatggtgctcgctacatgcctgggcagcttcatcctggtcatattttactttcagatcatgagaagaaatcctttcggagtggacatctgttgcagaaagggcagtaggagcccacttcaagaactgtacaaccccatccagttggaactgagcaacaccgccgtcctccaccaaatgcggcgcgaccaggtgacagacacctgtagggctaactcagcaacctctaggaaacggcgcgttctgactccaaacgatctgaaacacttagtggtagatgaggaccatgaactgatctactgctacgttcccaaggtcgcctgtactaactggaagcggctgatgatggtgctgaccgggagaggcaagtatagcgaccccatggagatccctgccaacgaggcccacgtgtcagcaaacctgaagacactaaaccaatattccattcctgaaatcaatcataggttgaaaagctacatgaagttcctgttcgtgcgtgaaccctttgagcgcctggtaagtgcatatcggaacaaatttacgcagaagtataatattagctttcataaacgttatggcaccaagatcattaaaaggcaaagaaaaaatgccacacaggaagccttacggaaaggagatgatgtgaagttcgaagaattcgtggcctacctgatagatccacacacgcagcgcgaagagcccttcaatgagcactggcaaaccgtgtacagcctctgtcatccctgccacattcattatgacttggttggcaagtacgaaacgctggaggaagattccaattacgttcttcagctggcgggagtgggatcttatctgaaattccccacatatgctaagagcactaggaccaccgatgagatgaccactgaattttttcagaacatttcatcagagcaccagacacagttgtacgaagtctacaagctcgatttcctcatgtttaactatagcgtgccctcttaccttaagttggaatag

SEQ ID NO: 68932 - DNA, 1044 bp, Artificial Sequence
  derived and/or modified sequence
atgaagcccgctctcttggaggtgatgcgcatgaatagaatttgtcgtatggtcctggcaacttgtcttggcagcttcattctcgtaatcttttactttcaaatcatgcgccgaaatccctttggggtcgacatctgctgccgcaagggcagccgcagtcccttgcaggaactttacaatccgattcagctcgagctgagcaacaccgcagtactgcatcagatgcgaagagaccaggttacagacacctgcagagccaattccgctacaagtcgtaagcgaagagtgcttactcctaatgacctaaaacatctggtcgttgacgaagatcacgagcttatctattgttatgtgcccaaggtagcatgtaccaactggaaaagactgatgatggtgctgacagggagggggaaatattccgatccaatggagatccctgctaacgaggcccacgtgtccgcgaatctcaagacactgaatcagtactccatcccagagatcaaccacaggctgaaatcctatatgaaatttctatttgttagagaaccatttgaacggttggtgtccgcctacagaaataagttcacccagaaatataacatatcattccacaaacgatacggtactaaaataatcaaacgtcaacgaaaaaatgcaacccaagaagcactgaggaagggcgacgacgtcaaatttgaggaatttgttgcatacttgatcgatcctcacacacaacgcgaagagccatttaacgagcactggcaaactgtgtacagcctgtgtcatccatgccacattcactatgatctggttggaaagtatgaaaccctcgaggaggacagcaattacgtgcttcagctcgccggagtcggttcatacctgaagttccctacatacgccaaatcaacaagaactacagacgaaatgacaacagagttttttcaaaatatctctagcgagcatcagacccagctttacgaagtgtataaactggacttcctcatgtttaactacagcgtgccctcgtacctcaagctggagtag

SEQ ID NO: 68933 - DNA, 5696 bp, Artificial Sequence
  derived and/or modified sequence
atatatagatcgttggagcgcaatgaagtagcctttggagagaagggagagggcccgtcggacagccacagcggccagcgcagcggcagcggcggcggcaccaccatcaccgctcgcaccccagccgcccggcccgcgaccaggcagcggcggccgccggcgggatcggaggaggcggcggagcggcgaggaggaggagcaggagcgcgcagccagcgggtccacgcatctcagcacttccagaccaactccggcaccttccacacccctgcccgggctgggggctccgagagcggccgcgaagcgactccgatcctccctctgagccttgctcagctctgccccgcgcctcccgggctccggtccgcgcggcggggtccctgctcctgcgccccgggcgcgcttcccggacaccccggtccccgcagccaggacaaagccatgaagccagcgctgctggaagtgatgaggatgaacagaatctgccggatggtgctggccacttgcttgggatcctttatcctggtcatcttctatttccaaatcatgcggaggaatccctttggtgtggacatctgctgccggaaggggtcccgaagccccctgcaggaactctacaacccaatccagctggagctctcaaacactgctgtcctgcaccagatgcggcgggaccaggtgacagacacgtgccgagccaacagcgccacaagccgtaagcggagggtgctgacccccaacgacctgaagcacttggtggtggatgaggaccacgagctcatctactgctacgtgcccaaggtggcctgcaccaactggaagcggctcatgatggtcctgaccgggcgggggaagtacagcgaccccatggagatcccggccaacgaggcacacgtctccgccaacctgaagaccctgaaccagtacagcatcccagaaatcaaccaccgcttgaaaagctacatgaagttcctgtttgtccgggagcccttcgagaggctagtgtccgcctaccgcaacaagttcacccagaagtacaacatctccttccacaagcggtacggcaccaagatcatcaaacgccagcggaagaacgccacccaggaggccctgcgcaaaggggacgatgtcaaattcgaggagtttgtggcctatctcatcgacccacacacccagcgggaggagcctttcaacgaacactggcaaaccgtctactcactctgccatccctgccacatccactatgacctcgtgggcaagtacgagacactggaagaggattctaattacgtcctgcagctggcaggagtgggcagctacctgaagttccccacctatgcaaagtctacgagaactactgatgaaatgaccacagaattcttccagaacatcagctcagagcaccaaacgcagctgtacgaagtctacaaactcgattttttaatgttcaattactcagtgccaagctacctgaaattggaataaagggggtggggagagggagagaatcatgctttttaatttaagatttttatttgtcaaaagaattatatggatattgggttattttgtaaattaatatttctttggggatgatgctgcgagcagcatagtgagaattatttaaaatccttcgtagggaaggacagctgtctttgcaggggaaataggatgggtcgtccttgtctgtagaagtgaatactgcaacactgtctcaaaggtttcttgtgttctggtgaattccatgaattgtgcattccataaattctaattaatattatttatagttatttaaacatggtctcattatttctttttgtggcagcaaaattctaacatctttccagaagaaatctatgattcctgctttgcttgctacagctcatttgggggcatgaatgttctccttactaacctctcatggagtcatgtgataacagccattgtcatgtgtatggatgccaccattcttgaatttctgctagaaataagtaggttgctattgcacttagagtcatctttgcaagggactcattccaaaccaattccaatcgacctgaaagtcccttgcactaaagaaatgtgatttttttttaacccaaggagaaagttggttgtaacaatttttcaccagaattagcaatctgatagaataggcttttttaacaggaattttaaactggcggtgccagttgcagtgaaggtgaagtggctattgctttatattcgacaaatatttattgagcatctactatatactaggccctgaagatagagcgttgaacaaacccaatagtcttggccctcaaaaagctttatgtgacatagagcatccagctcgacaattagcaaacccctgatattattcatggacttgacatgaggtttggactattcatgagcaacagcagaaggtccatgacccctacaaatttacatttttctatggcccatatttgaaaacctcacattcggagcaggccactttatattcgtgagtgatcccaagctcactgaccaacagaaaagatgctaaaaaaatgtgtcctatcatgtgcctgctccaactgatgggtaatgtctgcctttaagccccagaatggattctccaggcacagtgtggaagagtgctgtggttgattagcaatgtctgccttgggtgaggaaaggggaacactcctcaagtgcctcctactgtcatctccattcagcctagcaccacatccccatgtagaagtgttgtcttctactgcttgccacgtacaagtgtgaaatgccaaggtgagactcgtacacttggggatttgcaatggtttttacccctcatgaaggtcagaggtggactatttgtacacatacacacatgcacaccctctcacgtcctccagaggctgaaagactatcagcatcttggtaactgccatgcatgagcagcaaggacagccttccataatccatgccccatttcctctggaagcctggaaacttttcatttcctgttccttgctaattaacatctaaacatgcttctcatttccagccattgctgatgcttctcagttgaagtttgagccacatccctcttacagctagtgaatgagttggtagcagctactgtatataataataataatagttttaataataggggagggtgggatggggtgtgggtaagttttgccttttgttttgtttttgatgccgtatatagtgaaggggtgaggatattctaaacaaacaaaaattgaataatttattcacagaaactattaagattgtattgtaaagctcacagcaagctcagtgggcagcagctgcaacatctcaccggggaaattattttatttaacgtgagtgagatgtgggccggagaaggtagctgaagctatttataaaacgttgtgtaccttcttccgagctctctcccctttgtgaagggcgcagcaactatacccttgatggatggagatttacgcaatgtgttttactgggtagagtgacagaccttggctgtccctggaattgagaatctggaccttatttccaggcagagaacactgtcctcagaaatgggacttctgataatgaaacaggttgtccaacattttctaatacgcattctacagaacacaggttccaggaggcatcaggttggtgtgatgcagactaagggttttgtggtcaaatatccttaagaaacaaagttaagtcagtttcctttctgcaaggacttttcagccttcaatgtgtgctgtgcatggtgaatccccaaaaataatccttgagtctgtagcatttcctgaacttacatgaccaggatactctattttgcagatcaccccacagagctagggttccaccgagtatactttgcttaggttgacttagcatatctgaggtcttcaaggataaaaactgccaccccaacacccttccattaaaaaaaaaatacaaaatagcaccacagtctccatctggtttatagcaacagaggtactttatttaatgaagcaatggttctaatcctggatactgccacggactacaattctatccctcccagagggagtggaggaagtcttgggtggtgtggacagaaggaagagaggagagggtgagtggggtatagggcccagggtggctccctactcctcaggctcaaaaggatgctcagtgggaacagatgatctcttgatgagtgcttcttcagtttcatagtttggaatcgttcactgtgtgctttttggggggttttcaatggaaattcacgttgctttgcatttctgtgtccgtctttggtcagttgtgcaagcctgctcactgtcatgtgaagatggcctttcatctggcttctctctcttaagtgagaaagattgtccttcaggggacatgacatcaataggtttctggaatgagggactctttctccccgtgttttgctttgtgttcacattttcttttctaatggcattgaaactttaaaaaaaatggattcaactgtttttgcagaatgtagaaagtattctgtgtccttggttaaagaaatccacttgtgaagtgtgcctggaaaatgaaagtttgtgttttttaaagaggaatatttgaaactgctttctatgcatgcttagctggagaaaagtacaggcaggcgtcccatctcccagccacttctcaaaggtgctgctgtgttttaaagaccaggtacagccagggcagtatttgcaaggacattcctgcttactttatccctttggttggaaagctctagatgattcccgcagctcctccagaccccgcctccctgccctccccagctggtctgggaagaggtggtctgctgacctgtggtatctcagaggggacgttcctcctcctccctgtgcaccaggtgggctgcaccctcctgcctattcaggatgtggatgccacaggagagcagcaggcagtggaaacttcagttgcactggttctcctggtggcaaaggcatgaagcacaggggtcgattaatccaggctactagaaagctccagagcaaagtgtgcgggtcccacaaatgcttggctggtggggtctggatcagtgctgagatagagttggcagaagaagcagaggcactctgcttgctttcctagccagtcctcccctacacacacacacacacacacacacacacacacacacaatctcagctgcgccattctgtgcaatcccagtgaccaaatcccttccttgcccacctctatgtcagcaggactgaccacatcactcccccgagttcccaccaccagcatttcctccaacctttttccatcacaaccagttagaaccctacaggcaacaaggccttctagaatccgcttaacccttggctgataacaggcaaatttcagtctgctacactttgttaggtccagaaggagctgcccatactactttcttatgagcatgctcagtatggcatatggacatgtaatgtcacatctttgtggagtgtgattttcttttttcacatatttgtatgcagtagagagcctgttgtagaaaacgctccctgtatcttgctgtactgttaaagaaagctgaattccacattgccaacaaaagcgtgaaaatgttcatgaaccttcctccaggaaaagccattcaagcctgattatttttctaagtaacttcaattaaattgaagaaaaaagaa

SEQ ID NO: 68934 - protein, 652 aa, Artificial Sequence
  derived and/or modified sequence
MGKKHKKHKSDKHLYEEYVEKPLKLVLKVGGNEVTELSTGSSGHDSSLFEDKNDHDKHKDRKRKKRKKGEKQIPGEEKGRKRRRVKEDKKKRDRDRVENEAEKDLQCHAPVRLDLPPEKPLTSSLAKQEEVEQTPLQEALNQLMRQLQRKDPSAFFSFPVTDFIAPGYSMIIKHPMDFSTMKEKIKNNDYQSIEELKDNFKLMCTNAMIYNKPETIYYKAAKKLLHSGMKILSQERIQSLKQSIDFMADLQKTRKQKDGTDTSQSGEDGGCWQREREDSGDAEAHAFKSPSKENKKKDKDMLEDKFKSNNLEREQEQLDRIVKESGGKLTRRLVNSQCEFERRKPDGTTTLGLLHPVDPIVGEPGYCPVRLGMTTGRLQSGVNTLQGFKEDKRNKVTPVLYLNYGPYSSYAPHYDSTFANISKDDSDLIYSTYGEDSDLPSDFSIHEFLATCQDYPYVMADSLLDVLTKGGHSRTLQEMEMSLPEDEGHTRTLDTAKEMEQITEVEPPGRLDSSTQDRLIALKAVTNFGVPVEVFDSEEAEIFQKKLDETTRLLRELQEAQNERLSTRPPPNMICLLGPSYREMHLAEQVTNNLKELAQQVTPGDIVSTYGVRKAMGISIPSPVMENNFVDLTEDTEEPKKTDVAECGPGGS

SEQ ID NO: 68935 - DNA, 1959 bp, Artificial Sequence
  derived and/or modified sequence
atgggcaaaaagcataagaaacacaaatctgacaagcacctgtacgaggaatacgtggaaaagcctcttaagctcgttttaaaggtgggaggcaacgaggttaccgagctgagcacaggctcatcaggacacgactcgagtctgtttgaagacaagaacgaccatgacaaacataaggacagaaagcgaaagaagcgaaagaagggcgagaagcagatcccaggggaggagaaaggccggaaacgacggcgtgtgaaggaagataagaaaaaacgagatagagaccgcgtggagaatgaggccgaaaaagatcttcagtgtcacgcacctgttcggcttgatctgcccccggagaagcccttgacaagtagtctagccaaacaagaggaggtcgagcagactcctcttcaggaagcactgaaccagttgatgcgacaactgcagagaaaggatccttctgcttttttctcttttcctgttaccgatttcatagcacctgggtatagcatgatcattaagcacccaatggacttttccacaatgaaggagaaaattaaaaataacgattatcagtctattgaggaactcaaagacaattttaaactgatgtgtactaatgctatgatatataacaaacccgaaacaatctattataaggctgccaaaaaactgctgcattccggcatgaagatcctgtcccaggaacgaatccagagcctcaagcagtcaatcgatttcatggcagacctgcagaagacgcgcaagcagaaggatggcactgacaccagccagagtggcgaggacggagggtgttggcagcgcgagcgtgaggattctggcgacgcagaggcccatgcttttaaaagcccctctaaagaaaacaagaaaaaggataaggatatgctcgaggataaatttaaaagcaacaacttggaaagggagcaggaacaattagatcgcattgtgaaggagtctggtggaaagctgacaagacgcctggtgaattcccaatgcgaatttgagagacggaaaccagatggtacaaccactctggggttattgcatcccgtggatccaattgtcggagagcctggctactgccctgtgcggctgggaatgaccacgggcaggctgcagtctggtgttaatacactgcaaggcttcaaggaagacaaacgaaacaaggtcactccggtgctctatctcaactacgggccttacagttcttatgccccccattacgacagcacattcgccaacatcagcaaggatgactccgatctcatatattcaacctatggcgaggactccgatctgccaagcgacttctctattcacgagttcttggctacttgccaagattacccatacgtcatggccgatagccttttggatgtcctcacaaagggcgggcactccaggacactgcaggaaatggagatgagtctgcccgaagacgaaggtcacaccaggacacttgatacggccaaagaaatggagcagattactgaagttgaaccccctgggcggctggactccagcacacaggacaggttaattgctttaaaggctgtgaccaacttcggagtacccgtcgaggtgtttgatagtgaagaagctgaaatctttcagaagaagttagatgagacaacgcggttgctccgcgaactgcaggaagcccagaacgagcgcttgtcaacacgcccaccgccaaacatgatctgtctcctgggtccatcataccgcgagatgcatctggctgagcaggtcacaaacaatctcaaagagttagcccagcaggtcacccccggggatattgtttccacatacggggtcaggaaagcgatgggcatatccattccaagcccagtcatggaaaacaactttgttgacctgaccgaggatacagaggagcctaaaaaaaccgacgtggccgagtgcgggcctgggggcagctag

SEQ ID NO: 68936 - DNA, 1959 bp, Artificial Sequence
  derived and/or modified sequence
atgggcaagaaacacaagaagcataagtccgacaaacatctttatgaagagtatgtagaaaaacccctgaaactggtactcaaggtaggaggtaacgaggtcacggaactgtcaaccgggtcctcagggcacgacagctccctgtttgaagataaaaatgaccacgacaagcacaaggatagaaaaaggaagaaacggaagaagggtgagaaacagatccccggcgaagaaaagggccgcaaacggcggcgagtaaaagaggacaagaaaaaacgagatagagaccgggtcgagaacgaggccgaaaaagatctgcaatgtcatgccccggttaggctagacctacccccagagaaacccctgacttctagcttagctaaacaggaagaggtggaacagaccccactccaggaggccctcaaccagctcatgcgccaactacagcgaaaggatccgtctgcgtttttctcattcccggtgacagattttattgcccccggctactccatgatcatcaaacatcctatggatttctcaactatgaaggagaaaattaagaataacgattatcaaagtattgaagaactcaaagataacttcaagcttatgtgcacgaacgccatgatttataacaaaccagagactatctattataaagcagcaaagaagctccttcatagcgggatgaaaatactgtctcaggagcgaatccagtccctcaagcagagtattgattttatggcagaccttcagaagacacgaaagcaaaaggatggcactgatacaagccagagcggtgaggacggtggctgctggcagcgtgagcgcgaggactccggcgacgcggaggcccacgcgttcaagtcccccagcaaggagaacaaaaaaaaggataaagatatgctcgaagacaaatttaagtccaacaacctcgaaagagaacaggaacaattggatcgtattgttaaagaatctggcggcaaactcacccggaggcttgtgaattctcagtgcgaatttgagcggcgaaagccagatggcaccacaaccctgggactgttgcaccctgtcgaccctatagtcggtgagccaggatactgtcctgtgcgcctgggtatgaccacggggcgcctgcagagcggagtaaacacgctgcagggtttcaaagaagataaacggaacaaggtaacacccgtgctctatctgaactatggtccctacagctcatatgcacctcattacgattctactttcgcaaacatttctaaagatgacagtgacttgatttattctacatacggtgaggactctgacctgccttccgacttcagtatccatgagttcttagccacatgccaagattatccatatgtgatggcggactcactgctcgacgtgctgaccaaggggggccattcaagaaccctccaggaaatggaaatgagcctgcctgaggatgagggccacacacggacactagacacagccaaagaaatggagcagatcacagaagttgagccaccgggtagactggactcatctacccaggaccgtctgatagccctcaaggctgtgacaaattttggagtgcctgtggaagtgttcgactctgaagaggccgaaatcttccagaaaaaactggacgaaactaccaggctgctgagagaattgcaggaggcccagaacgaaaggcttagcacacgccctccgcctaatatgatttgcctgcttggcccaagttatcgggaaatgcacctggccgaacaggtcactaataacctaaaagagcttgctcagcaggtaacccctggtgacattgtctcaacgtatggggtgagaaaggccatggggatttctataccaagtccagtgatggagaataatttcgtggatctgactgaggacacggaggaacctaagaagaccgatgtcgccgaatgtgggccgggagggtcatag

SEQ ID NO: 68937 - DNA, 1959 bp, Artificial Sequence
  derived and/or modified sequence
atgggcaagaagcacaagaagcacaagagtgacaagcacctgtatgaggagtatgtggagaagcccctgaagctggtgctgaaggtgggcggcaatgaggtgacagagctgagcacaggcagcagcggccatgacagcagcctgtttgaggacaagaatgaccatgacaagcacaaggacaggaagaggaagaagaggaagaagggggagaagcagatccctggagaggagaagggcaggaagagaagaagagtgaaggaggacaagaagaagagggaccgggacagagtggagaatgaagctgagaaggacctgcagtgccacgcccctgtgcggctggacctgcccccagagaagcccctgaccagcagcctggccaagcaggaggaggtggagcagacccccctgcaggaggccctgaaccagctgatgaggcagctgcagaggaaggaccccagcgccttcttctccttccctgtgacagacttcatcgcccctggctacagcatgatcatcaagcaccccatggacttcagcaccatgaaggagaagatcaagaacaatgactaccagagcattgaggagctgaaggacaacttcaagctgatgtgcaccaatgccatgatctacaacaagccagagaccatctactacaaggccgccaagaagctgctgcacagcggcatgaagatcctgagccaggagcgcatccagagcctgaagcagagcattgacttcatggctgacctgcagaagaccaggaagcagaaggatggaacagacaccagccagagcggagaagatggcggctgctggcagcgggagagagaagattctggagatgctgaggcccacgccttcaagagccccagcaaagaaaacaagaagaaggacaaggacatgctggaggacaagttcaagagcaacaacctggagcgggagcaggagcagctggacagaattgtgaaggagagcggcggcaagctgacccggcggctggtgaacagccagtgtgaatttgagaggaggaagccagatggcaccaccaccctgggcctgctgcaccctgtggaccccatcgtgggggagcccggctactgccctgtgcggctgggcatgaccaccggccgcctgcagagcggcgtgaacaccctgcagggcttcaaggaggacaagaggaacaaggtgacccctgtgctgtacctgaactacggcccctacagcagctatgccccccactatgacagcacctttgccaacatcagcaaggatgacagcgacctgatctacagcacctatggagaagattctgacctgcccagcgacttcagcatccacgagttcctggccacctgccaggactacccctacgtgatggctgacagcctgctggatgtgctgaccaagggcggccacagcaggaccctgcaggagatggagatgagcctgcctgaagatgagggccacaccaggaccctggacacagccaaggagatggagcagatcacagaggtggagcccccaggccgcctggacagcagcacccaggacaggctcatcgccctgaaggctgtgaccaactttggagtgcctgtggaggtgtttgattctgaggaggccgagatcttccagaagaagctggatgagaccacccggctgctgcgggagctgcaggaggcccagaatgaaaggctgagcacccggcccccacccaacatgatctgcctgctgggccccagctaccgggagatgcacctggccgagcaggtgaccaacaacctgaaggagctggcccagcaggtgacccctggggacatcgtgtccacctacggcgtgaggaaggccatgggcatcagcatccccagccctgtgatggagaacaactttgtggacctgacagaggacacagaggagcccaagaagacagatgtggccgagtgtggccctgggggcagctag

SEQ ID NO: 68938 - DNA, 1959 bp, Artificial Sequence
  derived and/or modified sequence
atgggcaagaagcacaagaagcacaagagcgacaagcacctgtacgaggagtatgttgagaaaccactaaagttagtcctgaaagtgggcgggaacgaagttactgagttatcaacaggcagctccggccatgattcatcactttttgaggataaaaacgaccacgacaaacataaagatcggaaacgaaagaaaaggaagaaaggggagaaacagattcctggtgaagaaaaaggcaggaagaggcgaagggtgaaggaggacaagaagaagcgcgatcgagaccgcgtagagaatgaagctgaaaaggatcttcaatgccatgcccccgtccggctggatttgccgcccgaaaagcccttaacaagctcactggctaagcaagaggaggtagaacagacgccactccaggaggcccttaaccagctcatgagacagctgcagagaaaagatccctccgcatttttttcgttccctgttaccgatttcatcgcccccggctatagtatgattatcaagcacccaatggatttctctacaatgaaagaaaagatcaagaacaatgactaccagtccatcgaggaactgaaggacaacttcaagctaatgtgtacgaacgccatgatttataataagccggagacaatttattacaaggccgcgaagaagctacttcactccgggatgaaaatcctgagtcaggagcgaatccaatccctgaaacagtcgatcgattttatggctgacctgcagaaaacgaggaagcagaaggacgggacagacacgagtcagtctggcgaggatggcggatgctggcaaagggaaagggaagattctggcgatgctgaggcacacgcgttcaagagcccatcaaaagaaaacaaaaaaaaggataaggacatgctcgaagataagtttaagtctaataaccttgagcgcgaacaggagcagctggacagaattgtgaaggaatctggaggaaagctaactcggcgcctggttaatagccagtgtgagtttgagagaaggaagccggacggtactactacattggggctgttgcacccagttgatcctattgtgggtgagcctggttactgtcccgttaggttggggatgactactgggcgcttacagagtggggtcaacaccctgcaaggcttcaaggaagacaaacgtaacaaagttacaccggtcctttaccttaactatgggccctattccagttatgcaccgcactacgactctaccttcgccaatatttccaaggatgattcagatctgatctactcaacatatggagaagattcagatcttccctcagatttctcaatacatgaattcctcgcaacctgtcaggattacccatatgtgatggccgactcactgctggacgtcctgactaagggcggccattctcgaactttacaggagatggagatgagtctccctgaggatgagggacatacccggacccttgacacagctaaagaaatggagcagattacagaagttgagcctcctggcaggcttgatagcagcacacaggacagactgattgcactcaaagctgttaccaatttcggcgtgcccgttgaggtgttcgactcggaggaagcagagattttccagaaaaagctggatgaaaccaccagacttttacgggaattgcaagaagctcagaatgaacgactgtccaccaggcccccccccaacatgatctgcctcctcgggccttcatatagagagatgcatctagctgagcaggtgaccaacaaccttaaggagctggcacagcaggtcactcccggagacatcgtatctacctacggggtgcgcaaagcaatgggcatatccatccccagcccagtgatggagaacaacttcgtcgatcttaccgaggatactgaagagccaaaaaagaccgatgtggctgagtgtggccctggcggctcctag

SEQ ID NO: 68939 - DNA, 1959 bp, Artificial Sequence
  derived and/or modified sequence
atgggcaagaagcacaagaagcacaagagcgacaagcacctgtacgaggaatacgtcgagaagccgctgaaactcgtccttaaggtgggagggaacgaagtcactgagctcagcacgggcagtagtggacatgattcctccctgtttgaggacaagaacgatcacgataagcacaaggataggaaacggaaaaagagaaagaagggcgaaaaacagatccccggtgaagagaaaggacggaagagaagaagggtgaaagaggacaaaaaaaaaagagatcgggatcgagtcgagaatgaggccgagaaggacctgcagtgtcacgccccggtgaggctcgatttgcctcccgaaaagcctctcacatcatccctggctaaacaggaagaggtggagcagactcccctgcaggaggcactgaatcagttgatgaggcagttgcagcggaaggatccatctgcgttctttagctttcccgtcactgactttatcgctcccggatattcaatgataatcaagcaccccatggatttttctacaatgaaggaaaaaattaagaataatgattatcagagcatcgaagagcttaaggataactttaagctgatgtgcacaaacgcaatgatctacaacaaacccgagactatatactataaggcagctaagaaattgctacacagtgggatgaagattctctctcaagagcgtattcaaagtctgaagcagtccatcgattttatggctgatttacagaagactcggaagcagaaggacgggaccgatacaagccagtcaggggaagatggcggatgctggcaacgagagcgagaagactcaggggatgcagaggcacacgctttcaagtcaccctcaaaagaaaataaaaaaaaggacaaagatatgctcgaggacaagtttaaatccaacaatctcgaacgcgagcaggagcagctggatcgcatcgttaaggagtcgggaggtaaactgaccaggagactggtgaattcccagtgtgagtttgaacggaggaaaccggacggcacaacgaccctgggattgctgcatcccgtggacccgattgtgggggagcctggctactgtccagtgcggctgggtatgactacagggaggctgcaatccggggtaaatactctgcaaggtttcaaggaggacaaacggaacaaggtgacccccgtgctttacttaaattacgggccttattcgtcatatgccccacactacgattctacttttgcaaacatctctaaagacgacagcgacctgatatattctacttacggagaagattcagacttgcccagtgacttcagtatccacgaattcctggctacttgtcaagactatccatacgtgatggccgacagcctgctggatgtgcttacgaaaggaggtcattctcgcacactgcaggaaatggaaatgtctctgcccgaggatgaaggacataccaggactctggacaccgccaaggagatggaacagatcaccgaggttgaacctcccggtcggctggactccagtacgcaagatcgactgatcgcgttaaaggccgtcaccaattttggcgttcctgtcgaagtgttcgattctgaggaggccgagatcttccagaagaaactggacgaaacgacccgactgctcagagaactgcaggaagcccagaacgagcgtctgtccacccgcccacctccgaacatgatctgtttactagggccatcatatcgtgagatgcatctcgctgagcaggtgacgaataacttaaaagagctcgcccagcaggtgactccgggtgatatcgttagtacctatggagtgagaaaggctatggggatcagcatcccatctccagtgatggagaataactttgtagatctcacagaggatacagaggagcccaagaaaacagacgtcgccgagtgcggacctggcgggagctag

SEQ ID NO: 68940 - DNA, 1959 bp, Artificial Sequence
  derived and/or modified sequence
atggggaaaaagcataaaaaacacaaatcagacaaacacctatatgaagagtatgttgaaaaacctctgaagttggtgctcaaagtgggaggaaatgaagtgaccgagctttctactgggtcttcgggccatgatagttccctttttgaggacaagaacgatcacgataaacataaggataggaaacgtaaaaaacgtaaaaaaggcgagaaacagattccaggggaggagaaggggagaaaacggcgtagagtgaaggaggataaaaagaagcgggatcgggacagagtcgaaaatgaagctgagaaggaccttcagtgccatgcaccagtgaggctggatctgccgcctgaaaagcctctaacaagttctctcgccaaacaggaggaagtggagcagactcctctccaggaagcgcttaatcagttaatgaggcaactccagcgtaaagacccttcggccttctttagctttcctgtgactgattttatcgctccaggttattcgatgataataaagcaccctatggacttctcaacaatgaaagagaaaatcaagaacaacgactatcaatcaattgaggaattgaaagataacttcaaactgatgtgcacaaatgccatgatttacaataagccagagaccatctattataaagcagctaaaaagttgcttcacagcggaatgaagattctcagccaggaaagaatccagagtctgaaacaatcaattgatttcatggccgacctgcagaagactcgtaaacagaaggatggaaccgatacgtcccagagcggcgaagatgggggatgttggcagagggaacgggaggatagcggcgacgcagaagcgcacgctttcaagtcaccttccaaggagaacaagaagaaggataaagacatgctagaggataagtttaaatcaaataacctcgaaagggagcaggaacaattggacagaattgtcaaggagagcggagggaagctcacccgccgactggtcaatagccagtgtgaatttgaacgacgtaaacctgacggaacgaccaccctagggctgttgcacccagtggaccccatcgttggggagcccggatattgcccagtgcggctcgggatgaccaccggccgactccaatcaggggttaacacattacagggctttaaagaagataagaggaacaaagttacacccgtcctttacctgaattatggcccatactcttcttatgcaccccactatgatagcacattcgccaacatttctaaggacgactccgatcttatatacagcacctacggcgaagatagcgacctcccctccgacttttcaatccatgagtttctcgctacttgtcaggattacccgtatgtcatggcggattctttactggatgtattgactaagggaggacattctaggaccttacaggaaatggaaatgagcttaccagaggatgagggacatacaaggactctggacacggccaaggagatggagcagatcactgaggtggaacctcccggacgcctagatagctccacccaagatcgcctcatagctttgaaggccgtcactaatttcggcgtccccgtggaggtgttcgattcagaagaggccgagattttccagaagaagctagacgagacaacaaggctcctcagggagctccaggaagcccagaatgagcgcctgtctactcgccctcctcctaatatgatatgtctgctgggcccttcctacagagagatgcacctcgcagagcaagttacgaataacttgaaagaactcgcacagcaggtgactccgggagatatagtgtcgacatatggtgttagaaaggccatggggatcagcattccctcacctgtgatggagaataacttcgtggacctcaccgaggacaccgaagagcctaaaaagaccgatgtcgccgaatgcggtcccggagggtcatag

SEQ ID NO: 68941 - DNA, 1959 bp, Artificial Sequence
  derived and/or modified sequence
atgggaaaaaaacataagaaacacaaatcggacaaacacctctacgaagaatacgtggagaaacccctgaaactggtgctgaaggttgggggtaacgaggtcactgaactgtccacaggctcttctggccacgactcctctctgttcgaggataagaacgatcatgacaaacataaggaccgcaaaagaaaaaaaaggaagaagggcgaaaagcagattcctggcgaggaaaagggacgcaagcgaaggcgcgtgaaagaagacaaaaagaaacgcgatagagatagagtcgagaacgaagccgagaaggaccttcaatgtcacgccccagtcagactcgaccttccacccgagaaacctttaacctcttctctggcgaagcaggaagaagttgagcaaacccctctgcaggaagcgctgaaccagcttatgagacagctacagcgtaaggatccatcagcattcttcagtttcccagtgacagatttcatcgccccaggatatagcatgatcatcaagcatcctatggatttcagtaccatgaaagaaaaaatcaagaataatgattatcagtcgatcgaagagctcaaagacaactttaagctgatgtgtaccaacgctatgatctataacaagcccgaaacaatctactataaggccgcaaagaaactcctgcactccggcatgaagatcctgagtcaggaacgcattcagtcactcaaacagagcatcgactttatggcggatttacagaagactcggaagcaaaaggatggaactgacacaagtcaatccggcgaagatggcggttgttggcagcgagagagagaagatagtggagatgccgaagcacacgctttcaagtccccatccaaggagaacaagaagaaagataaggacatgttggaggacaaattcaagtcaaacaatctggaaagggagcaagaacagctcgatcgtatcgtgaaagagtctgggggtaagctgacacgccgattggtgaacagccagtgcgagttcgaaaggcggaaaccagatgggacgaccactttgggcttactacatcctgtcgatccaatcgtaggggagcctggctactgtccggtgcgacttggaatgacgaccggaaggcttcagtctggggttaatacactgcagggatttaaagaagacaagcgtaacaaagtaacacctgtattgtacctgaactatgggccttattcttcctacgcccctcactacgactccacgtttgccaacatatctaaggacgatagtgacctaatttactccacctacggcgaagattcagacttgccaagtgattttagcattcatgaattccttgcaacatgccaggattatccatacgtgatggccgattctttgctggacgtgctgaccaagggtggacacagcagaactctacaagagatggagatgagcctgccggaggatgagggccacacacgcactctggatacagctaaggaaatggaacagattacagaggttgaaccacctggccgacttgatagttccacccaggaccggttaattgcactgaaggccgtcactaatttcggcgtccctgttgaggtgtttgattccgaggaagctgaaatctttcagaagaagctagacgagactacaagactgcttcgtgaactccaggaagcccagaatgagcgcttgtctaccagacctcctcccaatatgatttgcctcttggggccatcgtatagagaaatgcatctcgctgagcaagtcacgaataacctgaaagagctagcgcaacaagtgactccaggggacattgtgtccacctatggagtcagaaaggcaatgggtatctctatcccaagcccggtcatggagaacaacttcgtcgacttgacggaggacacagaggaacctaaaaagacagacgtggccgagtgtggccctggcggtagctag

SEQ ID NO: 68942 - DNA, 2145 bp, Artificial Sequence
  derived and/or modified sequence
cggacatgggcaagaagcacaagaagcacaagtcggacaaacacctctacgaggagtatgtagagaagcccttgaagctggtcctcaaagtaggagggaacgaagtcaccgaactctccacgggcagctcggggcacgactccagcctcttcgaagacaaaaacgatcatgacaaacacaaggacagaaagcggaaaaagagaaagaaaggagagaagcagattccaggggaagaaaaggggagaaaacggagaagagttaaggaggataaaaagaagcgagatcgagaccgggtggagaatgaggcagaaaaagatctccagtgtcacgcccctgtgagattagacttgcctcctgagaagcctctcacaagctctttagccaaacaagaagaagtagaacagacaccccttcaagaagctttgaatcaactgatgagacaattgcagagaaaagatccaagtgctttcttttcatttcctgtgactgattttattgctcctggctactccatgatcattaaacacccaatggattttagtaccatgaaagaaaagatcaagaacaatgactatcagtccatagaagaactaaaggataacttcaaactaatgtgtactaatgccatgatttacaataaaccagagaccatttattataaagctgcaaagaagctgttgcactcaggaatgaaaattcttagccaggaaagaattcagagcctgaagcagagcatagacttcatggctgacttgcagaaaactcgaaagcagaaagatggaacagacacctcacagagtggggaggacggaggctgctggcagagagagagagaggactctggagatgccgaagcacacgccttcaagagtcccagcaaagaaaataaaaagaaagacaaagatatgcttgaagataagtttaaaagcaataatttagagagagagcaggagcagcttgaccgcatcgtgaaggaatctggaggaaagctgaccaggcggcttgtgaacagtcagtgcgaatttgaaagaagaaaaccagatggaacaacgacgttgggacttctccatcctgtggatcccattgtaggagagccaggctactgccctgtgagactgggaatgacaactggaagacttcagtctggagtgaatactttgcaggggttcaaagaggataaaaggaacaaagtcactccagtgttatatttgaattatgggccctacagttcttatgcaccgcattatgactccacatttgcaaatatcagcaaggatgattctgatttaatctattcaacctatggggaagactctgatcttccaagtgatttcagcatccatgagtttttggccacgtgccaagattatccgtatgtcatggcagatagtttactggatgttttaacaaaaggagggcattccaggaccctacaagagatggagatgtcattgcctgaagatgaaggccatactaggacacttgacacagcaaaagaaatggagcagattacagaagtagagccaccagggcgtttggactccagtactcaagacaggctcatagcgctgaaagcagtaacaaattttggcgttccagttgaagtttttgactctgaagaagctgaaatattccagaagaaacttgatgagaccaccagattgctcagggaactccaggaagcccagaatgaacgtttgagcaccagaccccctccgaacatgatctgtctcttgggtccctcatacagagaaatgcatcttgctgaacaagtgaccaataatcttaaagaacttgcacagcaagtaactccaggtgatatcgtaagcacgtatggagttcgaaaagcaatggggatttccattccttcccccgtcatggaaaacaactttgtggatttgacagaagacactgaagaacctaaaaagacggatgttgctgagtgtggacctggtggaagttgaggctgcctggtatttgattatatattatgtacatactttttcattcttaacttagaaatgcttttcagaagatattaaatatttgtaaattgtgtttttaattaaactttggaacagcgaatttggatgttccagaggttggacttgtattaggtaataaagctggacctgggactcgtga

SEQ ID NO: 68943 - DNA, 1959 bp, Artificial Sequence
  derived and/or modified sequence
atgggcaagaagcacaagaagcacaagagcgacaagcacctgtacgaggagtacgtggagaagcccctgaagctggtgctgaaggtgggcggcaacgaggtgaccgagctgagcaccggcagcagcggccacgacagcagcctgttcgaggacaagaacgaccacgacaagcacaaggacagaaagagaaagaagagaaagaagggcgagaagcagatccccggcgaggagaagggcagaaagagaagaagagtgaaggaggacaagaagaagagagacagagacagagtggagaacgaggccgagaaggacctgcagtgccacgcccccgtgagactggacctgccccccgagaagcccctgaccagcagcctggccaagcaggaggaggtggagcagacccccctgcaggaggccctgaaccagctgatgagacagctgcagagaaaggaccccagcgccttcttcagcttccccgtgaccgacttcatcgcccccggctacagcatgatcatcaagcaccccatggacttcagcaccatgaaggagaagatcaagaacaacgactaccagagcatcgaggagctgaaggacaacttcaagctgatgtgcaccaacgccatgatctacaacaagcccgagaccatctactacaaggccgccaagaagctgctgcacagcggcatgaagatcctgagccaggagagaatccagagcctgaagcagagcatcgacttcatggccgacctgcagaagaccagaaagcagaaggacggcaccgacaccagccagagcggcgaggacggcggctgctggcagagagagagagaggacagcggcgacgccgaggcccacgccttcaagagccccagcaaggagaacaagaagaaggacaaggacatgctggaggacaagttcaagagcaacaacctggagagagagcaggagcagctggacagaatcgtgaaggagagcggcggcaagctgaccagaagactggtgaacagccagtgcgagttcgagagaagaaagcccgacggcaccaccaccctgggcctgctgcaccccgtggaccccatcgtgggcgagcccggctactgccccgtgagactgggcatgaccaccggcagactgcagagcggcgtgaacaccctgcagggcttcaaggaggacaagagaaacaaggtgacccccgtgctgtacctgaactacggcccctacagcagctacgccccccactacgacagcaccttcgccaacatcagcaaggacgacagcgacctgatctacagcacctacggcgaggacagcgacctgcccagcgacttcagcatccacgagttcctggccacctgccaggactacccctacgtgatggccgacagcctgctggacgtgctgaccaagggcggccacagcagaaccctgcaggagatggagatgagcctgcccgaggacgagggccacaccagaaccctggacaccgccaaggagatggagcagatcaccgaggtggagccccccggcagactggacagcagcacccaggacagactgatcgccctgaaggccgtgaccaacttcggcgtgcccgtggaggtgttcgacagcgaggaggccgagatcttccagaagaagctggacgagaccaccagactgctgagagagctgcaggaggcccagaacgagagactgagcaccagacccccccccaacatgatctgcctgctgggccccagctacagagagatgcacctggccgagcaggtgaccaacaacctgaaggagctggcccagcaggtgacccccggcgacatcgtgagcacctacggcgtgagaaaggccatgggcatcagcatccccagccccgtgatggagaacaacttcgtggacctgaccgaggacaccgaggagcccaagaagaccgacgtggccgagtgcggccccggcggcagctag

SEQ ID NO: 68944 - protein, 215 aa, Artificial Sequence
  derived and/or modified sequence
MESKSPWSLRLLICCAAMVAIALLPQQGGQAACFVPTPGPAPAPPGSSATNTNASSAAPRPAKPSAFPPPMYGGVTPGTGSLQPHECGGRCAERCSATAYQKPCLFFCRKCCAACLCVPPGTYGNKNTCPCYNNWKTKRGMYGGVTPGTGSLQPHECGGRCAERCSATAYQKPCLFFCRKCCAACLCVPPGTYGNKNTCPCYNNWKTKRGGPKCP

SEQ ID NO: 68945 - protein, 730 aa, Artificial Sequence
  derived and/or modified sequence
MFSALKKLVGSDQAPGRDKNIPAGLQSMNQALQRRFAKGVQYNMKIVIRGDRNTGKTALWHRLQGRPFVEEYIPTQEIQVTSIHWSYKTTDDIVKVEVWDVVDKGKCKKRGDGLKMENDPQEAESEMALDAEFLDVYKNCNGVVMMFDITKQWTFNYILRELPKVPTHVPVCVLGNYRDMGEHRVILPDDVRDFIDNLDSRPPGSSYFRYAESSMKNSFGLKYLHKFFNIPFLQLQRETLLRQLETNQLDMDATLEELSVQQETEDQNYGIFLEMMEARSRGHASPLAANGQSPSPGSQSPVVPAGAVSTGSSSPGTPQPAPQLPLNAAPPSSVPPVPPSEALPPPACPSAPAPRRSIISRLFGTSPATEAAPPPPEPVPAAEGPATVQSVEDFVPDDRLDRSFLEDTTPARDEKKVGAKAAQQDSDSDGEALGGNPMVAGFQDDVDLEDQPRGSPPLPAGPVPSQDITLSSEEEAEVAAPTKGPAPAPQQCSEPETKWSSIPASKPRRGTAPTRTAAPPWPGGVSVRTGPEKRSSTRPPAEMEPGKGEQASSSESDPEGPIAAQMLSFVMDDPDFESEGSDTQRRADDFPVRDDPSDVTDEDEGPAEPPPPPKLPLPAFRLKNDSDLFGLGLEEAGPKESSEEGKEGKTPSKEKKKKKKKGKEEEEKAAKKKSKHKKSKDKEEGKEERRRRQQRPPRSRERTAADELEAFLGGGAPGGRHPGGGDYEEL

SEQ ID NO: 68946 - protein, 521 aa, Artificial Sequence
  derived and/or modified sequence
MFSALKKLVGSDQAPGRDKNIPAGLQSMNQALQRRFAKGVQYNMKIVIRGDRNTGKTALWHRLQGRPFVEEYIPTQEIQVTSIHWSYKTTDDIVKVEVWDVVDKGKCKKRGDGLKMENDPQEAESEMALDAEFLDVYKNCNGVVMMFDITKQWTFNYILRELPKVPTHVPVCVLGNYRDMGEHRVILPDDVRDFIDNLDSRPPGSSYFRYAESSMKNSFGLKYLHKFFNIPFLQLQRETLLRQLETNQLDMDATLEELSVQQETEDQNYGIFLEMMEARSRGHASPLAANGQSPSPGSQSPVVPAGAVSTGSSSPGTPQPAPQLPLNAAPPSSVPPVPPSEALPPPACPSAPAPRRSIISRPPPWGWRLRGALGRRGQWPPWGGGRACHCLGRHLPLYHRLCRCPVAAVCASELEEAGHWWSPGWALQVLGLQAQCEPALQEGRGQLASARLGGHPGPLGAEPPVFLRDVTEAQEGPVRVCLQRLGRGRLAVGCALPRHLLALRAHLGPQHAYGSASGREP

SEQ ID NO: 68947 - protein, 215 aa, Artificial Sequence
  derived and/or modified sequence
  misc_feature (1)..(1): Xaa can be any naturally occurring amino acid
XKIVIRGDRNTGKTALWHRLQGRPFVEEYIPTQEIQVTSIHWSYKTTDDIVKVEVWDVVDKGKCKKRGDGLKMENDPQEAESEMALDAEFLDVYKNCNGVVMMFDITKQWTFNYILRELPKVPTHVPVCVLGNYRDMGEHRVILPDDVRDFIDNLDSRPPGSSYFRYAESSMKNSFGLKYLHKFFNIPFLQLQVSTHHVGWSGCWSLTSFQVSPV

SEQ ID NO: 68948 - DNA, 2193 bp, Artificial Sequence
  derived and/or modified sequence
atgtttagtgccctgaagaaactagttggctccgatcaggcacccggacgcgacaaaaacattccagccggcctacagtccatgaatcaggccctgcagcgaagattcgctaagggggttcagtataacatgaagattgtgattagaggcgaccggaataccgggaagactgccctttggcatagactacagggaagaccattcgtcgaggagtatattcccacacaggaaatccaggtaacatccattcattggtcatataaaaccacagacgatatagtgaaagtagaggtgtgggatgttgtcgacaaggggaagtgcaagaagcgcggcgacgggctgaagatggagaatgatccccaagaggctgagtcagagatggccttagacgcagaatttctcgacgtgtataagaattgcaatggagtggtgatgatgtttgacattaccaagcaatggacctttaactacatcttgagggagttacctaaggtaccaacccatgtccctgtctgtgtgctgggtaattatagagacatgggagaacacagagtcattttgccagatgacgtcagggatttcatcgataatctggactcccgacccccaggctcatcatacttcaggtatgccgagagctcaatgaaaaactcatttggattgaagtatttgcacaagttcttcaacatacctttcctgcagctgcagagggaaacgttgcttagacagctcgaaaccaatcagctcgatatggatgctacgctggaggagttatcagtgcagcaggagacagaggaccagaattacggcatcttcctggagatgatggaggcccggtctcgcggccacgcctcacctcttgcagccaatgggcaatccccttctcctgggtctcagtctccagtcgtgcctgctggtgctgtgtcaacaggatccagttctcctggcaccccacaaccagccccccaactccccctgaacgctgcacctccctcctcagtacctcccgtgccaccctctgaagcacttccgcccccagcctgcccaagcgcgcccgctccaaggcggagcatcatctcccgactgttcgggacatcccctgcgacagaagccgctccccccccaccagaaccagtccccgcggctgaagggccagccacagtacagtccgtagaggacttcgtgccggacgaccgtctagataggagttttctggaggataccacccctgcaagggacgagaagaaggtgggcgccaaggcagctcagcaggacagtgactcagacggggaagctctaggtggtaatccaatggtagccggctttcaggatgacgtcgacctcgaggaccagccacgcggctccccacccctgcctgctgggccggtgccctctcaggacattaccctgtcatccgaggaggaggccgaggtggccgctcctactaaaggccccgcacctgccccccaacaatgcagcgagccggagaccaaatggtcttctatccccgcatctaaaccgcgccgggggacagcaccgaccaggaccgccgctcctccttggccgggtggtgtgtcagttcgaaccggcccggaaaagaggagtagcactaggcccccagccgagatggaacctggcaagggggagcaggcgagcagctccgaatctgatcccgaaggtcctatagccgcccagatgctgtctttcgtgatggacgatcctgactttgagagcgagggatctgatacccaaagaagagcagacgactttcctgtgagagacgacccgagcgatgtcacagatgaggacgaaggacccgccgaacctcctccaccaccaaagttgccactacccgcctttcgactcaagaatgattcagacctgtttggcctcggactggaagaagccggcccaaaggagtcatctgaggaaggtaaagaggggaaaaccccatcaaaggagaagaagaagaagaaaaagaaggggaaggaagaagaggaaaaggccgcaaagaagaaaagcaagcacaagaagagcaaggacaaggaggaaggcaaggaggaacggcggaggcgccaacaacggcctcctcgctcccgcgagaggacggcggccgacgaactggaggcatttctcggcggcggggcccccggcggccgccatccgggagggggggactacgaagaattatag

SEQ ID NO: 68949 - DNA, 1566 bp, Artificial Sequence
  derived and/or modified sequence
atgttcagtgcactgaaaaagctcgtcgggtccgatcaggctccgggacgggacaagaatatccctgctggcctccagagcatgaaccaggctttgcagcggaggtttgctaagggtgtccaatacaacatgaagattgtgattagaggggacagaaacactggcaagacagccctgtggcaccggctccagggtcggcctttcgtcgaggagtacattccaactcaagagatccaggtcacaagcatccattggtcctacaagaccacggatgatatagtcaaagtggaagtttgggacgtcgttgacaaggggaagtgcaaaaagcggggcgatggcttaaagatggagaacgatccacaggaggcagagagtgagatggccctggatgctgaatttttggatgtatacaagaactgcaacggcgtggtcatgatgttcgatataacgaaacaatggacctttaactatatcctgcgcgagctcccaaaagtgcctacccacgtccccgtgtgcgttctcgggaactacagggatatgggggagcaccgcgtgattctacccgatgacgtgagagacttcattgataatctagacagcagaccgccgggaagcagctacttcaggtatgccgagagcagcatgaaaaacagcttcgggctgaaatatctgcataagtttttcaatattccttttctccaactgcagcgcgagaccttactgagacagctggagacaaaccagctcgacatggacgcgaccctggaggagctgtccgtccagcaggagaccgaagaccaaaattacggcatcttcctggagatgatggaggccaggtcaagggggcacgcttccccattggccgcgaacgggcaatctccaagccctggaagccagagtcctgttgttcctgccggggccgttagcacaggctccagctcaccaggcaccccacagcccgcacctcagctccccctcaatgctgcgcctccttcttcagtgcccccagtgcccccaagtgaggcactacctcctcccgcctgcccatctgccccagcgcctcgccggagcattatcagccggcctcctccgtggggctggagactccgcggcgccctgggacgccgaggccagtggccaccctggggcggcggtagggcctgccattgcctggggcgacatctccccctttaccatcgcttatgccgctgccccgtcgcagctgtgtgtgctagtgagctggaagaggcggggcactggtggtcgccaggctgggctttacaggtgcttgggctgcaagcccagtgcgagcctgccttgcaggagggacgtggtcaactggctagcgcccgcctggggggccatcctggtcctttaggggccgaaccacccgtgttcctgcgcgacgtcaccgaggcacaagagggcccggtccgcgtatgcctacaaaggttgggtcgtggccgcttggccgttggctgtgcactccctagacatctccttgctctcagggcccaccttggtcctcagcacgcatatggcagcgcatcagggcgtgaaccttag

SEQ ID NO: 68950 - DNA, 2193 bp, Artificial Sequence
  derived and/or modified sequence
atgttttctgccctgaagaagctggtgggcagtgaccaggcccctggccgggacaagaacatcccagctggcctgcagagcatgaaccaggccctgcagaggagatttgccaagggcgtgcagtacaacatgaagatcgtcatccggggggacaggaacacaggcaagacagccctgtggcaccggctgcagggccggccctttgtggaggagtacatccccacccaggagatccaggtgaccagcatccactggagctacaagaccacagatgacatcgtgaaggtggaggtgtgggatgtggtggacaagggcaagtgcaagaagagaggagatggcctgaagatggagaatgacccccaggaggccgagagcgagatggccctggatgctgagttcctggatgtgtacaagaactgcaatggagtggtgatgatgtttgacatcaccaagcagtggaccttcaactacatcctgcgggagctgcccaaggtgcccacccacgtgcctgtgtgtgtgctgggcaactacagagacatgggagagcacagggtcatcctgcctgatgatgtgcgggacttcatcgacaacctggacagccggcccccaggcagcagctacttccgctatgcagagagctccatgaagaacagctttggcctgaagtacctgcacaagttcttcaacatccccttcctgcagctgcagcgggagaccctgctgcggcagctggagaccaaccagctggacatggatgccaccctggaggagctgtctgtgcagcaggagacagaggaccagaactacggcatcttcctggagatgatggaggcccggagccggggccacgccagccccctggccgccaacggccagagccccagccctggcagccagagccctgtggtgcctgctggagctgtgtccacaggcagcagcagccctggcaccccccagcctgccccccagctgcccctgaatgctgccccacccagctctgtgccccctgtgccccccagcgaggccctgcccccaccagcctgccccagcgccccagcccccaggaggagcatcatcagccggctgtttggcaccagccctgccacagaagctgcccctcctcctcctgagcctgtgcctgctgctgagggccctgccaccgtgcagagcgtggaggactttgtgcctgatgaccggctggaccgctccttcctggaggacaccaccccagccagagatgagaagaaggtgggcgccaaggccgcccagcaggacagcgacagtgatggagaggccctgggcggcaaccccatggtggccggcttccaggatgatgtggacctggaggaccagccccggggcagcccccccctgcctgctggccctgtgcccagccaggacatcaccctgagcagcgaggaggaggccgaggtggccgcccccaccaagggccctgccccagccccccagcagtgcagcgagcctgagaccaagtggagcagcatcccagccagcaagccccggcggggcacagcccccaccaggacagctgccccaccctggccaggcggcgtgtctgtgaggactggacctgagaagaggagcagcaccaggcctcctgctgagatggagcctggaaaaggagagcaggccagcagcagcgagagtgaccctgagggccccatcgccgcccagatgctgagctttgtgatggatgatcctgactttgagagcgagggcagtgacacccagaggagagcagatgacttccctgtgagagatgaccccagtgatgtgacagatgaagatgagggccctgctgagcccccacctccacccaagctgcccctgcctgccttccggctgaagaatgacagcgacctgtttggcctgggcctggaggaggccggccccaaggagagcagcgaggagggcaaggagggcaagacccccagcaaggagaagaagaagaagaagaagaagggcaaggaggaggaggagaaggccgccaagaagaagagcaagcacaagaagagcaaggacaaggaggagggcaaggaggagaggagaagacggcagcagaggcctcccaggagccgggagaggacagctgctgatgagctggaggccttcctgggcggcggggcccctgggggccgccaccctgggggcggggactatgaggagctgtag

SEQ ID NO: 68951 - DNA, 1566 bp, Artificial Sequence
  derived and/or modified sequence
atgttttctgccctgaagaagctggtgggcagtgaccaggcccctggccgggacaagaacatcccagctggcctgcagagcatgaaccaggccctgcagaggagatttgccaagggcgtgcagtacaacatgaagatcgtcatccggggggacaggaacacaggcaagacagccctgtggcaccggctgcagggccggccctttgtggaggagtacatccccacccaggagatccaggtgaccagcatccactggagctacaagaccacagatgacatcgtgaaggtggaggtgtgggatgtggtggacaagggcaagtgcaagaagagaggagatggcctgaagatggagaatgacccccaggaggccgagagcgagatggccctggatgctgagttcctggatgtgtacaagaactgcaatggagtggtgatgatgtttgacatcaccaagcagtggaccttcaactacatcctgcgggagctgcccaaggtgcccacccacgtgcctgtgtgtgtgctgggcaactacagagacatgggagagcacagggtcatcctgcctgatgatgtgcgggacttcatcgacaacctggacagccggcccccaggcagcagctacttccgctatgcagagagctccatgaagaacagctttggcctgaagtacctgcacaagttcttcaacatccccttcctgcagctgcagcgggagaccctgctgcggcagctggagaccaaccagctggacatggatgccaccctggaggagctgtctgtgcagcaggagacagaggaccagaactacggcatcttcctggagatgatggaggcccggagccggggccacgccagccccctggccgccaacggccagagccccagccctggcagccagagccctgtggtgcctgctggagctgtgtccacaggcagcagcagccctggcaccccccagcctgccccccagctgcccctgaatgctgccccacccagctctgtgccccctgtgccccccagcgaggccctgcccccaccagcctgccccagcgccccagcccccaggaggagcatcatcagccggcccccaccctggggctggaggctgcggggggccctgggcagaagaggccagtggccaccctggggcggcggccgggcctgccactgcctgggccgccacctgcccctgtaccaccggctgtgccgctgccctgtggccgctgtgtgtgccagcgagctggaggaggccggccactggtggagccctggctgggccctgcaggtgctgggcctgcaggcccagtgtgagcccgccctgcaggagggccggggccagctggccagcgcccggctgggcggccaccctggccccctgggcgctgagccccctgtgttcctgagagatgtgacagaggcccaggagggccctgtgcgggtgtgcctgcagaggctgggccggggccgcctggccgtgggctgtgccctgcccaggcacctgctggccctgcgggcccacctgggcccccagcacgcctacggcagcgccagcggccgggagccctag

SEQ ID NO: 68952 - DNA, 2193 bp, Artificial Sequence
  derived and/or modified sequence
atgttcagcgccctgaagaagctggtgggcagcgaccaggcccccgggcgggataagaacatacctgccggtttgcaatcaatgaaccaggcccttcagaggagatttgctaagggagtacagtacaacatgaagatcgtcattaggggcgatagaaatacagggaagacagctctctggcacagactgcaaggtagacctttcgtagaggagtatattcccacacaggagatccaggtgacatcaattcattggagttacaagaccactgacgacatcgtgaaagtggaagtgtgggacgtggtggacaagggtaaatgcaagaaaaggggagacggtttgaaaatggagaacgatccccaggaggccgagtcagagatggctttagacgcagagttcctggatgtctataagaattgcaacggagtagtgatgatgttcgatattactaagcagtggacattcaactacattctcagggaacttccaaaggtgccaactcacgtgcccgtatgcgtgctaggaaactatcgggacatgggcgaacaccgcgtgatactcccagatgacgtcagggactttatcgacaacctggattcaaggccacccggcagcagttatttcaggtacgccgaaagttctatgaagaatagcttcggcctaaagtacttacacaagttcttcaacattcccttcctccagctgcagcgggaaactctgctgaggcagctggaaactaaccaactcgatatggatgccacactggaggagcttagcgtacaacaggaaactgaagatcagaactacggaatattcctcgaaatgatggaggcccggtctaggggccacgccagtccgttagccgcaaacggccagagcccatctcctggatcccagagcccggtggtccctgctggcgctgtcagcacgggcagctcttcccccggaactccccagccagccccccagcttcccctgaatgctgccccacctagttccgtgccgccagtacccccctccgaagccctccccccaccagcgtgccctagtgcaccggctcctcggcggtctattatctctaggttgttcgggacctcacccgcaaccgaagctgcacctccacctccagagcccgtgcccgccgcagagggtcccgcaaccgttcagagtgttgaagacttcgtgcctgacgaccgactggacaggagctttctagaagacactacacccgctcgggatgaaaaaaaggtgggggctaaagccgcgcagcaggacagcgattcagatggagaggccctcgggggcaaccccatggtggctggctttcaggatgatgttgacctggaggaccagcctagaggaagcccgcctctcccggctggcccagtcccaagtcaggacataactttgtctagtgaggaggaagccgaagtcgctgctcccaccaaaggccccgctcctgctccccagcaatgcagtgagcctgaaaccaaatggagcagcatcccagcctccaagccgcgcaggggcacagccccaacacgcacagcggcccctccgtggcccggcggggtctcggtaaggaccggaccagaaaaaagaagctctacaagaccccccgccgaaatggaacctggcaagggggagcaggcgtcttcttctgaatccgaccccgagggaccgatagctgctcagatgctgtccttcgtcatggatgaccctgatttcgagtccgaggggtccgatacgcagagacgggctgacgattttcccgtgagagatgaccccagcgacgtgactgatgaagacgagggacccgccgaaccgcccccacctcccaagctgccgttgccggcattccgcctgaaaaacgatagtgatctgtttggactcggactcgaagaggcaggccccaaggagtcctccgaggaaggtaaggaagggaaaactccttctaaagagaaaaagaaaaaaaagaagaagggtaaagaggaggaggaaaaagccgcaaaaaagaagtcaaaacacaaaaagagtaaggataaagaagagggaaaggaagagaggagaagacggcagcagcgcccacctagatcaagggagagaacagccgccgatgaattggaggcgttcctgggcggcggcgctcctggaggacgtcaccccggaggcggagactatgaagagctgtag

SEQ ID NO: 68953 - DNA, 1566 bp, Artificial Sequence
  derived and/or modified sequence
atgttcagcgccctgaagaagctggtgggcagcgaccaggcccccggccgcgacaaaaacatccctgcggggctacaatctatgaatcaagctcttcagagacgctttgctaaaggagtgcaatacaacatgaagatcgtcatcaggggggaccggaacactgggaaaaccgctctttggcatagacttcaggggcggccttttgtcgaggaatatattcccactcaggaaatccaggtgacatccatacactggtcctataagaccactgatgatatcgtgaaagtggaagtgtgggacgtggttgataaagggaagtgcaagaagagaggcgatggcctcaaaatggaaaacgatccgcaagaggcagagtcagagatggctctggatgccgagttcctagacgtctataagaattgcaacggcgtggttatgatgtttgatatcaccaagcagtggactttcaactacatcctcagagagctgccaaaagtgcccacgcatgttcctgtgtgcgtcctcggtaattaccgcgacatgggagaacatcgcgttatcttacctgacgacgtacgggactttatcgacaacctggactcgcgcccgccggggtcctcatatttccgctacgccgagagttctatgaagaattcatttgggctgaaataccttcacaagtttttcaacatccccttcttgcagctgcagagagaaaccctgctgcgacagctcgagacaaaccagctggatatggacgctaccttggaggaactgtctgtacagcaggagaccgaagatcaaaactacggtatctttctggagatgatggaggcgcgctcgagaggacacgctagccctctggccgctaatggtcagtcaccaagtcctggctcgcagtcccccgtggtgcccgctggcgcggtctctacggggtcaagcagcccagggaccccgcagccagctccccagctgccactcaacgctgccccccctagctctgttcctcctgtgccccctagcgaagctctgccacctcccgcctgtcctagcgctcctgcccctcggaggtccattatttccagaccacctccgtggggctggcgcctgcgcggtgccctcgggaggagagggcagtggcccccctggggcggcggccgggcgtgtcattgtctcggaaggcatctgccactgtaccacaggctgtgtcggtgccctgtagcggctgtgtgtgcctctgagttggaggaggccgggcactggtggagtcctgggtgggccctccaagtgctgggcttgcaggctcaatgcgaaccagcgctgcaggagggccgcgggcagttggccagtgccagactcgggggtcatcctgggccccttggggcagagccacctgttttcctgcgtgatgtgaccgaagctcaggagggccctgtgagagtgtgcctgcagaggctgggacgcggcaggctggctgtgggttgcgccttgccacgtcatcttctggcgcttcgcgctcatctggggcctcagcacgcgtacggcagtgccagtgggcgtgagccttag

SEQ ID NO: 68954 - DNA, 2193 bp, Artificial Sequence
  derived and/or modified sequence
atgttcagcgccctgaagaagttagtgggcagcgaccaggcgcctggacgcgataagaatataccagccggattacagtcaatgaatcaggctctccagcgccgtttcgccaagggtgttcagtataatatgaagattgtgatccggggagacagaaatactggcaagacagctctgtggcacaggctgcagggccgtccatttgtggaggaatacatcccaacccaagagattcaagtcacgagcattcactggtcatacaagaccaccgacgacatcgtcaaggttgaagtgtgggacgtggtggacaaagggaagtgcaagaaacgtggagacggtctgaagatggagaatgatcctcaagaggcagaatctgaaatggcccttgatgcagagttcctggacgtatacaagaattgcaacggtgtcgtcatgatgttcgatataacaaagcagtggacgttcaactatattctccgcgagctacctaaggtgcctacacacgtgcccgtatgcgtgctgggaaactatcgcgatatgggtgagcacagagtgatcctccctgatgatgttcgagattttatcgacaacctggattcaaggcctccaggttccagctactttcggtatgcggagtcttcaatgaaaaatagcttcggcttaaagtacctccacaagttcttcaacatcccattccttcaattacagagggagaccctgctgcgacagctggaaactaaccagttagatatggacgccactctggaagaattatcagtgcagcaggagacagaagatcagaattacggcatcttcttggaaatgatggaagccaggtcccgcggtcatgctagccccctggccgctaatggacagtcgccctcacctggctctcagtctcctgtggtacccgcaggggcagtatctactggttccagctcacccggaaccccccaacccgcacctcagcttcctctgaacgccgctcctcccagctctgtcccccctgtgcctccaagcgaagctctgcctcccccagcttgcccttctgcacccgctccacggaggtcaatcatttccaggttatttggcacttcacccgcaaccgaggccgcaccccctccgccagagcccgtacctgctgcagagggcccagcaaccgtgcaatctgtggaggattttgttccggatgacaggctagatcgtagcttcctggaggacaccacccctgctcgtgacgagaagaaggtgggggctaaagccgctcaacaggactccgactcggatggggaagccctaggcggaaatccgatggtcgcaggcttccaggatgacgttgaccttgaagatcagcctcgtggatccccgcctctgcctgctggcccagtacctagccaggacatcaccctgtccagcgaagaggaagctgaggtggccgctcccacaaaaggccctgcccctgcgcctcagcagtgcagcgaaccagaaaccaaatggagttctatccccgcatcgaagcccagacgaggcacggcaccaactcgcactgctgccccaccatggcccggtggcgtcagcgtccgcaccgggccagaaaaaagatccagtacacgcccaccagcagaaatggagcccggaaaaggggaacaggccagttcgtcggaaagtgatccagaaggcccaattgcagcacagatgctatccttcgtgatggacgaccccgacttcgaatccgaaggctcggatacacagagaagagccgacgattttccagtgagagacgacccgagcgatgttactgacgaagatgaagggccagcggaacctcccccacccccaaagctacccctccctgcgttcaggctgaagaatgacagcgatctgttcggtttgggccttgaggaagccggacccaaggaatcttccgaagaaggaaaggagggaaagaccccttccaaggaaaaaaagaagaagaagaagaaagggaaggaggaagaggagaaagctgctaagaagaaatccaagcataaaaagtccaaggataaagaggaaggaaaggaggagcgcagacggcgtcaacaaaggcccccaagaagcagagaacgcacagccgctgatgagctggaagctttccttggcggaggtgctcccggagggagacatccaggcggtggagactatgaggaactctag

SEQ ID NO: 68955 - DNA, 1566 bp, Artificial Sequence
  derived and/or modified sequence
atgttctctgccctcaagaaactcgtgggttcggatcaagcacctggccgtgacaagaacatccctgccggtctgcagtctatgaaccaggcgctccaacggaggttcgccaagggggtccagtataacatgaaaattgtgattaggggcgaccgcaacacggggaaaactgctctctggcaccgactgcaggggaggccatttgtcgaagagtacattcctacacaggaaattcaggtgaccagtatacattggtcctacaaaaccactgatgatatcgtgaaagtggaagtgtgggacgttgtggacaaaggcaaatgcaagaagcgcggagacggtctgaaaatggaaaatgaccctcaggaagcagagtccgagatggcacttgacgccgagttcctggacgtgtacaaaaactgtaatggcgtagttatgatgttcgatattactaagcaatggaccttcaattatattctccgtgagctgcccaaagtccccacccacgtgcccgtctgcgtgctcggtaattaccgggacatgggtgaacaccgtgttatactgcccgacgatgtgcgtgatttcatcgataatctcgactctcgccctcctggctccagctatttccgttacgccgaaagtagcatgaagaattctttcggcctgaagtacctgcacaaatttttcaatattcctttcctgcaacttcagagggagacacttctgaggcagctggaaacaaaccaactggatatggatgcaacattggaggaattgagtgttcagcaggagaccgaggaccagaactatgggatttttttggaaatgatggaagctcgatcgagggggcacgcttcacccctggcagccaatggacaaagcccgagccctgggtcccagtcaccggtcgtgcctgccggagctgtttcaacaggaagctccagtcctggcacaccacagcctgcccctcagctgcccctcaacgcagctccccctagctccgttcctcctgtcccgccatcggaggccttgccaccgccagcatgtccttctgctcccgctcccaggagatctatcatttctagaccgccaccttggggctggagattgcgtggcgcacttggacggagagggcagtggcccccatgggggggaggcagggcttgccattgtttgggaagacaccttcctctgtatcaccggctgtgccgttgcccagtggcagcagtgtgtgcctccgagctggaagaagccggtcactggtggagtcccggttgggccctccaggtgctcggcctccaggcacagtgtgagcctgctctgcaggaaggacggggacaactcgcctctgcccgtcttggcggacacccaggccctctcggcgcagagcctcccgtttttttacgggatgtgaccgaggctcaagaggggccagtgcgcgtatgcctgcaacggctaggcaggggtcgattagccgtcggctgcgccttgccaagacacctgcttgccctgagggctcacctaggacctcagcatgcctacggtagcgcctccgggagagaaccatag

SEQ ID NO: 68956 - DNA, 3133 bp, Artificial Sequence
  derived and/or modified sequence
cctcccgtcccgccgagccggcgccaagatggcggcgctgactcctggagagcggtcgcgccggaggccgcgggggccggagcggagcagccgcggctgaggttcccgagtcgccgctcggggctgcgctccgccgccgggaccccggcctctggccgcgccggctccggcctccgggggggccggggccgccgggacatggtgccagtcgcaccccttccccgccgccgctgagctcgccggccgcgcccgggctgggacgtccgagcgggaagatgttttccgccctgaagaagctggtggggtcggaccaggccccgggccgggacaagaacatccccgccgggctgcagtccatgaaccaggcgttgcagaggcgcttcgccaagggggtgcagtacaacatgaagatagtgatccggggagacaggaacacgggcaagacagcgctgtggcaccgcctgcagggccggccgttcgtggaggagtacatccccacacaggagatccaggtcaccagcatccactggagctacaagaccacggatgacatcgtgaaggttgaagtctgggatgtagtagacaaaggaaaatgcaaaaagcgaggcgacggcttaaagatggagaacgacccccaggaggcggagtctgaaatggccctggatgctgagttcctggacgtgtacaagaactgcaacggggtggtcatgatgttcgacattaccaagcagtggaccttcaattacattctccgggagcttccaaaagtgcccacccacgtgccagtgtgcgtgctgggaaactaccgggacatgggcgagcaccgagtcatcctgccggacgacgtgcgtgacttcatcgacaacctggacagcagacctccaggttcctcctacttccgctatgctgagtcttccatgaagaacagcttcggcctaaagtaccttcataagttcttcaatatcccatttttgcagcttcagagggagacgctgttgcggcagctggagacgaaccagctggacatggacgccacgctggaggagctgtcggtgcagcaggagacggaggaccagaactacggcatcttcctggagatgatggaggctcgcagccgtggccatgcgtccccactggcggccaacgggcagagcccatccccgggctcccagtcaccagtggtgcctgcaggcgctgtgtccacggggagctccagccccggcacaccccagcccgccccacagctgcccctcaatgccgccccaccatcctctgtgccccctgtaccaccctcagaggccctgcccccacctgcgtgcccctcagcccccgccccacggcgcagcatcatctctaggctgtttgggacgtcacctgccaccgaggcagcccctccacctccagagccagtcccggccgcagagggcccagcaacggtccagagtgtggaggactttgttcctgacgaccgcctggaccgcagcttcctggaagacacaacccccgccagggacgagaagaaggtgggggccaaggctgcccagcaggacagcgacagtgatggggaggccctgggcggcaacccgatggtggcagggttccaggacgatgtggacctcgaagaccagccacgtgggagtcccccgctgcctgcaggccccgtccccagtcaagacatcactctttcgagtgaggaggaagcagaagtggcagctcccacaaaaggccctgccccagctccccagcagtgctcagagccagagaccaagtggtcctccataccagcttcgaagccacggagggggacagctcccacgaggaccgcagcacccccctggccaggcggtgtctctgttcgcacaggtccggagaagcgcagcagcaccaggccccctgctgagatggagccggggaagggtgagcaggcctcctcgtcggagagtgaccccgagggacccattgctgcacaaatgctgtccttcgtcatggatgaccccgactttgagagcgagggatcagacacacagcgcagggcggatgactttcccgtgcgagatgacccctccgatgtgactgacgaggatgagggccctgccgagccgcccccaccccccaagctccctctccccgccttcagactgaagaatgactcggacctcttcgggctggggctggaggaggccggacccaaggagagcagtgaggaaggtaaggagggcaaaaccccctctaaggagaagaagaagaagaagaaaaaaggcaaagaggaagaagaaaaagctgccaagaagaagagcaaacacaagaagagcaaggacaaggaggagggcaaggaggagcggcgacggcggcagcagcggcccccgcgcagcagggagaggacggctgccgatgagctggaggctttcctggggggcggggccccgggcggccgccaccctgggggtggcgactacgaggagctctaggccggcgtgggcagtggccgccctggggcggggggcgtgcctgtcactgcctggggaggcatttgcctctgtaccatcgcctttgccgctgccccgtggctgccgtgtgcgcttctgagctggaagaggccgggcattggtggtccccaggctgggccctgcaggtgctgggccttcaggcccagtgtgagcctgctctgcaagaagggaggggacagctggcttcagccaggctcggtggacaccctggccctctcggggcagagccgccagtgtttctcagggatgtgactgaggcccaggagggacctgtgagggtctgtttacagaggctgggcaggggccgcttggctgtggggtgtgcgctgccccggcacctgcttgccctccgcgctcatctggggccgcagcatgcctatggttccgcttccggccgggagccctgaacacgggtgtgcagactcaccctaaagggcggcccaggccccacgctagaaggctggcgagaccgaaggcagcatgtgaggcctctcctgggagtgggggttgtgtttcccacagtggcctcagctgcgcccccgctcaggtgagcccgaaggcaggagccgggaggcactcctcccaaacactccactcagaccataaagcactcctgtttcactctg

SEQ ID NO: 68957 - DNA, 1841 bp, Artificial Sequence
  derived and/or modified sequence
cctcccgtcccgccgagccggcgccaagatggcggcgctgactcctggagagcggtcgcgccggaggccgcgggggccggagcggagcagccgcggctgaggttcccgagtcgccgctcggggctgcgctccgccgccgggaccccggcctctggccgcgccggctccggcctccgggggggccggggccgccgggacatggtgccagtcgcaccccttccccgccgccgctgagctcgccggccgcgcccgggctgggacgtccgagcgggaagatgttttccgccctgaagaagctggtggggtcggaccaggccccgggccgggacaagaacatccccgccgggctgcagtccatgaaccaggcgttgcagaggcgcttcgccaagggggtgcagtacaacatgaagatagtgatccggggagacaggaacacgggcaagacagcgctgtggcaccgcctgcagggccggccgttcgtggaggagtacatccccacacaggagatccaggtcaccagcatccactggagctacaagaccacggatgacatcgtgaaggttgaagtctgggatgtagtagacaaaggaaaatgcaaaaagcgaggcgacggcttaaagatggagaacgacccccaggaggcggagtctgaaatggccctggatgctgagttcctggacgtgtacaagaactgcaacggggtggtcatgatgttcgacattaccaagcagtggaccttcaattacattctccgggagcttccaaaagtgcccacccacgtgccagtgtgcgtgctgggaaactaccgggacatgggcgagcaccgagtcatcctgccggacgacgtgcgtgacttcatcgacaacctggacagcagacctccaggttcctcctacttccgctatgctgagtcttccatgaagaacagcttcggcctaaagtaccttcataagttcttcaatatcccatttttgcagcttcagagggagacgctgttgcggcagctggagacgaaccagctggacatggacgccacgctggaggagctgtcggtgcagcaggagacggaggaccagaactacggcatcttcctggagatgatggaggctcgcagccgtggccatgcgtccccactggcggccaacgggcagagcccatccccgggctcccagtcaccagtggtgcctgcaggcgctgtgtccacggggagctccagccccggcacaccccagcccgccccacagctgcccctcaatgccgccccaccatcctctgtgccccctgtaccaccctcagaggccctgcccccacctgcgtgcccctcagcccccgccccacggcgcagcatcatctctaggccgccaccctgggggtggcgactacgaggagctctaggccggcgtgggcagtggccgccctggggcggggggcgtgcctgtcactgcctggggaggcatttgcctctgtaccatcgcctttgccgctgccccgtggctgccgtgtgcgcttctgagctggaagaggccgggcattggtggtccccaggctgggccctgcaggtgctgggccttcaggcccagtgtgagcctgctctgcaagaagggaggggacagctggcttcagccaggctcggtggacaccctggccctctcggggcagagccgccagtgtttctcagggatgtgactgaggcccaggagggacctgtgagggtctgtttacagaggctgggcaggggccgcttggctgtggggtgtgcgctgccccggcacctgcttgccctccgcgctcatctggggccgcagcatgcctatggttccgcttccggccgggagccctga

SEQ ID NO: 68958 - DNA, 2193 bp, Artificial Sequence
  derived and/or modified sequence
atgttcagcgccctgaagaagctggtgggcagcgaccaggcccccggcagagacaagaacatccccgccggcctgcagagcatgaaccaggccctgcagagaagattcgccaagggcgtgcagtacaacatgaagatcgtgatcagaggcgacagaaacaccggcaagaccgccctgtggcacagactgcagggcagacccttcgtggaggagtacatccccacccaggagatccaggtgaccagcatccactggagctacaagaccaccgacgacatcgtgaaggtggaggtgtgggacgtggtggacaagggcaagtgcaagaagagaggcgacggcctgaagatggagaacgacccccaggaggccgagagcgagatggccctggacgccgagttcctggacgtgtacaagaactgcaacggcgtggtgatgatgttcgacatcaccaagcagtggaccttcaactacatcctgagagagctgcccaaggtgcccacccacgtgcccgtgtgcgtgctgggcaactacagagacatgggcgagcacagagtgatcctgcccgacgacgtgagagacttcatcgacaacctggacagcagaccccccggcagcagctacttcagatacgccgagagcagcatgaagaacagcttcggcctgaagtacctgcacaagttcttcaacatccccttcctgcagctgcagagagagaccctgctgagacagctggagaccaaccagctggacatggacgccaccctggaggagctgagcgtgcagcaggagaccgaggaccagaactacggcatcttcctggagatgatggaggccagaagcagaggccacgccagccccctggccgccaacggccagagccccagccccggcagccagagccccgtggtgcccgccggcgccgtgagcaccggcagcagcagccccggcaccccccagcccgccccccagctgcccctgaacgccgccccccccagcagcgtgccccccgtgccccccagcgaggccctgcccccccccgcctgccccagcgcccccgcccccagaagaagcatcatcagcagactgttcggcaccagccccgccaccgaggccgccccccccccccccgagcccgtgcccgccgccgagggccccgccaccgtgcagagcgtggaggacttcgtgcccgacgacagactggacagaagcttcctggaggacaccacccccgccagagacgagaagaaggtgggcgccaaggccgcccagcaggacagcgacagcgacggcgaggccctgggcggcaaccccatggtggccggcttccaggacgacgtggacctggaggaccagcccagaggcagcccccccctgcccgccggccccgtgcccagccaggacatcaccctgagcagcgaggaggaggccgaggtggccgcccccaccaagggccccgcccccgccccccagcagtgcagcgagcccgagaccaagtggagcagcatccccgccagcaagcccagaagaggcaccgcccccaccagaaccgccgcccccccctggcccggcggcgtgagcgtgagaaccggccccgagaagagaagcagcaccagaccccccgccgagatggagcccggcaagggcgagcaggccagcagcagcgagagcgaccccgagggccccatcgccgcccagatgctgagcttcgtgatggacgaccccgacttcgagagcgagggcagcgacacccagagaagagccgacgacttccccgtgagagacgaccccagcgacgtgaccgacgaggacgagggccccgccgagcccccccccccccccaagctgcccctgcccgccttcagactgaagaacgacagcgacctgttcggcctgggcctggaggaggccggccccaaggagagcagcgaggagggcaaggagggcaagacccccagcaaggagaagaagaagaagaagaagaagggcaaggaggaggaggagaaggccgccaagaagaagagcaagcacaagaagagcaaggacaaggaggagggcaaggaggagagaagaagaagacagcagagaccccccagaagcagagagagaaccgccgccgacgagctggaggccttcctgggcggcggcgcccccggcggcagacaccccggcggcggcgactacgaggagctgtag

SEQ ID NO: 68959 - DNA, 1566 bp, Artificial Sequence
  derived and/or modified sequence
atgttcagcgccctgaagaagctggtgggcagcgaccaggcccccggcagagacaagaacatccccgccggcctgcagagcatgaaccaggccctgcagagaagattcgccaagggcgtgcagtacaacatgaagatcgtgatcagaggcgacagaaacaccggcaagaccgccctgtggcacagactgcagggcagacccttcgtggaggagtacatccccacccaggagatccaggtgaccagcatccactggagctacaagaccaccgacgacatcgtgaaggtggaggtgtgggacgtggtggacaagggcaagtgcaagaagagaggcgacggcctgaagatggagaacgacccccaggaggccgagagcgagatggccctggacgccgagttcctggacgtgtacaagaactgcaacggcgtggtgatgatgttcgacatcaccaagcagtggaccttcaactacatcctgagagagctgcccaaggtgcccacccacgtgcccgtgtgcgtgctgggcaactacagagacatgggcgagcacagagtgatcctgcccgacgacgtgagagacttcatcgacaacctggacagcagaccccccggcagcagctacttcagatacgccgagagcagcatgaagaacagcttcggcctgaagtacctgcacaagttcttcaacatccccttcctgcagctgcagagagagaccctgctgagacagctggagaccaaccagctggacatggacgccaccctggaggagctgagcgtgcagcaggagaccgaggaccagaactacggcatcttcctggagatgatggaggccagaagcagaggccacgccagccccctggccgccaacggccagagccccagccccggcagccagagccccgtggtgcccgccggcgccgtgagcaccggcagcagcagccccggcaccccccagcccgccccccagctgcccctgaacgccgccccccccagcagcgtgccccccgtgccccccagcgaggccctgcccccccccgcctgccccagcgcccccgcccccagaagaagcatcatcagcagaccccccccctggggctggagactgagaggcgccctgggcagaagaggccagtggcccccctggggcggcggcagagcctgccactgcctgggcagacacctgcccctgtaccacagactgtgcagatgccccgtggccgccgtgtgcgccagcgagctggaggaggccggccactggtggagccccggctgggccctgcaggtgctgggcctgcaggcccagtgcgagcccgccctgcaggagggcagaggccagctggccagcgccagactgggcggccaccccggccccctgggcgccgagccccccgtgttcctgagagacgtgaccgaggcccaggagggccccgtgagagtgtgcctgcagagactgggcagaggcagactggccgtgggctgcgccctgcccagacacctgctggccctgagagcccacctgggcccccagcacgcctacggcagcgccagcggcagagagccctag

SEQ ID NO: 68960 - protein, 314 aa, Artificial Sequence
  derived and/or modified sequence
MFSALKKLVGSDQAPGRDKNIPAGLQSMNQALQRRFAKGVQYNMKIVIRGDRNTGKTALWHRLQGRPFVEEYIPTQEIQVTSIHWSYKTTDDIVKVEVWDVVDKGKCKKRGDGLKMENDPQEAESEMALDAEFLDVYKNCNGVVMMFDITKQWTFNYILRELPKVPTHVPVCVLGNYRDMGEHRVILPDDVRDFIDNLDRPPGSSYFRYAESSMKNSFGLKYLHKFFNIPFLQLQKDVRLAQERGCAVVLVSEEVRMPAGWDCCWGRLGWKEGGSQTCPVPALLGRPLLPAEPSPHHWVDYSLESSPLLSCSIP

SEQ ID NO: 68961 - protein, 225 aa, Artificial Sequence
  derived and/or modified sequence
  misc_feature (1)..(1): Xaa can be any naturally occurring amino acid
XDDIVKVEVWDVVDKGKCKKRGDGLKMENDPQEAESEMALDAEFLDVYKNCNGVVMMFDITKQWTFNYILRELPKVPTHVPVCVLGNYRDMGEHRVILPDDVRDFIDNLDRPPGSSYFRYAESSMKNSFGLKYLHKFFNIPFLQLQKDVRLAQERGCAVVLVSEEVRMPAGWDCCWGRLGWKEGGSQTCPVPALLGRPLLPAEPSPHHWVDYSLESSPLLSCSIP

SEQ ID NO: 68962 - DNA, 945 bp, Artificial Sequence
  derived and/or modified sequence
atgtttagtgccctaaagaaactcgtgggctcggaccaggcacctggccgcgacaagaacattccggctggactgcagagtatgaatcaggctttgcagagaaggtttgcaaaaggcgttcaatacaatatgaaaatcgtgattaggggtgatagaaatactggaaaaactgccctctggcatcggctccagggccggccattcgtggaagaatatatccccacacaggagatccaggtcacttccattcactggagctataaaactaccgatgatattgtgaaagtcgaggtctgggacgtggtcgacaaggggaaatgcaagaaacggggggacggcctgaaaatggagaacgacccccaggaggctgagtctgagatggctctggacgccgaattcctggatgtttacaaaaactgtaatggcgtggtcatgatgtttgatattacaaagcagtggaccttcaactatattttgcgagagcttccaaaggtgccaacccacgtaccagtgtgtgtgctgggaaattatcgcgacatgggggagcaccgcgttatcttgcccgacgacgtgagagactttatcgacaacttagacagaccacctggctccagttactttagatatgctgagtcgtcaatgaagaacagttttggactcaaatatctgcacaaattttttaatattccctttctgcagttgcagaaagatgttagacttgcacaggaaaggggatgcgctgtcgtgcttgtttctgaggaagttcgtatgccggcaggctgggactgttgttggggacggttgggttggaaggaggggggctcccagacctgcccggtaccagctcttttaggacggccgcttctgccagccgagccaagtccacaccattgggtggactatagccttgaatcctcccccttgctctcatgctctatcccctag

SEQ ID NO: 68963 - DNA, 678 bp, Artificial Sequence
  derived and/or modified sequence
tgagacgacattgtcaaggttgaggtgtgggatgtggtggataaggggaagtgtaaaaagcgcggcgatggactgaagatggagaacgacccccaagaagccgaatcagagatggccttggacgctgagtttctcgatgtttataagaattgcaacggggtcgtcatgatgtttgatataaccaaacagtggacctttaactatattcttagagaactcccaaaggtgccgacccacgttcccgtttgtgtactggggaattatcgggatatgggcgaacatagggttatacttcccgatgacgtgagggacttcatcgataacctcgacaggccaccagggtcatcttactttcgctacgccgaaagtagtatgaagaactcttttggtctgaagtacctgcacaaattttttaacattcctttcctgcagctccagaaggatgttcggttagcccaggaacgaggttgcgctgtggttctggtcagcgaggaggtgagaatgccagctggctgggactgctgctggggcaggctgggttggaaggagggagggtcccagacctgccccgtgcctgcactcctggggaggccactccttcccgctgagccttcgccacaccactgggtggattattccctcgaatcttcccctctcttgagttgttccattccttag

SEQ ID NO: 68964 - DNA, 648 bp, Artificial Sequence
  derived and/or modified sequence
taaaaaattgtgatcagaggcgacaggaatactggcaagacggcactgtggcatagactccagggcaggccctttgttgaggagtatatccccactcaagaaattcaagtcacctccatacactggtcctataagacgacagatgatattgtgaaagtggaggtgtgggatgtggtcgacaaagggaagtgcaagaaacgcggggatggtttgaagatggagaatgaccctcaggaggctgagtcagaaatggcccttgatgccgagttcctcgatgtctacaagaactgcaatggggtcgtgatgatgtttgacatcaccaagcaatggactttcaattacattctgcgcgaacttcccaaggtgccaactcatgtgccggtttgcgtgctgggaaattaccgtgacatgggtgagcatagagtgatcctgccagatgacgttagggatttcatcgataatctagatagtcggccgcccggtagttcttatttccggtacgctgagtcaagcatgaaaaactcctttggcttaaagtacttacacaagttttttaacatcccattccttcagctgcaggtatctacgcatcatgtaggttggagcgggtgctggagtctgacaagctttcaggtttcccccgtttag

SEQ ID NO: 68965 - DNA, 945 bp, Artificial Sequence
  derived and/or modified sequence
atgttttctgccctgaagaagctggtgggcagtgaccaggcccctggccgggacaagaacatcccagctggcctgcagagcatgaaccaggccctgcagaggagatttgccaagggcgtgcagtacaacatgaagatcgtcatccggggggacaggaacacaggcaagacagccctgtggcaccggctgcagggccggccctttgtggaggagtacatccccacccaggagatccaggtgaccagcatccactggagctacaagaccacagatgacatcgtgaaggtggaggtgtgggatgtggtggacaagggcaagtgcaagaagagaggagatggcctgaagatggagaatgacccccaggaggccgagagcgagatggccctggatgctgagttcctggatgtgtacaagaactgcaatggagtggtgatgatgtttgacatcaccaagcagtggaccttcaactacatcctgcgggagctgcccaaggtgcccacccacgtgcctgtgtgtgtgctgggcaactacagagacatgggagagcacagggtcatcctgcctgatgatgtgcgggacttcatcgacaacctggacaggcctcctggcagcagctacttccgctatgcagagagctccatgaagaacagctttggcctgaagtacctgcacaagttcttcaacatccccttcctgcagctgcagaaggatgtgcggctggcccaggagcggggctgtgctgtggtgctggtgtctgaggaggtgaggatgcctgctggctgggactgctgctggggccgcctgggctggaaggagggcggcagccagacctgccctgtgcctgccctgctgggccggcccctgctgcctgctgagcccagcccccaccactgggtggactacagcctggagagcagccccctgctgagctgcagcatcccctag

SEQ ID NO: 68966 - DNA, 678 bp, Artificial Sequence
  derived and/or modified sequence
tgagatgacatcgtgaaggtggaggtgtgggatgtggtggacaagggcaagtgcaagaagagaggagatggcctgaagatggagaatgacccccaggaggccgagagcgagatggccctggatgctgagttcctggatgtgtacaagaactgcaatggagtggtgatgatgtttgacatcaccaagcagtggaccttcaactacatcctgcgggagctgcccaaggtgcccacccacgtgcctgtgtgtgtgctgggcaactacagagacatgggagagcacagggtcatcctgcctgatgatgtgcgggacttcatcgacaacctggaccggcccccaggcagcagctacttccgctatgcagagagctccatgaagaacagctttggcctgaagtacctgcacaagttcttcaacatccccttcctgcagctgcagaaggatgtgcggctggcccaggagcggggctgtgctgtggtgctggtgtctgaggaggtgaggatgcctgctggctgggactgctgctggggccgcctgggctggaaggagggcggcagccagacctgccctgtgcctgccctgctgggccggcccctgctgcctgctgagcccagcccccaccactgggtggactacagcctggagagcagccccctgctgagctgcagcatcccctag

SEQ ID NO: 68967 - DNA, 648 bp, Artificial Sequence
  derived and/or modified sequence
tgaaaaattgtcatccggggggacaggaacacaggcaagacagccctgtggcaccggctgcagggccggccctttgtggaggagtacatccccacccaggagatccaggtgaccagcatccactggagctacaagaccacagatgacatcgtgaaggtggaggtgtgggatgtggtggacaagggcaagtgcaagaagagaggagatggcctgaagatggagaatgacccccaggaggccgagagcgagatggccctggatgctgagttcctggatgtgtacaagaactgcaatggagtggtgatgatgtttgacatcaccaagcagtggaccttcaactacatcctgcgggagctgcccaaggtgcccacccacgtgcctgtgtgtgtgctgggcaactacagagacatgggagagcacagggtcatcctgcctgatgatgtgcgggacttcatcgacaacctggacagcaggcctcctggcagcagctacttccgctatgcagagagctccatgaagaacagctttggcctgaagtacctgcacaagttcttcaacatccccttcctgcagctgcaggtgtccacccaccacgtgggctggagcggctgctggagcctgaccagcttccaggtgtcccctgtgtag

SEQ ID NO: 68968 - DNA, 945 bp, Artificial Sequence
  derived and/or modified sequence
atgttcagcgccctgaagaagctggtgggcagcgaccaggcccccggcagggacaagaacatcccggctggattacagtctatgaaccaggctctgcagagaagatttgctaagggcgtgcagtacaacatgaaaatagtgattagaggcgatagaaataccggcaaaacggccttgtggcatcgcctccaaggccgacccttcgtcgaggagtatatcccaacacaggagatccaggttacttctatccactggagctacaagaccacggatgacatcgttaaggtggaggtttgggatgttgtggacaagggaaaatgcaaaaaacgaggcgatggactgaagatggaaaacgatccccaggaagcggagtctgagatggcactggatgctgaattcctagatgtttataaaaattgcaatggggttgtcatgatgttcgacatcaccaaacagtggacattcaattacattcttcgggaactgcccaaagtcccaacacacgtgcccgtctgcgtgttggggaactacagagatatgggcgaacaccgggtgatcctgcctgacgatgtccgcgattttatcgataaccttgaccgccctccggggtctagttattttcggtatgcagagtcttccatgaagaacagcttcggtttgaagtacttgcacaagttctttaatattcccttcctgcagcttcaaaaggatgtgagacttgctcaagaacgtgggtgtgccgtggtcctcgtctccgaggaggtcagaatgcccgccgggtgggactgttgttggggacgtctgggttggaaagagggtggaagccagacttgtccagttccagctttgctgggccggcctttgcttcctgccgaaccctctccacaccattgggtggattacagtttggagagctcccccctgttgagttgttcgatcccctag

SEQ ID NO: 68969 - DNA, 678 bp, Artificial Sequence
  derived and/or modified sequence
tgagacgacatcgtgaaggtggaggtgtgggacgtggtggacaagggaaagtgtaaaaagaggggggacggcctcaagatggaaaacgatccgcaggaagcagagagtgaaatggctttagacgctgagttcctggacgtgtacaaaaattgcaatggagtcgtcatgatgttcgacattactaaacaatggactttcaattacattctccgcgagcttccaaaagtcccgactcatgtgccagtctgtgtactgggtaactaccgcgacatgggtgaacatcgcgttatcctgcccgacgacgtcagggactttatagataatttggacaggccacccggctcaagctacttccgctatgctgagtccagtatgaagaacagtttcggtctgaaatacctgcacaaattttttaatattccattcctccagctgcagaaagatgtgagactggcgcaggaaaggggttgtgcagtggttctcgtgtcggaagaggtgcgcatgcccgccgggtgggattgctgctggggtcggctgggctggaaggagggagggtcacagacatgcccagtcccagcacttctgggacggccgctgcttccagctgagcccagcccgcaccactgggttgattatagcttggaatcctccccgctcctttcatgctctattccctag

SEQ ID NO: 68970 - DNA, 648 bp, Artificial Sequence
  derived and/or modified sequence
tgaaagatcgtgatccggggcgaccggaacaccggcaagaccgccttatggcaccgcctgcagggcagaccctttgtggaagagtacatcccaacccaagaaatccaggtgaccagcatccactggagctataagactactgacgacatcgtcaaggtagaggtctgggacgtcgttgataagggaaagtgcaagaagcgcggcgacggattgaagatggaaaatgatcctcaagaggcggagtctgaaatggccctagatgctgagttcctcgacgtttacaagaactgcaatggggttgtcatgatgtttgatataaccaaacaatggacattcaattatattttgcgtgagctgcctaaagtgccaactcacgtacccgtgtgtgtgctaggaaattaccgcgatatgggcgagcacagggtgatcctgcctgacgacgtgagggactttatagacaatttggattcccgcccacccgggagctcttatttccgttatgccgaaagttctatgaagaactcctttgggctgaagtacctgcacaagttctttaacatcccatttcttcagctgcaggtgtcaacccatcacgtgggctggtctggttgttggtccctaacctcctttcaggtctcccccgtttag

SEQ ID NO: 68971 - DNA, 945 bp, Artificial Sequence
  derived and/or modified sequence
atgttcagtgccctaaaaaagctcgtgggaagtgaccaagcaccaggcagagacaagaatatacctgccggattacaatcaatgaatcaggccttgcagcggcgattcgctaagggcgtccaatacaacatgaaaatagttattcggggtgaccgcaatacaggaaagaccgctctgtggcatagacttcaggggcgaccctttgttgaggagtacatcccaacccaggagatccaggtcacctcaatccactggtcttacaaaacaaccgatgatatcgtgaaggtcgaagtatgggacgtggtcgataaaggcaagtgcaagaaacggggtgacgggctgaagatggaaaatgacccacaggaagccgagagcgagatggcgctcgacgcagagtttctggacgtctataagaactgcaatggggtagtgatgatgttcgacatcactaagcagtggacgttcaattatattctgagagagctgcctaaggtgccaacccatgtgcccgtgtgcgtccttggcaactaccgagacatgggcgagcacagggtgatccttcccgacgacgtgagggattttattgacaatctggaccgtcctcctggctctagctactttcgctacgccgagagttctatgaagaacagctttgggctgaagtatttacacaaatttttcaatatccccttcctccaactgcagaaagatgtgcgtctggcccaggaacggggatgcgccgtggtgctagtctcagaggaagtgcgaatgccagctgggtgggattgttgttggggaaggctgggctggaaagagggcggttcccaaacctgccctgtgcctgcccttctggggaggcctttactccccgcagaaccttctccccaccattgggtggactacagtctcgagtcgagccccctgctgagttgttccataccctag

SEQ ID NO: 68972 - DNA, 678 bp, Artificial Sequence
  derived and/or modified sequence
tgagacgatattgtgaaggtcgaggtgtgggatgtggtggataaaggtaaatgcaaaaaacgaggagatggactgaagatggagaacgacccacaggaggcggagtcagagatggccttagatgctgagttcctggacgtctacaagaactgcaacggagtagtcatgatgttcgacattaccaagcagtggacttttaactacattcttagagagttgccgaaggtgccaacacatgttcctgtctgtgtgctcggcaattacagagatatgggagagcaccgggtgatactgcctgacgatgttcgagacttcatcgacaacttagaccgacctccgggaagctcttacttccgttatgctgaaagctcaatgaagaattcctttggactgaagtacctgcacaagttttttaatattcctttcctgcagctgcaaaaagacgtgcggctggctcaggagcggggttgcgcagtcgttctggtcagtgaggaagtcagaatgccggctggctgggattgctgctggggtagactgggctggaaagagggtggcagccagacatgtccagtaccggctctattgggacgtcctctgctccccgctgaaccgtccccccaccactgggtggattactctctggagagttctcctctcctatcctgcagcattccgtag

SEQ ID NO: 68973 - DNA, 648 bp, Artificial Sequence
  derived and/or modified sequence
tagaagatcgttattagaggtgatagaaacactggcaaaactgctctttggcatagactgcaaggacgcccattcgtggaggagtacatcccgacacaggaaatccaggtgacttccattcactggtcatataagaccactgatgacatcgtgaaagtcgaggtgtgggacgtcgtagataaggggaagtgtaaaaaaagaggcgatggtctgaagatggagaacgacccccaagaagccgaaagcgagatggcgttggacgccgagtttctcgacgtatacaagaactgtaatggagtggttatgatgttcgatattacaaaacagtggaccttcaactacatcctccgagaactgccaaaagtccctacacacgtgcctgtgtgtgtcctcgggaactatcgcgacatgggcgagcaccgagttatattacccgatgacgtgcgggatttcatcgataacctggactctcgtccaccagggagctcttacttcagatatgccgagtcctccatgaaaaattcctttgggctgaagtaccttcataagttctttaacattccgttcctacagctccaagtgtccacacatcatgtagggtggtctggttgctggtcgctcacctcattccaagtgtcaccggtgtag

SEQ ID NO: 68974 - DNA, 1603 bp, Artificial Sequence
  derived and/or modified sequence
cctcccgtcccgccgagccggcgccaagatggcggcgctgactcctggagagcggtcgcgccggaggccgcgggggccggagcggagcagccgcggctgaggttcccgagtcgccgctcggggctgcgctccgccgccgggaccccggcctctggccgcgccggctccggcctccgggggggccggggccgccgggacatggtgccagtcgcaccccttccccgccgccgctgagctcgccggccgcgcccgggctgggacgtccgagcgggaagatgttttccgccctgaagaagctggtggggtcggaccaggccccgggccgggacaagaacatccccgccgggctgcagtccatgaaccaggcgttgcagaggcgcttcgccaagggggtgcagtacaacatgaagatagtgatccggggagacaggaacacgggcaagacagcgctgtggcaccgcctgcagggccggccgttcgtggaggagtacatccccacacaggagatccaggtcaccagcatccactggagctacaagaccacggatgacatcgtgaaggttgaagtctgggatgtagtagacaaaggaaaatgcaaaaagcgaggcgacggcttaaagatggagaacgacccccaggaggcggagtctgaaatggccctggatgctgagttcctggacgtgtacaagaactgcaacggggtggtcatgatgttcgacattaccaagcagtggaccttcaattacattctccgggagcttccaaaagtgcccacccacgtgccagtgtgcgtgctgggaaactaccgggacatgggcgagcaccgagtcatcctgccggacgacgtgcgtgacttcatcgacaacctggacagacctccaggttcctcctacttccgctatgctgagtcttccatgaagaacagcttcggcctaaagtaccttcataagttcttcaatatcccatttttgcagcttcagaaggatgtcaggcttgcccaggaaaggggctgtgctgtcgtcctggtgtcagaagaagtgaggatgcctgcaggctgggactgctgctggggacgtttgggttggaaggaaggcggcagtcagacttgtcctgtgccggcactgctggggaggcccctccttcctgcagagccgtcccctcatcactgggttgattactccttagagagctccccactgctcagctgctccattccctaatggtttgccctccaaacccttccaaagcctcccagggagagaacgggaccctggacagagtcttgagctggaagcgtagggctgagctgtgtgtgactatccttttgctatggatgtgttcaagcagatctgatgtcctcgcctgtctcagcagcgggacccctgtttcctctttgtcttgcccctggattgcctggaagcaaatttcaggccttctttatgtcacctaaaaatatttcaaacacatctctaaaaaaatcagttgtttttttaacctgaccgtagtacctaatgtaataccgcatgttaaactcacagaaggtttttcttggagaaataagccacaataacaaattgaaaaaataaaattcccaaagagttct

SEQ ID NO: 68975 - DNA, 887 bp, Artificial Sequence
  derived and/or modified sequence
ggatgacatcgtgaaggttgaagtctgggatgtagtagacaaaggaaaatgcaaaaagcgaggcgacggcttaaagatggagaacgacccccaggaggcggagtctgaaatggccctggatgctgagttcctggacgtgtacaagaactgcaacggggtggtcatgatgttcgacattaccaagcagtggaccttcaattacattctccgggagcttccaaaagtgcccacccacgtgccagtgtgcgtgctgggaaactaccgggacatgggcgagcaccgagtcatcctgccggacgacgtgcgtgacttcatcgacaacctggacagacctccaggttcctcctacttccgctatgctgagtcttccatgaagaacagcttcggcctaaagtaccttcataagttcttcaatatcccatttttgcagcttcagaaggatgtcaggcttgcccaggaaaggggctgtgctgtcgtcctggtgtcagaagaagtgaggatgcctgcaggctgggactgctgctggggacgtttgggttggaaggaaggcggcagtcagacttgtcctgtgccggcactgctggggaggcccctccttcctgcagagccgtcccctcatcactgggttgattactccttagagagctccccactgctcagctgctccattccctaatggtttgccctccaaacccttccaaagcctcccagggagagaacgggaccctggacagagtcttgagctggaagcgtagggctgagctgtgtgtgactatccttttgctatggatgtgttcaagcagatctgatgtcctcgcctgtctcagcagcgggacccctgtttcctctttgtcttgcccctggattgcctggaagcaaatttcagg

SEQ ID NO: 68976 - DNA, 2547 bp, Artificial Sequence
  derived and/or modified sequence
gaagatagtgatccggggagacaggaacacgggcaagacagcgctgtggcaccgcctgcagggccggccgttcgtggaggagtacatccccacacaggagatccaggtcaccagcatccactggagctacaagaccacggatgacatcgtgaaggttgaagtctgggatgtagtagacaaaggaaaatgcaaaaagcgaggcgacggcttaaagatggagaacgacccccaggaggcggagtctgaaatggccctggatgctgagttcctggacgtgtacaagaactgcaacggggtggtcatgatgttcgacattaccaagcagtggaccttcaattacattctccgggagcttccaaaagtgcccacccacgtgccagtgtgcgtgctgggaaactaccgggacatgggcgagcaccgagtcatcctgccggacgacgtgcgtgacttcatcgacaacctggacagcagacctccaggttcctcctacttccgctatgctgagtcttccatgaagaacagcttcggcctaaagtaccttcataagttcttcaatatcccatttttgcagcttcaggtaagcactcaccacgtggggtggagtggctgctggtctctcacctccttccaggtgtctcctgtgtagcaacgggtctccctcctaacccctgagaaagctgtggacctgctcggagattggctgctggcaagggcccagcgttctactgcacctgcctgctctgggtggcagagggtacagggtcctgagggctagacccagtcccaggagcccctccacctctgcggggaccccttgctcagtttcccccagtgtttttggttgtttttgtttgttgagataaggtcttgctgtgtggcccaggctggagtgcagtggcgcaatcatggctcactgcggcctcaaactccggggctcaggcaatcctcccacctgtctcccaaagtgctgggatgccaggcgtgagtcaccgaggtactcgctgttcacatctcacatttccctggtgcttgtgtcaaaaccaaggaaccaactttggcctacggactaaactcactttcctttgtagaaacaagggccaggccagctgtggctgcaaagtagcccagcaaatgatgaggcttgaacctcctcgccctgggctgccctgattgggtctgggggacctgaacctcctcgccctgggctgccctgactgggtctgggggacctgaacctcctcgccctgggctgccccagctgggtctggggacctgaacctcctcgccctgggctgccccgcctgggtctggggacctgaacctcctcgccctgggctgccccgcctgggtctggggacctgaacctcctcgccctgggctgccccacctgggtctggggacctgaacctcctcgccctgggctgccccagctgggtctgggggacctgaacctcctcgccctgggctgccccagctgggtctgggggacctgaacctcctcgccctgggctgccccagctggatctgggggacctgaacctcctcgccctgggctgccccgcctgggtctgggggacctgaacctccttgcctgggctgccccgcctgggtctgggggacctgaacctcctcgccctgggctgccccagctgggtctgggggacctgtacctcctcgccctgggctgccccgcctgggtctgggggacctgaacctcctcgccctgggctgccccgactgggtctgggggacctgaatctcctcaccctgggctgccccagctgggtctggggacctgaacctcctcgccctgggctgccccagctgggtctgggggacctgaacctcctcgccctgggctgccccgactgggtctgggggacctggggcccagctgcagctgcagcagccttggtctttctccagaaggatgtcaggcttgcccaggaaaggggctgtgctgtcgtcctggtgtcagaagaagtgaggatgcctgcaggctgggactgctgctggggacgtttgggttggaaggaaggcggcagtcagacttgtcctgtgccggcactgctggggaggcccctccttcctgcagagccgtcccctcatcactgggttgattactccttagagagctccccactgctcagctgctccattccctaatggtttgccctccaaacccttccaaagcctcccagggagagaacgggaccctggacagagtcttgagctggaagcgtagggctgagctgtgtgtgactatccttttgctatggatgtgttcaagcagatctgatgtcctcgcctgtctcagcagcgggacccctgtttcctctttgtcttgcccctggattgcctggaagcaaatttcaggccttctttatgtcacctaaaaatatttcaaacacatctctaaaaaaatcagttgtttttttaacctgaccgtagtacctaatgtaataccgcatgttaaactcacagaaggtttttcttggagaaataagccacaataacaaattgaaaaaataaaattcccaaagagtt

SEQ ID NO: 68977 - DNA, 945 bp, Artificial Sequence
  derived and/or modified sequence
atgttcagcgccctgaagaagctggtgggcagcgaccaggcccccggcagagacaagaacatccccgccggcctgcagagcatgaaccaggccctgcagagaagattcgccaagggcgtgcagtacaacatgaagatcgtgatcagaggcgacagaaacaccggcaagaccgccctgtggcacagactgcagggcagacccttcgtggaggagtacatccccacccaggagatccaggtgaccagcatccactggagctacaagaccaccgacgacatcgtgaaggtggaggtgtgggacgtggtggacaagggcaagtgcaagaagagaggcgacggcctgaagatggagaacgacccccaggaggccgagagcgagatggccctggacgccgagttcctggacgtgtacaagaactgcaacggcgtggtgatgatgttcgacatcaccaagcagtggaccttcaactacatcctgagagagctgcccaaggtgcccacccacgtgcccgtgtgcgtgctgggcaactacagagacatgggcgagcacagagtgatcctgcccgacgacgtgagagacttcatcgacaacctggacagaccccccggcagcagctacttcagatacgccgagagcagcatgaagaacagcttcggcctgaagtacctgcacaagttcttcaacatccccttcctgcagctgcagaaggacgtgagactggcccaggagagaggctgcgccgtggtgctggtgagcgaggaggtgagaatgcccgccggctgggactgctgctggggcagactgggctggaaggagggcggcagccagacctgccccgtgcccgccctgctgggcagacccctgctgcccgccgagcccagcccccaccactgggtggactacagcctggagagcagccccctgctgagctgcagcatcccctag

SEQ ID NO: 68978 - DNA, 678 bp, Artificial Sequence
  derived and/or modified sequence
tgagacgacatcgtgaaggtggaggtgtgggacgtggtggacaagggcaagtgcaagaagagaggcgacggcctgaagatggagaacgacccccaggaggccgagagcgagatggccctggacgccgagttcctggacgtgtacaagaactgcaacggcgtggtgatgatgttcgacatcaccaagcagtggaccttcaactacatcctgagagagctgcccaaggtgcccacccacgtgcccgtgtgcgtgctgggcaactacagagacatgggcgagcacagagtgatcctgcccgacgacgtgagagacttcatcgacaacctggacagaccccccggcagcagctacttcagatacgccgagagcagcatgaagaacagcttcggcctgaagtacctgcacaagttcttcaacatccccttcctgcagctgcagaaggacgtgagactggcccaggagagaggctgcgccgtggtgctggtgagcgaggaggtgagaatgcccgccggctgggactgctgctggggcagactgggctggaaggagggcggcagccagacctgccccgtgcccgccctgctgggcagacccctgctgcccgccgagcccagcccccaccactgggtggactacagcctggagagcagccccctgctgagctgcagcatcccctag

SEQ ID NO: 68979 - DNA, 648 bp, Artificial Sequence
  derived and/or modified sequence
tgaaagatcgtgatcagaggcgacagaaacaccggcaagaccgccctgtggcacagactgcagggcagacccttcgtggaggagtacatccccacccaggagatccaggtgaccagcatccactggagctacaagaccaccgacgacatcgtgaaggtggaggtgtgggacgtggtggacaagggcaagtgcaagaagagaggcgacggcctgaagatggagaacgacccccaggaggccgagagcgagatggccctggacgccgagttcctggacgtgtacaagaactgcaacggcgtggtgatgatgttcgacatcaccaagcagtggaccttcaactacatcctgagagagctgcccaaggtgcccacccacgtgcccgtgtgcgtgctgggcaactacagagacatgggcgagcacagagtgatcctgcccgacgacgtgagagacttcatcgacaacctggacagcagaccccccggcagcagctacttcagatacgccgagagcagcatgaagaacagcttcggcctgaagtacctgcacaagttcttcaacatccccttcctgcagctgcaggtgagcacccaccacgtgggctggagcggctgctggagcctgaccagcttccaggtgagccccgtgtag

SEQ ID NO: 68980 - protein, 145 aa, Artificial Sequence
  derived and/or modified sequence
MLPRGLKMAPRGKRLSSTPLEILFFLNGWYNATYFLLELFIFLYKGVLLPYPTANLVLDVVMLLLYLGIEVIRLFFGTKGNLCQRKMPLSISVALTFPSAMMASYYLLLQTYVLRLEAIMNGILLFFCGSELLLEVLTLAAFSRI

SEQ ID NO: 68981 - DNA, 438 bp, Artificial Sequence
  derived and/or modified sequence
atgctgcccagaggcctgaagatggcccccagaggcaagagactgagcagcacccccctggagatcctgttcttcctgaacggctggtacaacgccacctacttcctgctggagctgttcatcttcctgtacaagggcgtgctgctgccctaccccaccgccaacctggtgctggacgtggtgatgctgctgctgtacctgggcatcgaggtgatcagactgttcttcggcaccaagggcaacctgtgccagagaaagatgcccctgagcatcagcgtggccctgaccttccccagcgccatgatggccagctactacctgctgctgcagacctacgtgctgagactggaggccatcatgaacggcatcctgctgttcttctgcggcagcgagctgctgctggaggtgctgaccctggccgccttcagcagaatctag

SEQ ID NO: 68982 - DNA, 438 bp, Artificial Sequence
  derived and/or modified sequence
atgctccctcgcggcctcaagatggctccgaggggaaagagactctccagtactccactggagatcctgttctttcttaacggctggtataacgcaacctacttcctgctggagctatttattttcctgtataagggggtcttgttaccataccctaccgccaatctggttctggacgtggtgatgttgttgttgtatctggggattgaggtcatcagactcttctttggaactaaaggaaacctctgtcagagaaagatgccactcagcatttccgtggcgttgacgttccctagcgccatgatggctagctactaccttctgctacaaacctacgtgctaagactcgaagccatcatgaatggcattttactgtttttctgtggcagtgagttgctcctggaagtgctaacactcgctgccttctccaggatctag

SEQ ID NO: 68983 - DNA, 438 bp, Artificial Sequence
  derived and/or modified sequence
atgctgccccggggcctgaagatggccccccggggcaagaggctgagcagcacccccctggagatcctcttcttcctgaatggctggtacaatgccacctacttcctgctggagctgttcatcttcctgtacaagggcgtgctgctgccctaccccacagccaacctggtgctggatgtggtgatgctgctgctgtacctgggcattgaagtcatccgcctcttcttcggcaccaagggcaacctgtgccagaggaagatgcccctgagcatctctgtggccctgaccttccccagcgccatgatggccagctactacctgctgctgcagacctacgtgctgcggctggaggccatcatgaatggcatcctgctcttcttctgtggcagcgagctgctgctggaggtgctgaccctggccgccttcagccgcatctag

SEQ ID NO: 68984 - DNA, 438 bp, Artificial Sequence
  derived and/or modified sequence
atgctgccccggggcctgaagatggccccccggggcaagcggctgagcagtactccactggaaatcctgtttttcctgaacggctggtacaacgcaacctattttctgcttgagctcttcatctttctgtacaagggagttcttttgccctacccaactgccaatctggtgctggacgtagtgatgttgctcttatatctcggtatcgaggtgatcaggctgtttttcggtacgaaggggaacctgtgccagaggaaaatgccactgagtatcagtgtcgctttaacattcccctctgctatgatggccagttattatctgctcctgcaaacttacgtgctccgattggaggccatcatgaatgggattctgctgttcttttgcggctcggagctgctccttgaagtgctgactttggcagcctttagccggatctag

SEQ ID NO: 68985 - DNA, 438 bp, Artificial Sequence
  derived and/or modified sequence
atgctcccccgtgggctcaagatggctccgagaggcaaaagactaagcagcacaccactagagattttattctttctcaacggatggtataacgccacctacttcttactggagctgtttatcttcctctacaaaggcgttttgctcccttaccctacagccaatctcgtcttagatgtagtcatgctgctgttgtatttgggcattgaggtaatcaggctattcttcggtaccaagggaaatctgtgtcagagaaagatgcccctgtcaatctcagtggcactgacctttcccagcgcaatgatggcatcttattacctgctgcttcaaacatatgtgctgcggctggaggctataatgaacggcatactgctgttcttctgcggatcagagctgctccttgaagttcttacactagcagccttttctcggatctag

SEQ ID NO: 68986 - DNA, 1955 bp, Artificial Sequence
  derived and/or modified sequence
cagttttctgtttttttttttttttgagacagagtctcactgtcgcccaggctggagtgcggtggcgcgatctcagctcactgcaacctccgcctcccgggttcgagcgattctcctacctcagcctcccaagtagctgtaactactggcgcgcgccagtacgcccggctaatttttgtatttttagtagagacggggtttcgccatgttggccaggctgatttcgaactcctgacctcaggtgatccatcacctcggcctcccaaagtgctgggattacaggcgtgagccactaagcccggccagcaacacgcttttaccgctgcaaatccggatcaggcaggctttgaagcccagctcacaggccgtctcttggaaactaacttagatttccacctgggagcactttgtcctctcagctcccactgcaccactttatggatcgcgtggtgactcgtttcattttatttatgtgtgttcctggaaaggacgctctatttccttcgtgtctctacctggtaggtaaatcggccgcagaaaagaccaatgctaactccaccctgcatttgcagagatccgtcgctcacaccttttcttgtcttccgttgaaaaaagagaatcgtgggagtaggacctatttgccaatctcctggtaacactatcacaactggccacttccgcccaacgcccggtagtctgagagcctccaaggtcctcccccgcacccctgaggtcctgcagacgacggcgtcgtgggtggtcaccgttatcccttaggtctggagaggggacatccgagcgagggccacttgcggccaggcccgagctcgtccagctccgggtgaccacagagtgccgcgggcgggcagaggggccggaaacccaggccgcttcgtccctgtttccggcagcgccgcgctgctccgggagccgctgtggcagcgtatgctgccacggggactgaagatggcgccgcgaggtaaacggttgtcctccaccccgctggaaatcctgttctttctgaacgggtggtataatgctacctatttcctgctggaacttttcatatttctgtataaaggtgtcctgctaccatatccaacagctaacctagtactggatgtggtgatgctcctcctttatcttggaattgaagtaattcgcctgttttttggtacaaagggaaacctctgccagcgaaagatgccgctcagtattagcgtggccttgaccttcccatctgccatgatggcctcctattacctgctgctgcagacctacgtactccgcctggaagccatcatgaatggcatcttgctcttcttctgtggctcagagcttttacttgaggtgctcaccttggctgctttctccaggatttgaagtacagaatttcagccagcagcccatcaggctgacaccacacatattgcttctggtactttagccacaccagtgagaattggtggggcaagttgtcctgagaaaggctgtgtggcttttcttcagcacagacatttgggcaagcaactcagcataaggccagtgggtaccatcttctaaaccaggaccatcagcccaagagactcttctacactccagtatagggaggggcaaggttattcccatcctgccccttctcagaaccagtcccctgctgacctcaagttctcctccttgatcaccgtggccagagcatctcgtgtggaccatctaggctccttgggcttcaagcaggacctgagccacatgctccctgtacgagctgtgctatacctgtcccacatgagcacggagagcctcatgttggtgggtttccagagtgatgtgaaagcctctcaccccaatcctcggagactgagttccacaacttttttagtagctcatagtgttatttttctactctcttcatgaaactaactttattttataataaatatgtattttctgttgtg

SEQ ID NO: 68987 - protein, 148 aa, Artificial Sequence
  derived and/or modified sequence
MLPRGLKMAPRGKRLSSTPLEILFFLNGWYNATYFLLELFIFLYKGVLLPYPTANLVLDVVMLLLYLGIEVIRLFFGTKGNLCQRKMPLSISVALTFPSAMMASYYLLLQTYVLRLEAIMNGILLFFCGSELLLEVLTLAAFSSMDRI

SEQ ID NO: 68988 - DNA, 447 bp, Artificial Sequence
  derived and/or modified sequence
atgctgcccagaggcctgaagatggcccccagaggcaagagactgagcagcacccccctggagatcctgttcttcctgaacggctggtacaacgccacctacttcctgctggagctgttcatcttcctgtacaagggcgtgctgctgccctaccccaccgccaacctggtgctggacgtggtgatgctgctgctgtacctgggcatcgaggtgatcagactgttcttcggcaccaagggcaacctgtgccagagaaagatgcccctgagcatcagcgtggccctgaccttccccagcgccatgatggccagctactacctgctgctgcagacctacgtgctgagactggaggccatcatgaacggcatcctgctgttcttctgcggcagcgagctgctgctggaggtgctgaccctggccgccttcagcagcatggacagaatctag

SEQ ID NO: 68989 - DNA, 447 bp, Artificial Sequence
  derived and/or modified sequence
atgttgccacggggcctgaagatggctccccgcggcaaacgactctctagcaccccgctggagattttgtttttccttaatggatggtacaatgccacttattttctcttggaactgttcatcttcctgtataagggggtcctgttaccatatcctacagctaatctggtgctggatgtcgtgatgcttctgctgtacctcggcattgaagtcattaggctgtttttcggcactaaaggaaacttgtgtcagaggaaaatgccactgtcgatatcagtggctctcacatttccgtccgccatgatggctagctattacctgctcctgcagacctatgtgctgaggttggaagccataatgaatggaatcctgttgttcttctgcgggagtgaattgctgctggaggttcttacactggctgccttcagttcaatggaccgcatctag

SEQ ID NO: 68990 - DNA, 447 bp, Artificial Sequence
  derived and/or modified sequence
atgctgccccggggcctgaagatggccccccggggcaagaggctgagcagcacccccctggagatcctcttcttcctgaatggctggtacaatgccacctacttcctgctggagctgttcatcttcctgtacaagggcgtgctgctgccctaccccacagccaacctggtgctggatgtggtgatgctgctgctgtacctgggcattgaagtcatccgcctcttcttcggcaccaagggcaacctgtgccagaggaagatgcccctgagcatctctgtggccctgaccttccccagcgccatgatggccagctactacctgctgctgcagacctacgtgctgcggctggaggccatcatgaatggcatcctgctcttcttctgtggcagcgagctgctgctggaggtgctgaccctggccgccttcagctccatggaccgcatctag

SEQ ID NO: 68991 - DNA, 447 bp, Artificial Sequence
  derived and/or modified sequence
atgctgccccggggcctgaagatggccccccggggcaagcggctgagctctactcccctcgagattcttttcttcctgaacggttggtacaatgccacctacttcctcttggaactgttcatattcctatacaagggtgtgctcctaccttatccgactgctaatctcgtgcttgacgtggtgatgctcctgttatacctcgggattgaggtcatacgactgttttttggtaccaaggggaatttatgccagagaaagatgccattaagcatcagcgttgccctgacattcccaagtgcaatgatggcaagctactacctgctgctgcagacatatgtgctgcgactggaagccattatgaacggtatcctcttgtttttttgcggctcggagctccttctcgaagtcctgacgctggctgccttttctagcatggatagaatttag

SEQ ID NO: 68992 - DNA, 447 bp, Artificial Sequence
  derived and/or modified sequence
atgctcccgaggggcctaaaaatggctcctcggggtaagcgtttatctagcaccccccttgaaattcttttctttctgaatgggtggtacaacgctacctacttcctgctggagctctttatttttctatataaaggtgtcctgctcccttacccaacagcaaatctcgtcctggacgttgtgatgctgctgttgtacctgggtattgaagtcatccgtctgtttttcggcacaaaggggaacctgtgccaacgcaagatgccgctgtctataagcgtcgccctcacttttccgtcagctatgatggcctcatactacttactgctccagacttatgtgctcagactggaggcaataatgaatgggatcttgctgttcttttgtggctcagagctccttttggaggtccttaccttagctgccttttcatctatggatcggatttag

SEQ ID NO: 68993 - DNA, 1306 bp, Artificial Sequence
  derived and/or modified sequence
acttccgcccaacgcccggtagtctgagagcctccaaggtcctcccccgcacccctgaggtcctgcagacgacggcgtcgtgggtggtcaccgttatcccttaggtctggagaggggacatccgagcgagggccacttgcggccaggcccgagctcgtccagctccgggtgaccacagagtgccgcgggcgggcagaggggccggaaacccaggccgcttcgtccctgtttccggcagcgccgcgctgctccgggagccgctgtggcagcgtatgctgccacggggactgaagatggcgccgcgaggtaaacggttgtcctccaccccgctggaaatcctgttctttctgaacgggtggtataatgctacctatttcctgctggaacttttcatatttctgtataaaggtgtcctgctaccatatccaacagctaacctagtactggatgtggtgatgctcctcctttatcttggaattgaagtaattcgcctgttttttggtacaaagggaaacctctgccagcgaaagatgccgctcagtattagcgtggccttgaccttcccatctgccatgatggcctcctattacctgctgctgcagacctacgtactccgcctggaagccatcatgaatggcatcttgctcttcttctgtggctcagagcttttacttgaggtgctcaccttggctgctttctccagtatggacaggatttgaagtacagaatttcagccagcagcccatcaggctgacaccacacatattgcttctggtactttagccacaccagtgagaattggtggggcaagttgtcctgagaaaggctgtgtggcttttcttcagcacagacatttgggcaagcaactcagcataaggccagtgggtaccatcttctaaaccaggaccatcagcccaagagactcttctacactccagtatagggaggggcaaggttattcccatcctgccccttctcagaaccagtcccctgctgacctcaagttctcctccttgatcaccgtggccagagcatctcgtgtggaccatctaggctccttgggcttcaagcaggacctgagccacatgctccctgtacgagctgtgctatacctgtcccacatgagcacggagagcctcatgttggtgggtttccagagtgatgtgaaagcctctcaccccaatcctcggagactgagttccacaacttttttagtagctcatagtgttatttttctactctcttcatgaaactaactttattttataataaatatgtattttctgttgtgggggttgcagccttt

SEQ ID NO: 68994 - protein, 1150 aa, Artificial Sequence
  derived and/or modified sequence
MAVPARTCGASRPGPARTARPWPGCGPHPGPGTRRPTSGPPRPLWLLLPLLPLLAAPGASAYSFPQQHTMQHWARRLEQEVDGVMRIFGGVQQLREIYKDNRNLFEVQENEPQKLVEKVAGDIESLLDRKVQALKRLADAAENFQKAHRWQDNIKEEDIVYYDAKADAELDDPESEDVERGSKASTLRLDFIEDPNFKNKVNYSYAAVQIPTDIYKGSTVILNELNWTEALENVFMENRRQDPTLLWQVFGSATGVTRYYPATPWRAPKKIDLYDVRRRPWYIQGASSPKDMVIIVDVSGSVSGLTLKLMKTSVCEMLDTLSDDDYVNVASFNEKAQPVSCFTHLVQANVRNKKVFKEAVQGMVAKGTTGYKAGFEYAFDQLQNSNITRANCNKMIMMFTDGGEDRVQDVFEKYNWPNRTVRVFTFSVGQHNYDVTPLQWMACANKGYYFEIPSIGAIRINTQEYLDVLGRPMVLAGKEAKQVQWTNVYEDALGLGLVVTGTLPVFNLTQDGPGEKKNQLILGVMGIDVALNDIKRLTPNYTLGANGYVFAIDLNGYVLLHPNLKPQTTNFREPVTLDFLDAELEDENKEEIRRSMIDGNKGHKQIRTLVKSLDERYIDEVTRNYTWVPIRSTNYSLGLVLPPYSTFYLQANLSDQILQVKLPISKLKDFEFLLPSSFESEGHVFIAPREYCKDLNASDNNTEFLKNFIELMEKVTPDSKQCNNFLLHNLILDTGITQQLVERVWRDQDLNTYSLLAVFAATDGGITRVFPNKAAEDWTENPEPFNASFYRRSLDNHGYVFKPPHQDALLRPLELENDTVGILVSTAVELSLGRRTLRPAVVGVKLDLEAWAEKFKVLASNRTHQDQPQKCGPNSHCEMDCEVNNEDLLCVLIDDGGFLVLSNQNHQWDQVGRFFSEVDANLMLALYNNSFYTRKESYDYQAACAPQPPGNLGAAPRGVFVPTVADFLNLAWWTSAAAWSLFQQLLYGLIYHSWFQADPAEAEGSPETRESSCVMKQTQYYFGSVNASYNAIIDCGNCSRLFHAQRLTNTNLLFVVAEKPLCSQCEAGRLLQKETHSDGPEQCELVQRPRYRRGPHICFDYNATEDTSDCGRGASFPPSLGVLVSLQLLLLLGLPPRPQPQVLVHASRRL

SEQ ID NO: 68995 - DNA, 3453 bp, Artificial Sequence
  derived and/or modified sequence
atggccgtacccgcccggacatgcggagcaagcaggccaggtccagctcgaacagcacgaccctggcctgggtgcggtccacacccaggccccgggactaggcgccctacttctggacccccccgcccgctttggctgctgctaccactgctccccttgctcgccgctcctggggcttcagcatacagctttccacagcaacataccatgcagcactgggcccgccggctggaacaggaggtggatggggtgatgaggatctttggaggcgtccagcagctccgcgagatttacaaagacaacaggaatctgttcgaggtgcaagagaatgagcctcagaagctcgtggagaaggtggccggggacattgaatctctgcttgaccggaaagtgcaagcactgaagcgtctggcagatgcggcagagaatttccaaaaagcccatcgttggcaggacaatataaaagaggaggacattgtttattatgacgccaaagccgacgctgagctagacgaccccgagtctgaggacgtagagaggggcagcaaagctagcaccctgcggctggatttcatagaagacccgaatttcaagaacaaggtcaactactcctatgctgcagtacagattcccacggacatctacaaggggtctaccgtgatcctcaacgagctgaattggaccgaggcactggagaacgttttcatggaaaatcggcggcaggacccaaccctgctgtggcaggtgttcgggtcagcgacaggagttacccgctattatcctgccactccttggagagcaccgaagaagattgacctgtatgatgtacgaaggaggccatggtacatacagggtgcaagcagtcctaaagatatggtcatcatcgtcgatgttagtggtagcgtcagtggcttaaccctgaaactgatgaaaactagcgtatgcgaaatgctggacacgctgtcagacgatgactacgtgaatgtggcatcattcaatgagaaagcccagccagtcagctgttttactcacttggtgcaggccaatgttaggaacaagaaggtttttaaagaagccgtgcaagggatggtggcaaaaggaactactggttacaaagctggctttgagtacgccttcgaccaactccagaattccaacatcactagggctaactgcaataaaatgattatgatgttcaccgatggaggagaggatcgcgtgcaagacgtgtttgaaaaatacaattggccaaataggactgttcgggtattcacattttcagtcgggcaacacaactatgacgtaacccccctccaatggatggcgtgtgccaataaaggctactactttgagataccaagcatcggagctattagaatcaatacacaagagtacctggatgtgcttggacgccccatggtgctcgccggcaaagaggccaagcaggtgcagtggacgaacgtatatgaggacgcattaggactcgggttagtcgtcaccggcactctgcctgtgttcaacctcacgcaggatgggcccggcgagaagaaaaatcaactgatcctgggcgtgatgggcatcgacgtagcccttaatgacataaaaaggctcactccgaattacaccctcggcgccaatggttacgtgtttgctattgatctgaatggctatgtcctgcttcaccctaatctgaaacctcaaaccaccaattttagggagcctgttactcttgattttctggacgcagaactggaagacgaaaataaggaagaaattcggaggagtatgatcgacggtaacaaaggtcacaaacaaataaggacactagttaagagtctcgatgagcgttacatcgacgaggtaacccggaactacacgtgggtgccaatccgaagcactaactattccttgggacttgttttgcctccctattccaccttctacctccaggcaaatttaagcgaccaaattcttcaggtgaagctgcccatcagtaagcttaaagattttgagttcctattgccttccagcttcgaatccgaaggacacgtgttcattgctccaagggagtactgcaaagatctcaatgccagcgacaataacactgaattcctgaaaaactttattgagctgatggagaaggtgacaccagattcaaagcaatgtaacaattttctactacacaatctcattttggacactgggatcacacagcagctggtagagcgagtttggcgcgatcaggacctgaatacctactcattgctggctgtcttcgctgcaacagacggaggaataacgagagtctttcccaacaaggcagctgaggattggactgaaaatccagaaccttttaatgctagtttctaccggagaagcctcgataatcacggctacgttttcaaacccccacaccaggacgccttattacgtcccctggagcttgagaatgacaccgtggggatcctggtttctactgctgtggaactgtcactaggacgtaggactctgcgccccgcagtagtcggagtgaagctagacctggaggcttgggccgaaaaattcaaggttctcgcaagcaataggacgcaccaggatcagccccagaaatgtggaccaaatagccactgtgagatggactgcgaggtcaacaacgaggacctgctctgcgtgctgattgatgacggcgggttcctggtgctctccaatcagaaccaccaatgggaccaggtcggtagattctttagtgaggtagacgcaaatctgatgctcgccctctataacaattcgttttatacaagaaaagagtcatatgattatcaggccgcatgtgccccccagcctcctggaaatcttggagccgctccgcgaggcgtctttgttcccaccgtggcggacttcctgaatttggcttggtggacctctgcagctgcttggagtctgttccagcagctgctgtacggcttaatttatcacagctggtttcaagctgatccagccgaggccgaaggatctcccgagactcgcgaaagctcttgcgttatgaaacagactcagtactactttgggtcagtcaatgctagctataacgctattatcgattgtggcaattgttctagattgtttcatgcacaaagattgactaacaccaatctgcttttcgtcgtggctgaaaagccgctctgctcgcagtgcgaggctggcagactgctgcagaaggagactcactccgacgggcccgagcagtgtgagctggttcaaagaccccgctatcgccggggaccacacatctgtttcgattacaacgcaacggaagacacatccgattgtggcagaggagcttctttccccccttcactcggggtgctggtttctctccagctcctgcttctgcttggcctgcctccccgcccacaaccccaagtgctggtgcacgcgagcagacgcttatag

SEQ ID NO: 68996 - DNA, 3453 bp, Artificial Sequence
  derived and/or modified sequence
atggctgtgcctgcccggacctgtggggccagcaggcctggccctgccaggacagcccggccctggccaggctgcggcccccaccctggccctggcacccggcggcccaccagcggccccccccggcccctgtggctgctgctgcccctgctgcccctgctggccgcccctggggccagcgcctacagcttcccccagcagcacaccatgcagcactgggcccggcggctggagcaggaggtggatggagtgatgaggatctttggaggagtgcagcagctgcgggagatctacaaggacaacagaaacctgtttgaggtgcaggagaatgagccccagaagctggtggagaaggtggccggggacatcgagagcctgctggacaggaaggtgcaggccctgaagaggctggctgatgctgctgagaacttccagaaggcccaccgctggcaggacaacatcaaggaggaggacatcgtgtactatgatgccaaggcagatgctgagctggatgatcctgagagtgaagatgtggagcggggcagcaaggccagcaccctgcggctggacttcatcgaggaccccaacttcaagaacaaggtgaactacagctatgctgctgtgcagatccccacagacatctacaagggcagcaccgtcatcctgaatgagctgaactggacagaggccctggagaatgtgttcatggagaacagacggcaggaccccaccctgctgtggcaggtgtttggcagcgccaccggggtgacccgctactacccagccaccccctggagggcccccaagaagattgacctgtatgatgtgagaagaagaccctggtacatccagggcgccagcagccccaaggacatggtgatcatcgtggatgtgtctggctctgtgtctggcctgaccctgaagctgatgaagacctctgtgtgtgagatgctggacaccctgagtgatgatgattatgtgaatgtggccagcttcaatgagaaggcccagcctgtgtcctgcttcacccacctggtgcaggccaacgtgaggaacaagaaggtgttcaaggaggccgtgcagggcatggtggccaagggcaccaccggctacaaggccggctttgaatatgcctttgaccagctgcagaacagcaacatcacccgggccaactgcaacaagatgatcatgatgttcacagatggaggagaggacagagtgcaggatgtgtttgagaagtacaactggcccaacagaacagtgcgggtcttcaccttctctgtgggccagcacaactatgatgtgacccccctgcagtggatggcctgtgccaacaagggctactactttgagatccccagcattggagccatccgcatcaacacccaggagtacctggatgtgctgggccggcccatggtgctggccggcaaggaggccaagcaggtgcagtggaccaacgtgtatgaagatgccctgggcctgggcctggtggtgacaggcaccctgcccgtcttcaacctgacccaggacggccctggagagaagaagaaccagctgatcctgggcgtgatgggcattgatgtggccctgaatgacatcaagaggctgacccccaactacaccctgggcgccaacggctacgtgtttgccatcgacctgaatggctacgtgctgctgcaccccaacctgaagccccagaccaccaacttccgggagcctgtgaccctggacttcctggatgctgagctggaggatgagaacaaggaggagatcagaagatccatgattgatggcaacaagggccacaagcagatccgcaccctggtgaagagcctggatgagcgctacattgatgaggtgaccaggaactacacctgggtgcccatccgcagcaccaactacagcctgggcctggtgctgcccccctacagcaccttctacctgcaggccaacctgagtgaccagatcctgcaggtgaagctgcccatcagcaagctgaaggactttgagttcctgctgcccagcagctttgagagcgagggccacgtgttcatcgccccccgggagtactgcaaggacctgaatgccagtgacaacaacacagagttcctgaagaacttcatcgagctgatggagaaggtgaccccagacagcaagcagtgcaacaacttcctgctgcacaacctgatcctggacaccggcatcacccagcagctggtggagcgggtgtggagggaccaggacctgaacacctacagcctgctggccgtgtttgctgccacagatggcggcatcaccagggtcttccccaacaaggctgctgaggactggacagagaaccctgagcccttcaatgccagcttctacagaagaagcctggacaaccacggctacgtgttcaagccaccccaccaggatgccctgctgcggcccctggagctggagaatgacacagtgggcatcctggtgtccacagctgtggagctgagcctgggccgccgcaccctgcggcctgctgtggtgggcgtgaagctggacctggaggcctgggccgagaagttcaaggtgctggccagcaacagaacccaccaggaccagccccagaagtgtggccccaacagccactgtgagatggactgtgaggtgaacaatgaagacctgctgtgtgtgctgattgatgatggcggcttcctggtgctgagcaaccagaaccaccagtgggaccaggtgggccgcttcttcagcgaggtggatgccaacctgatgctggccctgtacaacaacagcttctacaccaggaaggagagctatgactaccaggccgcctgtgccccccagcccccaggcaacctgggcgccgccccccggggcgtgtttgtgcccaccgtggccgacttcctgaacctggcctggtggaccagcgctgctgcctggagcctcttccagcagctgctgtatggcctcatctaccacagctggttccaggccgaccctgctgaggccgagggcagccctgagacccgggagagcagctgtgtgatgaagcagacccagtactacttcggctctgtgaatgccagctacaatgccatcatcgactgtggcaactgcagccgcctcttccacgcccagaggctgaccaacaccaacctgctgtttgtggtggccgagaagcccctgtgcagccagtgtgaggccggccgcctgctgcagaaggagacccacagtgatggccctgagcagtgtgagctggtgcagaggccccgctaccgccggggcccccacatctgctttgactacaatgccacagaggacaccagtgactgtggccgcggggccagcttcccccccagcctgggcgtgctggtgtccctgcagctgctgctgctgctgggcctgcccccccggccccagccccaggtgctggtgcacgccagccggcggctgtag

SEQ ID NO: 68997 - DNA, 3453 bp, Artificial Sequence
  derived and/or modified sequence
atggccgtgcccgcccggacctgcggcgccagccggcccggccccgcaaggaccgcccgaccttggcctgggtgcgggcctcaccccggcccagggaccaggcgacctacatctgggccacctcggcccctgtggttgctgctccctctattgccactgttggccgcgccgggagccagcgcttacagcttcccacagcagcatactatgcagcattgggcaagaagacttgagcaagaggttgatggcgttatgcggatttttgggggcgtgcagcagctgcgggagatttacaaggataaccgcaacctgtttgaagtccaagaaaatgagccacagaaactggtcgaaaaggtggccggcgacatcgaatctcttctcgaccggaaagtgcaggcattgaagcgtttagctgatgcggccgagaattttcagaaagcacacaggtggcaggataacatcaaggaagaagacattgtttattatgacgcaaaagcagacgcagaactcgatgatcccgagagtgaagacgtggagagggggtcgaaagcctcgacacttcgcctggactttatcgaggatcctaatttcaagaacaaggtcaattacagttatgccgccgtgcaaattcctactgacatatacaaaggcagcactgtgatcttaaacgagctcaactggactgaagccctcgaaaacgtgttcatggagaatcggaggcaagatccgacccttttgtggcaagtgtttggcagtgctactggagtaactaggtactaccctgctacaccgtggagggccccaaagaaaattgacttatatgacgtccgccgaagaccatggtatatccagggcgctagttcgcctaaagacatggttattatcgtcgacgtttccggctccgttagtggcctaactctgaagttaatgaagacctccgtgtgtgaaatgctagacaccttgtccgacgatgattacgtaaacgtggcatcattcaacgagaaggctcagccagtgagttgcttcacacatctagtgcaggcaaacgtccgaaacaagaaggtgtttaaggaggcagtccagggaatggtcgcaaaaggaactaccggctataaagcaggcttcgaatacgcctttgaccagctgcagaattccaacattactcgagcaaattgtaataagatgattatgatgtttactgatggtggagaggatagggttcaggacgttttcgagaaatataattggccaaaccgcacagtaagagtgttcacattttctgtgggccaacacaactacgacgtgaccccattgcaatggatggcttgtgccaacaagggctactattttgagattccctctattggcgctattaggattaatactcaggagtatctcgatgttcttggccgcccgatggttcttgcaggaaaagaagccaagcaggttcagtggactaatgtttacgaagacgccctgggattggggctggttgtaacaggtacattgcccgtgttcaacttgacacaagacggaccaggggaaaagaaaaatcaactgatcttaggagtgatgggcattgacgtcgcattaaacgatattaaacgccttacgccaaattatacattgggtgccaacggctatgtgttcgctattgatctgaacggttacgttctgctccatcccaacctcaaaccgcaaaccaccaacttcagggaacctgtcaccttggacttcctggatgcagaactggaggatgaaaacaaggaagagattaggcgatccatgattgacggaaacaaaggccacaagcagatcaggaccctcgtaaagtctctggacgaaaggtatatagacgaggttacgcgcaactacacctgggtgccaatccgtagcacgaactactcactcggcctcgtcctccctccatactctaccttctatcttcaggcgaacctgagtgaccaaatcctgcaggttaaactgcctatttcgaagttaaaagacttcgaattcttactcccgtcctccttcgagagcgagggtcacgtatttattgccccacgagagtattgcaaagatctgaatgcatcagacaacaacaccgaatttctgaaaaattttatcgagttaatggagaaggtgaccccagactctaaacagtgtaacaactttctgctacataacctgattcttgacaccgggatcacgcagcagcttgtcgagagggtgtggagagatcaggacctaaacacttactccctgctggcagtttttgccgcaacagatggcggaatcacaagggtgttccccaacaaggccgccgaggactggacagagaaccccgagccattcaatgccagcttttataggcgatcgctggataaccatggctacgtgttcaaacctcctcaccaggatgcattgcttagacccctggagctggaaaacgatacggttggcatcttagtgtcgaccgccgtggagctgagtctgggtagaaggacgcttcgtcccgccgtcgttggtgtgaaacttgacctagaggcgtgggcagaaaagtttaaagtgttggctagcaacaggactcatcaagaccaaccgcagaagtgcggtcccaacagccactgtgaaatggactgtgaggtcaataacgaagatctgctgtgtgtgcttatcgatgatggcggctttttggtacttagtaaccagaaccatcaatgggaccaggtgggacgattcttcagtgaggtggatgctaatctgatgctagccctgtataataactcattttacacgaggaaggagtcgtacgattaccaggcggcgtgcgctccacagcccccgggcaatctgggagccgcccctagaggggtgttcgttccaacagtcgccgacttcctgaatcttgcgtggtggacatctgcggccgcctggagtctgttccagcagctcctgtacggcctcatctatcactcatggtttcaggccgatccagctgaggcagaaggcagtcctgaaacgagggagtcctcttgcgtgatgaagcagacacaatattatttcggctcagtaaatgccagttataacgcgattatagattgcgggaactgcagcagattgtttcacgcccagcgcctcacaaatacaaacctcctgttcgttgttgcagagaaacctctgtgctcccagtgcgaggcaggccgactgctgcagaaggagacccattcagatggtcctgagcagtgcgagctggtgcagagaccacgttatcgccgcgggccacacatttgctttgactacaatgcaacagaggacacaagcgactgtgggagaggtgcttcatttcccccatcccttggggtgctcgtttccctgcaattgctactactgctaggactgccccccaggccacagccgcaggttctcgtgcatgcctctagacgactttag

SEQ ID NO: 68998 - DNA, 3453 bp, Artificial Sequence
  derived and/or modified sequence
atggccgttcctgcgagaacctgtggtgcctcccgacccggacccgctagaaccgccaggccctggccgggatgtggccctcacccaggaccagggactagacggcctacgagtggtcccccacggccactttggctgcttctgcccctgctacccctgttagcagccccaggcgcatctgcctatagttttcctcaacagcataccatgcagcactgggcacggcgtctggagcaggaggttgacggtgtcatgcgcatcttcggtggagtgcagcagctgcgggaaatctataaggataatcgcaacttgttcgaagtgcaggagaatgaaccacagaagctcgttgagaaagtcgccggtgacatcgaaagccttctcgaccgtaaggtgcaggccttaaaaaggttagctgatgccgctgaaaattttcagaaggcccataggtggcaagacaacattaaagaggaggatatagtgtattatgacgccaaggccgatgctgaattagacgatcccgagagtgaagatgtcgagagaggcagtaaggcttccactctacggttagatttcatcgaagaccccaatttcaagaacaaggtgaattactcttatgctgccgtgcaaatacctactgacatctacaaggggtccaccgtcattctgaacgagctgaattggacagaggccctggagaacgtgtttatggagaacaggcgccaagatcccaccttactttggcaggtgtttggcagcgccactggcgtgactagatattaccctgctacaccatggagggcacccaagaagatcgacctctatgacgtcagacggaggccttggtatatccagggagccagttctcctaaagatatggtgatcattgttgatgttagcggttcagtatcaggcttgaccctcaaactgatgaaaacgtccgtttgtgaaatgctagacactttgtctgatgacgattatgtgaacgttgcgtccttcaatgaaaaggctcaaccagtgtcatgcttcacacacctcgtacaggcgaacgttcgcaacaagaaagttttcaaggaggcagtccaggggatggtggctaagggcactaccggctacaaggccggttttgagtacgcgttcgaccaattgcaaaacagtaatattacaagagccaactgtaacaagatgataatgatgtttacagatggcggtgaagatagagtgcaagatgttttcgaaaagtataactggccgaataggacagttcgagtttttacgttctcagtcggtcagcataattacgatgttacccccctacagtggatggcttgcgcaaacaagggctattatttcgagatcccctcaataggagctatacgcattaatacacaggagtacctggatgtgttgggacggcctatggtgctggctggaaaggaggcgaagcaagtgcagtggacgaacgtgtatgaggacgctctgggattgggcctagttgttaccggaaccctccccgttttcaacctgacacaggatgggcctggtgagaaaaagaatcaactgatcctcggggtgatgggaattgacgtcgctctcaatgacatcaagaggctgacacctaattacaccctcggcgctaatgggtacgtctttgccatagatctgaacggatacgtgttattacatcctaatctgaaaccccagacaacaaatttccgggaacctgtgacactagattttctggatgcggaactagaagacgaaaacaaggaggaaattcgccgttccatgatagacggcaacaagggacataagcaaatcagaactctggtgaaatccctggacgaaaggtacattgatgaggtcacccggaattacacgtgggtcccaatcaggagcaccaactacagtttgggcctggtgcttccgccatactccactttttacctgcaagcaaacctctccgaccagatcctccaagtgaagctccctatcagcaaactcaaggatttcgaattcttgcttcctagtagtttcgagtccgaaggtcacgtcttcatcgccccaagagagtactgtaaggatttgaatgcgtcagacaataacaccgagtttctgaagaacttcatagaattaatggagaaggttactcctgactccaaacagtgcaacaactttctgcttcacaacctcatcctggataccggtatcacccagcaactggttgaacgggtgtggcgcgatcaggacctgaatacatattcactgctggccgtctttgcggctaccgatggtggtatcacacgggtctttccaaacaaagccgctgaagactggaccgaaaacccagaaccatttaacgcgagtttttatcggcgatctctggacaaccatgggtatgttttcaaaccccctcaccaggatgccctattgcgtccgctggaactggaaaacgacactgtgggaattctcgtgagcacagccgtggagctgtccctagggaggcgtacactccgacccgctgtggtcggagtcaaactggacctggaagcctgggccgagaaatttaaggttctagccagcaaccgaacacatcaagatcagccgcagaagtgtggtcccaactctcattgtgaaatggactgcgaggtgaataatgaagatctgctctgtgtgcttatcgacgacgggggttttctcgtcctttctaatcaaaatcatcaatgggatcaggtcggacggttcttttccgaggtggatgccaacttaatgctagcactgtataacaactccttctataccaggaaagagtcttacgactaccaggccgcatgtgcccctcagcctccaggaaacctcggggcagccccacgcggagtctttgttcccactgtcgcagattttctgaatctggcctggtggacgtctgcagccgcttggtctctatttcagcagctcctgtatggtctgatctatcactcctggttccaggcggatcctgcagaagccgaggggtctcctgagacccgagagtcctcatgcgttatgaaacaaacccaatattatttcgggagtgtcaacgcctcatacaacgccataattgactgtggaaactgtagccgcctatttcatgcccagcgccttaccaacacaaatctgctgttcgttgtcgccgaaaaaccgctctgttcccagtgcgaagcaggccgactcctgcagaaggagactcactccgatggaccagagcagtgcgagctggtgcagcggccaaggtacaggcggggtccccacatttgctttgactacaacgctaccgaggacacttcagattgtggacgcggagccagtttccctccaagcctgggcgtgctcgtctcattgcagctgttacttctgttgggcctgcccccaagaccccagccccaggtgttggttcatgcgagccgcaggctgtag

SEQ ID NO: 68999 - DNA, 3453 bp, Artificial Sequence
  derived and/or modified sequence
atggcggtgccggctcggacctgcggcgcctctcggcccggcccagcgcggactgcgcgcccctggcccggctgcggcccccaccctggccccggcacccggcgcccgacgtccgggcccccgcgcccgctgtggctgctgctgccgcttctaccgctgctcgccgcccccggcgcctctgcctacagcttcccccagcagcacacgatgcagcactgggcccggcgtctggagcaggaggtcgacggcgtgatgcggatttttggaggcgtccagcagctccgtgagatttacaaggacaaccggaacctgttcgaggtacaggagaatgagcctcagaagttggtggagaaggtggcaggggacattgagagccttctggacaggaaggtgcaggccctgaagagactggctgatgctgcagagaacttccagaaagcacaccgctggcaggacaacatcaaggaggaagacatcgtgtactatgacgccaaggctgacgctgagctggacgaccctgagagtgaggatgtggaaagggggtctaaggccagcaccctaaggctggacttcatcgaggacccaaacttcaagaacaaggtcaactattcatacgcggctgtacagatccctacggacatctacaaaggctccactgtcatcctcaatgagctcaactggacagaggccctggagaatgtgttcatggaaaaccgcagacaagaccccacactgctgtggcaggtcttcggcagcgccacaggagtcactcgctactacccggccaccccgtggcgagcccccaagaagatcgacctgtacgatgtccgaaggagaccctggtatatccagggggcctcgtcacccaaagacatggtcatcatcgtggatgtgagtggcagtgtgagcggcctgaccctgaagctgatgaagacatctgtctgcgagatgctggacacgctgtctgatgatgactatgtgaatgtggcctcgttcaacgagaaggcacagcctgtgtcatgcttcacacacctggtgcaggccaatgtgcgcaacaagaaggtgttcaaggaagctgtgcagggcatggtggccaagggcaccacaggctacaaggccggctttgagtatgcctttgaccagctgcagaactccaacatcactcgggccaactgcaacaagatgatcatgatgttcacggatggtggtgaggaccgcgtgcaggacgtctttgagaagtacaattggccaaaccggacggtgcgcgtgtttactttctccgtggggcagcataactatgacgtcacaccgctgcagtggatggcctgtgccaacaaaggctactattttgagatcccttccatcggagccatccgcatcaacacacaggaatatctagatgtgttgggcaggcccatggtgctggcaggcaaggaggccaagcaggtgcagtggaccaacgtgtatgaggatgcactgggactggggttggtggtaacagggaccctccctgttttcaacctgacacaggatggccctggggaaaagaagaaccagctgatcctgggcgtgatgggcattgacgtggctctgaatgacatcaagaggctgacccccaactacacgcttggagccaacggctatgtgtttgccattgacctgaacggctacgtgttgctgcaccccaatctcaagccccagaccaccaacttccgggagcctgtgactctggacttcctggatgcggagctagaggatgagaacaaggaagagatccgtcggagcatgattgatggcaacaagggccacaagcagatcagaacgttggtcaagtccctggatgagaggtacatagatgaggtgacacggaactacacctgggtgcctataaggagcactaactacagcctggggctggtgctcccaccctacagcaccttctacctccaagccaatctcagtgaccagatcctgcaggtcaagttgccaatcagcaaactgaaggattttgagttcctgctccccagcagctttgagtctgaaggacacgttttcattgctcccagagagtactgcaaggacctgaatgcctcagacaacaacaccgagttcctgaaaaactttattgagctcatggagaaagtgactccagactccaagcagtgcaacaacttccttctgcacaacctgatcttggacacgggcatcacgcagcagctggtagagcgtgtgtggagggaccaggatctcaacacgtacagcctactggccgtgttcgctgccacagacggtggcatcacccgagtcttccccaacaaggcagctgaggactggacagagaaccctgagcccttcaatgccagcttctaccgccgcagcctggataaccacggttatgtcttcaagcccccacaccaggatgccctgttaaggccgctggagctggagaatgacactgtgggcatcctcgtcagcacagctgtggagctcagcctaggcaggcgcacactgaggccagcagtggtgggcgtcaagctggacctagaggcttgggctgagaagttcaaggtgctagccagcaaccgtacccaccaagaccagcctcagaagtgcggccccaacagccactgtgagatggactgcgaggttaacaatgaggacttactctgtgtcctcattgatgatggaggattcctggtgctgtcaaaccagaaccatcagtgggaccaggtgggcaggttcttcagtgaggtggatgccaacctgatgctggcactctacaataactccttctacacccgcaaggagtcctatgactatcaggcagcctgtgcccctcagccccctggcaacctgggtgctgcaccccggggtgtctttgtgcccaccgttgcagatttccttaacctggcctggtggacctctgctgccgcctggtccctgttccagcagcttctctacggcctcatctaccacagctggttccaagcagaccccgcggaggccgaggggagccccgagacgcgcgagagcagctgcgtcatgaaacagacccagtactacttcggctcggtaaacgcctcctacaacgccatcatcgactgcggaaactgctccaggctgttccacgcgcagagactgaccaacaccaatcttctctttgtggtggccgagaagccgctgtgcagccagtgcgaggctggccggctgctgcagaaggagacgcactcggacggcccggagcagtgtgagctagtgcagagaccgcgataccggagaggcccgcacatctgcttcgactacaacgcgacagaagatacctcagactgtggccgcggggcctccttcccgccgtcgctgggcgtcctggtctccctgcaactgctgctcctcctgggcctgccgccccggccgcagcctcaagtcctcgtccacgcctctcgccgcctctga

SEQ ID NO: 69000 - DNA, 3453 bp, Artificial Sequence
  derived and/or modified sequence
atggccgtgcccgccagaacctgcggcgccagcagacccggccccgccagaaccgccagaccctggcccggctgcggcccccaccccggccccggcaccagaagacccaccagcggcccccccagacccctgtggctgctgctgcccctgctgcccctgctggccgcccccggcgccagcgcctacagcttcccccagcagcacaccatgcagcactgggccagaagactggagcaggaggtggacggcgtgatgagaatcttcggcggcgtgcagcagctgagagagatctacaaggacaacagaaacctgttcgaggtgcaggagaacgagccccagaagctggtggagaaggtggccggcgacatcgagagcctgctggacagaaaggtgcaggccctgaagagactggccgacgccgccgagaacttccagaaggcccacagatggcaggacaacatcaaggaggaggacatcgtgtactacgacgccaaggccgacgccgagctggacgaccccgagagcgaggacgtggagagaggcagcaaggccagcaccctgagactggacttcatcgaggaccccaacttcaagaacaaggtgaactacagctacgccgccgtgcagatccccaccgacatctacaagggcagcaccgtgatcctgaacgagctgaactggaccgaggccctggagaacgtgttcatggagaacagaagacaggaccccaccctgctgtggcaggtgttcggcagcgccaccggcgtgaccagatactaccccgccaccccctggagagcccccaagaagatcgacctgtacgacgtgagaagaagaccctggtacatccagggcgccagcagccccaaggacatggtgatcatcgtggacgtgagcggcagcgtgagcggcctgaccctgaagctgatgaagaccagcgtgtgcgagatgctggacaccctgagcgacgacgactacgtgaacgtggccagcttcaacgagaaggcccagcccgtgagctgcttcacccacctggtgcaggccaacgtgagaaacaagaaggtgttcaaggaggccgtgcagggcatggtggccaagggcaccaccggctacaaggccggcttcgagtacgccttcgaccagctgcagaacagcaacatcaccagagccaactgcaacaagatgatcatgatgttcaccgacggcggcgaggacagagtgcaggacgtgttcgagaagtacaactggcccaacagaaccgtgagagtgttcaccttcagcgtgggccagcacaactacgacgtgacccccctgcagtggatggcctgcgccaacaagggctactacttcgagatccccagcatcggcgccatcagaatcaacacccaggagtacctggacgtgctgggcagacccatggtgctggccggcaaggaggccaagcaggtgcagtggaccaacgtgtacgaggacgccctgggcctgggcctggtggtgaccggcaccctgcccgtgttcaacctgacccaggacggccccggcgagaagaagaaccagctgatcctgggcgtgatgggcatcgacgtggccctgaacgacatcaagagactgacccccaactacaccctgggcgccaacggctacgtgttcgccatcgacctgaacggctacgtgctgctgcaccccaacctgaagccccagaccaccaacttcagagagcccgtgaccctggacttcctggacgccgagctggaggacgagaacaaggaggagatcagaagaagcatgatcgacggcaacaagggccacaagcagatcagaaccctggtgaagagcctggacgagagatacatcgacgaggtgaccagaaactacacctgggtgcccatcagaagcaccaactacagcctgggcctggtgctgcccccctacagcaccttctacctgcaggccaacctgagcgaccagatcctgcaggtgaagctgcccatcagcaagctgaaggacttcgagttcctgctgcccagcagcttcgagagcgagggccacgtgttcatcgcccccagagagtactgcaaggacctgaacgccagcgacaacaacaccgagttcctgaagaacttcatcgagctgatggagaaggtgacccccgacagcaagcagtgcaacaacttcctgctgcacaacctgatcctggacaccggcatcacccagcagctggtggagagagtgtggagagaccaggacctgaacacctacagcctgctggccgtgttcgccgccaccgacggcggcatcaccagagtgttccccaacaaggccgccgaggactggaccgagaaccccgagcccttcaacgccagcttctacagaagaagcctggacaaccacggctacgtgttcaagcccccccaccaggacgccctgctgagacccctggagctggagaacgacaccgtgggcatcctggtgagcaccgccgtggagctgagcctgggcagaagaaccctgagacccgccgtggtgggcgtgaagctggacctggaggcctgggccgagaagttcaaggtgctggccagcaacagaacccaccaggaccagccccagaagtgcggccccaacagccactgcgagatggactgcgaggtgaacaacgaggacctgctgtgcgtgctgatcgacgacggcggcttcctggtgctgagcaaccagaaccaccagtgggaccaggtgggcagattcttcagcgaggtggacgccaacctgatgctggccctgtacaacaacagcttctacaccagaaaggagagctacgactaccaggccgcctgcgccccccagccccccggcaacctgggcgccgcccccagaggcgtgttcgtgcccaccgtggccgacttcctgaacctggcctggtggaccagcgccgccgcctggagcctgttccagcagctgctgtacggcctgatctaccacagctggttccaggccgaccccgccgaggccgagggcagccccgagaccagagagagcagctgcgtgatgaagcagacccagtactacttcggcagcgtgaacgccagctacaacgccatcatcgactgcggcaactgcagcagactgttccacgcccagagactgaccaacaccaacctgctgttcgtggtggccgagaagcccctgtgcagccagtgcgaggccggcagactgctgcagaaggagacccacagcgacggccccgagcagtgcgagctggtgcagagacccagatacagaagaggcccccacatctgcttcgactacaacgccaccgaggacaccagcgactgcggcagaggcgccagcttcccccccagcctgggcgtgctggtgagcctgcagctgctgctgctgctgggcctgccccccagaccccagccccaggtgctggtgcacgccagcagaagactgtag

SEQ ID NO: 69001 - protein, 700 aa, Artificial Sequence
  derived and/or modified sequence
MERAVQGTDGGGGSNSSSRSSSRATSAGSSPSCSLAGRGVSSRSAAAGLGGGGSRSSPGSVAASPSGGGGRRREPALEGVLSKYTNLLQGWQNRYFVLDFEAGILQYFVNEQSKHQKPRGVLSLSGAIVSLSDEAPHMLVVYSANGEMFKLRAADAKEKQFWVTQLRACAKYHMEMNSKMMNQVEGQQKNLVHAIESLPGSGPLTALDQDLLLLKATSAATLSCLGECLNLLQQSVHQAGQPSQKPGASENILGWHGSKSHSTEQLKNGTLGSLPSASANITWAILPNSAEDEQTSQPEPEPNSGSELVLSEDEKSDNEDKEETELGVMEDQRSIILHLISQLKLGMDLTKVVLPTFILEKRSLLEMYADFMAHPDLLLAITAGATPEERVICFVEYYLTAFHEGRKGALAKKPYNPIIGETFHCSWEVPKDRVKPKRTASRSPASCHEHPMADDPSKSYKLRFVAEQVSHHPPISCFYCECEEKRLCVNTHVWTKSKFMGMSVGVSMIGEGVLRLLEHGEEYVFTLPSAYARSILTIPWVELGGKVSINCAKTGYSATVIFHTKPFYGGKVHRVTAEVKHNPTNTIVCKAHGEWNGTLEFTYNNGETKVIDTTTLPVYPKKIRPLEKQGPMESRNLWREVTRYLRLGDIDAATEQKRHLEEKQRVEERKRENLRTPWKPKYFIQEGDGWVYFNPLWKAH

SEQ ID NO: 69002 - DNA, 2103 bp, Artificial Sequence
  derived and/or modified sequence
atggaaagagctgtccagggaacagacggcggaggcgggagcaattcgtccagtagatcaagtagtcgagcgacatcagcagggagctccccttcttgcagtcttgcagggaggggagtgagcagccgcagcgccgctgctggcctcggcggaggcggtagccgatcaagcccaggcagcgttgcggcaagtccaagcggaggaggtgggcggcgacgggaaccagccctagagggggtgctctcaaaatatactaatttactacagggatggcagaatagatactttgtgctcgatttcgaggccggcattctgcagtactttgtcaacgagcagagcaagcaccagaagccccgcggcgtgctgtctctgagcggagccatcgtttcactgtcagatgaggccccccatatgctggttgtgtactcagctaatggcgagatgttcaagctgcgggctgcagacgccaaagaaaaacagttctgggtcacacaattgagggcttgtgctaagtaccatatggaaatgaattcaaagatgatgaatcaagttgagggacaacagaaaaatctggtgcacgccatagagagccttcccggatccgggcccctgactgcactcgaccaggacctgcttctgttaaaggccacctcagctgcaaccttgtcctgtctgggggaatgtttgaatcttctgcagcagtctgttcaccaggccgggcagcccagccagaagcctggcgccagcgagaatattcttggttggcatggctccaagagtcattctaccgagcaactcaaaaatggaacgcttggctctctacctagcgcatcagctaatataacatgggcaatcctccccaatagtgccgaagatgagcagacttcacaaccagaacccgaacccaacagcggatctgaattggtcctctccgaggacgaaaagagtgacaatgaagacaaggaggaaaccgaactgggtgtcatggaagatcaaagaagcattatattgcaccttataagccagctgaagttgggcatggatctgacaaaagtggtcctcccgactttcatcctggagaaacggtccctgctagaaatgtatgcggattttatggcccacccagacctcctccttgccattactgcgggagcgacacctgaggagcgggtgatctgctttgtggagtactatcttactgcctttcacgagggtcggaaaggtgccctggccaagaagccttacaatcctatcataggagagaccttccactgtagctgggaggtccccaaagaccgcgttaagcctaaacgcaccgcgtcgagatccccagcatcttgccacgaacatcccatggctgatgaccccagcaagtcttataagctgcgctttgttgccgagcaggtgagccaccaccccccaataagctgtttctactgcgagtgtgaggagaagcgactctgtgtcaacacacacgtttggactaagagcaagttcatggggatgagcgtgggcgtgtcaatgataggcgaaggggtcctgcgactgctggaacacggcgaagagtatgtctttactctacctagcgcttacgcccggtctatcctgacgattccgtgggtcgagcttggcggaaaggtcagtattaactgcgcgaaaactggatacagtgcaactgtcattttccacacgaagccgttttatggaggcaaagtgcatcgtgttactgcagaggtgaaacacaatccaactaacaccatcgtgtgtaaagcccacggggagtggaacggaacattagagttcacatacaataacggggaaaccaaggttatcgacacaaccactctgcccgtgtatcctaagaaaatccggcctttggaaaagcaaggtcctatggaaagccgcaatctctggagagaagtcactcggtatcttcgtttgggcgatatagatgcggccacagaacagaagagacacctggaggaaaaacaaagagtggaggagaggaagagagagaatctccgtaccccgtggaaacccaaatacttcattcaggaaggagatggctgggtatattttaaccccttgtggaaagcacactag

SEQ ID NO: 69003 - DNA, 2103 bp, Artificial Sequence
  derived and/or modified sequence
atggagagagctgtgcagggcacagatggcggcggcggcagcaacagcagcagccgcagcagcagccgggccaccagcgctggcagcagccccagctgcagcctggccggccggggcgtgagcagccgctctgctgctgctggcctgggcggcggcggcagccgcagcagccctggctctgtggccgccagccccagcggcggcggcggcagaagaagagagcccgccctggagggcgtgctgagcaagtacaccaacctgctgcagggctggcagaaccgctactttgtgctggactttgaggccggcatcctgcagtactttgtgaatgagcagagcaagcaccagaagccccggggcgtgctgagcctgagcggggccatcgtgtccctgagtgatgaggccccccacatgctggtggtgtacagcgccaatggagagatgttcaagctgcgggcagcagatgccaaggagaagcagttctgggtgacccagctgcgggcctgtgccaagtaccacatggagatgaacagcaagatgatgaaccaggtggagggccagcagaagaacctggtgcacgccatcgagagcctgcccggcagcggccccctgacagccctggaccaggacctgctgctgctgaaggccaccagcgctgccaccctgagctgcctgggagaatgtctgaacctgctgcagcagagcgtgcaccaggccggccagcccagccagaagccaggggccagcgagaacatcctgggctggcacggcagcaagagccacagcacagagcagctgaagaatggcaccctgggcagcctgcccagcgccagcgccaacatcacctgggccatcctgcccaacagcgcagaagatgagcagaccagccagcctgagcctgagcccaacagcggcagcgagctggtgctgtctgaagatgagaagagtgacaatgaagacaaggaggagacagagctgggcgtgatggaggaccagaggagcatcatcctgcacctgatcagccagctgaagctgggcatggacctgaccaaggtggtgctgcccaccttcatcctggagaagaggagcctgctggagatgtatgctgacttcatggcccacccagacctgctgctggccatcacagctggggccaccccagaggagagggtcatctgctttgtggagtactacctgacagccttccacgagggcaggaaaggagccctggccaagaagccctacaaccccatcattggagagaccttccactgctcctgggaggtgcccaaggacagagtgaagcccaagaggacagccagccgcagccctgccagctgccacgagcaccccatggctgatgaccccagcaagagctacaagctgcgctttgtggccgagcaggtgagccaccacccccccatcagctgcttctactgtgaatgtgaggagaagaggctgtgtgtgaacacccacgtgtggaccaagagcaagttcatgggcatgtctgtgggcgtgtccatgattggagagggcgtgctgcggctgctggagcacggggaggagtatgtgttcaccctgcccagcgcctatgcccggagcatcctgaccatcccctgggtggagctgggcggcaaggtgtccatcaactgtgccaagacaggctacagcgccaccgtcatcttccacaccaagcccttctacggcggcaaggtgcaccgggtgacagctgaggtgaagcacaaccccaccaacaccatcgtgtgcaaggcccacggggagtggaatggcaccctggagttcacctacaacaatggagagaccaaggtgattgacaccaccaccctgcctgtgtaccccaagaagatccggcccctggagaagcagggccccatggagagcaggaacctgtggagggaggtgacccgctacctgcggctgggggacattgatgctgccacagagcagaagaggcacctggaggagaagcagagggtggaggagaggaagcgggagaacctgcggaccccctggaagcccaagtacttcatccaggagggagatggctgggtgtacttcaaccccctgtggaaggcccactag

SEQ ID NO: 69004 - DNA, 2103 bp, Artificial Sequence
  derived and/or modified sequence
atggagcgggccgtgcagggcaccgacggcggcggcggcagcaactccagtagtaggtcctccagtagggctacctccgcaggcagttcaccatcctgctctctggcggggaggggcgtttctagccgcagcgctgctgccggcttgggagggggcggcagtagaagcagccctggttcagtggccgcctccccaagcggcggcggtggcaggcgaagagagccagccttggagggtgtcttgtccaagtatacaaatctgctccagggttggcagaaccgctatttcgtattggacttcgaggccggcatcctccagtacttcgtaaatgagcagtccaagcatcagaaacctcgaggcgtgctgagtctctctggtgccattgttagcctctctgatgaggcgccccatatgctggttgtctatagcgccaacggtgagatgttcaaactgcgcgccgctgatgccaaggaaaagcaattctgggtgacgcagttgcgagcgtgcgcaaagtaccatatggaaatgaactccaaaatgatgaaccaggtcgaagggcaacaaaaaaacctggtgcatgccatcgagagccttcccggaagtggcccattgaccgctctagaccaagatctgctgttgctgaaagcaacgagcgcagctactctgtcctgcctgggcgaatgtctgaatctgctgcagcaatctgttcaccaggccggacagccttcccagaaaccaggcgcctccgaaaatattctggggtggcacggttctaaaagccactccacggaacaactaaagaatggcaccctggggagtctgccatccgcttccgcaaatatcacttgggctattttgccgaatagcgcagaagacgaacagacttcacagccagagccagagccaaattcaggttccgaactggtcctgtccgaagacgaaaagagcgataatgaagataaagaagagactgaactaggagtgatggaggaccagcgatccataattcttcatctgatttctcagctcaagctgggaatggatcttacaaaagtagttttacctacttttatcctcgaaaagcggtccctgctggagatgtacgctgatttcatggcacacccagacttgctcttggctatcaccgcaggagctaccccagaagagcgtgtcatctgttttgtggaatattacctgacagcctttcatgagggtaggaagggcgcactggcaaagaagccctacaaccccattatcggcgaaactttccattgtagctgggaggttccaaaagaccgcgtaaagcctaaaagaaccgcaagtcgatccccggcctcctgtcatgaacatcccatggcagacgacccttctaaaagctacaagttacgcttcgtggccgagcaggtttcgcaccacccccccatttcttgcttttattgtgagtgtgaggagaaacgtctctgcgttaacacacacgtatggacgaaaagtaagtttatgggaatgtctgtgggcgtcagcatgatcggtgaaggtgtcttgaggctccttgagcatggcgaggagtatgtgttcactctgccgagcgcctatgctcggtcgatcctgactatcccatgggtggaactcggcggcaaggtctcaatcaactgcgcgaaaacggggtacagtgcaacagtgatctttcataccaaaccgttctacgggggcaaggtccaccgagttactgcggaggtgaaacacaacccaacgaacactatcgtctgcaaggcgcacggagaatggaacggcacactcgaatttacctacaataacggtgaaaccaaagtgatagacacgaccaccctgccggtttatccaaaaaagatccggcctctagagaagcagggcccgatggaatcgcggaacctgtggcgggaggttactagatacctgcggctcggcgacatagatgcagcaacagaacagaagaggcacctggaagagaagcagagggtcgaagaacgcaagagggagaacctgcggactccgtggaagccgaagtatttcatacaggaaggtgacggctgggtctattttaatccgctctggaaggcacattag

SEQ ID NO: 69005 - DNA, 2624 bp, Artificial Sequence
  derived and/or modified sequence
tttcccggggatttggagcaggcacgcgcggcccgggcgtccggagctgtagcagcagcagcagccgccgtgccggggccgccaccgcggcgggcacccgcgtcccgggcgcccacggaccatggagagggcagtccagggcacagacggcggcgggggtagcaacagcagcagccgcagcagcagccgtgctacctcggcgggctcctcgccctcctgctctctggcgggccggggggtctccagccggtcggcggcggccgggctcggcggcgggggaagccgcagcagcccgggctctgtggccgctagcccgtccgggggaggcggccgcaggagggagccggcgctcgagggcgtgctcagcaaatacaccaacctcctccagggctggcagaacaggtacttcgtactggatttcgaggctggcatcctgcagtattttgtgaatgagcaaagcaaacaccagaagcctcgaggagtcctgtctttatctggagccatagtgtccctgagcgatgaagctccccacatgctggtggtgtactctgctaatggagagatgtttaaactgagagctgctgatgcaaaagagaaacaattctgggtgactcagcttcgagcttgtgccaaataccacatggaaatgaattctaagatgatgaaccaggtggaagggcagcagaagaaccttgtgcacgccattgagtccctgccagggtccggccccctcactgccttggaccaggacctgctgctcctgaaagctacctctgctgccaccctcagctgccttggggagtgcctcaacttgttacagcagagtgtgcaccaggcgggccagcccagccagaagccaggagcctcggaaaacatcctgggatggcacgggtccaagtcacattccacagagcagctgaaaaatgggacacttggctctttgccatcagccagtgccaacataacctgggcaattttaccaaactctgctgaagacgaacaaacctcacagccagagccagagccaaactcaggctctgaattggttttgtctgaagatgaaaaaagtgacaatgaagataaggaagagacggaattgggcgtcatggaggatcagcgtagtataattcttcatctcatttcacaactcaaacttggaatggatttgaccaaggtggtgcttcccacctttatcctggagaagcgatctttgctggagatgtatgcagatttcatggcgcacccagacctactgctggccatcaccgctggggccacaccagaggagagagtcatttgcttcgttgagtattatctcacagcctttcacgagggccgcaagggcgctttagccaagaagccctacaaccccatcataggcgagacatttcactgctcctgggaagttcccaaggacagggtcaagcctaagaggactgcttcccgctctcctgccagctgtcacgaacacccaatggccgatgacccttccaaaagctacaaactaaggtttgtggctgagcaagtgtcccatcacccacccatctcctgcttctactgtgagtgcgaggagaagagactgtgcgtcaacactcatgtatggaccaaaagcaagttcatgggcatgtccgtgggggtctctatgataggggaaggtgtgttgaggctcctggaacacggggaggagtacgtattcaccctgcctagtgcctacgcccggtccattctcaccatcccgtgggtggagctcggaggaaaagtcagcatcaactgtgccaagactgggtactcagcgacagtgatattccacacgaagcctttctatggagggaaagtccacagggttaccgcagaagtgaagcacaacccaaccaacaccattgtttgtaaagcccatggggaatggaatggtactttagagttcacctacaacaatggagaaaccaaagtcatcgacacaaccacactgccagtgtatcccaagaagatcagacctcttgagaagcagggacccatggagtccaggaacctctggcgggaggtgacccgatacctgcggctgggggacattgacgcagccaccgagcagaagcggcacctggaggagaagcaacgggtggaggaacggaagcgcgagaacctccgcacaccatggaagcccaaatattttatccaggagggcgatggctgggtatacttcaatcccctctggaaagcacactgatggggtggaggtgcagagctttccagtatagccctgtttttgtaggaatattaaagtagtagagtatcagggttttgttggcattcactgagaccttgtattagcatccaagaaatgatgagagagagagaaattatatactatgaaaagtgcacccccacactctgctagaggaatgaatttattcaagagccattcggggcacgtgtgtgtacacaccgtatacgttcacacacatgcactatgtaaacatctgagtatgattacacatttaaatactgcactcaccaaggttaaagtgggtaatcataagctcctttttatcaatgaagtttgaagtttttctatttttcactttgccaaaaatgttttacactcacaaagatattctcacttagtc

SEQ ID NO: 69006 - DNA, 2103 bp, Artificial Sequence
  derived and/or modified sequence
atggaacgggcagttcagggcacggatggtggcggagggtcaaactccagcagccgcagttcctcacgggcaacgagtgctggctctagccccagttgctctctggccggaagaggcgttagctcacgctccgccgcagctggattgggtgggggaggaagtcgctcatctcctggttctgtggccgcatcgcctagtggcggtgggggacggcgtcgcgagcccgctctggaaggtgtcttgagtaagtacaccaacctcttacaggggtggcagaaccgatattttgtcttggacttcgaggcaggaatcctgcagtactttgtgaacgagcaatctaaacaccagaagcctcgaggtgtgctcagcctgtccggcgctatagtgtcgctatcagacgaggcaccccatatgctcgtggtctattctgccaatggtgagatgttcaaactacgcgcagctgacgcaaaggagaaacagttttgggtcacacagctcagggcctgtgccaagtaccacatggaaatgaacagcaagatgatgaatcaggtcgagggccagcagaaaaacttggtacatgccattgaaagtttaccaggaagcggccctctgacagcgctggatcaagacttgctgctcctgaaggctacaagtgccgctactcttagctgcctgggagagtgccttaaccttctccagcaatcagtgcaccaggcaggacagcccagtcagaagccaggggcttcagagaacatccttgggtggcacggcagcaagtctcatagcactgagcagctgaaaaatggcaccctgggttccctaccatccgccagcgctaatatcacgtgggcaattctgcccaactccgctgaagatgaacaaacctcgcagcccgaaccggagcctaacagcgggagtgaactggttttgagtgaagatgagaagtccgacaacgaggataaggaagagaccgagctgggggtaatggaagaccagcggagcatcatacttcatcttatatctcagctaaagcttggaatggacctgacaaaggtggtgttaccaaccttcattctggagaagaggagcctgttagagatgtacgccgatttcatggcccacccagacctgctgctggccatcaccgcgggagccactcccgaggagagggtaatctgctttgttgagtactacctgaccgcattccacgagggcaggaagggagctctggccaagaaaccttataacccaatcatcggagagacattccactgttcttgggaggtccccaaggatcgcgttaagcctaagcgtaccgcgtccagatcaccggcatcatgccacgagcaccctatggctgacgacccctcaaagagctacaagctgcgattcgtcgccgaacaagtatcgcatcaccccccaatctcatgcttttattgtgaatgcgaggagaaacgtctgtgtgtgaatacccatgtctggacaaagagtaaatttatgggcatgtccgtgggggtctctatgatcggcgagggagttctcagactgctggaacatggcgaggagtacgtctttacactcccctctgcttacgctcggagtatccttactatcccctgggttgagcttgggggaaaggtttctatcaattgcgcgaaaactggatacagcgccaccgtcatttttcacacaaaacctttctacggtggtaaagtacaccgcgtgaccgccgaggttaagcataatccgaccaacaccattgtatgcaaggctcacggcgaatggaacggaactctggagttcacgtataataatggggaaacaaaagtaatcgacaccaccacattgcccgtataccccaagaaaatccggcctctggagaaacagggcccaatggagtcacggaatctctggcgggaagtgacgcggtacttgcgccttggggacatcgatgctgcaactgagcagaaacggcacttggaggaaaagcaacgggtggaagagcgcaaaagggaaaacttgaggactccatggaaaccgaaatactttattcaggagggggacggttgggtatactttaatcccctctggaaagcacactag

SEQ ID NO: 69007 - DNA, 2103 bp, Artificial Sequence
  derived and/or modified sequence
atggagagagccgtgcagggcaccgacggcggcggcggcagcaacagcagcagcagaagcagcagcagagccaccagcgccggcagcagccccagctgcagcctggccggcagaggcgtgagcagcagaagcgccgccgccggcctgggcggcggcggcagcagaagcagccccggcagcgtggccgccagccccagcggcggcggcggcagaagaagagagcccgccctggagggcgtgctgagcaagtacaccaacctgctgcagggctggcagaacagatacttcgtgctggacttcgaggccggcatcctgcagtacttcgtgaacgagcagagcaagcaccagaagcccagaggcgtgctgagcctgagcggcgccatcgtgagcctgagcgacgaggccccccacatgctggtggtgtacagcgccaacggcgagatgttcaagctgagagccgccgacgccaaggagaagcagttctgggtgacccagctgagagcctgcgccaagtaccacatggagatgaacagcaagatgatgaaccaggtggagggccagcagaagaacctggtgcacgccatcgagagcctgcccggcagcggccccctgaccgccctggaccaggacctgctgctgctgaaggccaccagcgccgccaccctgagctgcctgggcgagtgcctgaacctgctgcagcagagcgtgcaccaggccggccagcccagccagaagcccggcgccagcgagaacatcctgggctggcacggcagcaagagccacagcaccgagcagctgaagaacggcaccctgggcagcctgcccagcgccagcgccaacatcacctgggccatcctgcccaacagcgccgaggacgagcagaccagccagcccgagcccgagcccaacagcggcagcgagctggtgctgagcgaggacgagaagagcgacaacgaggacaaggaggagaccgagctgggcgtgatggaggaccagagaagcatcatcctgcacctgatcagccagctgaagctgggcatggacctgaccaaggtggtgctgcccaccttcatcctggagaagagaagcctgctggagatgtacgccgacttcatggcccaccccgacctgctgctggccatcaccgccggcgccacccccgaggagagagtgatctgcttcgtggagtactacctgaccgccttccacgagggcagaaagggcgccctggccaagaagccctacaaccccatcatcggcgagaccttccactgcagctgggaggtgcccaaggacagagtgaagcccaagagaaccgccagcagaagccccgccagctgccacgagcaccccatggccgacgaccccagcaagagctacaagctgagattcgtggccgagcaggtgagccaccacccccccatcagctgcttctactgcgagtgcgaggagaagagactgtgcgtgaacacccacgtgtggaccaagagcaagttcatgggcatgagcgtgggcgtgagcatgatcggcgagggcgtgctgagactgctggagcacggcgaggagtacgtgttcaccctgcccagcgcctacgccagaagcatcctgaccatcccctgggtggagctgggcggcaaggtgagcatcaactgcgccaagaccggctacagcgccaccgtgatcttccacaccaagcccttctacggcggcaaggtgcacagagtgaccgccgaggtgaagcacaaccccaccaacaccatcgtgtgcaaggcccacggcgagtggaacggcaccctggagttcacctacaacaacggcgagaccaaggtgatcgacaccaccaccctgcccgtgtaccccaagaagatcagacccctggagaagcagggccccatggagagcagaaacctgtggagagaggtgaccagatacctgagactgggcgacatcgacgccgccaccgagcagaagagacacctggaggagaagcagagagtggaggagagaaagagagagaacctgagaaccccctggaagcccaagtacttcatccaggagggcgacggctgggtgtacttcaaccccctgtggaaggcccactag

SEQ ID NO: 69008 - protein, 812 aa, Artificial Sequence
  derived and/or modified sequence
MAAVTRDFGEMLLHSGRVLPAEAQPWGAPVEVESFLVHPGDLLQLRCRLRDDVQSINWLRDGVQLAESNRTRITGEEVEVQDSVPADSGLYACVTSSPSGSDTTYFSVNVSDALPSSEDDDDDDDSSSEEKETDNTKPNRMPVAPYWTSPEKMEKKLHAVPAAKTVKFKCPSSGTPNPTLRWLKNGKEFKPDHRIGGYKVRYATWSIIMDSVVPSDKGNYTCIVENEYGSINHTYQLDVVERSPHRPILQAGLPANKTVALGSNVEFMCKVYSDPQPHIQWLKHIEVNGSKIGPDNLPYVQILKTAGVNTTDKEMEVLHLRNVSFEDAGEYTCLAGNSIGLSHHSAWLTVLEALEERPAVMTSPLYLEIIIYCTGAFLISCMVGSVIVYKMKSGTKKSDFHSQMAVHKLAKSIPLRRQVSADSSASMNSGVLLVRPSRLSSSGTPMLAGVSEYELPEDPRWELPRDRLVLGKPLGEGCFGQVVLAEAIGLDKDKPNRVTKVAVKMLKSDATEKDLSDLISEMEMMKMIGKHKNIINLLGACTQDGPLYVIVEYASKGNLREYLQARRPPGLEYCYNPSHNPEEQLSSKDLVSCAYQVARGMEYLASKKCIHRDLAARNVLVTEDNVMKIADFGLARDIHHIDYYKKTTNGRLPVKWMAPEALFDRIYTHQSDVWSFGVLLWEIFTLGGSPYPGVPVEELFKLLKEGHRMDKPSNCTNELYMMMRDCWHAVPSQRPTFKQLVEDLDRIVALTSNQEYLDLSMPLDQYSPSFPDTRSSTCSSGEDSVFSHEPLPEEPCLPRHPAQLANGGLKRR

SEQ ID NO: 69009 - DNA, 4157 bp, Artificial Sequence
  derived and/or modified sequence
gcgctcttgcggccacaggcgcggcgtcctcggcggcgggcggcagctagcgggagccgggacgccggtgcagccgcagcgcgcggaggaacccgggtgtgccgggagctgggcggccacgtccggacgggaccgagacccctcgtagcgcattgcggcgacctcgccttccccggccgcgagcgcgccgctgcttgaaaagccgcggaacccaaggacttttctccggtccgagctcggggcgccccgcagggcgcacggtacccgtgctgcagtcgggcacgccgcggcgccggggcctccgcagggcgatggagcccggtctgcaaggaaagtgaggcgccgccgctgcgttctggaggaggggggcacaaggtctggagaccccgggtggcggacgggagccctccccccgccccgcctccggggcaccagctccggctccattgttcccgcccgggctggaggcgccgagcaccgagcgccgccgggagtcgagcgccggccgcggagctcttgcgaccccgccaggacccgaacagagcccgggggcggcgggccggagccggggacgcgggcacacgcccgctcgcacaagccacggcggactctcccgaggcggaacctccacgccgagcgagggtcagtttgaaaaggaggatcgagctcactgtggagtatccatggagatgtggagccttgtcaccaacctctaactgcagaactgggatgtggagctggaagtgcctcctcttctgggctgtgctggtcacagccacactctgcaccgctaggccgtccccgaccttgcctgaacaaggatggcagctgtgacccgggatttcggtgagatgcttctgcactctggccgggtcctgccagccgaagcccagccctggggagcccctgtggaagtggagtccttcctggtccaccccggtgacctgctgcagcttcgctgtcggctgcgggacgatgtgcagagcatcaactggctgcgggacggggtgcagctggcggaaagcaaccgcacccgcatcacaggggaggaggtggaggtgcaggactccgtgcccgcagactccggcctctatgcttgcgtaaccagcagcccctcgggcagtgacaccacctacttctccgtcaatgtttcagatgctctcccctcctcggaggatgatgatgatgatgatgactcctcttcagaggagaaagaaacagataacaccaaaccaaaccgtatgcccgtagctccatattggacatccccagaaaagatggaaaagaaattgcatgcagtgccggctgccaagacagtgaagttcaaatgcccttccagtgggaccccaaaccccacactgcgctggttgaaaaatggcaaagaattcaaacctgaccacagaattggaggctacaaggtccgttatgccacctggagcatcataatggactctgtggtgccctctgacaagggcaactacacctgcattgtggagaatgagtacggcagcatcaaccacacataccagctggatgtcgtggagcggtcccctcaccggcccatcctgcaagcagggttgcccgccaacaaaacagtggccctgggtagcaacgtggagttcatgtgtaaggtgtacagtgacccgcagccgcacatccagtggctaaagcacatcgaggtgaatgggagcaagattggcccagacaacctgccttatgtccagatcttgaagactgctggagttaataccaccgacaaagagatggaggtgcttcacttaagaaatgtctcctttgaggacgcaggggagtatacgtgcttggcgggtaactctatcggactctcccatcactctgcatggttgaccgttctggaagccctggaagagaggccggcagtgatgacctcgcccctgtacctggagatcatcatctattgcacaggggccttcctcatctcctgcatggtggggtcggtcatcgtctacaagatgaagagtggtaccaagaagagtgacttccacagccagatggctgtgcacaagctggccaagagcatccctctgcgcagacaggtgtctgctgactccagtgcatccatgaactctggggttcttctggttcggccatcacggctctcctccagtgggactcccatgctagcaggggtctctgagtatgagcttcccgaagaccctcgctgggagctgcctcgggacagactggtcttaggcaaacccctgggagagggctgctttgggcaggtggtgttggcagaggctatcgggctggacaaggacaaacccaaccgtgtgaccaaagtggctgtgaagatgttgaagtcggacgcaacagagaaagacttgtcagacctgatctcagaaatggagatgatgaagatgatcgggaagcataagaatatcatcaacctgctgggggcctgcacgcaggatggtcccttgtatgtcatcgtggagtatgcctccaagggcaacctgcgggagtacctgcaggcccggaggcccccagggctggaatactgctacaaccccagccacaacccagaggagcagctctcctccaaggacctggtgtcctgcgcctaccaggtggcccgaggcatggagtatctggcctccaagaagtgcatacaccgagacctggcagccaggaatgtcctggtgacagaggacaatgtgatgaagatagcagactttggcctcgcacgggacattcaccacatcgactactataaaaagacaaccaacggccgactgcctgtgaagtggatggcacccgaggcattatttgaccggatctacacccaccagagtgatgtgtggtctttcggggtgctcctgtgggagatcttcactctgggcggctccccataccccggtgtgcctgtggaggaacttttcaagctgctgaaggagggtcaccgcatggacaagcccagtaactgcaccaacgagctgtacatgatgatgcgggactgctggcatgcagtgccctcacagagacccaccttcaagcagctggtggaagacctggaccgcatcgtggccttgacctccaaccaggagtacctggacctgtccatgcccctggaccagtactcccccagctttcccgacacccggagctctacgtgctcctcaggggaggattccgtcttctctcatgagccgctgcccgaggagccctgcctgccccgacacccagcccagcttgccaatggcggactcaaacgccgctgactgccacccacacgccctccccagactccaccgtcagctgtaaccctcacccacagcccctgctgggcccaccacctgtccgtccctgtcccctttcctgctggcaggagccggctgcctaccaggggccttcctgtgtggcctgccttcaccccactcagctcacctctccctccacctcctctccacctgctggtgagaggtgcaaagaggcagatctttgctgccagccacttcatcccctcccagatgttggaccaacacccctccctgccaccaggcactgcctggagggcagggagtgggagccaatgaacaggcatgcaagtgagagcttcctgagctttctcctgtcggtttggtctgttttgccttcacccataagcccctcgcactctggtggcaggtgccttgtcctcagggctacagcagtagggaggtcagtgcttcgtgcctcgattgaaggtgacctctgccccagataggtggtgccagtggcttattaattccgatactagtttgctttgctgaccaaatgcctggtaccagaggatggtgaggcgaaggccaggttgggggcagtgttgtggccctggggcccagccccaaactgggggctctgtatatagctatgaagaaaacacaaagtgtataaatctgagtatatatttacatgtctttttaaaagggtcgttaccagagatttacccatcgggtaagatgctcctggtggctgggaggcatcagttgctatatattaaaaacaaaaaagaaaaaaaaggaaaatgtttttaaaaaggtcatatattttttgctacttttgctgttttatttttttaaattatgttctaaacctattttcagtttaggtccctcaataaaaattgctgctgcttc

SEQ ID NO: 69010 - DNA, 2439 bp, Artificial Sequence
  derived and/or modified sequence
atggctgccgtcacacgcgattttggagagatgctcctccattccggaagagttctgcccgccgaagcgcaaccatggggcgctcctgttgaggtcgaatcgtttctggtgcatcctggagatctacttcagctcagatgtaggctccgggatgacgtacagagtattaactggctgcgagacggcgttcaactcgcggagagcaatcggacacgaataaccggggaagaggtcgaggtgcaggatagcgtccccgcggacagcggactctacgcttgcgtgaccagctccccttctggcagcgatacaacgtattttagcgtgaacgtttccgacgcactgccctctagtgaggacgacgacgatgacgacgacagtagctcagaggaaaaggagactgataacacgaagccaaatcgaatgccggtagccccgtattggacctcccccgagaaaatggagaaaaaactacatgcagtcccagccgccaaaactgtgaagtttaaatgccctagcagcggtactccgaaccctaccctgcggtggctaaaaaatggtaaggaatttaaacctgatcaccgtattggtggctacaaagtgcggtatgccacatggagtatcattatggattccgtcgtaccttccgacaaggggaattacacttgcattgtcgagaacgaatatggatccattaaccacacctatcagctcgacgtagtcgagagatcccctcataggcctatccttcaggctggcctgccggccaataaaacagtcgcacttgggagcaacgtcgaattcatgtgcaaagtttactccgatcctcagccacatatccagtggctcaagcacattgaggtgaacggaagcaaaatcggaccggataacctcccctacgtgcagatattgaagacagccggggtgaacacaacggacaaggagatggaagttttgcatctgcggaacgtctctttcgaagatgccggcgaatatacgtgtcttgccggaaacagtatcgggttgtcacatcattccgcttggctgacagtgctcgaagctctggaggagcgcccagccgtcatgacctccccactgtatctggaaatcatcatatactgcactggagcgtttctcatctcctgtatggtggggtctgtgatcgtatacaagatgaaaagcggtactaagaaatctgattttcacagtcagatggcggtgcacaagctagcaaagtcaattcccctccgacggcaggttagtgcagacagtagcgcgagcatgaactccggtgttctgctggtaaggccgtcgcggctgtcatcttccggaaccccaatgctcgcaggagtgagcgaatacgaattacctgaagaccctcgttgggagctgccacgcgaccgcctcgtccttggaaagccccttggagaaggttgcttcggccaggtagtactcgccgaagctatcggcctggataaggacaaacctaatcgcgtgaccaaagttgctgtgaagatgttaaagtccgatgccactgaaaaggacctgagcgatctgatcagcgagatggaaatgatgaagatgattggcaaacataaaaatatcattaatctgctgggtgcttgtacacaagatgggcctctttacgtcatcgtcgagtatgcgtcaaaaggcaacctccgcgagtatctgcaggcccggcgaccaccaggtctcgagtattgctataaccccagccacaatccggaagagcagctctcttctaaggacctggtgagctgtgcttatcaagtcgccagaggtatggagtacctggcgagcaagaagtgcattcatagagatttggcagcgagaaacgttcttgtcacagaagacaatgtcatgaagattgccgattttgggctcgctcgcgatattcatcatatagactactacaaaaagacaacaaatgggcgcctgcctgtcaagtggatggctccggaagctttgtttgaccgtatttatacacaccagagtgacgtgtggtcattcggggttctcctctgggaaatcttcacacttggcggcagtccttatccgggagtcccagtggaggagttattcaaactcctcaaggaggggcaccgcatggataaaccctcaaactgcaccaatgaactgtacatgatgatgagggattgctggcacgcggttccatcgcagcgacccacatttaagcagctagtggaagatttggacaggatagtggccttaaccagtaaccaggagtaccttgatttgtcaatgcctttggaccagtactccccatccttcccagacacccgctccagcacatgctcttctggggaggactccgtgtttagccacgagccacttccggaggaaccctgcttgcctcgacatcctgcacaactagccaatgggggcctaaagaggcgatag

SEQ ID NO: 69011 - DNA, 2439 bp, Artificial Sequence
  derived and/or modified sequence
atggctgctgtgacccgggactttggagagatgctgctgcacagcggccgggtgctgcctgctgaggcccagccctggggcgcccctgtggaggtggagagcttcctggtgcaccctggggacctgctgcagctgcgctgccgcctgagagatgatgtgcagagcatcaactggctgagagatggagtgcagctggccgagagcaacagaacccgcatcaccggggaggaggtggaggtgcaggacagcgtgcctgctgacagcggcctgtatgcctgtgtgaccagcagccccagcggcagtgacaccacctacttctctgtgaatgtgtctgatgccctgcccagcagtgaagatgatgatgatgatgatgacagcagcagcgaggagaaggagacagacaacaccaagcccaacaggatgcctgtggccccctactggaccagccctgagaagatggagaagaagctgcatgctgtgcctgctgccaagacagtgaagttcaagtgccccagcagcggcacccccaaccccaccctgcgctggctgaagaatggcaaggagttcaagccagaccacagaattggaggctacaaggtgcgctatgccacctggagcatcatcatggattctgtggtgcccagcgacaagggcaactacacctgcatcgtggagaatgaatatggcagcatcaaccacacctaccagctggatgtggtggagaggagcccccaccggcccatcctgcaggccggcctgcctgccaacaagacagtggccctgggcagcaatgtggagttcatgtgcaaggtgtacagcgacccccagccccacatccagtggctgaagcacatcgaggtgaatggcagcaagattggccctgacaacctgccctacgtgcagatcctgaagacagctggggtgaacaccacagacaaggagatggaggtgctgcacctgagaaatgtgtcctttgaagatgctggggagtacacctgcctggccggcaacagcatcggcctgagccaccacagcgcctggctgactgtgctggaggccctggaggagaggcctgctgtgatgaccagccccctgtacctggagatcatcatctactgcaccggggccttcctgatcagctgcatggtgggctctgtgattgtgtacaagatgaagagcggcaccaagaagagtgacttccacagccagatggctgtgcacaagctggccaagagcatccccctgcggcggcaggtgtctgctgacagcagcgcctccatgaacagcggcgtgctgctggtgcggcccagccggctgagcagcagcggcacccccatgctggccggcgtgtctgaatatgagctgcctgaggacccccgctgggagctgccccgggaccggctggtgctgggcaagcccctgggggagggctgcttcggccaggtggtgctggccgaggccatcggcctggacaaggacaagcccaacagagtgaccaaggtggccgtgaagatgctgaagagtgatgccacagagaaggacctgagtgacctgatcagcgagatggagatgatgaagatgattggcaagcacaagaacatcatcaacctgctgggcgcctgcacccaggacggccccctgtatgtgattgtggagtatgccagcaagggcaacctgcgggagtacctgcaggcccggcggcccccaggcctggagtactgctacaaccccagccacaaccctgaggagcagctgagcagcaaggacctggtgtcctgtgcctaccaggtggcccggggcatggagtacctggccagcaagaagtgcatccaccgggacctggccgccagaaatgtgctggtgacagaagataatgtgatgaagattgctgactttggcctggcccgggacatccaccacatcgactactacaagaagaccaccaacggccgcctgcctgtgaagtggatggcccctgaggccctgtttgaccgcatctacacccaccagagtgatgtgtggagctttggagtgctgctgtgggagatcttcaccctgggcggcagcccctacccaggagtgcctgtggaggagctgttcaagctgctgaaggagggccacaggatggacaagcccagcaactgcaccaatgagctgtacatgatgatgagggactgctggcatgctgtgcccagccagaggcccaccttcaagcagctggtggaggacctggacagaattgtggccctgaccagcaaccaggagtacctggacctgtccatgcccctggaccagtacagccccagcttcccagacaccaggagcagcacctgcagcagcggggaggacagcgtcttcagccatgagcccctgcctgaggagccctgcctgcccaggcacccagcccagctggccaacggcggcctgaagagaagatag

SEQ ID NO: 69012 - DNA, 2439 bp, Artificial Sequence
  derived and/or modified sequence
atggccgccgtgacccgggacttcggcgagatgctgctgcacagcgggagagtgcttcccgccgaggcccagccctggggagcgccagtcgaggttgaaagtttcctggtgcaccccggcgaccttcttcagctgcggtgcaggctgagagacgacgtgcagagcatcaattggctccgggacggggtgcaattggccgagagtaataggacaaggatcacaggggaggaggtggaggtccaggatagtgtgcccgcagattcgggtctttatgcatgtgtgactagcagcccctccggcagcgataccacctatttctcagtcaacgtctccgatgctctcccgtcctcagaagatgatgatgatgacgacgactcatcctccgaagagaaggaaaccgacaatactaagcccaataggatgccagttgccccctattggacctcgccggagaagatggaaaagaaactccacgcagtgcctgccgcgaagaccgtcaagtttaagtgtccctcatccggcactcccaatcccactttgaggtggttaaaaaacgggaaggaatttaagcccgatcacagaattggcggctataaggtgcgatatgccacttggtccatcatcatggactctgtggtgccctctgacaaggggaattatacctgtattgtagaaaatgaatacggcagtatcaaccacacctaccagctggacgtcgttgagcgaagcccacaccgcccgattctgcaggccggcttgccagccaacaagaccgtggcgttgggtagtaacgttgaatttatgtgtaaggtgtattccgacccacagcctcacatccagtggcttaaacacattgaagtcaacggcagcaagatcggacccgataacctgccatacgtccagattctgaagacagccggggtcaacaccactgacaaggagatggaagtcttgcacctcagaaatgtgtccttcgaagacgcaggggagtatacttgcctggccggcaatagtatcgggctgtctcaccacagcgcttggctaacggtcctcgaagcactggaagagaggccagctgtgatgacctcaccgttgtatttggagatcatcatctattgtaccggagcattcctgatatcatgcatggtcgggagtgtgatagtgtacaagatgaaatccggcactaagaaatctgatttccactcccagatggcggtgcacaagcttgccaaatccatccctcttaggagacaagtatcagcagattcgtcagcctcaatgaattcaggagtcttacttgtgaggccatcccgactctccagtagcggaactcccatgctcgctggcgtgtccgagtacgagctccctgaggatcccagatgggagcttccacgggatcggctggtgctcggcaaaccccttggggaaggctgctttggccaggtggtgctggcagaggcgatcgggctcgataaggacaaaccaaaccgcgtgacaaaagtggctgtgaagatgcttaaatcagacgctacagaaaaagatctctctgatttgatcagtgaaatggagatgatgaaaatgattggaaaacacaaaaacatcatcaatctgctgggagcctgcactcaagacgggcctctgtatgttattgtggaatatgccagcaagggcaatctccgcgaataccttcaggcccgccgcccaccagggcttgagtactgctacaatccgagccataatcctgaggaacaactgtcctccaaggatttggtttcatgtgcttatcaggtggctcgcgggatggagtacctggcctcaaagaaatgtatacatcgtgacctcgccgctcgaaatgttcttgtgactgaagataacgtcatgaagattgcagacttcggtctggctcgggatatacatcacattgactactacaagaagaccactaatggacgcctcccggttaaatggatggcccccgaggctctgttcgacaggatctacacacatcagtccgacgtgtggtcctttggcgtcttgctgtgggagattttcaccctgggcggctcaccatatcccggagttcccgtggaagaattgtttaaactcctgaaggaagggcacagaatggataaacccagcaattgcacaaatgaactgtatatgatgatgcgtgattgttggcatgccgtgccttcacagaggcccacatttaagcagctcgtcgaagacttagaccgcatcgtcgctctgacttccaatcaggaatacctggacctgtcaatgcctcttgatcagtattctccttccttccccgacactagatcctctacatgctcttccggcgaagatagtgtgttcagtcacgaacctcttccggaagagccctgcctaccacggcacccagcccagctggccaacggcgggctgaaaaggcggtag

SEQ ID NO: 69013 - DNA, 2439 bp, Artificial Sequence
  derived and/or modified sequence
atggcggctgtcacacgcgatttcggagagatgttgctgcatagcgggagagttttgccagccgaggctcagccatggggggctcccgtggaagtggagagcttcttagttcacccaggagacctgcttcagctgagatgtcgtctgcgtgatgacgtgcagagtataaactggctgagagatggcgtgcagcttgccgagtccaaccggacacgcatcaccggagaggaggtagaggtccaggacagtgtgccagctgattctggcttatacgcatgtgttacgtcttctcctagtggcagcgataccacatacttctcagtgaacgtcagtgacgccctgcccagtagcgaagacgatgacgacgatgatgactctagcagcgaagagaaggaaaccgacaacacaaaacccaatcgcatgcccgtcgccccatattggacctctcctgagaagatggaaaagaaactgcacgccgtgcctgccgctaaaaccgtaaaattcaagtgtccatcgtccgggaccccaaatcctacacttcggtggcttaaaaatggtaaggagtttaaacctgaccacagaattggaggctacaaagtccggtacgcaacgtggagtattataatggactcagttgtcccgtctgataaaggcaactacacctgcatcgtggagaacgagtatggcagtatcaaccacacctatcagctggatgtggtcgaacggtctccccatcggcctatactgcaggccggtctacccgctaataaaacagttgcactggggtcaaatgtcgagtttatgtgtaaggtttactccgatcctcagccacacattcagtggctgaagcatattgaggtaaacgggtctaagatcggccctgacaacctcccgtatgtgcagatactgaaaaccgccggagttaatacgaccgataaagaaatggaggtgctacacttgcgtaacgtcagcttcgaggacgctggcgaatacacctgcttggctggcaattcgatcggactttcacaccacagtgcctggttaacggtcttggaggctctcgaagagcgaccagctgtgatgaccagtcccctttacttggagataatcatttactgcacaggggctttcttgatttcgtgcatggtggggagcgttattgtgtacaaaatgaagtctggcacgaagaagagtgactttcactcgcagatggctgtgcataagctggctaagtccatcccactcaggcggcaggtctccgcggactcttcagcgtctatgaattctggcgtactccttgttcgaccctctcggctgtcctccagcgggacaccgatgctggctggtgtatcagaatatgagctccccgaggatcctaggtgggagctgcccagagatcggctggtgctgggcaagcccctaggagaggggtgttttggacaagttgtgctggctgaagccatcggactagataaggacaaacctaatagagtaacaaaggtcgccgtgaaaatgcttaagtccgacgcaaccgagaaggatctgtctgatctgatatccgagatggagatgatgaagatgattggaaagcataaaaacatcatcaacctactgggagcatgcactcaggacggccctctatatgtcatcgttgagtacgctagtaagggcaatttacgcgaatacctgcaggctagaagacccccaggactagaatattgttacaatccttcacacaatcccgaggagcaactgtcatctaaagatctggtgagttgcgcctatcaggttgctcggggaatggagtacctggccagcaaaaagtgcattcatcgggatctagccgctaggaatgtgttggtgactgaggataatgtgatgaagatcgctgatttcggactggccagggacatccaccatatcgattattataaaaagactacaaatggacgcctccccgttaagtggatggctcccgaggctctgttcgacagaatttacacacatcagtctgatgtttggtcatttggggtacttttatgggagattttcacacttggcggttccccctatcccggagtgccagtggaggaactgttcaagctgcttaaggagggccatagaatggataagccctccaactgcacaaatgagttatacatgatgatgcgcgattgttggcatgcagtgccctcgcagcgtccaaccttcaagcagctggtggaggacttggaccgaatagtggcccttaccagcaatcaggagtaccttgacctttctatgcctcttgatcaatattctccctctttcccagacacccggtcaagcacttgctcaagcggggaggacagtgtcttctcgcacgaaccccttcccgaggaaccgtgcctccccagacatcctgcccagctggcaaatggaggccttaagcgtagatag

SEQ ID NO: 69014 - DNA, 2439 bp, Artificial Sequence
  derived and/or modified sequence
atggccgccgtgaccagagacttcggcgagatgctgctgcacagcggcagagtgctgcccgccgaggcccagccctggggcgcccccgtggaggtggagagcttcctggtgcaccccggcgacctgctgcagctgagatgcagactgagagacgacgtgcagagcatcaactggctgagagacggcgtgcagctggccgagagcaacagaaccagaatcaccggcgaggaggtggaggtgcaggacagcgtgcccgccgacagcggcctgtacgcctgcgtgaccagcagccccagcggcagcgacaccacctacttcagcgtgaacgtgagcgacgccctgcccagcagcgaggacgacgacgacgacgacgacagcagcagcgaggagaaggagaccgacaacaccaagcccaacagaatgcccgtggccccctactggaccagccccgagaagatggagaagaagctgcacgccgtgcccgccgccaagaccgtgaagttcaagtgccccagcagcggcacccccaaccccaccctgagatggctgaagaacggcaaggagttcaagcccgaccacagaatcggcggctacaaggtgagatacgccacctggagcatcatcatggacagcgtggtgcccagcgacaagggcaactacacctgcatcgtggagaacgagtacggcagcatcaaccacacctaccagctggacgtggtggagagaagcccccacagacccatcctgcaggccggcctgcccgccaacaagaccgtggccctgggcagcaacgtggagttcatgtgcaaggtgtacagcgacccccagccccacatccagtggctgaagcacatcgaggtgaacggcagcaagatcggccccgacaacctgccctacgtgcagatcctgaagaccgccggcgtgaacaccaccgacaaggagatggaggtgctgcacctgagaaacgtgagcttcgaggacgccggcgagtacacctgcctggccggcaacagcatcggcctgagccaccacagcgcctggctgaccgtgctggaggccctggaggagagacccgccgtgatgaccagccccctgtacctggagatcatcatctactgcaccggcgccttcctgatcagctgcatggtgggcagcgtgatcgtgtacaagatgaagagcggcaccaagaagagcgacttccacagccagatggccgtgcacaagctggccaagagcatccccctgagaagacaggtgagcgccgacagcagcgccagcatgaacagcggcgtgctgctggtgagacccagcagactgagcagcagcggcacccccatgctggccggcgtgagcgagtacgagctgcccgaggaccccagatgggagctgcccagagacagactggtgctgggcaagcccctgggcgagggctgcttcggccaggtggtgctggccgaggccatcggcctggacaaggacaagcccaacagagtgaccaaggtggccgtgaagatgctgaagagcgacgccaccgagaaggacctgagcgacctgatcagcgagatggagatgatgaagatgatcggcaagcacaagaacatcatcaacctgctgggcgcctgcacccaggacggccccctgtacgtgatcgtggagtacgccagcaagggcaacctgagagagtacctgcaggccagaagaccccccggcctggagtactgctacaaccccagccacaaccccgaggagcagctgagcagcaaggacctggtgagctgcgcctaccaggtggccagaggcatggagtacctggccagcaagaagtgcatccacagagacctggccgccagaaacgtgctggtgaccgaggacaacgtgatgaagatcgccgacttcggcctggccagagacatccaccacatcgactactacaagaagaccaccaacggcagactgcccgtgaagtggatggcccccgaggccctgttcgacagaatctacacccaccagagcgacgtgtggagcttcggcgtgctgctgtgggagatcttcaccctgggcggcagcccctaccccggcgtgcccgtggaggagctgttcaagctgctgaaggagggccacagaatggacaagcccagcaactgcaccaacgagctgtacatgatgatgagagactgctggcacgccgtgcccagccagagacccaccttcaagcagctggtggaggacctggacagaatcgtggccctgaccagcaaccaggagtacctggacctgagcatgcccctggaccagtacagccccagcttccccgacaccagaagcagcacctgcagcagcggcgaggacagcgtgttcagccacgagcccctgcccgaggagccctgcctgcccagacaccccgcccagctggccaacggcggcctgaagagaagatag

SEQ ID NO: 69015 - protein, 853 aa, Artificial Sequence
  derived and/or modified sequence
MEARVSLKRRIELTVEYPWRCGALSPTSNCRTGMWSWKCLLFWAVLVTATLCTARPSPTLPEQAQPWGAPVEVESFLVHPGDLLQLRCRLRDDVQSINWLRDGVQLAESNRTRITGEEVEVQDSVPADSGLYACVTSSPSGSDTTYFSVNVSDALPSSEDDDDDDDSSSEEKETDNTKPNPVAPYWTSPEKMEKKLHAVPAAKTVKFKCPSSGTPNPTLRWLKNGKEFKPDHRIGGYKVRYATWSIIMDSVVPSDKGNYTCIVENEYGSINHTYQLDVVERSPHRPILQAGLPANKTVALGSNVEFMCKVYSDPQPHIQWLKHIEVNGSKIGPDNLPYVQILKTAGVNTTDKEMEVLHLRNVSFEDAGEYTCLAGNSIGLSHHSAWLTVLEALEERPAVMTSPLYLEIIIYCTGAFLISCMVGSVIVYKMKSGTKKSDFHSQMAVHKLAKSIPLRRQVTVSADSSASMNSGVLLVRPSRLSSSGTPMLAGVSEYELPEDPRWELPRDRLVLGKPLGEGCFGQVVLAEAIGLDKDKPNRVTKVAVKMLKSDATEKDLSDLISEMEMMKMIGKHKNIINLLGACTQDGPLYVIVEYASKGNLREYLQARRPPGLEYCYNPSHNPEEQLSSKDLVSCAYQVARGMEYLASKKCIHRDLAARNVLVTEDNVMKIADFGLARDIHHIDYYKKTTNGRLPVKWMAPEALFDRIYTHQSDVWSFGVLLWEIFTLGGSPYPGVPVEELFKLLKEGHRMDKPSNCTNELYMMMRDCWHAVPSQRPTFKQLVEDLDRIVALTSNQEYLDLSMPLDQYSPSFPDTRSSTCSSGEDSVFSHEPLPEEPCLPRHPAQLANGGLKRR

SEQ ID NO: 69016 - DNA, 5900 bp, Artificial Sequence
  derived and/or modified sequence
agatgcaggggcgcaaacgccaaaggagaccaggctgtaggaagagaagggcagagcgccggacagctcggcccgctccccgtcctttggggccgcggctggggaactacaaggcccagcaggcagctgcagggggcggaggcggaggagggaccagcgcgggtgggagtgagagagcgagccctcgcgccccgccggcgcatagcgctcggagcgctcttgcggccacaggcgcggcgtcctcggcggcgggcggcagctagcgggagccgggacgccggtgcagccgcagcgcgcggaggaacccgggtgtgccgggagctgggcggccacgtccggacgggaccgagacccctcgtagcgcattgcggcgacctcgccttccccggccgcgagcgcgccgctgcttgaaaagccgcggaacccaaggacttttctccggtccgagctcggggcgccccgcagggcgcacggtacccgtgctgcagtcgggcacgccgcggcgccggggcctccgcagggcgatggagcccggtctgcaaggaaagtgaggcgccgccgctgcgttctggaggaggggggcacaaggtctggagaccccgggtggcggacgggagccctccccccgccccgcctccggggcaccagctccggctccattgttcccgcccgggctggaggcgccgagcaccgagcgccgccgggagtcgagcgccggccgcggagctcttgcgaccccgccaggacccgaacagagcccgggggcggcgggccggagccggggacgcgggcacacgcccgctcgcacaagccacggcggactctcccgaggcggaacctccacgccgagcgagggtcagtttgaaaaggaggatcgagctcactgtggagtatccatggagatgtggagccttgtcaccaacctctaactgcagaactgggatgtggagctggaagtgcctcctcttctgggctgtgctggtcacagccacactctgcaccgctaggccgtccccgaccttgcctgaacaagcccagccctggggagcccctgtggaagtggagtccttcctggtccaccccggtgacctgctgcagcttcgctgtcggctgcgggacgatgtgcagagcatcaactggctgcgggacggggtgcagctggcggaaagcaaccgcacccgcatcacaggggaggaggtggaggtgcaggactccgtgcccgcagactccggcctctatgcttgcgtaaccagcagcccctcgggcagtgacaccacctacttctccgtcaatgtttcagttcccatagatgctctcccctcctcggaggatgatgatgatgatgatgactcctcttcagaggagaaagaaacagataacaccaaaccaaaccccgtagctccatattggacatccccagaaaagatggaaaagaaattgcatgcagtgccggctgccaagacagtgaagttcaaatgcccttccagtgggaccccaaaccccacactgcgctggttgaaaaatggcaaagaattcaaacctgaccacagaattggaggctacaaggtccgttatgccacctggagcatcataatggactctgtggtgccctctgacaagggcaactacacctgcattgtggagaatgagtacggcagcatcaaccacacataccagctggatgtcgtggagcggtcccctcaccggcccatcctgcaagcagggttgcccgccaacaaaacagtggccctgggtagcaacgtggagttcatgtgtaaggtgtacagtgacccgcagccgcacatccagtggctaaagcacatcgaggtgaatgggagcaagattggcccagacaacctgccttatgtccagatcttgaagcattcggggattaatagctcggatgcggaggtgctgaccctgttcaatgtgacagaggcccagagcggggagtatgtgtgtaaggtttccaattatattggtgaagctaaccagtctgcgtggctcactgtcaccagacctgtgctggaagagaggccggcagtgatgacctcgcccctgtacctggagatcatcatctattgcacaggggccttcctcatctcctgcatggtggggtcggtcatcgtctacaagatgaagagtggtaccaagaagagtgacttccacagccagatggctgtgcacaagctggccaagagcatccctctgcgcagacaggtaacagtgtctgctgactccagtgcatccatgaactctggggttcttctggttcggccatcacggctctcctccagtgggactcccatgctagcaggggtctctgagtatgagcttcccgaagaccctcgctgggagctgcctcgggacagactggtcttaggcaaacccctgggagagggctgctttgggcaggtggtgttggcagaggctatcgggctggacaaggacaaacccaaccgtgtgaccaaagtggctgtgaagatgttgaagtcggacgcaacagagaaagacttgtcagacctgatctcagaaatggagatgatgaagatgatcgggaagcataagaatatcatcaacctgctgggggcctgcacgcaggatggtcccttgtatgtcatcgtggagtatgcctccaagggcaacctgcgggagtacctgcaggcccggaggcccccagggctggaatactgctacaaccccagccacaacccagaggagcagctctcctccaaggacctggtgtcctgcgcctaccaggtggcccgaggcatggagtatctggcctccaagaagtgcatacaccgagacctggcagccaggaatgtcctggtgacagaggacaatgtgatgaagatagcagactttggcctcgcacgggacattcaccacatcgactactataaaaagacaaccaacggccgactgcctgtgaagtggatggcacccgaggcattatttgaccggatctacacccaccagagtgatgtgtggtctttcggggtgctcctgtgggagatcttcactctgggcggctccccataccccggtgtgcctgtggaggaacttttcaagctgctgaaggagggtcaccgcatggacaagcccagtaactgcaccaacgagctgtacatgatgatgcgggactgctggcatgcagtgccctcacagagacccaccttcaagcagctggtggaagacctggaccgcatcgtggccttgacctccaaccaggagtacctggacctgtccatgcccctggaccagtactcccccagctttcccgacacccggagctctacgtgctcctcaggggaggattccgtcttctctcatgagccgctgcccgaggagccctgcctgccccgacacccagcccagcttgccaatggcggactcaaacgccgctgactgccacccacacgccctccccagactccaccgtcagctgtaaccctcacccacagcccctgctgggcccaccacctgtccgtccctgtcccctttcctgctggcaggagccggctgcctaccaggggccttcctgtgtggcctgccttcaccccactcagctcacctctccctccacctcctctccacctgctggtgagaggtgcaaagaggcagatctttgctgccagccacttcatcccctcccagatgttggaccaacacccctccctgccaccaggcactgcctggagggcagggagtgggagccaatgaacaggcatgcaagtgagagcttcctgagctttctcctgtcggtttggtctgttttgccttcacccataagcccctcgcactctggtggcaggtgccttgtcctcagggctacagcagtagggaggtcagtgcttcgtgcctcgattgaaggtgacctctgccccagataggtggtgccagtggcttattaattccgatactagtttgctttgctgaccaaatgcctggtaccagaggatggtgaggcgaaggccaggttgggggcagtgttgtggccctggggcccagccccaaactgggggctctgtatatagctatgaagaaaacacaaagtgtataaatctgagtatatatttacatgtctttttaaaagggtcgttaccagagatttacccatcgggtaagatgctcctggtggctgggaggcatcagttgctatatattaaaaacaaaaaagaaaaaaaaggaaaatgtttttaaaaaggtcatatattttttgctacttttgctgttttatttttttaaattatgttctaaacctattttcagtttaggtccctcaataaaaattgctgctgcttcatttatctatgggctgtatgaaaagggtgggaatgtccactggaaagaagggacacccacgggccctggggctaggtctgtcccgagggcaccgcatgctcccggcgcaggttccttgtaacctcttcttcctaggtcctgcacccagacctcacgacgcacctcctgcctctccgctgcttttggaaagtcagaaaaagaagatgtctgcttcgagggcaggaaccccatccatgcagtagaggcgctgggcagagagtcaaggcccagcagccatcgaccatggatggtttcctccaaggaaaccggtggggttgggctggggagggggcacctacctaggaatagccacggggtagagctacagtgattaagaggaaagcaagggcgcggttgctcacgcctgtaatcccagcactttgggacaccgaggtgggcagatcacttcaggtcaggagtttgagaccagcctggccaacttagtgaaaccccatctctactaaaaatgcaaaaattatccaggcatggtggcacacgcctgtaatcccagctccacaggaggctgaggcagaatcccttgaagctgggaggcggaggttgcagtgagccgagattgcgccattgcactccagcctgggcaacagagaaaacaaaaaggaaaacaaatgatgaaggtctgcagaaactgaaacccagacatgtgtctgccccctctatgtgggcatggttttgccagtgcttctaagtgcaggagaacatgtcacctgaggctagttttgcattcaggtccctggcttcgtttcttgttggtatgcctccccagatcgtccttcctgtatccatgtgaccagactgtatttgttgggactgtcgcagatcttggcttcttacagttcttcctgtccaaactccatcctgtccctcaggaacggggggaaaattctccgaatgtttttggttttttggctgcttggaatttacttctgccacctgctggtcatcactgtcctcactaagtggattctggctcccccgtacctcatggctcaaactaccactcctcagtcgctatattaaagcttatattttgctggattactgctaaatacaaaagaaagttcaatatgttttcatttctgtagggaaaatgggattgctgctttaaatttctgagctagggattttttggcagctgcagtgttggcgactattgtaaaattctctttgtttctctctgtaaatagcacctgctaacattacaatttgtatttatgtttaaagaaggcatcatttggtgaacagaactaggaaatgaatttttagctcttaaaagcatttgctttgagaccgcacaggagtgtctttccttgtaaaacagtgatgataatttctgccttggccctaccttgaagcaatgttgtgtgaagggatgaagaatctaaaagtcttcataagtccttgggagaggtgctagaaaaatataaggcactatcataattacagtgatgtccttgctgttactactcaaatcacccacaaatttccccaaagactgcgctagctgtcaaataaaagacagtgaaattgacctg

SEQ ID NO: 69017 - DNA, 5702 bp, Artificial Sequence
  derived and/or modified sequence
gccggcgcatagcgctcggagcgctcttgcggccacaggcgcggcgtcctcggcggcgggcggcagctagcgggagccgggacgccggtgcagccgcagcgcgcggaggaacccgggtgtgccgggagctgggcggccacgtccggacgggaccgagacccctcgtagcgcattgcggcgacctcgccttccccggccgcgagcgcgccgctgcttgaaaagccgcggaacccaaggacttttctccggtccgagctcggggcgccccgcagggcgcacggtacccgtgctgcagtcgggcacgccgcggcgccggggcctccgcagggcgatggagcccggtctgcaaggaaagtgaggcgccgccgctgcgttctggaggaggggggcacaaggtctggagaccccgggtggcggacgggagccctccccccgccccgcctccggggcaccagctccggctccattgttcccgcccgggctggaggcgccgagcaccgagcgccgccgggagtcgagcgccggccgcggagctcttgcgaccccgccaggacccgaacagagcccgggggcggcgggccggagccggggacgcgggcacacgcccgctcgcacaagccacggcggactctcccgaggcggaacctccacgccgagcgagggtcagtttgaaaaggaggatcgagctcactgtggagtatccatggagatgtggagccttgtcaccaacctctaactgcagaactgggatgtggagctggaagtgcctcctcttctgggctgtgctggtcacagccacactctgcaccgctaggccgtccccgaccttgcctgaacaagcccagccctggggagcccctgtggaagtggagtccttcctggtccaccccggtgacctgctgcagcttcgctgtcggctgcgggacgatgtgcagagcatcaactggctgcgggacggggtgcagctggcggaaagcaaccgcacccgcatcacaggggaggaggtggaggtgcaggactccgtgcccgcagactccggcctctatgcttgcgtaaccagcagcccctcgggcagtgacaccacctacttctccgtcaatgtttcagatgctctcccctcctcggaggatgatgatgatgatgatgactcctcttcagaggagaaagaaacagataacaccaaaccaaaccccgtagctccatattggacatccccagaaaagatggaaaagaaattgcatgcagtgccggctgccaagacagtgaagttcaaatgcccttccagtgggaccccaaaccccacactgcgctggttgaaaaatggcaaagaattcaaacctgaccacagaattggaggctacaaggtccgttatgccacctggagcatcataatggactctgtggtgccctctgacaagggcaactacacctgcattgtggagaatgagtacggcagcatcaaccacacataccagctggatgtcgtggagcggtcccctcaccggcccatcctgcaagcagggttgcccgccaacaaaacagtggccctgggtagcaacgtggagttcatgtgtaaggtgtacagtgacccgcagccgcacatccagtggctaaagcacatcgaggtgaatgggagcaagattggcccagacaacctgccttatgtccagatcttgaagactgctggagttaataccaccgacaaagagatggaggtgcttcacttaagaaatgtctcctttgaggacgcaggggagtatacgtgcttggcgggtaactctatcggactctcccatcactctgcatggttgaccgttctggaagccctggaagagaggccggcagtgatgacctcgcccctgtacctggagatcatcatctattgcacaggggccttcctcatctcctgcatggtggggtcggtcatcgtctacaagatgaagagtggtaccaagaagagtgacttccacagccagatggctgtgcacaagctggccaagagcatccctctgcgcagacaggtaacagtgtctgctgactccagtgcatccatgaactctggggttcttctggttcggccatcacggctctcctccagtgggactcccatgctagcaggggtctctgagtatgagcttcccgaagaccctcgctgggagctgcctcgggacagactggtcttaggcaaacccctgggagagggctgctttgggcaggtggtgttggcagaggctatcgggctggacaaggacaaacccaaccgtgtgaccaaagtggctgtgaagatgttgaagtcggacgcaacagagaaagacttgtcagacctgatctcagaaatggagatgatgaagatgatcgggaagcataagaatatcatcaacctgctgggggcctgcacgcaggatggtcccttgtatgtcatcgtggagtatgcctccaagggcaacctgcgggagtacctgcaggcccggaggcccccagggctggaatactgctacaaccccagccacaacccagaggagcagctctcctccaaggacctggtgtcctgcgcctaccaggtggcccgaggcatggagtatctggcctccaagaagtgcatacaccgagacctggcagccaggaatgtcctggtgacagaggacaatgtgatgaagatagcagactttggcctcgcacgggacattcaccacatcgactactataaaaagacaaccaacggccgactgcctgtgaagtggatggcacccgaggcattatttgaccggatctacacccaccagagtgatgtgtggtctttcggggtgctcctgtgggagatcttcactctgggcggctccccataccccggtgtgcctgtggaggaacttttcaagctgctgaaggagggtcaccgcatggacaagcccagtaactgcaccaacgagctgtacatgatgatgcgggactgctggcatgcagtgccctcacagagacccaccttcaagcagctggtggaagacctggaccgcatcgtggccttgacctccaaccaggagtacctggacctgtccatgcccctggaccagtactcccccagctttcccgacacccggagctctacgtgctcctcaggggaggattccgtcttctctcatgagccgctgcccgaggagccctgcctgccccgacacccagcccagcttgccaatggcggactcaaacgccgctgactgccacccacacgccctccccagactccaccgtcagctgtaaccctcacccacagcccctgctgggcccaccacctgtccgtccctgtcccctttcctgctggcaggagccggctgcctaccaggggccttcctgtgtggcctgccttcaccccactcagctcacctctccctccacctcctctccacctgctggtgagaggtgcaaagaggcagatctttgctgccagccacttcatcccctcccagatgttggaccaacacccctccctgccaccaggcactgcctggagggcagggagtgggagccaatgaacaggcatgcaagtgagagcttcctgagctttctcctgtcggtttggtctgttttgccttcacccataagcccctcgcactctggtggcaggtgccttgtcctcagggctacagcagtagggaggtcagtgcttcgtgcctcgattgaaggtgacctctgccccagataggtggtgccagtggcttattaattccgatactagtttgctttgctgaccaaatgcctggtaccagaggatggtgaggcgaaggccaggttgggggcagtgttgtggccctggggcccagccccaaactgggggctctgtatatagctatgaagaaaacacaaagtgtataaatctgagtatatatttacatgtctttttaaaagggtcgttaccagagatttacccatcgggtaagatgctcctggtggctgggaggcatcagttgctatatattaaaaacaaaaaagaaaaaaaaggaaaatgtttttaaaaaggtcatatattttttgctacttttgctgttttatttttttaaattatgttctaaacctattttcagtttaggtccctcaataaaaattgctgctgcttcatttatctatgggctgtatgaaaagggtgggaatgtccactggaaagaagggacacccacgggccctggggctaggtctgtcccgagggcaccgcatgctcccggcgcaggttccttgtaacctcttcttcctaggtcctgcacccagacctcacgacgcacctcctgcctctccgctgcttttggaaagtcagaaaaagaagatgtctgcttcgagggcaggaaccccatccatgcagtagaggcgctgggcagagagtcaaggcccagcagccatcgaccatggatggtttcctccaaggaaaccggtggggttgggctggggagggggcacctacctaggaatagccacggggtagagctacagtgattaagaggaaagcaagggcgcggttgctcacgcctgtaatcccagcactttgggacaccgaggtgggcagatcacttcaggtcaggagtttgagaccagcctggccaacttagtgaaaccccatctctactaaaaatgcaaaaattatccaggcatggtggcacacgcctgtaatcccagctccacaggaggctgaggcagaatcccttgaagctgggaggcggaggttgcagtgagccgagattgcgccattgcactccagcctgggcaacagagaaaacaaaaaggaaaacaaatgatgaaggtctgcagaaactgaaacccagacatgtgtctgccccctctatgtgggcatggttttgccagtgcttctaagtgcaggagaacatgtcacctgaggctagttttgcattcaggtccctggcttcgtttcttgttggtatgcctccccagatcgtccttcctgtatccatgtgaccagactgtatttgttgggactgtcgcagatcttggcttcttacagttcttcctgtccaaactccatcctgtccctcaggaacggggggaaaattctccgaatgtttttggttttttggctgcttggaatttacttctgccacctgctggtcatcactgtcctcactaagtggattctggctcccccgtacctcatggctcaaactaccactcctcagtcgctatattaaagcttatattttgctggattactgctaaatacaaaagaaagttcaatatgttttcatttctgtagggaaaatgggattgctgctttaaatttctgagctagggattttttggcagctgcagtgttggcgactattgtaaaattctctttgtttctctctgtaaatagcacctgctaacattacaatttgtatttatgtttaaagaaggcatcatttggtgaacagaactaggaaatgaatttttagctcttaaaagcatttgctttgagaccgcacaggagtgtctttccttgtaaaacagtgatgataatttctgccttggccctaccttgaagcaatgttgtgtgaagggatgaagaatctaaaagtcttcataagtccttgggagaggtgctagaaaaatataaggcactatcataattacagtgatgtccttgctgttactactcaaatcacccacaaatttccccaaagactgcgctagctgtcaaataaaagacagtgaaattgacctga

SEQ ID NO: 69018 - DNA, 2870 bp, Artificial Sequence
  derived and/or modified sequence
aacttttcctccaactcgcgctcgggagctggcgaggcggcggcggctcctcaaagtgggagagcttcaaggtcacgtggtccgtccagcccctgctatctcaccagacactgtccaccctgtatgttggatcagtactccagtgagaagacagcaggcactttcacccatgcagcccattcagtcttcataaccacctgtgatggaggcaagggtcagtttgaaaaggaggatcgagctcactgtggagtatccatggagatgtggagccttgtcaccaacctctaactgcagaactgggatgtggagctggaagtgcctcctcttctgggctgtgctggtcacagccacactctgcaccgctaggccgtccccgaccttgcctgaacaagcccagccctggggagcccctgtggaagtggagtccttcctggtccaccccggtgacctgctgcagcttcgctgtcggctgcgggacgatgtgcagagcatcaactggctgcgggacggggtgcagctggcggaaagcaaccgcacccgcatcacaggggaggaggtggaggtgcaggactccgtgcccgcagactccggcctctatgcttgcgtaaccagcagcccctcgggcagtgacaccacctacttctccgtcaatgtttcagatgctctcccctcctcggaggatgatgatgatgatgatgactcctcttcagaggagaaagaaacagataacaccaaaccaaaccccgtagctccatattggacatccccagaaaagatggaaaagaaattgcatgcagtgccggctgccaagacagtgaagttcaaatgcccttccagtgggaccccaaaccccacactgcgctggttgaaaaatggcaaagaattcaaacctgaccacagaattggaggctacaaggtccgttatgccacctggagcatcataatggactctgtggtgccctctgacaagggcaactacacctgcattgtggagaatgagtacggcagcatcaaccacacataccagctggatgtcgtggagcggtcccctcaccggcccatcctgcaagcagggttgcccgccaacaaaacagtggccctgggtagcaacgtggagttcatgtgtaaggtgtacagtgacccgcagccgcacatccagtggctaaagcacatcgaggtgaatgggagcaagattggcccagacaacctgccttatgtccagatcttgaagactgctggagttaataccaccgacaaagagatggaggtgcttcacttaagaaatgtctcctttgaggacgcaggggagtatacgtgcttggcgggtaactctatcggactctcccatcactctgcatggttgaccgttctggaagccctggaagagaggccggcagtgatgacctcgcccctgtacctggagatcatcatctattgcacaggggccttcctcatctcctgcatggtggggtcggtcatcgtctacaagatgaagagtggtaccaagaagagtgacttccacagccagatggctgtgcacaagctggccaagagcatccctctgcgcagacaggtaacagtgtctgctgactccagtgcatccatgaactctggggttcttctggttcggccatcacggctctcctccagtgggactcccatgctagcaggggtctctgagtatgagcttcccgaagaccctcgctgggagctgcctcgggacagactggtcttaggcaaacccctgggagagggctgctttgggcaggtggtgttggcagaggctatcgggctggacaaggacaaacccaaccgtgtgaccaaagtggctgtgaagatgttgaagtcggacgcaacagagaaagacttgtcagacctgatctcagaaatggagatgatgaagatgatcgggaagcataagaatatcatcaacctgctgggggcctgcacgcaggatggtcccttgtatgtcatcgtggagtatgcctccaagggcaacctgcgggagtacctgcaggcccggaggcccccagggctggaatactgctacaaccccagccacaacccagaggagcagctctcctccaaggacctggtgtcctgcgcctaccaggtggcccgaggcatggagtatctggcctccaagaagtgcatacaccgagacctggcagccaggaatgtcctggtgacagaggacaatgtgatgaagatagcagactttggcctcgcacgggacattcaccacatcgactactataaaaagacaaccaacggccgactgcctgtgaagtggatggcacccgaggcattatttgaccggatctacacccaccagagtgatgtgtggtctttcggggtgctcctgtgggagatcttcactctgggcggctccccataccccggtgtgcctgtggaggaacttttcaagctgctgaaggagggtcaccgcatggacaagcccagtaactgcaccaacgagctgtacatgatgatgcgggactgctggcatgcagtgccctcacagagacccaccttcaagcagctggtggaagacctggaccgcatcgtggccttgacctccaaccaggagtacctggacctgtccatgcccctggaccagtactcccccagctttcccgacacccggagctctacgtgctcctcaggggaggattccgtcttctctcatgagccgctgcccgaggagccctgcctgccccgacacccagcccagcttgccaatggcggactcaaacgccgctgactgccacccacacgccctccccagactccaccgtcagctgtaaccctcacccacagcccctgctgggcccaccacctgtccgtccctgtcccctttcctgctggca

SEQ ID NO: 69019 - DNA, 3680 bp, Artificial Sequence
  derived and/or modified sequence
gctttgcccgccgcagcccagccggggccggcgcctccctccgctcgccgcccgcccctttcacctcctggctccctcccgggcgatccgcgccccttgggtctcccctcccttccctccgtccgcgtctcctgcgccccctccctgcgctcgtcccgccgctcttcccgccgcccaacttttcctccaactcgcgctcgggagctggcgaggcggcggcggctcctcaggtcagtttgaaaaggaggatcgagctcactgtggagtatccatggagatgtggagccttgtcaccaacctctaactgcagaactgggatgtggagctggaagtgcctcctcttctgggctgtgctggtcacagccacactctgcaccgctaggccgtccccgaccttgcctgaacaagcccagccctggggagcccctgtggaagtggagtccttcctggtccaccccggtgacctgctgcagcttcgctgtcggctgcgggacgatgtgcagagcatcaactggctgcgggacggggtgcagctggcggaaagcaaccgcacccgcatcacaggggaggaggtggaggtgcaggactccgtgcccgcagactccggcctctatgcttgcgtaaccagcagcccctcgggcagtgacaccacctacttctccgtcaatgtttcagatgctctcccctcctcggaggatgatgatgatgatgatgactcctcttcagaggagaaagaaacagataacaccaaaccaaaccccgtagctccatattggacatccccagaaaagatggaaaagaaattgcatgcagtgccggctgccaagacagtgaagttcaaatgcccttccagtgggaccccaaaccccacactgcgctggttgaaaaatggcaaagaattcaaacctgaccacagaattggaggctacaaggtccgttatgccacctggagcatcataatggactctgtggtgccctctgacaagggcaactacacctgcattgtggagaatgagtacggcagcatcaaccacacataccagctggatgtcgtggagcggtcccctcaccggcccatcctgcaagcagggttgcccgccaacaaaacagtggccctgggtagcaacgtggagttcatgtgtaaggtgtacagtgacccgcagccgcacatccagtggctaaagcacatcgaggtgaatgggagcaagattggcccagacaacctgccttatgtccagatcttgaagactgctggagttaataccaccgacaaagagatggaggtgcttcacttaagaaatgtctcctttgaggacgcaggggagtatacgtgcttggcgggtaactctatcggactctcccatcactctgcatggttgaccgttctggaagccctggaagagaggccggcagtgatgacctcgcccctgtacctggagatcatcatctattgcacaggggccttcctcatctcctgcatggtggggtcggtcatcgtctacaagatgaagagtggtaccaagaagagtgacttccacagccagatggctgtgcacaagctggccaagagcatccctctgcgcagacaggtaacagtgtctgctgactccagtgcatccatgaactctggggttcttctggttcggccatcacggctctcctccagtgggactcccatgctagcaggggtctctgagtatgagcttcccgaagaccctcgctgggagctgcctcgggacagactggtcttaggcaaacccctgggagagggctgctttgggcaggtggtgttggcagaggctatcgggctggacaaggacaaacccaaccgtgtgaccaaagtggctgtgaagatgttgaagtcggacgcaacagagaaagacttgtcagacctgatctcagaaatggagatgatgaagatgatcgggaagcataagaatatcatcaacctgctgggggcctgcacgcaggatggtcccttgtatgtcatcgtggagtatgcctccaagggcaacctgcgggagtacctgcaggcccggaggcccccagggctggaatactgctacaaccccagccacaacccagaggagcagctctcctccaaggacctggtgtcctgcgcctaccaggtggcccgaggcatggagtatctggcctccaagaagtgcatacaccgagacctggcagccaggaatgtcctggtgacagaggacaatgtgatgaagatagcagactttggcctcgcacgggacattcaccacatcgactactataaaaagacaaccaacggccgactgcctgtgaagtggatggcacccgaggcattatttgaccggatctacacccaccagagtgatgtgtggtctttcggggtgctcctgtgggagatcttcactctgggcggctccccataccccggtgtgcctgtggaggaacttttcaagctgctgaaggagggtcaccgcatggacaagcccagtaactgcaccaacgagctgtacatgatgatgcgggactgctggcatgcagtgccctcacagagacccaccttcaagcagctggtggaagacctggaccgcatcgtggccttgacctccaaccaggagtacctggacctgtccatgcccctggaccagtactcccccagctttcccgacacccggagctctacgtgctcctcaggggaggattccgtcttctctcatgagccgctgcccgaggagccctgcctgccccgacacccagcccagcttgccaatggcggactcaaacgccgctgactgccacccacacgccctccccagactccaccgtcagctgtaaccctcacccacagcccctgctgggcccaccacctgtccgtccctgtcccctttcctgctggcaggagccggctgcctaccaggggccttcctgtgtggcctgccttcaccccactcagctcacctctccctccacctcctctccacctgctggtgagaggtgcaaagaggcagatctttgctgccagccacttcatcccctcccagatgttggaccaacacccctccctgccaccaggcactgcctggagggcagggagtgggagccaatgaacaggcatgcaagtgagagcttcctgagctttctcctgtcggtttggtctgttttgccttcacccataagcccctcgcactctggtggcaggtgccttgtcctcagggctacagcagtagggaggtcagtgcttcgtgcctcgattgaaggtgacctctgccccagataggtggtgccagtggcttattaattccgatactagtttgctttgctgaccaaatgcctggtaccagaggatggtgaggcgaaggccaggttgggggcagtgttgtggccctggggcccagccccaaactgggggctctgtatatagctatgaagaaaacacaaagtgtataaatctgagtatatatttacatgtctttttaaaagggtcgttaccagagatttacccatcgggtaagatgctcctggtggctgggaggcatcagttgctatatattaaaaacaaaaaagaaaaaaaaggaaaatgtttttaaaaaggtcatatattttttgctacttttgctgttttatttttttaaattatgttctaaacctattttcagtttaggtccctcaataaaaattgctgctgcttcatt

SEQ ID NO: 69020 - DNA, 5375 bp, Artificial Sequence
  derived and/or modified sequence
ccctttcacctcctggctccctcccgggcgatccgcgccccttgggtctcccctcccttccctccgtccgcgtctcctgcgccccctccctgcgctcgtcccgccgctcttcccgccgcccaacttttcctccaactcgcgctcgggagctggcgaggcggcggcggctcctcaaagtgggagagcttcaaggtcacgtggtccgtccagcccctgctatctcaccagacactgtccaccctgtatgttggatcagtactccagtgagaagacagcaggcactttcacccatgcagcccattcagtcttcataaccacctgtgatggaggcaagggtcagtttgaaaaggaggatcgagctcactgtggagtatccatggagatgtggagccttgtcaccaacctctaactgcagaactgggatgtggagctggaagtgcctcctcttctgggctgtgctggtcacagccacactctgcaccgctaggccgtccccgaccttgcctgaacaagcccagccctggggagcccctgtggaagtggagtccttcctggtccaccccggtgacctgctgcagcttcgctgtcggctgcgggacgatgtgcagagcatcaactggctgcgggacggggtgcagctggcggaaagcaaccgcacccgcatcacaggggaggaggtggaggtgcaggactccgtgcccgcagactccggcctctatgcttgcgtaaccagcagcccctcgggcagtgacaccacctacttctccgtcaatgtttcagatgctctcccctcctcggaggatgatgatgatgatgatgactcctcttcagaggagaaagaaacagataacaccaaaccaaaccccgtagctccatattggacatccccagaaaagatggaaaagaaattgcatgcagtgccggctgccaagacagtgaagttcaaatgcccttccagtgggaccccaaaccccacactgcgctggttgaaaaatggcaaagaattcaaacctgaccacagaattggaggctacaaggtccgttatgccacctggagcatcataatggactctgtggtgccctctgacaagggcaactacacctgcattgtggagaatgagtacggcagcatcaaccacacataccagctggatgtcgtggagcggtcccctcaccggcccatcctgcaagcagggttgcccgccaacaaaacagtggccctgggtagcaacgtggagttcatgtgtaaggtgtacagtgacccgcagccgcacatccagtggctaaagcacatcgaggtgaatgggagcaagattggcccagacaacctgccttatgtccagatcttgaagactgctggagttaataccaccgacaaagagatggaggtgcttcacttaagaaatgtctcctttgaggacgcaggggagtatacgtgcttggcgggtaactctatcggactctcccatcactctgcatggttgaccgttctggaagccctggaagagaggccggcagtgatgacctcgcccctgtacctggagatcatcatctattgcacaggggccttcctcatctcctgcatggtggggtcggtcatcgtctacaagatgaagagtggtaccaagaagagtgacttccacagccagatggctgtgcacaagctggccaagagcatccctctgcgcagacaggtaacagtgtctgctgactccagtgcatccatgaactctggggttcttctggttcggccatcacggctctcctccagtgggactcccatgctagcaggggtctctgagtatgagcttcccgaagaccctcgctgggagctgcctcgggacagactggtcttaggcaaacccctgggagagggctgctttgggcaggtggtgttggcagaggctatcgggctggacaaggacaaacccaaccgtgtgaccaaagtggctgtgaagatgttgaagtcggacgcaacagagaaagacttgtcagacctgatctcagaaatggagatgatgaagatgatcgggaagcataagaatatcatcaacctgctgggggcctgcacgcaggatggtcccttgtatgtcatcgtggagtatgcctccaagggcaacctgcgggagtacctgcaggcccggaggcccccagggctggaatactgctacaaccccagccacaacccagaggagcagctctcctccaaggacctggtgtcctgcgcctaccaggtggcccgaggcatggagtatctggcctccaagaagtgcatacaccgagacctggcagccaggaatgtcctggtgacagaggacaatgtgatgaagatagcagactttggcctcgcacgggacattcaccacatcgactactataaaaagacaaccaacggccgactgcctgtgaagtggatggcacccgaggcattatttgaccggatctacacccaccagagtgatgtgtggtctttcggggtgctcctgtgggagatcttcactctgggcggctccccataccccggtgtgcctgtggaggaacttttcaagctgctgaaggagggtcaccgcatggacaagcccagtaactgcaccaacgagctgtacatgatgatgcgggactgctggcatgcagtgccctcacagagacccaccttcaagcagctggtggaagacctggaccgcatcgtggccttgacctccaaccaggagtacctggacctgtccatgcccctggaccagtactcccccagctttcccgacacccggagctctacgtgctcctcaggggaggattccgtcttctctcatgagccgctgcccgaggagccctgcctgccccgacacccagcccagcttgccaatggcggactcaaacgccgctgactgccacccacacgccctccccagactccaccgtcagctgtaaccctcacccacagcccctgctgggcccaccacctgtccgtccctgtcccctttcctgctggcaggagccggctgcctaccaggggccttcctgtgtggcctgccttcaccccactcagctcacctctccctccacctcctctccacctgctggtgagaggtgcaaagaggcagatctttgctgccagccacttcatcccctcccagatgttggaccaacacccctccctgccaccaggcactgcctggagggcagggagtgggagccaatgaacaggcatgcaagtgagagcttcctgagctttctcctgtcggtttggtctgttttgccttcacccataagcccctcgcactctggtggcaggtgccttgtcctcagggctacagcagtagggaggtcagtgcttcgtgcctcgattgaaggtgacctctgccccagataggtggtgccagtggcttattaattccgatactagtttgctttgctgaccaaatgcctggtaccagaggatggtgaggcgaaggccaggttgggggcagtgttgtggccctggggcccagccccaaactgggggctctgtatatagctatgaagaaaacacaaagtgtataaatctgagtatatatttacatgtctttttaaaagggtcgttaccagagatttacccatcgggtaagatgctcctggtggctgggaggcatcagttgctatatattaaaaacaaaaaagaaaaaaaaggaaaatgtttttaaaaaggtcatatattttttgctacttttgctgttttatttttttaaattatgttctaaacctattttcagtttaggtccctcaataaaaattgctgctgcttcatttatctatgggctgtatgaaaagggtgggaatgtccactggaaagaagggacacccacgggccctggggctaggtctgtcccgagggcaccgcatgctcccggcgcaggttccttgtaacctcttcttcctaggtcctgcacccagacctcacgacgcacctcctgcctctccgctgcttttggaaagtcagaaaaagaagatgtctgcttcgagggcaggaaccccatccatgcagtagaggcgctgggcagagagtcaaggcccagcagccatcgaccatggatggtttcctccaaggaaaccggtggggttgggctggggagggggcacctacctaggaatagccacggggtagagctacagtgattaagaggaaagcaagggcgcggttgctcacgcctgtaatcccagcactttgggacaccgaggtgggcagatcacttcaggtcaggagtttgagaccagcctggccaacttagtgaaaccccatctctactaaaaatgcaaaaattatccaggcatggtggcacacgcctgtaatcccagctccacaggaggctgaggcagaatcccttgaagctgggaggcggaggttgcagtgagccgagattgcgccattgcactccagcctgggcaacagagaaaacaaaaaggaaaacaaatgatgaaggtctgcagaaactgaaacccagacatgtgtctgccccctctatgtgggcatggttttgccagtgcttctaagtgcaggagaacatgtcacctgaggctagttttgcattcaggtccctggcttcgtttcttgttggtatgcctccccagatcgtccttcctgtatccatgtgaccagactgtatttgttgggactgtcgcagatcttggcttcttacagttcttcctgtccaaactccatcctgtccctcaggaacggggggaaaattctccgaatgtttttggttttttggctgcttggaatttacttctgccacctgctggtcatcactgtcctcactaagtggattctggctcccccgtacctcatggctcaaactaccactcctcagtcgctatattaaagcttatattttgctggattactgctaaatacaaaagaaagttcaatatgttttcatttctgtagggaaaatgggattgctgctttaaatttctgagctagggattttttggcagctgcagtgttggcgactattgtaaaattctctttgtttctctctgtaaatagcacctgctaacattacaatttgtatttatgtttaaagaaggcatcatttggtgaacagaactaggaaatgaatttttagctcttaaaagcatttgctttgagaccgcacaggagtgtctttccttgtaaaacagtgatgataatttctgccttggccctaccttgaagcaatgttgtgtgaagggatgaagaatctaaaagtcttcataagtccttgggagaggtgctagaaaaatataaggcactatcataattacagtgatgtccttgctgttactactcaaatcacccacaaatttccccaaagactgcgctagctgtcaaataaaagacagtgaaattgacctga

SEQ ID NO: 69021 - DNA, 2469 bp, Artificial Sequence
  derived and/or modified sequence
atgtggagctggaaatgcttgttgttctgggccgtgctggtgaccgctaccctctgcacagctcggcccagtcccaccctccctgagcaggcccagccctggggggcccctgtagaagtagaatctttcctggttcacccaggagatctgctgcagctgcgctgcagactcagagacgatgtccagtccatcaactggctcagagatggcgtacaactggcagagtccaacagaacacgcattactggagaggaggttgaggtgcaggattccgtgcctgccgactcaggtttgtatgcatgtgttacttcatccccttcggggtcagacacaacatacttttccgtgaacgtatcagtcccaatcgatgcacttccctcttccgaggatgacgatgatgatgatgattcttcgagtgaagaaaaggagactgataatacgaagcccaaccccgtcgcgccttattggacctcaccagaaaaaatggaaaaaaagttgcatgctgtcccggctgcaaaaacagtgaagttcaagtgtccaagctctggaactccaaatcccacattgcggtggctcaaaaatggtaaagaattcaagcccgatcaccggataggtggttataaagtcaggtatgcaacatggagtattataatggattcagtcgtgccctccgacaaagggaattacacatgtatcgtggagaatgagtacggctccatcaatcacacatatcagcttgatgtcgttgaacgctcacctcatcggccaatcctccaagctggcctgccagccaataagacggtagctctaggctcaaatgtggaattcatgtgtaaagtttattccgacccgcagcctcacattcagtggctgaagcacattgaggtgaacggctcaaaaatcggacccgacaatctgccttacgtccagatcctgaagcactccggcatcaattcctctgacgcagaggttctcactctgtttaacgtgacagaagcccagtccggagaatacgtatgcaaagtgtctaactacattggcgaagcaaaccagtcagcatggctgacagtcacacggccagttctggaggaacgcccagctgtcatgacatcccccctttacctggaaatcataatctactgcaccggcgcattcctgatttcatgtatggtgggatcagtaatcgtatataagatgaaatctggtaccaaaaaatccgacttccactctcagatggcagtgcacaagctcgccaaatcaatccctcttagaagacaagtgacagtaagcgccgattcctctgcctctatgaactctggggtgctcctggtgaggccctcacggctgagttcctcaggaactcccatgctggccggcgtgtccgaatatgagctgcccgaggacccccgatgggaactcccccgtgacaggctggtgctcggcaagcctctgggagaggggtgctttgggcaggtggtgttggcagaagccatcggcctggataaagataaacctaaccgcgttaccaaggtcgccgtgaagatgcttaagagtgacgccactgaaaaagacctgagtgacctaatatctgagatggaaatgatgaagatgatcggtaaacacaagaacataataaatctcttaggcgcatgcactcaggacgggccgctctacgtaatcgtggaatacgcctctaagggaaatttacgggaatacctccaggcccggcggccccccggcctggagtactgttataatcccagccataatcctgaggaacagctaagcagcaaagacttggtgtcttgcgcatatcaggtggccagaggtatggagtaccttgcttccaaaaagtgtattcaccgcgacctggctgcccgcaatgtgctggtgacagaagataacgtcatgaagatcgccgatttcggcctcgcacgcgacatccaccacatcgattattataaaaagaccaccaatgggagactgccagtcaagtggatggctcccgaggcactgttcgataggatttacacccaccagtcagatgtttggtctttcggcgtgttgttgtgggaaattttcactctgggcggaagcccgtatcccggagtgcccgtggaagagctcttcaaactgctgaaagaagggcaccgaatggacaagccatcaaattgtaccaatgaattgtacatgatgatgcgcgattgttggcacgcagtacccagccagagacctacttttaaacagctcgttgaggacctggatagaatcgtggcactgacatccaatcaagagtatttggatttatcgatgccactagaccaatactcaccctcgtttcccgacacacgcagcagcacatgcagcagtggagaggactctgtgttttcgcatgagccattgccggaagaaccctgcttaccccggcatcccgcccagctggctaacggagggctcaaacggagatag

SEQ ID NO: 69022 - DNA, 2463 bp, Artificial Sequence
  derived and/or modified sequence
atgtggagttggaaatgcctgctgttctgggccgtcctggttacggccactctgtgcactgctcggccctcccctacactgcctgagcaggctcagccctggggcgctccagtggaagtcgaaagcttccttgtacacccaggggatctgctgcagctgcggtgccgcctccgcgacgacgtgcaaagcattaactggctgcgtgatggcgtgcaactggcagagagtaacagaactaggatcactggcgaagaggtggaggttcaggatagtgtacccgctgatagcggtctgtacgcatgcgtaacaagttcaccatctggatcagacaccacatatttcagcgtgaacgtttctgatgcactgccaagcagcgaggacgacgacgatgacgacgatagctccagcgaagagaaagagaccgacaataccaaacccaaccccgtcgccccttattggacatctccagagaagatggagaaaaaactccatgcagtcccagctgccaaaacagtgaaatttaaatgtcccagcagcggaactcctaaccctacactaagatggctcaaaaacggcaaagaattcaaacccgatcaccggattggtgggtacaaggtacggtacgctacctggtctatcatcatggattcagttgtcccatccgacaaaggcaactacacctgcatagtagagaacgaatatggttcaatcaaccacacataccagctcgacgtcgtggagcgctcaccgcatcggcccatactgcaagctggcctgccagccaacaaaacagtcgccctcggatcaaacgtagaatttatgtgcaaagtttactccgatcctcagccgcacattcagtggctcaaacatattgaagtgaatggctcaaagattggacccgataacttgccttacgtgcagattctgaagacggctggagttaacaccaccgacaaagagatggaagttttgcacttgcggaatgtcagctttgaagatgccggtgaatacacctgtctcgctggcaacagtattggcttgtcacatcattcagcttggctaacagttctggaagcccttgaggaacgccccgccgtcatgacctcacccctgtacctcgaaattatcatttactgtaccggcgctttccttatcagttgcatggtcgggtcagtgattgtttacaaaatgaaatcaggaacaaaaaaatctgactttcacagccagatggccgtgcataagctggctaagtcaattcccctccggaggcaagtgacagtcagtgccgattctagtgctagtatgaactccggcgttctcctggtgaggcccagtcgccttagcagttctggcactcccatgctggccggggtgtctgagtacgaactcccagaggaccccaggtgggaattacccagagaccgtctggtactcggtaagcccctcggggagggatgctttggacaggtagtcctggctgaagcaattggactggacaaagataagcctaacagagtcacaaaggtcgccgtaaagatgcttaaatccgatgcgaccgagaaagacctgtccgacctcattagcgagatggaaatgatgaagatgattgggaagcacaagaacatcattaatctgctgggtgcatgcacacaggacggccctctttatgttattgtcgagtacgcctctaaaggaaacctccgtgaatatctgcaagcccgaaggcctcctggtctcgaatactgctacaacccaagtcacaaccccgaagagcagttgagttccaaggatctggtctcttgcgcctaccaggtcgcacgaggcatggagtacctcgcatcgaagaagtgtatacaccgcgacttggccgcacggaatgtgctggtgactgaagacaatgttatgaagattgccgacttcggcctcgcgcgggatatccaccacattgactactataaaaaaacgacaaatgggaggctgcctgttaaatggatggctcctgaggcgctgtttgaccgcatttacacacaccaatcagatgtttggtcgttcggtgtccttctctgggaaatattcacattgggcggctcaccctaccccggagtgccagtggaggagctgtttaaactcctcaaagagggacatcgaatggacaagcccagcaattgcactaacgaactgtacatgatgatgcgggattgctggcatgctgtaccaagtcagcgccctacgtttaagcagttagtggaagacctggatcggattgtagcgttaactagcaatcaggaatacctcgacctgagcatgcccctcgatcagtattcccctagttttccagacactagaagtagcacctgctcctccggagaggactctgtcttttctcatgagcctctgcctgaggagccttgcttgcctcgtcacccggcccagcttgcaaacgggggtttgaaacgacgctag

SEQ ID NO: 69023 - DNA, 2463 bp, Artificial Sequence
  derived and/or modified sequence
atgtggagttggaaatgtctgttattctgggccgtcttggtgacagcaactctttgcacggctcgtccctcgccgacccttccagaacaagcgcaaccttggggggcgccggtagaagtcgagtcattcctcgtgcatcctggagacttactccagcttcgctgcaggctgcgtgatgatgtccaatcaataaattggcttagggatggggtgcagttggctgagagcaaccggacacgcataacaggagaagaagtcgaagtccaagactctgtgccggctgatagcggtttatatgcgtgcgtgacgagctcacccagtggctcagacaccacatacttcagtgttaacgtgagcgacgccctaccttcaagcgaagatgatgacgatgacgacgattccagctcagaagagaaggaaacagataacacaaaaccaaatcctgttgccccctactggacatcacctgagaagatggagaagaaactccatgctgttcctgccgccaaaactgtgaaatttaaatgcccatcttcagggacacctaatcccaccctgaggtggctaaaaaacggaaaggagtttaagcctgatcaccggattggcggttataaggtccggtacgccacttggtctatcataatggattcagtcgttccctccgacaaaggaaactatacatgtatcgtggagaacgagtacggctcaattaatcacacctatcagctcgatgtcgtcgaaaggtcgcctcataggcctattttacaggctggcctcccagccaataagacggtggcactcggcagcaatgtcgaattcatgtgcaaggtgtattcggacccccaaccacatatacagtggttgaaacacatcgaggttaacggctctaagatcggaccagacaatctcccgtatgtgcagatactgaagactgctggagtgaacactacagacaaagagatggaagtcttacacttgcgcaacgtgagtttcgaggatgcgggagagtacacttgtctagctggaaactcaattggcctgagccaccactcggcatggctgacggtccttgaggctctcgaagaacgcccagcagtgatgacgtcccctctgtacttggagattatcatctattgcacaggggccttcctcatcagctgcatggtcggatctgtgatagtctataaaatgaagagcgggactaagaaatccgactttcattcacagatggccgtgcataaactcgctaagtctattcccctacgtagacaggttacagtgagcgcagattccagcgcaagtatgaatagcggggtgctgctggtcagaccctctaggctttcatcaagtggcacacccatgttggcaggagtgtcggaatacgagctgccagaggaccccaggtgggaactgcccagagaccggttagtgcttggaaaacccctaggtgaggggtgttttggacaggtggtgctggcagaggcaatcggactggacaaggataagccgaatagggttactaaggttgcagtgaagatgctcaagtctgacgcaaccgagaaagacctaagtgacttaatatctgaaatggagatgatgaagatgatcggaaaacacaagaacataattaacttacttggtgcctgcacccaggatggccctttgtacgtcattgtggaatacgccagtaaggggaacctgcgggagtaccttcaagcccgtcgccctcccggactggagtactgctacaatcctagtcacaatcccgaggaacagctgtctagcaaggatttagtatcctgcgcctatcaagtggccagaggaatggagtacttggcgagcaaaaagtgtatccatcgagatcttgccgctcgtaatgtcctagtcactgaggacaatgtgatgaaaattgcagattttggcctcgcgcgggatattcatcatatagattattataaaaaaaccaccaatggaaggctgccagtgaaatggatggcacccgaggcactctttgacaggatatacacccatcagagcgatgtctggtccttcggcgttctgctttgggagatctttaccctgggcggcagcccttatccaggggtgcccgtggaagagctctttaaactgctaaaagagggacaccgtatggataagccttctaactgcaccaacgagctttacatgatgatgagagactgctggcacgccgtgccctcccagcgtcctacgttcaaacagctcgttgaggaccttgacagaatcgtagcccttacttccaatcaagagtacttagacttaagtatgccactagatcagtacagcccctctttccctgatacacgatcttccacgtgttcttctggcgaggacagtgtgttttcacacgagcccctgcctgaagagccgtgtctgcctagacaccctgcgcaactggcgaatggcggtctgaaaagaagatag

SEQ ID NO: 69024 - DNA, 2463 bp, Artificial Sequence
  derived and/or modified sequence
atgtggagctggaagtgcttgctattttgggccgtgctcgtgaccgctaccctctgcactgcccgtccatcacctactctgcccgagcaggctcagccctggggagctcctgtggaggttgagtccttcctggtccatcccggcgacctgctgcagctgcggtgcaggttgagagatgacgttcagtccatcaattggttgagggatggagtgcaactggcagagtctaatcgcacgcggataacgggcgaagaagttgaggttcaggattcagttcccgctgactccgggctgtacgcttgtgtgacctcaagcccaagtggctccgatacaacatatttcagtgtcaatgttagtgacgctctcccctcaagtgaagacgatgatgatgacgatgatagttcatccgaggaaaaagaaaccgacaacacaaagcccaatcctgtggctccctactggacttcgcctgagaagatggagaagaagctgcatgctgttccggcagccaagacagtaaagttcaagtgtcccagttccgggaccccaaatccgactcttcgctggctgaagaatggcaaggagtttaaacccgaccacaggatcggagggtacaaagtcaggtatgcgacatggtcaattattatggactcagttgttccatccgacaaaggtaactacacctgcatagtggagaatgaatatggatctatcaaccacacgtaccagctggacgtggtggagaggtcccctcatagaccaatcctacaggccgggcttcccgccaataagaccgttgcccttggatctaatgtggagtttatgtgcaaagtctattctgatcctcagccacatatccagtggttgaaacatattgaggtgaatggctccaagatcggtcccgacaatttgccctacgtgcagatcctgaaaactgctggggtaaacacaacagacaaagagatggaggtcctgcacttgcggaacgtctcctttgaagacgctggtgagtatacgtgtttggctgggaatagcattggcctgtctcatcacagtgcttggttaacggttttggaggcattggaagaacggccagcagtcatgacctcacccttatatctggaaatcattatctattgtactggcgcatttctgatatcttgtatggtcgggagcgtcattgtttacaagatgaaatcaggtacgaagaaaagcgattttcatagccagatggccgttcataagctagcaaagtcaattccactgcggcgacaagtgactgtctcagccgattcttctgcaagcatgaactcaggagtgctcttagtgcggccgagtcgcttatcgagtagcggaacccctatgcttgccggtgtgagtgaatatgagttacctgaagatccacgatgggaactcccccgggacagattggtgctcgggaagcccctcggggagggctgctttggacaagtggtgctggccgaggccatcggcctcgacaaagataaaccgaacagagtgactaaagtggccgtgaaaatgctcaaatctgacgcaaccgagaaagatctgtctgaccttatctctgaaatggaaatgatgaaaatgattggcaaacacaagaacataatcaatctgctgggggcttgcacacaggatggtccactgtacgtcattgtggagtacgctagcaagggcaaccttagggagtatctgcaggctagaagaccacctgggttagagtactgctataaccccagccataatccagaggaacagcttagctccaaggacctggtatcatgtgcctaccaggtggcaagaggcatggaatatctggcatctaagaaatgcatccatcgggacttagccgcgcgtaacgtcctcgtgaccgaggacaatgtgatgaaaatagccgattttggccttgcccgtgatatccaccacattgattactataaaaaaacaaccaacggccggctccccgttaagtggatggctcctgaggcgcttttcgataggatctacacccaccagtcagacgtgtggtcattcggcgtgcttctctgggagatcttcaccttgggagggtccccttacccgggcgtcccagtggaggagctttttaaactattgaaggaggggcatagaatggacaaaccatccaattgcaccaatgagctgtatatgatgatgagagattgctggcacgcagtaccctctcagaggccaacctttaaacaactggtcgaagaccttgaccgtatcgtggccctgacttctaaccaggaatatctagacctgtccatgcccctggaccagtactctcctagttttcccgacacacgaagctcaacgtgctcatcaggcgaggacagcgttttcagccatgagccgttgcccgaagagccctgcttaccacggcaccctgcgcagcttgccaatggtggactgaaacggcggtag

SEQ ID NO: 69025 - DNA, 2562 bp, Artificial Sequence
  derived and/or modified sequence
atggaggctagagtcagtctcaagaggcggatagaactaactgtggaatatccctggagatgtggcgccttgagtcctactagcaactgccgcaccgggatgtggagctggaagtgcctcctcttttgggccgtgcttgtgacagcaactttgtgcaccgccagaccaagccctaccctgcccgaacaagcgcaaccctggggggctcccgtagaggtggaatcattcctagtccaccccggggatctcctgcagttaaggtgtcgactccgagacgatgtgcagagtatcaactggctgcgggacggcgttcaactagccgagtccaacagaacccgcatcactggcgaagaagtcgaggtgcaggatagcgtgcccgcagactctggactttatgcatgtgtcacatcatcgccaagcggctcagacaccacatatttctctgttaacgtatccgatgccctgccttctagtgaagacgatgacgatgacgacgatagctcttccgaggagaaagaaaccgacaatacaaaacccaatcccgtcgctccttactggacatcacctgaaaaaatggagaaaaaactgcatgctgtgcccgcagcaaagaccgtcaagtttaaatgcccttccagtggtacccccaatccaaccctgcggtggctcaaaaacgggaaggagttcaaacccgatcaccgtatcgggggatataaggtgcgctacgcgacatggtcaattattatggacagtgtggttccgtcagacaagggaaattatacgtgcattgtggagaacgagtacgggagtatcaaccatacataccagctggacgtcgtggaaagatcccctcacaggcccatcctccaggccggcctgcccgctaacaagacagtcgcattaggctcgaacgtggaatttatgtgcaaggtctactctgaccctcagcctcacatccagtggttgaagcacatcgaggtcaatggcagtaagattggaccggacaacctcccttatgtacaaattcttaaaactgctggggtcaacacaaccgacaaggaaatggaagttctgcacctgcggaacgtttccttcgaggatgcaggcgagtacacttgcttagcaggcaattctatcggattatcccaccatagtgcctggctaacagtgttggaagctttggaagaacggccagctgtgatgacatcccctctgtacctcgagatcattatatactgcacaggagctttccttatttcttgtatggtgggctccgtcatagtatacaagatgaaaagtggaaccaagaagagcgatttccattcacagatggccgtgcataaattggccaagtccatccccttgcgccgtcaggtgacggtttctgcagattcttccgcctcaatgaatagcggtgtgctgttagtacgcccatcacggctgtcttcttccgggacgccaatgctagccggggtgtctgaatacgagttgcccgaggatcctagatgggagctgcctcgggaccgactggtcctcgggaaacccttaggcgaaggttgtttcgggcaggtagtactcgcggaggccatcggactcgacaaggataaacctaatagggtcacaaaggtggcggttaaaatgctgaagagcgacgccacagagaaggacctctcagatctgatatcagaaatggagatgatgaaaatgattggcaaacacaagaatattataaacctgctaggggcatgtacacaggatggccccctttacgttattgtggagtacgcttcaaaagggaacctgcgtgagtacttgcaagccagacgacctcctggacttgagtactgttacaacccttcccacaacccggaagagcaactgtcttcgaaggacttggtttcttgcgcatatcaggtggctcgcggtatggagtatttggcatccaagaaatgcatccatcgagaccttgctgccaggaacgtactggtgactgaggataacgtgatgaagatcgccgactttggactggctagggacattcatcacatcgattactacaagaaaactaccaatggacgcctgcctgtgaagtggatggcccctgaggcactgtttgaccgcatatatacccaccagtccgatgtctggagtttcggggtgctcctgtgggagatctttactctcggaggctccccctatcctggggtgccggttgaggaactgttcaagcttctgaaggagggtcaccggatggacaagcccagcaactgcacgaatgagctttacatgatgatgcgtgactgctggcatgcggtgcctagccagagacctacatttaaacagctggtggaagacctggacagaatcgtggctctgactagcaatcaagaatacttggacttgagcatgcccctggaccaatactctcctagctttccggacacacggagctccacatgctccagtggcgaggatagcgtcttctctcacgaaccactgccagaagagccctgtctgcctcgacatcccgcccagttggctaatggagggctgaaacggcgctag

SEQ ID NO: 69026 - DNA, 2469 bp, Artificial Sequence
  derived and/or modified sequence
atgtggagctggaagtgcctgctcttctgggccgtgctggtgacagccaccctgtgcacagcccggcccagccccaccctgcctgagcaggcccagccctggggcgcccctgtggaggtggagagcttcctggtgcaccctggggacctgctgcagctgcgctgccgcctgagagatgatgtgcagagcatcaactggctgagagatggagtgcagctggccgagagcaacagaacccgcatcaccggggaggaggtggaggtgcaggacagcgtgcctgctgacagcggcctgtatgcctgtgtgaccagcagccccagcggcagtgacaccacctacttctctgtgaatgtgtctgtgcccattgatgccctgcccagcagtgaagatgatgatgatgatgatgacagcagcagcgaggagaaggagacagacaacaccaagcccaaccctgtggccccctactggaccagccctgagaagatggagaagaagctgcatgctgtgcctgctgccaagacagtgaagttcaagtgccccagcagcggcacccccaaccccaccctgcgctggctgaagaatggcaaggagttcaagccagaccaccgcatcggcggctacaaggtgcgctatgccacctggagcatcatcatggacagcgtggtgcccagcgacaagggcaactacacctgcatcgtggagaatgaatatggcagcatcaaccacacctaccagctggatgtggtggagaggagcccccaccggcccatcctgcaggccggcctgcctgccaacaagacagtggccctgggcagcaatgtggagttcatgtgcaaggtgtacagcgacccccagccccacatccagtggctgaagcacatcgaggtgaatggcagcaagattggaccagacaacctgccctacgtgcagatcctgaagcacagcggcatcaacagcagtgatgctgaggtgctgaccctcttcaacgtgacagaggcccagagcggggagtatgtgtgcaaggtgagcaactacatcggggaggccaaccagagcgcctggctgactgtgaccaggcctgtgctggaggagaggcctgctgtgatgaccagccccctgtacctggagatcatcatctactgcaccggggccttcctgatcagctgcatggtgggctctgtgattgtgtacaagatgaagagcggcaccaagaagagtgacttccacagccagatggctgtgcacaagctggccaagagcatccccctgcggcggcaggtgacagtgtctgctgacagcagcgcctccatgaacagcggcgtgctgctggtgcggcccagccggctgagcagcagcggcacccccatgctggccggcgtgtctgaatatgagctgcctgaggacccccgctgggagctgccccgggaccggctggtgctgggcaagcccctgggggagggctgcttcggccaggtggtgctggccgaggccatcggcctggacaaggacaagcccaacagagtgaccaaggtggccgtgaagatgctgaagagtgatgccacagagaaggacctgagtgacctgatcagcgagatggagatgatgaagatgattggcaagcacaagaacatcatcaacctgctgggcgcctgcacccaggacggccccctgtatgtgattgtggagtatgccagcaagggcaacctgcgggagtacctgcaggcccggcggcccccaggcctggagtactgctacaaccccagccacaaccctgaggagcagctgagcagcaaggacctggtgtcctgtgcctaccaggtggcccggggcatggagtacctggccagcaagaagtgcatccaccgggacctggccgccagaaatgtgctggtgacagaagataatgtgatgaagattgctgactttggcctggcccgggacatccaccacatcgactactacaagaagaccaccaacggccgcctgcctgtgaagtggatggcccctgaggccctgtttgaccgcatctacacccaccagagtgatgtgtggagctttggagtgctgctgtgggagatcttcaccctgggcggcagcccctacccaggagtgcctgtggaggagctgttcaagctgctgaaggagggccacaggatggacaagcccagcaactgcaccaatgagctgtacatgatgatgagggactgctggcatgctgtgcccagccagaggcccaccttcaagcagctggtggaggacctggacagaattgtggccctgaccagcaaccaggagtacctggacctgtccatgcccctggaccagtacagccccagcttcccagacaccaggagcagcacctgcagcagcggggaggacagcgtcttcagccatgagcccctgcctgaggagccctgcctgcccaggcacccagcccagctggccaacggcggcctgaagagaagatag

SEQ ID NO: 69027 - DNA, 2463 bp, Artificial Sequence
  derived and/or modified sequence
atgtggagctggaagtgcctgctcttctgggccgtgctggtgacagccaccctgtgcacagcccggcccagccccaccctgcctgagcaggcccagccctggggcgcccctgtggaggtggagagcttcctggtgcaccctggggacctgctgcagctgcgctgccgcctgagagatgatgtgcagagcatcaactggctgagagatggagtgcagctggccgagagcaacagaacccgcatcaccggggaggaggtggaggtgcaggacagcgtgcctgctgacagcggcctgtatgcctgtgtgaccagcagccccagcggcagtgacaccacctacttctctgtgaatgtgtctgatgccctgcccagcagtgaagatgatgatgatgatgatgacagcagcagcgaggagaaggagacagacaacaccaagcccaaccctgtggccccctactggaccagccctgagaagatggagaagaagctgcatgctgtgcctgctgccaagacagtgaagttcaagtgccccagcagcggcacccccaaccccaccctgcgctggctgaagaatggcaaggagttcaagccagaccacagaattggaggctacaaggtgcgctatgccacctggagcatcatcatggattctgtggtgcccagcgacaagggcaactacacctgcatcgtggagaatgaatatggcagcatcaaccacacctaccagctggatgtggtggagaggagcccccaccggcccatcctgcaggccggcctgcctgccaacaagacagtggccctgggcagcaatgtggagttcatgtgcaaggtgtacagcgacccccagccccacatccagtggctgaagcacatcgaggtgaatggcagcaagattggccctgacaacctgccctacgtgcagatcctgaagacagctggggtgaacaccacagacaaggagatggaggtgctgcacctgagaaatgtgtcctttgaagatgctggggagtacacctgcctggccggcaacagcatcggcctgagccaccacagcgcctggctgactgtgctggaggccctggaggagaggcctgctgtgatgaccagccccctgtacctggagatcatcatctactgcaccggggccttcctgatcagctgcatggtgggctctgtgattgtgtacaagatgaagagcggcaccaagaagagtgacttccacagccagatggctgtgcacaagctggccaagagcatccccctgcggcggcaggtgacagtgtctgctgacagcagcgcctccatgaacagcggcgtgctgctggtgcggcccagccggctgagcagcagcggcacccccatgctggccggcgtgtctgaatatgagctgcctgaggacccccgctgggagctgccccgggaccggctggtgctgggcaagcccctgggggagggctgcttcggccaggtggtgctggccgaggccatcggcctggacaaggacaagcccaacagagtgaccaaggtggccgtgaagatgctgaagagtgatgccacagagaaggacctgagtgacctgatcagcgagatggagatgatgaagatgattggcaagcacaagaacatcatcaacctgctgggcgcctgcacccaggacggccccctgtatgtgattgtggagtatgccagcaagggcaacctgcgggagtacctgcaggcccggcggcccccaggcctggagtactgctacaaccccagccacaaccctgaggagcagctgagcagcaaggacctggtgtcctgtgcctaccaggtggcccggggcatggagtacctggccagcaagaagtgcatccaccgggacctggccgccagaaatgtgctggtgacagaagataatgtgatgaagattgctgactttggcctggcccgggacatccaccacatcgactactacaagaagaccaccaacggccgcctgcctgtgaagtggatggcccctgaggccctgtttgaccgcatctacacccaccagagtgatgtgtggagctttggagtgctgctgtgggagatcttcaccctgggcggcagcccctacccaggagtgcctgtggaggagctgttcaagctgctgaaggagggccacaggatggacaagcccagcaactgcaccaatgagctgtacatgatgatgagggactgctggcatgctgtgcccagccagaggcccaccttcaagcagctggtggaggacctggacagaattgtggccctgaccagcaaccaggagtacctggacctgtccatgcccctggaccagtacagccccagcttcccagacaccaggagcagcacctgcagcagcggggaggacagcgtcttcagccatgagcccctgcctgaggagccctgcctgcccaggcacccagcccagctggccaacggcggcctgaagagaagatag

SEQ ID NO: 69028 - DNA, 2562 bp, Artificial Sequence
  derived and/or modified sequence
atggaggcccgggtgtccctgaagagaagaattgagctgactgtggagtacccctggaggtgtggggccctgagccccaccagcaactgcaggacaggcatgtggagctggaagtgcctgctcttctgggccgtgctggtgacagccaccctgtgcacagcccggcccagccccaccctgcctgagcaggcccagccctggggcgcccctgtggaggtggagagcttcctggtgcaccctggggacctgctgcagctgcgctgccgcctgagagatgatgtgcagagcatcaactggctgagagatggagtgcagctggccgagagcaacagaacccgcatcactggagaggaggtggaggtgcaggacagcgtgcctgctgacagcggcctgtatgcctgtgtgaccagcagccccagcggcagtgacaccacctacttctctgtgaatgtgtctgatgccctgcccagcagtgaagatgatgatgatgatgatgacagcagcagcgaggagaaggagacagacaacaccaagcccaaccctgtggccccctactggaccagccctgagaagatggagaagaagctgcatgctgtgcctgctgccaagacagtgaagttcaagtgccccagcagcggcacccccaaccccaccctgcgctggctgaagaatggcaaggagttcaagccagaccaccgcatcggcggctacaaggtgcgctatgccacctggagcatcatcatggacagcgtggtgcccagcgacaagggcaactacacctgcatcgtggagaatgaatatggcagcatcaaccacacctaccagctggatgtggtggagaggagcccccaccggcccatcctgcaggccggcctgcctgccaacaagacagtggccctgggcagcaatgtggagttcatgtgcaaggtgtacagcgacccccagccccacatccagtggctgaagcacatcgaggtgaatggcagcaagattggaccagacaacctgccctacgtgcagatcctgaagacagctggggtgaacaccacagacaaggagatggaggtgctgcacctgagaaatgtgtcctttgaagatgctggggagtacacctgcctggccggcaacagcatcggcctgagccaccacagcgcctggctgactgtgctggaggccctggaggagaggcctgctgtgatgaccagccccctgtacctggagatcatcatctactgcacaggagccttcctgatcagctgcatggtgggcagcgtcatcgtgtacaagatgaagagcggcaccaagaagagtgacttccacagccagatggctgtgcacaagctggccaagagcatccccctgcggcggcaggtgacagtgtctgctgacagcagcgcctccatgaacagcggcgtgctgctggtgcggcccagccggctgagcagcagcggcacccccatgctggccggcgtgtctgaatatgagctgcctgaggacccccgctgggagctgccccgggaccggctggtgctgggcaagcccctgggggagggctgcttcggccaggtggtgctggccgaggccatcggcctggacaaggacaagcccaacagagtgaccaaggtggccgtgaagatgctgaagagtgatgccacagagaaggacctgagtgacctgatcagcgagatggagatgatgaagatgattggcaagcacaagaacatcatcaacctgctgggcgcctgcacccaggacggccccctgtatgtgattgtggagtatgccagcaaaggaaacctgcgggagtacctgcaggcccggcggcccccaggcctggagtactgctacaaccccagccacaaccctgaggagcagctgagcagcaaggacctggtgtcctgtgcctaccaggtggcccggggcatggagtacctggccagcaagaagtgcatccaccgggacctggccgccagaaatgtgctggtgacagaggacaacgtgatgaagattgctgactttggcctggcccgggacatccaccacatcgactactacaagaagaccaccaacggccgcctgcctgtgaagtggatggcccctgaggccctgtttgaccgcatctacacccaccagagtgatgtgtggagctttggagtgctgctgtgggagatcttcaccctgggcggcagcccctacccaggagtgcctgtggaggagctgttcaagctgctgaaggagggccacaggatggacaagcccagcaactgcaccaatgagctgtacatgatgatgagggactgctggcatgctgtgcccagccagaggcccaccttcaagcagctggtggaggacctggaccgcatcgtggccctgaccagcaaccaggagtacctggacctgtccatgcccctggaccagtacagccccagcttcccagacaccaggagcagcacctgcagcagtggagaagattctgtgttcagccatgagcccctgcctgaggagccctgcctgcccaggcacccagcccagctggccaatggaggcctgaagagaagatag

SEQ ID NO: 69029 - DNA, 2469 bp, Artificial Sequence
  derived and/or modified sequence
atgtggagctggaagtgcctgctgttctgggccgtgctggtgaccgccactttgtgcaccgccagaccatctccaacattgcccgagcaggctcaaccttggggcgcacctgtggaggtcgagagttttctggtgcaccctggcgatctcttacagttgagatgccgcctgcgggacgatgttcaatccataaactggctcagagatggcgttcagctggccgaaagcaatagaaccagaatcacgggggaggaagtggaggtacaagattcagtgccagctgacagtggtctctacgcctgcgtcactagctccccaagcggctcagataccacttatttttccgtgaatgtgtcagtgccaatcgatgctcttccctcttcggaggacgacgatgacgacgatgacagcagttcagaagaaaaggagaccgataacaccaagcctaatcccgtcgccccttactggacttcccctgaaaagatggaaaagaaactgcatgctgttcctgccgccaagaccgtaaagttcaagtgccctagtagcggcacgccaaaccccaccctccggtggctaaagaatggaaaagaatttaaacccgaccatcgtattggtggatataaagtgcgatacgcaacctggagcattataatggactccgtggtgccgagtgacaaagggaactacacatgtatagtggagaacgagtatggaagcataaaccatacataccagctggacgttgtagagcgcagtccccatcgccctatactgcaggctggcctgcctgcgaacaagacagtggccctcgggtccaacgtggaattcatgtgcaaggtgtactccgacccacagccccacatccagtggctgaaacacatcgaggtcaacggctctaagattggacccgataacctgccttatgtgcagatcctcaagcacagcggcattaattcgagcgatgcggaggttctcacactctttaatgtcacggaggcccagtcgggtgaatacgtctgcaaggtgagcaattacatcggtgaagccaaccaatccgcttggctgacggtgactaggccagtactcgaggagcggcctgcagttatgaccagcccattgtacctggagatcataatctactgcacaggagcatttctgattagctgtatggtgggctccgtgatcgtgtataagatgaaatctgggactaaaaaatctgatttccatagccaaatggcagttcacaaactcgcaaagtctatcccactccgtaggcaggttaccgtttcggctgattcttccgcttcaatgaatagcggggtcctcttggttcggccaagtcgtctgagctctagcgggacacctatgttggcaggagtgtctgagtacgagcttccagaagaccctaggtgggagctccctagggaccggctggtgcttggcaaacctctaggtgagggctgttttgggcaggtggtcctggcggaagccattgggctggacaaagacaagcccaatagagtgaccaaagtggccgtgaagatgctgaagtcggacgcaaccgagaaggatttgagcgacctgatctcggagatggaaatgatgaaaatgattggtaaacataagaatatcataaaccttctgggagcgtgcacacaagatggccctctgtacgtgattgtggagtacgcctcaaagggaaacctccgggaatacttacaggctcgaaggccgccaggtcttgagtattgttacaatccatcccataaccccgaagagcaactgtccagcaaggacctggtgtcatgtgcgtatcaggttgctagagggatggagtacctcgcttctaagaagtgcattcatagggatctagccgcccggaacgtgctggtcacagaggacaacgtcatgaaaatcgccgactttggccttgctcgggacatccaccacatcgactactataagaagaccacgaacggtagactgcctgtgaaatggatggcccccgaggctctgttcgatagaatatatactcaccagtccgacgtgtggtcttttggggtcctcctgtgggagatcttcaccctcggtgggagcccttaccctggcgtgcctgtggaggaactcttcaaactcctaaaggaaggacatcggatggataagccttcaaattgtactaacgagctctacatgatgatgagagactgctggcacgctgttccatcccagcgaccaaccttcaaacagcttgtcgaggatctggacaggatcgttgcgctgacgtcaaatcaggagtaccttgatctctccatgcctctggaccaatattccccaagtttcccagatactcggtcctccacgtgttcatcaggagaagacagtgtcttctcacatgaaccattgcccgaggagccctgcttacctcgacatcccgcccagctcgctaatgggggtctcaaaagacgctag

SEQ ID NO: 69030 - DNA, 2463 bp, Artificial Sequence
  derived and/or modified sequence
atgtggagctggaagtgcctgctgttctgggccgtgctggtgaccgccaccctctgcacagcgcgcccctccccgaccctccccgagcaagcgcagccctggggtgcccctgtagaagtggaaagcttcctcgttcatcccggggaccttctccagctgcgatgtcgcctgagggatgatgttcagtctataaattggctgagagatggcgtgcagttagccgagtccaatagaactaggattactggcgaagaggtggaagtgcaggacagcgtgcccgccgattcggggctgtacgcttgcgtcacgtcctcaccaagtggatccgatactacgtatttttcagtcaatgtgtcagacgccctgccgtcaagcgaggatgatgatgatgatgatgactcttcgtccgaagagaaggaaaccgataacaccaagcccaacccggtggccccctattggacatctcccgaaaaaatggagaagaaattacacgccgttcccgcagcaaaaaccgtgaagttcaaatgtcctagctctggcaccccaaaccccacccttcgctggttgaagaacggcaaggaattcaaaccagaccatagaatcggcggctataaagttcggtacgccacttggtccattatcatggatagtgtcgtccccagcgataaggggaactacacctgtattgtggaaaatgagtatggcagtatcaatcatacctaccagttagacgtcgtggaaagatcgcctcacagaccaattttacaggcgggcctcccagccaataagacggtggctctggggagcaacgtagaatttatgtgtaaagtgtattccgacccccagccacacattcaatggttgaagcacatcgaggttaatggctccaagattgggcctgataatctcccctacgtccagattctaaaaaccgcaggcgtgaatacaacagataaagagatggaggtactacacctccgtaacgtaagcttcgaggacgcgggagagtacacctgccttgccgggaattctatagggttgtctcatcactcagcctggctgactgtgctggaggccctggaggaacgcccggccgtgatgacatcacccctgtacctcgagattattatttattgtacaggcgctttcctaatctcttgtatggtgggttccgtgatcgtgtataagatgaagtcaggaacaaagaagagcgacttccatagtcagatggcagtccataaactggctaagtctattcctttaaggcgccaggtaactgtttctgcagacagctcagcatccatgaactccggcgtgctactggtaaggccctcacgactcagcagctccggcacacccatgctggctggtgtgagtgaatacgagctgccggaagacccccggtgggaactgcctcgagataggctggtgctaggcaagccgttaggggagggttgttttggacaggtagtccttgccgaggcaatcgggttggacaaagacaaacctaacagagtgaccaaagtcgctgttaaaatgctcaagtctgatgctacagaaaaagacctctccgacctcatcagcgagatggaaatgatgaaaatgatcggtaagcacaagaatatcatcaaccttctcggggcctgtacccaggatggtcctctgtatgtgatagtcgaatacgcctcaaagggcaacctgagagagtatctgcaggccaggagaccccctggcctggagtattgctacaatccatctcataacccagaagagcagttgagctcgaaggatctggtaagctgtgcgtaccaggtcgctcgtgggatggaatacctcgcgtccaaaaagtgcattcatagggatctggcggccagaaatgtccttgttacagaggacaacgtgatgaagattgccgactttggcttggctagggacatacaccatatcgattattacaaaaaaaccacaaatggacggctacccgtcaagtggatggctcccgaggccctgtttgacagaatttatactcatcaatccgacgtgtggtcttttggagtgcttctgtgggagatcttcacactaggaggctctccatatcctggagtgcctgtggaagaattgttcaagctactgaaggagggacacaggatggacaagccctcaaattgtacaaatgagctctatatgatgatgcgggattgctggcatgctgttccttcccagcgccctacctttaaacagttggttgaggatctggatagaattgttgcactaactagtaaccaggaatatctggacttgagtatgcctctggaccagtatagtccctcatttcccgatacaagaagctcgacatgttcctccggtgaagacagtgtgttcagccacgaacctcttcctgaggaaccctgtcttcctcggcacccggcacagctggcaaatgggggcctaaaacgccgatag

SEQ ID NO: 69031 - DNA, 2463 bp, Artificial Sequence
  derived and/or modified sequence
atgtggagctggaagtgcctgctgttctgggccgtgctggtgaccgccaccctgtgcactgctcggccaagcccaacattgccggagcaagcacaaccatggggggccccagtcgaggtggaaagctttctagtgcatcctggggacctccttcagttgcgctgccgactgcgagacgatgttcaatcaatcaattggttaagagacggcgtacaactggcagaaagcaaccgaacccggattacgggcgaggaagtggaggtgcaggactccgtgcctgccgactcagggttgtatgcatgtgtcactagttccccatctgggagcgacacgacttacttctctgttaacgtgtcagatgctctgccttcatctgaagacgatgacgacgacgacgacagcagtagcgaggaaaaggaaaccgataacactaagcctaacccagtcgcgccttactggacaagtcccgagaaaatggaaaagaaattgcatgcggttcctgccgctaaaaccgtgaagttcaaatgtccctcctcaggcacccctaaccccacactccgttggctgaaaaatggtaaggaatttaagcccgatcaccgaatcggtggctataaggtgaggtacgccacatggagcatcatcatggacagcgtagtaccctccgacaagggcaactacacttgtatcgttgagaatgagtacgggagtatcaaccacacttaccagctcgatgtagttgagaggtcgccacaccggccgattctgcaggccgggctccctgcgaacaaaaccgttgctctaggctcaaatgttgagtttatgtgcaaggtctacagtgatccgcagccccacatccaatggctaaaacacattgaagtgaacgggtcaaaaatcgggcccgacaatctcccatacgtacagattctgaagacagctggtgtcaatacgacagataaggagatggaggtgctccacttaaggaatgtgagcttcgaagatgcgggggaatatacctgtctggctggaaatagcatcggcctgtcgcatcactcagcatggctcaccgttctggaggctttagaagagagacctgccgtgatgacatcacctctttacttggagataatcatatactgcactggggcgttcctgatttcttgcatggttgggagcgtgatcgtgtataagatgaagtctggcaccaagaagtctgacttccatagccagatggccgtgcataaactcgccaagtccatccccctccggcgacaggtgacagtcagcgctgatagcagcgcctccatgaactcaggcgtgctactcgtgaggcctagtaggctgtcctccagtggcacacccatgctcgctggagtgtcagagtacgagcttcccgaggatccgcgctgggaactgccacgtgaccgcctggtgctgggaaagcccctgggtgagggctgtttcggccaggtggtcctggcagaggcaatcggcctggacaaagacaagccaaatagggtgacaaaggtggctgtgaaaatgcttaagagtgacgccaccgaaaaggatttgagcgacctgattagcgaaatggagatgatgaaaatgattgggaaacataagaatatcattaatctgctgggagcctgcacccaggatggacccctctatgtgatagtcgagtacgctagcaaggggaacctcagggagtacctgcaggccaggcggccccccggtctcgaatattgctacaatcccagtcataaccctgaggagcagcttagctccaaggatttggtgtcttgtgcatatcaagtggccagaggaatggagtatctggctagtaaaaagtgtattcaccgtgacctggcggctcggaatgtgctcgtgacagaagataacgttatgaagatcgctgattttggcctggcccgcgatatccatcacatagattactacaagaagaccaccaatggaagactgcccgttaagtggatggcgccagaggcgttgttcgacagaatttacacccaccagagtgacgtgtggagttttggagtgttgctttgggaaatttttacccttggtgggtcaccttacccgggcgttccggttgaagagctgtttaaactgctgaaagaaggacaccggatggacaagccaagtaattgcacaaacgagctgtacatgatgatgcgggattgctggcacgccgtgccgagtcagagaccaactttcaagcaacttgtggaagatttggataggattgtggcattgactagtaatcaagagtacctcgatctcagcatgcctctggaccagtattcaccttcattcccagatactaggtctagcacttgtagcagcggtgaggacagtgttttcagccacgaacccctccctgaggaaccttgtctcccgagacacccggctcagctagcgaatggtggactgaaacggagatag

SEQ ID NO: 69032 - DNA, 2463 bp, Artificial Sequence
  derived and/or modified sequence
atgtggagctggaagtgcctgctgttctgggccgtgctggtgaccgctacgctttgtacagcacggccatcacccactctccccgagcaggctcagccatggggagcaccggttgaagtggagtccttcctggtccacccaggtgacctgctacagttgagatgccgcctaagggatgatgtgcagtccatcaattggctgagagatggggtgcagttagccgaatctaatcgcactcgcatcaccggtgaagaagttgaagtgcaggactcggttccggccgattctggcctttacgcctgtgtcacatcaagcccatcaggtagcgatactacatatttctcagtgaatgtgtctgacgccctgcctagcagtgaagatgatgacgacgacgatgacagctcgtccgaggaaaaggagactgataacacaaagcctaatccagtggccccctactggacctcccccgaaaaaatggaaaagaaactccatgcggtgccagctgcaaagaccgtaaaattcaaatgtccatcttctggcaccccgaacccaacattgcggtggttgaaaaatggaaaggagttcaagcctgatcacaggatagggggatacaaagtgagatatgccacttggagtatcattatggatagcgtagttcctagtgacaaaggaaactatacttgcatcgtggagaatgaatatggctccattaaccacacctatcagctggacgtggtggagagatccccacaccgtcccattctccaggcagggctgccagctaataaaactgtggccctgggatcaaatgtcgaattcatgtgtaaagtgtattctgaccctcagccccatatccaatggctcaaacacattgaggttaatggttccaagattgggccggacaacctgccatacgtgcagattctgaagacagccggtgtgaatacaacagataaagagatggaagtcttacacctgaggaatgtgtcttttgaggatgcaggcgaatacacttgcctagctgggaactctattggcctgagccatcattccgcctggctcactgtcctagaggcactagaagaacgccctgctgtcatgacatccccactgtacctggaaattatcatctactgcaccggtgccttcctgatcagttgcatggtgggatccgtcattgtgtacaagatgaaatccggaacaaaaaagtcagacttccacagccagatggccgtgcacaaactggcgaagtctatacccttgaggagacaggttacagtatccgccgacagcagcgcgtcgatgaatagcggcgtgcttttggtgaggccctcaaggctgtcatctagtggcaccccaatgcttgcaggagtgtcagaatacgaactccctgaagatcctcgttgggaactgccgcgagaccgcctcgtgcttgggaaaccactgggagaaggttgcttcggccaggtggtactggccgaggccatcggcctggataaggataaacccaatcgcgtgacaaaagtcgctgttaagatgctgaaaagcgacgccactgaaaaagatctgtctgacttgatatctgagatggaaatgatgaaaatgatcggcaaacataagaatatcattaacctgttgggagcgtgcacacaggatggcccattatatgtcatcgtggagtacgcctcaaaaggaaaccttagggagtatcttcaagcccgcagaccaccagggctggagtattgctacaacccttctcataaccccgaagagcagttgtcatctaaggacctcgtcagttgcgcgtatcaggtcgcccgcgggatggagtatctggcctcaaaaaagtgtatccaccgggatctggcagcacgcaacgtgctagtgacagaagacaatgtaatgaagatcgcagatttcggacttgctcgggatattcaccacattgactattataaaaagacgactaacggaaggctcccagttaaatggatggcccctgaagcactgttcgatagaatttatacccatcagtcagatgtgtggagtttcggtgttctcctgtgggaaatctttactcttggcgggtctccataccctggggtccccgtagaggagctcttcaaactactgaaggaggggcataggatggataagcccagcaactgtacaaacgagctgtacatgatgatgagagactgctggcatgctgtgccttcccagcgcccaacctttaagcagcttgtagaagatctcgacagaattgtagccctgacgagcaatcaggagtatttagacctgtccatgcctctagaccagtattccccctctttcccagacacaaggagcagtacatgctcctccggggaggatagcgtctttagccacgagcccctccccgaggagccttgcctaccccggcaccccgcccagttggcaaacggagggctgaagcgtcgatag

SEQ ID NO: 69033 - DNA, 2562 bp, Artificial Sequence
  derived and/or modified sequence
atggaggcccgggtgagcctgaagcggcggatcgagctgaccgtggagtacccatggcggtgcggtgcattgagtcccacgtcaaattgtcggaccggcatgtggagttggaaatgtcttctgttttgggccgttctggtaaccgcaacgttatgcacagcaaggcctagcccaacccttcccgagcaagcacaaccatggggtgccccagtggaggtcgaatctttcctcgttcatcctggcgacctgctgcagttgaggtgccgcctgagggatgatgtccaaagtatcaactggctacgggacggtgttcagttggctgaatccaacaggacccgcatcaccggggaggaagttgaagttcaggattccgtcccagccgactcgggcttgtacgcatgcgtaactagctccccgagcggctctgacaccacttactttagcgtaaatgtatctgatgctcttccctcctctgaagatgacgacgatgatgatgactcatcctcggaagaaaaagagacggacaacactaaacctaacccagtggcgccatactggactagtccagagaagatggagaagaagctccacgcagtgccggcagccaagacggtaaaatttaaatgcccatctagtggaaccccaaaccccaccctgagatggctaaaaaacggaaaagagttcaaacctgatcatcgtatcgggggatataaagtcaggtacgctacttggtctattataatggatagtgttgtaccgagtgacaagggaaactatacatgcatagtagaaaatgagtacggttctataaatcatacgtatcaactggacgtggtcgagaggagccctcatcggccgatcctgcaagctggattgcccgctaataaaaccgtcgcacttgggtcaaatgttgaatttatgtgtaaggtatatagcgatccacagcctcatatccagtggttgaaacacatagaggttaacgggtccaagatagggcccgataacttaccgtacgtacagatcctgaaaaccgccggcgtgaacacaacggataaagagatggaggtgctgcatttacgcaatgtgtctttcgaggacgcaggcgaatatacctgcttggcagggaatagtatcggtctgagccaccactctgcctggcttacagtgctggaggctcttgaggagcggccggctgtgatgacaagtcccctgtatctggaaatcatcatctactgcactggcgctttcctgatctcctgcatggtaggctctgtcatcgtgtataaaatgaagtctggtacaaagaagtccgattttcactcccagatggctgttcacaagttagccaagagcattccccttaggagacaggtaaccgtcagtgcagatagtagcgcatctatgaattccggagtcttgttagtgcgcccgagccgcttgagctcctcggggacaccgatgttggccggcgttagtgaatacgagctacccgaggatccccgctgggagctaccccgggacagactggtcctgggtaagcctctgggggagggatgttttgggcaggtggtgttggccgaggccatcggcctagataaggataaacctaaccgggtaaccaaagtggctgtgaaaatgctgaaatccgatgcaaccgagaaagacctctctgacctaataagcgaaatggaaatgatgaaaatgatcgggaagcataaaaatattataaacctgctgggcgcgtgcacacaagatggccccctgtatgtgattgtggaatatgcctcgaagggcaatctgagagaatacctgcaggcacgccgcccaccaggactggagtactgctacaatcctagtcataatcctgaggaacaattgtcctccaaggacctcgtgagctgtgcttatcaagtagcaagggggatggagtatctggcttcaaagaagtgtattcatcgagacctggctgctagaaacgtattggtgacggaagataacgtgatgaaaatcgctgacttcggactggccagggacatccaccatatcgattattacaagaaaacaaccaatggccgcttaccggttaaatggatggcgcccgaggcgttattcgacagaatctacacacatcagtccgatgtttggtccttcggcgtccttctctgggagattttcacactaggagggagtccatacccaggcgttcccgttgaggaactattcaaattgctgaaggagggccaccgcatggataagccttctaattgcaccaacgagctgtatatgatgatgagagactgctggcacgcagtgccaagccagagacctaccttcaagcagctggtggaagacctggatcggatcgtggctctgacctcaaaccaggagtatctggatctgtccatgccacttgatcagtacagcccgtcttttccagatactcggtcttccacctgtagctccggagaggactctgtgttcagtcacgagcccctgcccgaggagccgtgcctccctcgccatcctgctcagcttgccaacggcggactgaagagacgctag

SEQ ID NO: 69034 - DNA, 2469 bp, Artificial Sequence
  derived and/or modified sequence
atgtggtcatggaaatgcctcttattttgggctgtcctagtcactgcaactttgtgtacagccaggccttcacccactctgcccgagcaagcccagccctggggagctccagttgaggtggagagcttcctcgtgcaccccggagacttgctgcagctgagatgcaggcttagagacgatgtccagagcattaattggttgagggacggagtgcagctcgcagaatctaacagaactcggattaccggcgaagaagtggaggtacaggactccgtccccgcagattcgggcttatacgcatgtgtcacttcctccccatcaggatccgataccacatatttttccgtcaatgttagcgtcccaatcgacgcccttccctctagtgaagacgacgacgatgatgacgatagtagctcagaggagaaagaaaccgataacactaagccaaaccccgtggcaccctattggacaagccctgagaaaatggaaaagaagctgcatgcagtgccggcagctaagactgtgaagtttaagtgtcccagctcgggaacccccaaccccactctgagatggctgaaaaatggcaaagaatttaagccagatcaccgcatcggcggatataaagtccggtatgccacctggtcaattattatggactccgtcgtaccttctgataagggaaactacacatgcatcgtcgagaatgaatacggttctatcaaccatacctatcagcttgacgtcgtggagcggtccccccatagaccaatcctccaagctggtctccctgccaacaaaacagtggcccttggctctaacgtggagtttatgtgtaaagtgtattccgatccacagccacatatccaatggctgaaacacattgaggtcaacggctcaaagatcggcccagacaatctaccttatgtgcagatcctgaagcattctgggattaactcatcagatgcagaggtgctcacgttgttcaatgtcaccgaagctcaatcaggtgagtatgtttgcaaagtttccaactacatcggggaggcaaaccaaagcgcatggctgacggtgacacgaccagtgctagaggaaaggcctgcagtaatgacttcacccctttatctcgaaataattatctattgtactggtgctttcctaatttcttgtatggtgggctctgttatcgtctataaaatgaagagtggaacaaagaaaagtgatttccactctcagatggccgtgcacaagcttgcaaaatccattcccttaaggcgccaagtcactgtgtcagcagacagctccgcatctatgaactccggggtcctgctggtcagaccctcccgcttgtcatcttctggtactcccatgcttgctggagtgtcggagtatgagctgcccgaggatccccgttgggagttaccgagagaccgactcgtacttggtaaacccttgggggagggatgctttggtcaggtcgtgctggccgaggccattggactggacaaggacaagccaaacagagtcaccaaagtggcggtcaagatgctcaaaagtgatgccacagagaaagacctgagcgacttgatctcagagatggaaatgatgaagatgatcggcaagcacaaaaacattattaatctccttggagcttgcacacaggacggacccctgtatgtgatcgtcgagtacgcctctaagggaaacctgcgtgagtacttacaggcccgtagacctccaggcctggagtactgctataatccaagtcacaaccctgaggaacagttatcttccaaggatttagtgtcttgcgcctaccaggtggcaagaggtatggaataccttgcttccaagaaatgcatccaccgtgatctggctgcgaggaacgtcctggtgactgaggataatgtgatgaagatcgctgattttggtctcgccagggacatccaccacattgattattataagaaaactacaaacggacgcctcccagtaaagtggatggcacccgaggccctatttgacagaatttacacccaccagagcgacgtctggtctttcggcgtgctcctgtgggaaattttcactctcgggggaagcccatatcccggagtgccagttgaggagctgttcaagctccttaaggaggggcaccgcatggacaagccctctaattgcaccaatgagctgtacatgatgatgcgtgattgctggcacgccgtcccaagccagagaccaacttttaaacaactggtggaggatctcgacagaatcgttgccctgacctcaaatcaggagtatctggacttgtccatgccgctggaccaatattctcccagcttccctgacacgagaagctccacatgcagcagtggcgaggattccgttttcagtcatgagcctctgcccgaagaaccatgtctgccacgccatcctgcccagctggcaaatggcggattgaaacggaggtag

SEQ ID NO: 69035 - DNA, 2463 bp, Artificial Sequence
  derived and/or modified sequence
atgtggagttggaagtgtctgctattctgggccgtcttggtgactgctactctgtgcactgcaaggccgtccccgactctgcccgagcaagcccaaccctggggtgcccctgtggaggtggaatcatttctggtgcatcctggggatctcctccagctccgctgcagactgagggacgacgtgcagtccatcaattggctgcgcgacggcgtccagttagcagaaagcaatcgcactagaatcacaggggaagaggttgaggtgcaggactccgtgccggcagattcaggcctttacgcatgcgttacctccagccccagtggatccgacactacttactttagcgtgaatgtcagcgatgccctaccgagcagcgaggacgacgacgatgacgacgactctagctcagaggagaaggaaaccgacaacaccaagccgaaccctgtggcgccatattggactagcccagagaagatggagaaaaagcttcacgcagttccagctgccaagaccgttaagttcaaatgtccctcttcagggacacctaatcccacactgagatggctgaaaaacggcaaggaattcaagcccgaccaccgcatcggtggctacaaggtcaggtacgctacatggtcaatcattatggactctgtcgtgccgagtgacaaaggcaattacacatgcatcgtggagaacgagtatggctccatcaatcacacctaccaactggatgtagtcgagcggagccctcacaggcctattctgcaggctggactgccagccaacaagaccgtggccctgggatccaatgtggaatttatgtgtaaagtctattccgacccccagccccatatccagtggctgaaacatattgaggtgaatggatccaagatcggcccagataatctcccttatgtgcagatacttaagaccgccggagtgaacaccaccgacaaagaaatggaggtgttacatctcagaaacgtgagctttgaggacgcaggtgaatatacatgcctcgcaggcaacagcattgggctgtcacaccactctgcttggctaacggtcttagaggctctggaggaaaggcccgctgtaatgacctcaccactataccttgaaatcattatttactgcaccggcgcattccttatttcttgtatggttggctccgtgattgtgtacaaaatgaagtcaggaaccaagaaatccgactttcattctcagatggccgtgcacaaactggccaagagtattccactcaggcgccaagtgactgtctccgccgatagctccgcaagcatgaattccggggttctactggtgcggccatctagactgtccagctccggcacgccaatgctcgctggggtgtcggaatacgaattgccagaagacccgaggtgggaactaccacgcgacagactggtgctggggaagcccctcggcgaagggtgttttgggcaggtcgtgctggctgaggcaattgggctcgataaggacaagcccaaccgagtgaccaaggtcgcggtaaagatgctgaaatccgatgccaccgagaaagacctctccgacctcatctctgagatggagatgatgaagatgatcggcaagcacaagaacattataaatctcctgggcgcttgcacccaggacggacccctgtatgtgatagttgagtacgctagcaagggcaacctgagagagtatttacaagcgcgtaggcctccaggccttgaatactgctacaatcccagccataatccagaagaacaactttcaagtaaagacctggtctcatgcgcttaccaagtggctcggggaatggagtacctagcctccaaaaaatgtatacaccgggatcttgccgctagaaacgtccttgtgacagaggataatgtaatgaaaatagctgatttcggcttagcacgagacatccatcacatagactactataaaaagaccacaaatgggagactgcctgtaaagtggatggctccagaggctctgttcgacagaatctacacccatcaatctgacgtttggtctttcggagtgttactttgggaaatcttcacactgggtggcagcccttaccctggggttcctgtcgaggaactgttcaagttgctgaaggaggggcatcggatggacaaaccgtctaactgcaccaatgaactgtatatgatgatgcgggattgttggcatgctgtcccctcccagaggcctactttcaagcagttagttgaagatctggacaggattgtggcactgacatccaatcaggaatatctcgacctctctatgcccctcgaccagtattccccctctttcccagatacccgtagcagtacctgtagctccggcgaagacagcgttttctcacatgaacctcttccggaggagccttgcctgcccaggcaccccgctcaactggctaacggaggactgaagcgacgctag

SEQ ID NO: 69036 - DNA, 2463 bp, Artificial Sequence
  derived and/or modified sequence
atgtggtcctggaaatgcctactgttctgggccgttctggtgactgcgactctgtgcactgcacgaccctctccaaccctgccggagcaagcacagccttggggggcacccgtggaggtggaaagtttcctcgttcaccctggcgatctgctccaactcaggtgcaggctcagggacgatgtacagagtattaactggcttagagatggagttcagttggcagaatcaaaccggacacggattaccggcgaggaagttgaggtacaggactctgttccagccgatagtgggttatacgcctgcgtaacaagcagcccgtccgggtctgacacgacctatttttccgtgaatgtgagcgacgccttgccttcctccgaagatgatgatgatgatgatgatagtagctcagaagagaaggagaccgataacaccaagccaaaccccgtggcgccttactggacatcaccagagaaaatggagaaaaaactccacgccgttccagccgcaaagactgtgaaatttaagtgcccgtccagtggcactcctaatccaactctccgatggctgaagaacgggaaagaattcaaacctgatcaccgtatcggcggatacaaagtcagatacgctacgtggagtattatcatggacagtgtggtgccttctgataagggcaattacacctgtatcgtcgagaatgagtatggatctataaaccacacctatcagcttgatgtggttgagagatctccacatagacccattttacaggccggactcccagccaataaaaccgttgcgcttggttccaatgtcgagttcatgtgcaaggtctacagcgatcctcagcctcatatccaatggctcaaacatatcgaggttaatgggagtaagattgggcctgataatctcccatacgtacagatccttaagactgccggagtcaatacgacagacaaggagatggaggttctccacctacggaatgtcagcttcgaggatgcgggagaatatacctgtcttgctgggaattcgatcgggttaagtcatcattcggcctggctaacagtgctggaagccctagaggaacggcctgcagttatgacctcccccctgtacttagagatcatcatttactgtacaggcgctttccttatctcctgcatggtggggtctgtgatcgtgtacaaaatgaaatctggcaccaaaaagagcgattttcacagccagatggccgtgcataaactggcaaagtcaattcccctgaggcgccaggtgaccgtgagtgcggattcatctgcgagtatgaactcaggcgttcttctggttaggccctcccgactctcatcctcaggaactcctatgttggccggtgtgtctgaatacgagctgcctgaggacccgaggtgggaactgcccagggacaggttggtgctagggaagcccctcggggaggggtgcttcggacaggttgttttagcagaggctattggactggataaagacaagccaaatagggttaccaaagtggcagtgaagatgctgaaatccgatgccacagagaaagacctcagcgacctgattagtgagatggaaatgatgaagatgatcggaaagcacaaaaatatcatcaatctgcttggcgcttgtacccaggacggtcccctctacgtaatcgtggaatacgctagtaaggggaatttgagagaatatctgcaggcacgccgaccgccaggtctcgaatactgctataaccccagccacaatcccgaagaacaactgagcagcaaggatctcgtatcttgtgcgtaccaggtagcacgcggaatggagtatcttgcaagcaaaaagtgtatccatcgggatcttgcagctagaaacgtgctggttacagaggataacgtgatgaagatcgctgatttcggactggctcgcgacatccaccacattgactactataagaaaacaacaaacggaagacttcctgttaagtggatggcacccgaggccctgttcgatcgaatctacacccatcagtcagatgtgtggagctttggcgttctgctgtgggagatttttacactagggggttcaccataccctggcgtcccggttgaggaactgttcaaattgctcaaggagggccatcgtatggataagccttccaactgtactaacgagttatatatgatgatgagagattgctggcatgccgtgccctctcagcggcctactttcaagcaactggttgaggatctcgaccgaatcgtcgcgctgacatccaaccaggaatacctggacctgtcaatgcccctggaccagtattcacctagttttcctgacacgcgatcatcaacgtgtagctctggcgaggattccgtcttcagtcatgagcctctgccagaggagccttgcctccctaggcaccccgctcagctcgccaacggaggcctgaagaggagatag

SEQ ID NO: 69037 - DNA, 2463 bp, Artificial Sequence
  derived and/or modified sequence
atgtggtcatggaagtgcctcttattctgggccgtgttggtgaccgctaccttatgcaccgcccgaccaagtcctactttgcccgagcaggcccaaccctggggggcaccagtggaagtggagagctttctcgttcaccccggtgatctgctccagctgcgatgcagactgagggatgatgtgcagagcattaattggctgcgtgacggcgtccagcttgcagaaagcaatagaactcggatcactggcgaagaagttgaggtccaggattccgtccccgcagatagcgggctttatgcctgcgtgactagttcgcccagcgggagcgacaccacatacttttcagtgaacgtgtcggacgcccttccttcttccgaagacgacgacgacgacgacgactctagctcagaggagaaagagaccgacaatacaaaaccaaacccagttgcaccttactggaccagcccagagaagatggaaaagaaacttcatgccgtgccagccgcaaaaacggtcaaatttaaatgccccagctccgggactcccaatcccaccctccgctggctgaagaacgggaaagagttcaaaccagatcataggattggagggtataaggttcgatatgctacatggtctattatcatggacagtgttgttcctagtgataagggaaactacacttgcatcgtggagaatgaatatgggtccattaatcacacataccagttggacgtagtggaaaggagcccgcatcgcccaatcctgcaggcagggctgcccgctaataagacagtcgctttgggctcaaacgtggaattcatgtgcaaagtctattccgaccctcagccacacatccaatggttgaagcacattgaggtaaatggatccaaaatcggtcctgataacttgccctacgttcagatcttgaaaactgctggagtcaacacaaccgataaggaaatggaggtgctccacctgagaaatgtttcgttcgaagacgccggagaatacacttgcctggctgggaatagcatcggactttctcaccattccgcctggctgacagtgttagaagcactggaggagaggccagccgtcatgacctcacccctgtacttggaaattattatctattgtactggcgcattcctgatttcatgcatggtaggcagcgtcatcgtgtacaaaatgaagtccgggaccaaaaaaagcgatttccactcccagatggccgttcacaagctggctaaatccatcccgctcaggagacaggttacagtgtctgccgactcctcagcaagcatgaattccggcgtcctgctcgttcgcccttcgaggctctcgagctccggcactcctatgctggccggtgtgtcagagtacgagctccccgaagatccccgttgggagctgcctagggaccgcctcgtgctcggcaaaccactgggcgaggggtgctttggccaggtcgtgctggccgaagcaattgggctggacaaagacaagccaaacagggtgaccaaggtggccgtgaagatgttgaagagcgatgccacagaaaaagatctgagtgacctgatctcagagatggaaatgatgaaaatgataggcaagcataaaaacataatcaatttactaggggcttgcacccaggatggccctttatatgtcatcgtggaatacgccagtaaggggaacctccgagaatatctccaggccagaaggccgcctggtttggagtattgttacaacccatctcacaaccccgaagagcaactcagctccaaggatctggtatcctgcgcctaccaagttgcacgcggtatggaatatttggcgtcgaagaaatgtatccatcgagaccttgccgcaagaaacgtgctggtgaccgaggataatgtgatgaagattgctgacttcgggctggcccgagacattcatcatatcgactattacaagaagaccaccaacggcaggctcccggttaaatggatggccccagaagccctatttgacaggatctacacgcaccaatcagacgtctggtcctttggcgtgttactgtgggagattttcactctgggtggctcaccataccctggtgtgcctgtggaggagctcttcaaactcttaaaggaggggcacagaatggacaagcctagcaactgcaccaatgaactgtacatgatgatgagggactgctggcacgctgtgcccagccagagacctactttcaaacaactggttgaggatctggatagaatcgttgcgctgacaagcaaccaagagtatctggacctgtctatgccactggatcagtattctccgtctttccctgatactaggtcatccacatgttcttccggcgaagactctgtgttttcacacgaacccctgcccgaggagccctgtctgccccgtcaccctgcacagctcgcaaacggtggactgaagcgacgctag

SEQ ID NO: 69038 - DNA, 2562 bp, Artificial Sequence
  derived and/or modified sequence
atggaagcccgagtgtctctgaaacgcaggatcgagctgaccgtggagtatccttggcgctgtggagccctatcccctaccagcaactgccggacaggaatgtggtcttggaagtgcctgctgttctgggccgttcttgtcaccgccactctctgtaccgcccgacccagcccgactttgccagaacaggcgcaaccatggggagctccagtcgaggtggagtcgttcctggttcaccccggtgacctgctgcagctgaggtgtcgactgcgcgatgacgtccagagcatcaactggctgcgagatggagtacagcttgctgagtctaacagaacaaggataacgggtgaggaagtggaagtccaggactctgtgccagccgacagcggcctgtatgcctgtgtgacatccagtccctccggctccgatacgacatattttagtgtaaacgtctccgacgctttgccaagttccgaagatgatgacgatgacgacgacagttcttccgaggagaaagaaaccgataatactaagccaaaccccgttgctccatactggacaagtccagaaaagatggagaagaagcttcacgcggtgccagctgcaaaaacagtaaagttcaagtgcccttcaagtggaacacctaatcccaccttgcggtggctgaaaaatgggaaggaattcaagccagaccataggatcgggggatacaaagtacgctacgctacctggtcaattattatggacagtgtggtcccatcagacaagggaaattatacatgcattgtggaaaacgagtacggctcaatcaaccacacatatcagcttgacgtggttgaacgctctccacacaggcccatcctgcaggccggattgcctgctaacaagacagtcgcgctgggctcgaacgtagagtttatgtgtaaggtctactcagatcctcagccacacatccagtggcttaaacatattgaggtgaacggctcgaagatcggacctgacaacctgccatatgtgcagattctgaaaactgcaggtgtaaacaccactgacaaggaaatggaggtgctccacctgcgcaacgtcagctttgaggacgctggggagtatacgtgcttagctggaaattcaattggcctctctcaccattctgcctggctgaccgtcctagaagcattggaggaaaggcctgcagttatgacgtcaccactgtacctcgagatcatcatttattgtacgggggctttccttatttcgtgcatggtagggagcgttattgtgtacaaaatgaagtcaggcactaagaaatccgactttcattctcaaatggccgtccacaagcttgccaaatcaatcccgctccgaagacaagtcaccgtgagtgctgattcaagcgcctcaatgaactctggcgtgctcctggttcgtccctcgcggctgtccagctccggtacaccgatgttggcaggggttagcgagtatgagctaccagaagatcccaggtgggagctgccacgggatagattagtactgggcaagcccctcggggaagggtgcttcgggcaagtggttctcgcagaagccatagggttggataaagacaaacccaatcgcgtgactaaggtggccgtaaagatgctgaagtctgatgctacggaaaaggatctttctgacctgatcagtgaaatggaaatgatgaaaatgatcgggaagcacaaaaatatcattaatttattgggcgcttgtacacaggacggaccactgtacgtgatagtggaatatgcttccaaagggaatctcagggagtaccttcaggcaagacggcctccaggtctggagtactgttacaatcctagccacaacccagaggaacaacttagtagcaaggatcttgtctcctgcgcctaccaggtggctagggggatggagtatttggcctcaaagaagtgtattcaccgggatctcgccgctcgcaacgtcctggtgacggaagacaacgtcatgaaaatcgccgacttcggtctggctcgcgatatccaccacatagattattataagaagacaaccaatggtaggttaccagtgaaatggatggccccagaggcactcttcgaccgtatttatacgcatcagtctgatgtgtggtccttcggcgtgctgttatgggagatcttcacgttgggcggatcaccgtatccaggcgttccggtcgaggaactgttcaaactgctgaaggagggccatcggatggacaagccctccaactgcacaaatgagctgtatatgatgatgcgcgactgctggcacgccgtcccctcccagcgcccaacctttaaacagcttgtcgaggatctggaccgaatagtggcactgacaagtaaccaagagtacctggacctatcaatgccactggatcaatactcaccctcttttcccgacactcgaagttccacttgtagttccggggaagattcagtcttctcccacgagcccctcccggaggagccctgtcttcctagacaccccgcacaactagccaatggcggactgaaacgcagatag

SEQ ID NO: 69039 - DNA, 2469 bp, Artificial Sequence
  derived and/or modified sequence
atgtggagctggaagtgcctgctgttctgggccgtgctggtgaccgccaccctgtgcaccgccagacccagccccaccctgcccgagcaggcccagccctggggcgcccccgtggaggtggagagcttcctggtgcaccccggcgacctgctgcagctgagatgcagactgagagacgacgtgcagagcatcaactggctgagagacggcgtgcagctggccgagagcaacagaaccagaatcaccggcgaggaggtggaggtgcaggacagcgtgcccgccgacagcggcctgtacgcctgcgtgaccagcagccccagcggcagcgacaccacctacttcagcgtgaacgtgagcgtgcccatcgacgccctgcccagcagcgaggacgacgacgacgacgacgacagcagcagcgaggagaaggagaccgacaacaccaagcccaaccccgtggccccctactggaccagccccgagaagatggagaagaagctgcacgccgtgcccgccgccaagaccgtgaagttcaagtgccccagcagcggcacccccaaccccaccctgagatggctgaagaacggcaaggagttcaagcccgaccacagaatcggcggctacaaggtgagatacgccacctggagcatcatcatggacagcgtggtgcccagcgacaagggcaactacacctgcatcgtggagaacgagtacggcagcatcaaccacacctaccagctggacgtggtggagagaagcccccacagacccatcctgcaggccggcctgcccgccaacaagaccgtggccctgggcagcaacgtggagttcatgtgcaaggtgtacagcgacccccagccccacatccagtggctgaagcacatcgaggtgaacggcagcaagatcggccccgacaacctgccctacgtgcagatcctgaagcacagcggcatcaacagcagcgacgccgaggtgctgaccctgttcaacgtgaccgaggcccagagcggcgagtacgtgtgcaaggtgagcaactacatcggcgaggccaaccagagcgcctggctgaccgtgaccagacccgtgctggaggagagacccgccgtgatgaccagccccctgtacctggagatcatcatctactgcaccggcgccttcctgatcagctgcatggtgggcagcgtgatcgtgtacaagatgaagagcggcaccaagaagagcgacttccacagccagatggccgtgcacaagctggccaagagcatccccctgagaagacaggtgaccgtgagcgccgacagcagcgccagcatgaacagcggcgtgctgctggtgagacccagcagactgagcagcagcggcacccccatgctggccggcgtgagcgagtacgagctgcccgaggaccccagatgggagctgcccagagacagactggtgctgggcaagcccctgggcgagggctgcttcggccaggtggtgctggccgaggccatcggcctggacaaggacaagcccaacagagtgaccaaggtggccgtgaagatgctgaagagcgacgccaccgagaaggacctgagcgacctgatcagcgagatggagatgatgaagatgatcggcaagcacaagaacatcatcaacctgctgggcgcctgcacccaggacggccccctgtacgtgatcgtggagtacgccagcaagggcaacctgagagagtacctgcaggccagaagaccccccggcctggagtactgctacaaccccagccacaaccccgaggagcagctgagcagcaaggacctggtgagctgcgcctaccaggtggccagaggcatggagtacctggccagcaagaagtgcatccacagagacctggccgccagaaacgtgctggtgaccgaggacaacgtgatgaagatcgccgacttcggcctggccagagacatccaccacatcgactactacaagaagaccaccaacggcagactgcccgtgaagtggatggcccccgaggccctgttcgacagaatctacacccaccagagcgacgtgtggagcttcggcgtgctgctgtgggagatcttcaccctgggcggcagcccctaccccggcgtgcccgtggaggagctgttcaagctgctgaaggagggccacagaatggacaagcccagcaactgcaccaacgagctgtacatgatgatgagagactgctggcacgccgtgcccagccagagacccaccttcaagcagctggtggaggacctggacagaatcgtggccctgaccagcaaccaggagtacctggacctgagcatgcccctggaccagtacagccccagcttccccgacaccagaagcagcacctgcagcagcggcgaggacagcgtgttcagccacgagcccctgcccgaggagccctgcctgcccagacaccccgcccagctggccaacggcggcctgaagagaagatag

SEQ ID NO: 69040 - DNA, 2463 bp, Artificial Sequence
  derived and/or modified sequence
atgtggagctggaagtgcctgctgttctgggccgtgctggtgaccgccaccctgtgcaccgccagacccagccccaccctgcccgagcaggcccagccctggggcgcccccgtggaggtggagagcttcctggtgcaccccggcgacctgctgcagctgagatgcagactgagagacgacgtgcagagcatcaactggctgagagacggcgtgcagctggccgagagcaacagaaccagaatcaccggcgaggaggtggaggtgcaggacagcgtgcccgccgacagcggcctgtacgcctgcgtgaccagcagccccagcggcagcgacaccacctacttcagcgtgaacgtgagcgacgccctgcccagcagcgaggacgacgacgacgacgacgacagcagcagcgaggagaaggagaccgacaacaccaagcccaaccccgtggccccctactggaccagccccgagaagatggagaagaagctgcacgccgtgcccgccgccaagaccgtgaagttcaagtgccccagcagcggcacccccaaccccaccctgagatggctgaagaacggcaaggagttcaagcccgaccacagaatcggcggctacaaggtgagatacgccacctggagcatcatcatggacagcgtggtgcccagcgacaagggcaactacacctgcatcgtggagaacgagtacggcagcatcaaccacacctaccagctggacgtggtggagagaagcccccacagacccatcctgcaggccggcctgcccgccaacaagaccgtggccctgggcagcaacgtggagttcatgtgcaaggtgtacagcgacccccagccccacatccagtggctgaagcacatcgaggtgaacggcagcaagatcggccccgacaacctgccctacgtgcagatcctgaagaccgccggcgtgaacaccaccgacaaggagatggaggtgctgcacctgagaaacgtgagcttcgaggacgccggcgagtacacctgcctggccggcaacagcatcggcctgagccaccacagcgcctggctgaccgtgctggaggccctggaggagagacccgccgtgatgaccagccccctgtacctggagatcatcatctactgcaccggcgccttcctgatcagctgcatggtgggcagcgtgatcgtgtacaagatgaagagcggcaccaagaagagcgacttccacagccagatggccgtgcacaagctggccaagagcatccccctgagaagacaggtgaccgtgagcgccgacagcagcgccagcatgaacagcggcgtgctgctggtgagacccagcagactgagcagcagcggcacccccatgctggccggcgtgagcgagtacgagctgcccgaggaccccagatgggagctgcccagagacagactggtgctgggcaagcccctgggcgagggctgcttcggccaggtggtgctggccgaggccatcggcctggacaaggacaagcccaacagagtgaccaaggtggccgtgaagatgctgaagagcgacgccaccgagaaggacctgagcgacctgatcagcgagatggagatgatgaagatgatcggcaagcacaagaacatcatcaacctgctgggcgcctgcacccaggacggccccctgtacgtgatcgtggagtacgccagcaagggcaacctgagagagtacctgcaggccagaagaccccccggcctggagtactgctacaaccccagccacaaccccgaggagcagctgagcagcaaggacctggtgagctgcgcctaccaggtggccagaggcatggagtacctggccagcaagaagtgcatccacagagacctggccgccagaaacgtgctggtgaccgaggacaacgtgatgaagatcgccgacttcggcctggccagagacatccaccacatcgactactacaagaagaccaccaacggcagactgcccgtgaagtggatggcccccgaggccctgttcgacagaatctacacccaccagagcgacgtgtggagcttcggcgtgctgctgtgggagatcttcaccctgggcggcagcccctaccccggcgtgcccgtggaggagctgttcaagctgctgaaggagggccacagaatggacaagcccagcaactgcaccaacgagctgtacatgatgatgagagactgctggcacgccgtgcccagccagagacccaccttcaagcagctggtggaggacctggacagaatcgtggccctgaccagcaaccaggagtacctggacctgagcatgcccctggaccagtacagccccagcttccccgacaccagaagcagcacctgcagcagcggcgaggacagcgtgttcagccacgagcccctgcccgaggagccctgcctgcccagacaccccgcccagctggccaacggcggcctgaagagaagatag

SEQ ID NO: 69041 - DNA, 2562 bp, Artificial Sequence
  derived and/or modified sequence
atggaggccagagtgagcctgaagagaagaatcgagctgaccgtggagtacccctggagatgcggcgccctgagccccaccagcaactgcagaaccggcatgtggagctggaagtgcctgctgttctgggccgtgctggtgaccgccaccctgtgcaccgccagacccagccccaccctgcccgagcaggcccagccctggggcgcccccgtggaggtggagagcttcctggtgcaccccggcgacctgctgcagctgagatgcagactgagagacgacgtgcagagcatcaactggctgagagacggcgtgcagctggccgagagcaacagaaccagaatcaccggcgaggaggtggaggtgcaggacagcgtgcccgccgacagcggcctgtacgcctgcgtgaccagcagccccagcggcagcgacaccacctacttcagcgtgaacgtgagcgacgccctgcccagcagcgaggacgacgacgacgacgacgacagcagcagcgaggagaaggagaccgacaacaccaagcccaaccccgtggccccctactggaccagccccgagaagatggagaagaagctgcacgccgtgcccgccgccaagaccgtgaagttcaagtgccccagcagcggcacccccaaccccaccctgagatggctgaagaacggcaaggagttcaagcccgaccacagaatcggcggctacaaggtgagatacgccacctggagcatcatcatggacagcgtggtgcccagcgacaagggcaactacacctgcatcgtggagaacgagtacggcagcatcaaccacacctaccagctggacgtggtggagagaagcccccacagacccatcctgcaggccggcctgcccgccaacaagaccgtggccctgggcagcaacgtggagttcatgtgcaaggtgtacagcgacccccagccccacatccagtggctgaagcacatcgaggtgaacggcagcaagatcggccccgacaacctgccctacgtgcagatcctgaagaccgccggcgtgaacaccaccgacaaggagatggaggtgctgcacctgagaaacgtgagcttcgaggacgccggcgagtacacctgcctggccggcaacagcatcggcctgagccaccacagcgcctggctgaccgtgctggaggccctggaggagagacccgccgtgatgaccagccccctgtacctggagatcatcatctactgcaccggcgccttcctgatcagctgcatggtgggcagcgtgatcgtgtacaagatgaagagcggcaccaagaagagcgacttccacagccagatggccgtgcacaagctggccaagagcatccccctgagaagacaggtgaccgtgagcgccgacagcagcgccagcatgaacagcggcgtgctgctggtgagacccagcagactgagcagcagcggcacccccatgctggccggcgtgagcgagtacgagctgcccgaggaccccagatgggagctgcccagagacagactggtgctgggcaagcccctgggcgagggctgcttcggccaggtggtgctggccgaggccatcggcctggacaaggacaagcccaacagagtgaccaaggtggccgtgaagatgctgaagagcgacgccaccgagaaggacctgagcgacctgatcagcgagatggagatgatgaagatgatcggcaagcacaagaacatcatcaacctgctgggcgcctgcacccaggacggccccctgtacgtgatcgtggagtacgccagcaagggcaacctgagagagtacctgcaggccagaagaccccccggcctggagtactgctacaaccccagccacaaccccgaggagcagctgagcagcaaggacctggtgagctgcgcctaccaggtggccagaggcatggagtacctggccagcaagaagtgcatccacagagacctggccgccagaaacgtgctggtgaccgaggacaacgtgatgaagatcgccgacttcggcctggccagagacatccaccacatcgactactacaagaagaccaccaacggcagactgcccgtgaagtggatggcccccgaggccctgttcgacagaatctacacccaccagagcgacgtgtggagcttcggcgtgctgctgtgggagatcttcaccctgggcggcagcccctaccccggcgtgcccgtggaggagctgttcaagctgctgaaggagggccacagaatggacaagcccagcaactgcaccaacgagctgtacatgatgatgagagactgctggcacgccgtgcccagccagagacccaccttcaagcagctggtggaggacctggacagaatcgtggccctgaccagcaaccaggagtacctggacctgagcatgcccctggaccagtacagccccagcttccccgacaccagaagcagcacctgcagcagcggcgaggacagcgtgttcagccacgagcccctgcccgaggagccctgcctgcccagacaccccgcccagctggccaacggcggcctgaagagaagatag

SEQ ID NO: 69042 - protein, 382 aa, Artificial Sequence
  derived and/or modified sequence
MLDGLKMEENFQSAIDTSASFSSLLGRAVSPKSVCEGCQRVILDRFLLRLNDSFWHEQCVQCASCKEPLETTCFYRDKKLYCKYDYEKLFAVKCGGCFEAIAPNEFVMRAQKSVYHLSCFCCCVCERQLQKGDEFVLKEGQLLCKGDYEKERELLSLVSPAASDSGKSDDEESLCKSAHGAGKGTAEEGKDHKRPKRPRTILTTQQRRAFKASFEVSSKPCRKVRETLAAETGLSVRVVQVWFQNQRAKMKKLARRQQQQQQDQQNTQRLSSAQTNGGGSAGMEGIMNPYTALPTPQQLLAIEQSVYSSDPFRQGLTPPQMPGDHMHPYGAEPLFHDLDSDDTSLSNLGDCFLATSEAGPLQSRVGNPIDHLYSMQNSYFTS

SEQ ID NO: 69043 - DNA, 1149 bp, Artificial Sequence
  derived and/or modified sequence
atgctcgacggattgaagatggaggaaaacttccaatccgccatcgacacctctgccagtttcagctcactcctggggagggcagtgtcccccaaatcagtttgcgaaggctgtcagagagtgattctcgacagatttctgttgcggctgaacgattccttctggcacgagcagtgcgtgcagtgcgcttcatgtaaagagccgctcgaaacaacttgcttttatagagataagaagctgtactgcaagtacgactacgagaagttgttcgcagtcaaatgcggtgggtgcttcgaggcaattgcccctaatgagttcgtaatgcgggcacagaaaagcgtctaccacctgagctgtttttgctgttgcgtgtgtgagcgccagctccagaagggggatgagtttgtacttaaggagggccaattgctctgtaaaggtgactatgagaaagagcgggagctgctgagcctggtcagcccagccgccagtgactcgggcaaatccgatgacgaagagtcactgtgtaaatctgcccacggtgcaggcaagggcactgcagaagaaggaaaggatcacaaacgtcccaagcggcctaggacgatccttacaactcagcagagaagggcttttaaggcctcttttgaggtgtctagcaaaccctgcaggaaggtgagggagaccctggctgctgagacgggactctccgtgagagtggtacaggtgtggttccagaatcaacgtgctaaaatgaagaaattggcccgccggcagcagcaacagcaacaggatcaacagaatactcaacggctgagcagtgcgcagaccaacggcggtgggagcgcaggaatggagggaatcatgaatccatatacagcacttcccactccacagcagctgctggctatcgaacagtcagtgtattcctctgatcctttccgccagggtcttacaccgccacagatgcctggcgatcacatgcacccttatggagctgaaccgttgtttcacgatttggactctgacgatactagcttgtcaaatcttggagactgctttttggcgacctctgaagcagggcctctgcaatcgcgcgtgggaaatccaatcgaccatttgtacagtatgcagaacagctatttcacttcatag

SEQ ID NO: 69044 - DNA, 1149 bp, Artificial Sequence
  derived and/or modified sequence
atgttggacggcttaaagatggaagagaatttccagtcggctatcgacacgtcggcgagctttagtagcctcctgggccgcgccgtgtcccccaagtcagtctgtgagggatgccagcgtgtgatccttgaccggttccttctgagactgaatgattcattctggcacgagcagtgcgtgcagtgtgcctcttgcaaggagcctctagaaacgacttgtttctatcgagataagaagctgtactgcaaatatgactatgagaaactctttgccgttaaatgcggtgggtgctttgaagcaatagccccaaacgagtttgtgatgcgagctcagaagtctgtgtatcacctgagctgtttttgctgttgtgtatgcgagaggcagctccagaaaggggacgagtttgtcctgaaagagggacagttgctgtgcaaaggggactacgagaaagagagagagctactgtcactggttagtcccgccgccagcgacagtggtaaatcagatgacgaggaaagcctgtgcaagtctgcgcacggcgccggaaagggcaccgcagaagagggcaaagaccacaaaagacctaaaaggccccgcactatattgaccacacaacaacgccgggcctttaaagcttcctttgaagtctcatcaaagccatgtcgcaaggtccgggagactctggccgccgagacaggcctctccgtgcgcgtcgtgcaggtgtggttccagaaccagcgggcaaagatgaaaaagcttgcgaggagacagcaacagcagcaacaggatcagcaaaatacccaaaggctatcaagcgcacaaaccaatggtgggggcagcgctgggatggaagggataatgaatccttatacagctcttccaacacctcagcagctcctcgcaatcgaacagtccgtgtattcttctgacccattcaggcagggcctgacgccaccccagatgcccggcgaccacatgcatccatatggcgcagagcctttattccacgacctcgattcggacgatacctctttaagtaatcttggagattgctttttagcaactagcgaagccgggccattgcagtccagagtgggcaatccaatagaccatctgtattccatgcaaaactcttactttacgtcctag

SEQ ID NO: 69045 - DNA, 1149 bp, Artificial Sequence
  derived and/or modified sequence
atgttggacggtctcaaaatggaagaaaatttccagagcgcaatagatacctcagcttcctttagcagcctcctcggccgagccgttagccccaagtctgtgtgcgagggatgtcagcgagtaatcctggatcgctttttactgcggttgaacgattccttttggcatgaacagtgcgtacagtgcgcctcatgcaaggagcctttggagaccacatgcttttacagggataagaaattgtattgcaaatacgattatgagaagctcttcgccgtcaaatgtgggggatgctttgaggccatagctcccaacgagtttgttatgcgggcccagaagagcgtgtaccatctctcctgtttctgctgttgtgtctgcgagagacagctgcaaaagggcgacgaattcgtgctcaaggaaggtcagctcctgtgcaagggggactatgaaaaggaaagagaacttctatctctggtgagcccggcagcctctgattccggtaagtcagacgacgaagagtcattatgtaagtcagcccatggggccggaaagggcacagccgaagagggcaaggatcacaaaagacctaaacggccacgtacaattttaacaacacagcagcgtagagcattcaaggcttctttcgaggtttcctctaagccatgccggaaggtgagagagaccttggcggcagaaactggactttccgtccgcgtcgtccaggtctggtttcaaaaccaacgggctaagatgaagaagctggcccgccgtcagcagcaacagcagcaggaccagcagaacacacagagactttctagtgcccagactaatgggggtggcagcgccggaatggagggcattatgaacccctacacagccctgccaacaccccagcagttgttggcaatcgaacagtccgtatacagttccgacccgtttaggcagggtctgacacctccccagatgccgggtgaccacatgcacccatatggagctgaacccctgttccacgatttggattccgacgacaccagcctgtctaacctaggcgactgctttctagctacctcggaggctggacctctccagagtcgggttgggaaccccatcgatcacctttacagtatgcagaactcctatttcacgagctag

SEQ ID NO: 69046 - DNA, 1149 bp, Artificial Sequence
  derived and/or modified sequence
atgctggatggcctgaagatggaggagaacttccagagcgccatcgacaccagcgccagcttcagcagcctgctgggccgggctgtgagccccaagtctgtgtgtgagggctgccagagggtcatcctggaccgcttcctgctgcggctgaatgacagcttctggcatgagcagtgtgtgcagtgtgccagctgcaaggagcccctggagaccacctgcttctacagagacaagaagctgtactgcaagtatgactatgagaagctgtttgctgtgaagtgtggcggctgctttgaggccatcgccccaaatgaatttgtgatgagggcccagaagtctgtgtaccacctgagctgcttctgctgctgcgtgtgtgagcggcagctgcagaagggagatgaatttgtgctgaaggagggccagctgctgtgcaagggggactatgagaaggagcgggagctgctgagcctggtgtccccagctgccagtgacagcggcaagagtgatgatgaggagagcctgtgcaagagcgcccatggagctggaaaaggaacagctgaggagggcaaggaccacaagaggcccaagaggcccaggaccatcctgaccacccagcagaggcgggccttcaaggccagctttgaggtgagcagcaagccctgcaggaaggtgcgggagaccctggccgctgagaccggcctgtctgtgcgggtggtgcaggtgtggttccagaaccagagggccaagatgaagaagctggcccggcggcagcagcagcagcagcaggaccagcagaacacccagaggctgagcagcgcccagaccaacggcggcggcagcgctggcatggagggcatcatgaacccctacacagccctgcccaccccccagcagctgctggccatcgagcagagcgtgtacagcagtgaccccttccggcagggcctgaccccaccccagatgcctggggaccacatgcacccctatggagctgagcccctcttccatgacctggacagtgatgacaccagcctgagcaacctgggggactgcttcctggccaccagcgaggccggccccctgcagagccgggtgggcaaccccatcgaccacctgtacagcatgcagaacagctacttcaccagctag

SEQ ID NO: 69047 - DNA, 3350 bp, Artificial Sequence
  derived and/or modified sequence
ctcttttgcttctgcagacattcccggcactggccgactggcgggaggacctccccgcgcgccccgcacaccggctcctgcgcgcaccccaacagagcgcagcgccaggagtccagaagcgggcgggacgccctccgggtcccttacagtgccccttctcgacctggggcaggtcctcccggcccggcccgaacatgctggacggcctaaagatggaggagaacttccaaagcgcgatcgacacctcggcctccttctcctcgctgctgggcagagcggtgagccccaagtctgtctgcgagggctgtcagcgggtcatcttggacaggtttctgctgcggctcaacgacagcttctggcatgagcagtgcgtgcagtgcgcctcctgcaaagagcccctggagaccacctgcttctaccgggacaagaagctgtactgcaagtatgactacgagaagctgtttgctgttaaatgtgggggctgcttcgaggccatcgctcccaatgagtttgttatgcgggcccagaagagtgtataccacctgagctgcttctgctgctgtgtctgcgagcgacagcttcagaagggtgatgagtttgtcctgaaggaggggcagctgctctgcaaaggggactatgagaaggagcgggagctgctcagcctggtgagcccagcagcctcagactcaggtaaaagtgatgatgaagaaagtctctgcaagtcagcccatggggcagggaaaggaactgctgaggaaggcaaggaccataagcgccccaaacgtccgagaaccatcttgacaactcaacagaggcgagcattcaaggcctcatttgaagtatcctccaagccctgcaggaaggtgagagagactctggctgcagagacagggctgagtgtccgtgtcgtccaggtgtggttccaaaaccagagagcgaagatgaagaagctggccaggcgacagcagcagcagcagcaagatcagcagaacacccagaggctgagctctgctcagacaaacggtggtgggagtgctgggatggaaggaatcatgaacccctacacggctctgcccaccccacagcagctcctggccatcgagcagagtgtctacagctcagatcccttccgacagggtctcaccccaccccagatgcctggagaccacatgcacccttatggtgccgagccccttttccatgacctggatagcgacgacacctccctcagtaacctgggtgattgtttcctagcaacctcagaagctgggcctctgcagtccagagtgggaaaccccattgaccatctgtactccatgcagaattcttacttcacatcttgagtcttcccctagagttctgtgactaggctcccatatggaacaaccatattctttgaggggtcactggctttaggacagggaggccagggaagaggtgggttggggagggagttttgttggggatgctgttgtataatgatatggtgtagctcagcatttccaaagactgaatacattatggattgcatagtttaatgtttctaataagagtcttagcattagatatgaagacgtgtttatcattaaggacagagacttttaatatagacattctcatgcaaactagatacttagggactcctaacaacttcccaccatgtcggggaagctcttgtcaagaggtgcatatgtctatccatctacacaccaatagacagaaggacagatagatagatgtgtgtgtgtgagtgtgtaacctttcgtattttaccctcaaagtttattcctaattataacagacaccaactgtacagcaaaagtaactttattttcagtgtgaactatatttaaggaaatgcttgatgcacttaagttataaaatgagataatttacttttataaactttatttttagcttgacaagacttgtcagcagggcagagagggctgctccacctagccccatagctttgagtgctggggttcattctgttttcagagtgtctttcagatctggaaagaaattctgtgtggctgatggtgttctctcttgcattcttgctctctttggggttgaatcactgggcaggggtgggacagaataatctctgatcatgttctgagaaaatgtaaagcccagactcctgggctttcttttaaattctgacaagtggttgttgggcagtgctaggatgattggttcagctcttgagcttcagcatctgcaaatgtggatgaggctaatagtatgtacctacctcactgggaaacaccaaggcttaattcattcccaggacacatgagcagggctgagactaatatctgatatttgtttaagatacaaccaggccactcacttggcaaaggagggtacatagggttgcagagcaggagggctcctgaactccagagggcagttctgcctgctgaagtccctctgcaaagcctgtgctgaaggagacaccagctcagagcagttcagagggatcccagagtcccagagtggggaggaggtgaaggctgaggggatagaggagggcctggtggtgttctagagcagggttgggcaaactcctgcttgcgggcctgctttctatggcttgccagcaaagaatggtttttactttttttttgaggtcattaaaaaaaaggagaagaagaatatataacaggctgtctgtggcctggaaagcctgaaatatttgctatctgtattgtctggcccttacagaaaaagtttggggccccttgttttagagggtctgtttctaaagaacctcatggcgctcatagaggcagaaggttccagtggaaacccttggctcttccttccaactcactcctctgatcctcggcacagaagacccagcagccattgtacatggggacagttccacaccctggtctccagttgcggtgctaggatggtattgttctgtgctaggaagtctcctgggaacccagaatgagttggtggggaagacagcgggtcactgtggacccatccaggaggggccaggataggcttggcctcatttctggggacatcattggagacttgaacacagagacacgtccctatcactctggcaaggccagagggaacatgtccccttatggtagagtctatgttgtgtgatttttgtgctcttgtttataatttatgcaaaccaccaagaaacccaaaccagtctgatgagtgaaaattatgcagatgctgtatggccccacaggtttctgtggtaaagaccagttggagaatgtaggagatactatgtgagtgaaaatgaatagagatccttattccactccttaatggcataccaagatgaaattaaaatctcttac

SEQ ID NO: 69048 - DNA, 3545 bp, Artificial Sequence
  derived and/or modified sequence
agaagctgcaggatccgccccggcgaagcagggccgactcgcacccaggaccctgggcctctgccttccctcctagccttggagaagcaactggccctctcctcccgctgaggagcgacgcgggctggtaggacgtcccgggaaggccggcagctcgcgaccacgtcccggcccagcctgggcgcgccgaggagcagagccagcggccggcgttcgctccggctccctccccggcgctccgaagccgagggcggctcctccggctgcagtctcgggggcgacgccttcccgggcagaagcttccagcagcgctccgcaacttctctctgctccagtcactgggagagagctcgcctaccaggtcctcccggcccggcccgaacatgctggacggcctaaagatggaggagaacttccaaagcgcgatcgacacctcggcctccttctcctcgctgctgggcagagcggtgagccccaagtctgtctgcgagggctgtcagcgggtcatcttggacaggtttctgctgcggctcaacgacagcttctggcatgagcagtgcgtgcagtgcgcctcctgcaaagagcccctggagaccacctgcttctaccgggacaagaagctgtactgcaagtatgactacgagaagctgtttgctgttaaatgtgggggctgcttcgaggccatcgctcccaatgagtttgttatgcgggcccagaagagtgtataccacctgagctgcttctgctgctgtgtctgcgagcgacagcttcagaagggtgatgagtttgtcctgaaggaggggcagctgctctgcaaaggggactatgagaaggagcgggagctgctcagcctggtgagcccagcagcctcagactcaggtaaaagtgatgatgaagaaagtctctgcaagtcagcccatggggcagggaaaggaactgctgaggaaggcaaggaccataagcgccccaaacgtccgagaaccatcttgacaactcaacagaggcgagcattcaaggcctcatttgaagtatcctccaagccctgcaggaaggtgagagagactctggctgcagagacagggctgagtgtccgtgtcgtccaggtgtggttccaaaaccagagagcgaagatgaagaagctggccaggcgacagcagcagcagcagcaagatcagcagaacacccagaggctgagctctgctcagacaaacggtggtgggagtgctgggatggaaggaatcatgaacccctacacggctctgcccaccccacagcagctcctggccatcgagcagagtgtctacagctcagatcccttccgacagggtctcaccccaccccagatgcctggagaccacatgcacccttatggtgccgagccccttttccatgacctggatagcgacgacacctccctcagtaacctgggtgattgtttcctagcaacctcagaagctgggcctctgcagtccagagtgggaaaccccattgaccatctgtactccatgcagaattcttacttcacatcttgagtcttcccctagagttctgtgactaggctcccatatggaacaaccatattctttgaggggtcactggctttaggacagggaggccagggaagaggtgggttggggagggagttttgttggggatgctgttgtataatgatatggtgtagctcagcatttccaaagactgaatacattatggattgcatagtttaatgtttctaataagagtcttagcattagatatgaagacgtgtttatcattaaggacagagacttttaatatagacattctcatgcaaactagatacttagggactcctaacaacttcccaccatgtcggggaagctcttgtcaagaggtgcatatgtctatccatctacacaccaatagacagaaggacagatagatagatgtgtgtgtgtgagtgtgtaacctttcgtattttaccctcaaagtttattcctaattataacagacaccaactgtacagcaaaagtaactttattttcagtgtgaactatatttaaggaaatgcttgatgcacttaagttataaaatgagataatttacttttataaactttatttttagcttgacaagacttgtcagcagggcagagagggctgctccacctagccccatagctttgagtgctggggttcattctgttttcagagtgtctttcagatctggaaagaaattctgtgtggctgatggtgttctctcttgcattcttgctctctttggggttgaatcactgggcaggggtgggacagaataatctctgatcatgttctgagaaaatgtaaagcccagactcctgggctttcttttaaattctgacaagtggttgttgggcagtgctaggatgattggttcagctcttgagcttcagcatctgcaaatgtggatgaggctaatagtatgtacctacctcactgggaaacaccaaggcttaattcattcccaggacacatgagcagggctgagactaatatctgatatttgtttaagatacaaccaggccactcacttggcaaaggagggtacatagggttgcagagcaggagggctcctgaactccagagggcagttctgcctgctgaagtccctctgcaaagcctgtgctgaaggagacaccagctcagagcagttcagagggatcccagagtcccagagtggggaggaggtgaaggctgaggggatagaggagggcctggtggtgttctagagcagggttgggcaaactcctgcttgcgggcctgctttctatggcttgccagcaaagaatggtttttactttttttttgaggtcattaaaaaaaaggagaagaagaatatataacaggctgtctgtggcctggaaagcctgaaatatttgctatctgtattgtctggcccttacagaaaaagtttggggccccttgttttagagggtctgtttctaaagaacctcatggcgctcatagaggcagaaggttccagtggaaacccttggctcttccttccaactcactcctctgatcctcggcacagaagacccagcagccattgtacatggggacagttccacaccctggtctccagttgcggtgctaggatggtattgttctgtgctaggaagtctcctgggaacccagaatgagttggtggggaagacagcgggtcactgtggacccatccaggaggggccaggataggcttggcctcatttctggggacatcattggagacttgaacacagagacacgtccctatcactctggcaaggccagagggaacatgtccccttatggtagagtctatgttgtgtgatttttgtgctcttgtttataatttatgcaaaccaccaagaaacccaaaccagtctgatgagtgaaaattatgcagatgctgtatggccccacaggtttctgtggtaaagaccagttggagaatgtaggagatactatgtgagtgaaaatgaatagagatccttattccactccttaatggcataccaagatgaaattaaaatctcttacaaatga

SEQ ID NO: 69049 - DNA, 1342 bp, Artificial Sequence
  derived and/or modified sequence
ctgatctctcctcccaccctacattctcttggctggaccctatcctcctggctgattctggtcgccctggacactccctcagttctttcccaggagtgcggtggctgctggcgccgagtcccagcgggcacggacgtcagacgcatcgtttcttctcctctacaggtcctcccggcccggcccgaacatgctggacggcctaaagatggaggagaacttccaaagcgcgatcgacacctcggcctccttctcctcgctgctgggcagagcggtgagccccaagtctgtctgcgagggctgtcagcgggtcatcttggacaggtttctgctgcggctcaacgacagcttctggcatgagcagtgcgtgcagtgcgcctcctgcaaagagcccctggagaccacctgcttctaccgggacaagaagctgtactgcaagtatgactacgagaagctgtttgctgttaaatgtgggggctgcttcgaggccatcgctcccaatgagtttgttatgcgggcccagaagagtgtataccacctgagctgcttctgctgctgtgtctgcgagcgacagcttcagaagggtgatgagtttgtcctgaaggaggggcagctgctctgcaaaggggactatgagaaggagcgggagctgctcagcctggtgagcccagcagcctcagactcaggtaaaagtgatgatgaagaaagtctctgcaagtcagcccatggggcagggaaaggaactgctgaggaaggcaaggaccataagcgccccaaacgtccgagaaccatcttgacaactcaacagaggcgagcattcaaggcctcatttgaagtatcctccaagccctgcaggaaggtgagagagactctggctgcagagacagggctgagtgtccgtgtcgtccaggtgtggttccaaaaccagagagcgaagatgaagaagctggccaggcgacagcagcagcagcagcaagatcagcagaacacccagaggctgagctctgctcagacaaacggtggtgggagtgctgggatggaaggaatcatgaacccctacacggctctgcccaccccacagcagctcctggccatcgagcagagtgtctacagctcagatcccttccgacagggtctcaccccaccccagatgcctggagaccacatgcacccttatggtgccgagccccttttccatgacctggatagcgacgacacctccctcagtaacctgggtgattgtttcctagcaacctcagaagctgggcctctgcagtccagagtgggaaaccccattgaccatctgtactccatgcagaattcttacttcacatcttgagtcttc

SEQ ID NO: 69050 - DNA, 1149 bp, Artificial Sequence
  derived and/or modified sequence
atgctggacggcctgaagatggaggagaacttccagagcgccatcgacacctccgcttctttcagctcactgttgggccgggcggtctcccccaaatccgtgtgcgaaggatgtcagcgcgttattctagatcgtttcctcttgagattaaacgacagcttttggcacgaacagtgcgtgcagtgcgcatcttgcaaggaacccttggagactacctgcttctatagagataaaaaactgtattgcaagtatgactatgagaaattatttgcagttaaatgcgggggttgttttgaagccattgcccctaacgagttcgtgatgagagcacaaaagtcagtttatcatctctcatgtttctgttgttgcgtgtgtgagcgccagttgcagaagggtgacgaatttgtcctgaaggagggccaactcctttgtaaaggggactacgagaaggagagggaattactgtcacttgttagccccgctgcgagcgacagtggcaagtctgatgatgaagaaagcctgtgtaagtcagcccatggagccggaaagggtaccgccgaggaggggaaggaccataagagacccaaaagacccagaaccattctgaccacccagcaaaggagagcgttcaaggcgtctttcgaggtctcctccaaaccttgcaggaaagtgagggaaactctggcggcagaaaccggtctgagtgtgcgagtggtgcaggtgtggttccaaaaccaacgtgctaagatgaagaagctggcccgcagacagcagcaacagcagcaggatcagcaaaacacccagaggttatcatccgcacagaccaatgggggaggttctgcaggcatggagggaataatgaacccttacactgctcttcctacgccacagcagctgcttgccatagagcaatctgtgtactcctcggatccattcaggcagggcctcaccccccctcagatgccaggagatcacatgcacccctatggggcggaacccttgtttcacgacctcgacagcgacgacacaagtttatctaacctgggggactgctttcttgctacatcagaagctggcccactacagtctcgtgtggggaatccgatcgaccacctgtattctatgcagaactcctattttacttcgtag

SEQ ID NO: 69051 - DNA, 1149 bp, Artificial Sequence
  derived and/or modified sequence
atgctggacggcctgaagatggaggagaacttccagagcgccatcgatacaagtgcaagcttcagctcgttattgggacgagctgtgagcccgaaatcagtgtgtgaggggtgccagcgcgtaattctggatcggttcctgctcagactgaacgattccttttggcacgaacagtgcgtgcagtgcgcgtcctgtaaggagcccttggaaacaacttgcttttatagggataagaagctgtactgcaagtacgactatgaaaaactgtttgcagtgaaatgcgggggttgtttcgaggcaatcgcacccaatgaatttgttatgcgggctcagaaatctgtatatcatttaagctgcttctgttgttgtgtgtgcgaaagacagttgcagaagggagatgagttcgtgttgaaggaggggcagttgctttgcaaaggggactacgaaaaagaaagggaactactgtctctggtttctcctgccgcatccgactccggaaagtcagatgatgaggaatctctctgtaagagcgctcacggcgccggcaagggtaccgcagaagagggcaaggaccataaaaggcccaaacggccacggacaatcttgacaactcagcagagacgagcatttaaggcttcttttgaggtctcatcaaaaccctgtagaaaggttagagaaacactggcagctgaaacaggtctgtccgtgcgtgtcgtgcaagtgtggttccagaaccaaagagccaagatgaagaagctagctaggaggcagcaacaacagcagcaagaccaacagaacacacaaagactatcgagcgcacagaccaatggggggggcagcgcagggatggagggcattatgaacccttataccgcgttgccaacccctcagcagctgctggccatcgagcaaagcgtgtattcatcggacccatttaggcaggggctgacacctccccaaatgccaggtgatcacatgcacccttatggggccgaacctctgttccacgatctggacagtgatgatacctccctaagcaacttgggggactgcttcctcgcaacttctgaggccggcccactccaatctagagttgggaatcctatcgatcacctgtacagtatgcagaactcgtacttcaccagctag

SEQ ID NO: 69052 - DNA, 1149 bp, Artificial Sequence
  derived and/or modified sequence
atgctggacggcctgaagatggaggagaacttccagagcgccatcgatacgagcgcctcgttctcgagcctcctgggcagggcggtgagccccaagtctgtatgcgagggatgccagagagtcatactggataggttcctgttgaggctcaacgacagtttttggcacgagcagtgcgtgcaatgtgcgagttgtaaggagcccttggagacaacctgcttttatcgggacaaaaaattgtattgcaagtacgactacgaaaaactcttcgcagtgaagtgtggtggatgcttcgaagccatcgctcccaatgagtttgtaatgcgcgcccagaagagcgtataccatctttcatgtttttgttgctgcgtctgcgaaagacagctccagaagggagatgagtttgtactgaaggaaggccagctgctgtgtaaaggggactacgaaaaggagcgtgagcttctctctctagtctcgccagccgcttctgattctggtaaatcagacgatgaggagtccctgtgcaagagcgcacacggagccggaaaaggtacggctgaggaggggaaggatcacaaacgtcctaagcgacctcgaactatcctgacaactcagcaaaggcgcgcgtttaaggcctcatttgaagtttcttctaaaccttgtcgcaaggtcagagaaactctggccgcggaaacaggcctttcagttcgcgtggttcaggtatggttccagaatcagagggctaaaatgaaaaaattagcccggcgacagcagcagcagcaacaggatcaacagaatacgcaaaggttgagctctgcacagactaatggcggaggaagcgccggaatggaagggataatgaacccttacacggcactccccacaccccagcagctactggctattgaacagagtgtctactcttccgacccatttcgacagggcctgaccccgccacaaatgcctggcgaccacatgcatccctatggggcagaaccgctgttccacgatctggattccgatgatacatccctgtcaaacctgggcgattgtttcctcgccacaagcgaggccggacccctgcagtcccgagttggtaacccaatcgaccatctgtactccatgcagaactcatatttcactagttag

SEQ ID NO: 69053 - DNA, 1149 bp, Artificial Sequence
  derived and/or modified sequence
atgctggatggcttaaaaatggaagaaaacttccagagtgctattgacacttccgccagtttttcctcgctgctggggagagctgtctcccccaagtctgtgtgcgaaggctgccaacgcgtaatcctagaccgatttctccttcgcctgaatgattcgttttggcacgagcagtgcgtgcagtgtgcctcttgcaaggagccgctggaaaccacttgtttctatcgtgataagaagctgtactgcaaatacgactatgagaaactttttgccgttaagtgcggaggttgctttgaagccatcgctccaaatgaattcgtcatgagggctcaaaagtcggtctatcatctttcgtgtttctgttgttgcgtctgcgaacggcagcttcagaagggcgacgagttcgttctgaaggaaggtcaacttttgtgcaagggtgactatgagaaggagagagaattgctcagtttggtttctcctgctgcctcagacagtgggaaaagcgacgacgaggagtctttgtgtaaaagtgcgcacggagccggtaagggtaccgcagaggaggggaaggatcacaaaagaccaaagaggccccgaacgatactcaccacgcagcagcggcgagcctttaaagcctcgttcgaagtgtcaagtaagccatgcaggaaagttagagagaccttagctgccgagacaggcctgtctgtgcgggtggtgcaagtgtggtttcagaatcagcgggctaagatgaaaaaactggctaggagacagcagcagcagcagcaagatcagcagaacacacagcggctgagctcagcccagacaaacggaggcggatccgcagggatggagggcatcatgaacccctataccgccttaccgacaccccagcaactattggccatcgagcagtcagtatacagctcggaccccttcagacagggacttactccgccacagatgccaggggatcacatgcacccctatggagcagaacccttgttccacgacctagattcggatgacactagcctgagcaatctcggagactgtttcctcgcaacgtctgaagccggaccactgcagagcagggttggcaaccctatagaccatctgtactccatgcagaactcttactttactagctag

SEQ ID NO: 69054 - DNA, 1149 bp, Artificial Sequence
  derived and/or modified sequence
atgttggatgggctgaagatggaagagaattttcagtcagctatcgacacgtctgctagtttttcctccctattgggtcgtgccgtgagccccaaatccgtatgcgaagggtgtcaacgcgtgattttggataggtttcttctaaggctcaatgactctttctggcatgagcagtgcgtgcagtgcgccagttgtaaagaacccctggaaacgacatgcttctatcgcgacaaaaaattgtactgcaagtatgattacgaaaaactctttgctgttaagtgcgggggttgcttcgaagccattgctccaaacgagttcgtgatgagagctcagaaaagtgtgtatcaccttagctgcttctgttgttgtgtctgtgaaaggcaactgcagaagggggacgaattcgtactcaaagaggggcaactcttatgtaaaggagattacgagaaagaacgcgaactgttatcactggtgtcaccagcagcctccgacagcgggaaatcagacgatgaagagagtctatgtaagagcgcccacggcgctgggaagggcacggccgaggaagggaaggatcacaaacgtccaaagcgaccacggaccattctcacaacacagcagcgccgagctttcaaagcctcatttgaagtctcatctaagccatgccggaaggtacgagagacactggccgcagagacaggtttgtcggtccgcgtcgtccaggtttggtttcagaaccagagggccaaaatgaagaagctcgcacggagacagcagcagcaacaacaggaccagcaaaatactcagagactttcatctgcgcagactaacggcggaggctcagccggtatggaaggtattatgaacccctatactgcgctcccaacccctcaacagcttctcgccattgagcaatcagtctactcttcagacccatttcgacaaggcctgacccctccacaaatgccaggggaccacatgcatccttatggggctgagcctctatttcacgatctcgattctgacgacacctctctttcaaatctgggagactgctttctggctacttcggaggcgggaccacttcagtcacgggtcgggaatcctatcgaccatctttactcgatgcaaaactcttactttactagctag

SEQ ID NO: 69055 - DNA, 1149 bp, Artificial Sequence
  derived and/or modified sequence
atgctggatggactgaagatggaggagaactttcagagcgctattgacacatctgcctcctttagctccctgcttggacgagcggtcagccctaaatctgtttgcgagggttgtcagagggtcatcctcgacaggttcctgttgcggcttaacgattctttctggcacgaacaatgtgtacagtgtgcatcttgcaaagaaccactcgaaactacttgcttttatcgtgacaaaaagctttactgcaaatacgactacgaaaagctctttgccgtgaaatgcggaggatgttttgaggctatcgcccctaacgaatttgtaatgcgggcacagaaatcagtataccacctttcgtgcttttgttgctgtgtatgcgagcgccagctgcagaagggagatgagttcgtgttaaaggaaggacagctcctgtgtaaaggcgactatgagaaagaacgcgaacttttatccctggtgtcaccagccgctagcgactctggaaagtcagacgacgaagaaagtctgtgtaagagtgcgcacggtgccggaaagggcaccgcagaagagggcaaagaccacaagcggcctaagagaccaagaacaatcctgacaacgcagcaacggagggctttcaaagcctccttcgaagtctcctctaagccgtgtaggaaggtgcgagaaacgctggccgcagaaacgggacttagtgtgagagtggtgcaggtttggttccagaaccagcgggctaagatgaaaaaactcgctaggagacagcagcagcagcagcaagaccagcaaaacacccaacggctgtcctccgcccaaaccaatggtggagggtccgcaggaatggagggtattatgaacccctacacggccttgcccacccctcagcaacttctagccatcgaacaatcagtctactcaagcgatccattcaggcagggtttaactccacctcagatgccaggtgaccacatgcatccctatggggctgagcctctgtttcacgatctggacagcgacgatacaagtctttcaaatcttggagattgctttctcgcaacctcagaagccggacctctgcaatcgcgtgtgggaaatccaatcgaccatctttactcaatgcagaacagctattttacttcatag

SEQ ID NO: 69056 - DNA, 1149 bp, Artificial Sequence
  derived and/or modified sequence
atgctggacggcctgaagatggaggagaacttccagagcgccatcgacaccagcgccagcttcagcagcctgctgggcagagccgtgagccccaagagcgtgtgcgagggctgccagagagtgatcctggacagattcctgctgagactgaacgacagcttctggcacgagcagtgcgtgcagtgcgccagctgcaaggagcccctggagaccacctgcttctacagagacaagaagctgtactgcaagtacgactacgagaagctgttcgccgtgaagtgcggcggctgcttcgaggccatcgcccccaacgagttcgtgatgagagcccagaagagcgtgtaccacctgagctgcttctgctgctgcgtgtgcgagagacagctgcagaagggcgacgagttcgtgctgaaggagggccagctgctgtgcaagggcgactacgagaaggagagagagctgctgagcctggtgagccccgccgccagcgacagcggcaagagcgacgacgaggagagcctgtgcaagagcgcccacggcgccggcaagggcaccgccgaggagggcaaggaccacaagagacccaagagacccagaaccatcctgaccacccagcagagaagagccttcaaggccagcttcgaggtgagcagcaagccctgcagaaaggtgagagagaccctggccgccgagaccggcctgagcgtgagagtggtgcaggtgtggttccagaaccagagagccaagatgaagaagctggccagaagacagcagcagcagcagcaggaccagcagaacacccagagactgagcagcgcccagaccaacggcggcggcagcgccggcatggagggcatcatgaacccctacaccgccctgcccaccccccagcagctgctggccatcgagcagagcgtgtacagcagcgaccccttcagacagggcctgacccccccccagatgcccggcgaccacatgcacccctacggcgccgagcccctgttccacgacctggacagcgacgacaccagcctgagcaacctgggcgactgcttcctggccaccagcgaggccggccccctgcagagcagagtgggcaaccccatcgaccacctgtacagcatgcagaacagctacttcaccagctag

SEQ ID NO: 69057 - protein, 456 aa, Artificial Sequence
  derived and/or modified sequence
MSAQCCAGQLACCCGSAGCSLCCDCCPRIRQSLSTRFMYALYFILVVVLCCIMMSTTVAHKMKEHIPFFEDMCKGIKAGDTCEKLVGYSAVYRVCFGMACFFFIFCLLTLKINNSKSCRAHIHNGFWFFKLLLLGAMCSGAFFIPDQDTFLNAWRYVGAVGGFLFIGIQLLLLVEFAHKWNKNWTAGTASNKLWYASLALVTLIMYSIATGGLVLMAVFYTQKDSCMENKILLGVNGGLCLLISLVAISPWVQNRQPHSGLLQSGVISCYVTYLTFSALSSKPAEVDEHGKNVTICVPDFGQDLYRDENLVTILGTSLLIGCILYSCLTSTTRSSSDALQGRYAAPELEIARCCFCFSPGGEDTEEQQPGKEGPRVIYDEKKGTVYIYSYFHFVFFLASLYVMMTVTNWFKWSPTLLPRLEYSGMILAHCNLHLPDVKRFSCLSLPSSWGYRHVPP

SEQ ID NO: 69058 - DNA, 1371 bp, Artificial Sequence
  derived and/or modified sequence
atgagcgcccagtgctgcgccggccagctggcctgctgctgcggcagcgccggctgcagcctgtgctgcgactgctgccccagaatcagacagagcctgagcaccagattcatgtacgccctgtacttcatcctggtggtggtgctgtgctgcatcatgatgagcaccaccgtggcccacaagatgaaggagcacatccccttcttcgaggacatgtgcaagggcatcaaggccggcgacacctgcgagaagctggtgggctacagcgccgtgtacagagtgtgcttcggcatggcctgcttcttcttcatcttctgcctgctgaccctgaagatcaacaacagcaagagctgcagagcccacatccacaacggcttctggttcttcaagctgctgctgctgggcgccatgtgcagcggcgccttcttcatccccgaccaggacaccttcctgaacgcctggagatacgtgggcgccgtgggcggcttcctgttcatcggcatccagctgctgctgctggtggagttcgcccacaagtggaacaagaactggaccgccggcaccgccagcaacaagctgtggtacgccagcctggccctggtgaccctgatcatgtacagcatcgccaccggcggcctggtgctgatggccgtgttctacacccagaaggacagctgcatggagaacaagatcctgctgggcgtgaacggcggcctgtgcctgctgatcagcctggtggccatcagcccctgggtgcagaacagacagccccacagcggcctgctgcagagcggcgtgatcagctgctacgtgacctacctgaccttcagcgccctgagcagcaagcccgccgaggtggacgagcacggcaagaacgtgaccatctgcgtgcccgacttcggccaggacctgtacagagacgagaacctggtgaccatcctgggcaccagcctgctgatcggctgcatcctgtacagctgcctgaccagcaccaccagaagcagcagcgacgccctgcagggcagatacgccgcccccgagctggagatcgccagatgctgcttctgcttcagccccggcggcgaggacaccgaggagcagcagcccggcaaggagggccccagagtgatctacgacgagaagaagggcaccgtgtacatctacagctacttccacttcgtgttcttcctggccagcctgtacgtgatgatgaccgtgaccaactggttcaagtggagccccaccctgctgcccagactggagtacagcggcatgatcctggcccactgcaacctgcacctgcccgacgtgaagagattcagctgcctgagcctgcccagcagctggggctacagacacgtgcccccctag

SEQ ID NO: 69059 - DNA, 1371 bp, Artificial Sequence
  derived and/or modified sequence
atgtctgcgcagtgctgcgcaggacagcttgcctgctgttgcgggagcgccggttgttcactgtgttgcgactgttgtccccgaattaggcagtcgctcagtacaaggtttatgtacgccctgtatttcatacttgtagtagtgctgtgctgcatcatgatgtccacaaccgtcgcacacaagatgaaggaacacattcctttctttgaggatatgtgcaaagggataaaagctggggacacgtgcgagaaactggtgggctactctgccgtttacagagtttgctttgggatggcatgtttctttttcattttttgtctgctgacactgaaaatcaataatagcaaatcatgtcgcgcccacattcataatggtttctggttcttcaagttattgctcttaggagcgatgtgctccggcgccttcttcattcccgaccaggacactttcctgaacgcttggcgctatgtgggcgcagtaggggggttcctgttcattggaatacagctgctgctgctggtcgagtttgcccataagtggaacaaaaactggactgctggaaccgcgtcaaacaaattgtggtacgcatctctggctctcgtgaccctgataatgtactcgatcgccaccggtggcctggttctgatggccgtcttctatacccaaaaagattcctgcatggagaacaaaatcttactgggcgttaatggagggctctgcctgctgatctctctggtggcgattagcccttgggttcaaaatcggcagcctcactcggggcttctgcagtcaggggtaatctcgtgctacgtcacatacctgactttctctgccctgtcttctaagccggccgaagttgacgaacatggtaaaaatgttaccatatgtgtgcctgacttcgggcaggacctgtaccgagacgagaatctggttactatcttaggcacaagtctactcattggttgcatcctgtattcttgtctgacttcaacaacacgttcctcaagcgatgcgctccaggggagatacgcagctccagaattagaaattgcaaggtgttgcttctgcttttcccctgggggggaggacaccgaagaacagcagccaggcaaagaaggccccagagtaatctatgatgaaaagaaaggcactgtttacatctatagctatttccattttgtgttctttctggcctccctctatgtgatgatgaccgttacaaactggttcaagtggagtcctaccttattgccaaggctggaatatagcggaatgattcttgcccactgtaatctacatcttcctgacgtgaagcgattcagttgtctgtcactaccctcgagctggggatatcgccatgtgcccccgtag

SEQ ID NO: 69060 - DNA, 1371 bp, Artificial Sequence
  derived and/or modified sequence
atgtctgcccagtgctgtgccggccagctggcctgctgctgcggcagcgctggctgcagcctgtgctgtgactgctgcccccgcatccggcagagcctgagcacccgcttcatgtatgccctgtacttcatcctggtggtggtgctgtgctgcatcatgatgagcaccaccgtggcccacaagatgaaggagcacatccccttctttgaggacatgtgcaagggcatcaaggccggggacacctgtgagaagctggtgggctacagcgctgtgtacagagtgtgcttcggcatggcctgcttcttcttcatcttctgcctgctgaccctgaagatcaacaacagcaagagctgccgggcccacatccacaacggcttctggttcttcaagctgctgctgctgggcgccatgtgcagcggggccttcttcatcccagaccaggacaccttcctgaatgcctggaggtatgtgggcgctgtgggcggcttcctgttcatcggcatccagctgctgctgctggtggagtttgcccacaagtggaacaagaactggacagctggaacagccagcaacaagctgtggtacgccagcctggccctggtgaccctcatcatgtacagcatcgccaccggcggcctggtgctgatggctgtgttctacacccagaaggacagctgcatggagaacaagatcctgctgggcgtgaatggaggcctgtgcctgctgatcagcctggtggccatcagcccctgggtgcagaaccggcagccccacagcggcctgctgcagagcggggtcatcagctgctacgtgacctacctgaccttcagcgccctgagcagcaagccagctgaggtggatgaacatggcaagaatgtgaccatctgtgtgcctgactttggccaggacctgtacagagatgagaacctggtgaccatcctgggcaccagcctgctgattggctgcatcctgtacagctgcctgaccagcaccaccaggagcagcagtgatgccctgcagggccgctatgctgcccctgagctggagatcgcccgctgctgcttctgcttcagccctggaggagaggacacagaggagcagcagcccgggaaggagggccccagggtcatctatgatgagaagaagggcaccgtgtacatctacagctacttccactttgtgttcttcctggccagcctgtatgtgatgatgacagtgaccaactggttcaagtggagccccaccctgctgccccggctggagtacagcggcatgatcctggcccactgcaacctgcacctgcctgatgtgaagcgcttcagctgcctgagcctgcccagctcctggggctacagacatgtgcccccatag

SEQ ID NO: 69061 - DNA, 1371 bp, Artificial Sequence
  derived and/or modified sequence
atgagcgcccagtgctgcgccggccagctggcctgctgctgcggcagcgcaggctgcagcttatgctgcgattgttgtcccaggatccggcagagcttgagcactaggttcatgtatgccctttattttatcttagtcgtggtcctgtgctgtattatgatgtccactactgtggcacacaagatgaaggagcatatacccttcttcgaagatatgtgcaaggggattaaggccggcgacacttgtgaaaaactcgtgggttacagcgcagtctatcgtgtctgcttcgggatggcatgtttctttttcattttctgtctgcttaccttaaagattaacaatagcaagtcgtgccgggcccatatacacaatggcttttggttttttaagctactcctgctcggcgcaatgtgctctggcgcgttcttcattcccgatcaagatacttttctgaatgcctggcgatacgtcggggccgtcgggggctttctgttcatcggcatccagttgctgttactggtcgaatttgctcataagtggaataagaattggacggccggtaccgccagcaataaactgtggtacgccagccttgcactggtcacgctcatcatgtactccatcgcaacaggaggactcgtgcttatggcagtgttctatacccaaaaggacagctgcatggagaacaagatcctccttggcgttaacgggggcctgtgtctcttgatttctcttgtggcaattagcccttgggtgcaaaatcgccaaccgcattccggccttctgcagagcggtgttatttcctgttatgtgacctacctgaccttttccgccctttcaagtaaaccagccgaggtcgacgagcatggaaagaacgtgacaatctgtgtgccagattttggccaggacctttatcgagatgaaaacctcgtcaccatcctgggcactagcttgctaatcgggtgcatcctgtactcatgcctgacaagtactacacgatcatcatcagacgcactccagggtagatacgccgcacctgaactcgaaatcgcaagatgttgcttctgtttttcacccggtggggaggatactgaggaacaacagccgggcaaggaagggccgcgcgtcatctatgatgagaaaaagggcaccgtctatatttactcctacttccacttcgtattttttttggcgtctttatatgtaatgatgacagtgactaattggtttaaatggagccccactttgctgccccgattagagtactcgggaatgattttagcacactgtaacctgcacctaccagatgtgaagaggtttagctgcctttcactcccaagcagctgggggtataggcatgtacccccatag

SEQ ID NO: 69062 - DNA, 1371 bp, Artificial Sequence
  derived and/or modified sequence
atgtcagcgcagtgctgcgctggccagttggcatgttgttgcggctctgctgggtgcagcctgtgctgcgattgttgccctaggattcgtcaatctttaagcacacggttcatgtacgctctttatttcattttagtcgtcgtgctgtgctgcatcatgatgtcaacgacggtcgcccataaaatgaaggaacatatcccattcttcgaggacatgtgcaaggggatcaaagcaggggacacctgcgagaaattagtgggctactctgcagtttaccgggtttgttttgggatggcttgcttctttttcattttctgtctgctgacacttaagatcaataattccaagtcatgtcgagcccacattcacaatggattctggtttttcaagctactgttgcttggcgctatgtgctcaggagcattctttattcccgaccaggacacttttctgaatgcatggagatacgttggcgctgtcggcggattcctctttattggtattcagctgctgcttctggtcgaattcgcccataaatggaacaaaaactggaccgccggtacggcttctaacaagctgtggtacgcatcactggcgctcgtcacactaatcatgtattccattgcaaccggaggtctcgtgcttatggcagtgttctacacccagaaagattcttgcatggagaacaaaattctcctgggagtaaatgggggactatgcctgctaatctccctggtggctatctccccctgggttcagaatcgccagcctcactccggactgctgcagagcggggtcatcagctgctatgttacatacctgactttttccgccctttcgtcaaaacctgctgaggtggacgagcacgggaaaaatgttaccatatgcgtacccgatttcgggcaagacctgtatcgtgatgagaatctagtgaccattctgggaacaagtcttcttattggatgtatcctctacagctgtctgaccagcacgacacggagctccagcgatgcactccaggggcgatacgcggctccggagctcgaaatcgccagatgttgcttttgtttcagcccgggaggcgaggacactgaggaacagcaacccggtaaagagggcccacgggttatctatgacgagaagaaagggacagtttacatatatagctattttcacttcgtgttttttctggcctccctgtacgtcatgatgacagtcacaaattggtttaagtggtccccgaccctgctgccaaggcttgagtacagtgggatgattttggcacattgtaacttgcatttgcctgatgtgaaaaggttttcgtgtctatctctgcccagctcctgggggtacagacacgtgcctccttag

SEQ ID NO: 69063 - DNA, 1573 bp, Artificial Sequence
  derived and/or modified sequence
agctgcggctgagcccagcgctcgaggcgcgaggcagccaggagggcccgtgcggcgcggggagccagcgagcgcgccttcggcattggccgccgcgatgtcagctcagtgctgtgcgggccagctggcctgctgctgtgggtctgcaggctgctctctctgctgtgattgctgccccaggattcggcagtccctcagcacccgcttcatgtacgccctctacttcattctggtcgtcgtcctctgctgcatcatgatgtcaacaaccgtggctcacaagatgaaagagcacattcctttttttgaagatatgtgtaaaggcattaaagctggtgacacctgtgagaagctggtgggatattctgccgtgtatagagtctgttttggaatggcttgtttcttctttatcttctgtctactgaccttgaaaatcaacaacagcaaaagttgtagagctcatattcacaatggcttttggttctttaaacttctgctgttgggggccatgtgctcaggagctttcttcattccagatcaggacacctttctgaacgcctggcgctatgtgggagccgtcggaggcttcctcttcattggcatccagctcctcctgctcgtggagtttgcacataagtggaacaagaactggacagcaggcacagccagtaacaagctgtggtacgcctccctggccctggtgacgctcatcatgtattccattgccactggaggcttggttttgatggcagtgttttatacacagaaagacagctgcatggaaaacaaaattctgctgggagtaaatggaggcctgtgcctgcttatatcattggtagccatctcaccctgggtccaaaatcgacagccacactcggggctcttacaatcaggggtcataagctgctatgtcacctacctcaccttctcagctctgtccagcaaacctgcagaagtagatgaacatgggaaaaatgttacaatctgtgtgcctgactttggtcaagacctgtacagagatgaaaacttggtgactatactggggaccagcctcttaatcggatgtatcttgtattcatgtttgacatcaacaacaagatcgagttctgacgctctgcaggggcgatacgcagctcctgaattggagatagctcgctgttgtttttgcttcagtcctggtggagaggacactgaagagcagcagccggggaaggagggaccacgggtcatttatgacgagaagaaaggcaccgtctacatctactcctacttccacttcgtgttcttcctagcttccctgtatgtgatgatgaccgtcaccaactggttcaaatggagtcccactctgttgcccaggctggagtacagtggcatgatcttggctcactgcaacctccacctcccagatgtcaagcgattctcttgcctcagcctcccaagtagctggggttacaggcatgtgccaccatgaagtgcctttcacctcctgccatgattctgaggcctccccagccatgtggaactctgagaaacctgaacggactccatttggctccttcatttgcaagacatcaag

SEQ ID NO: 69064 - protein, 461 aa, Artificial Sequence
  derived and/or modified sequence
MSAQCCAGQLACCCGSAGCSLCCDCCPRIRQSLSTRFMYALYFILVVVLCCIMMSTTVAHKMKEHIPFFEDMCKGIKAGDTCEKLVGYSAVYRVCFGMACFFFIFCLLTLKINNSKSCRAHIHNGFWFFKLLLLGAMCSGAFFIPDQDTFLNAWRYVGAVGGFLFIGIQLLLLVEFAHKWNKNWTAGTASNKLWYASLALVTLIMYSIATGGLVLMAVFYTQKDSCMENKILLGVNGGLCLLISLVAISPWVQNRQPHSGLLQSGVISCYVTYLTFSALSSKPAEVVLDEHGKNVTICVPDFGQDLYRDENLVTILGTSLLIGCILYSCLTSTTRSSSDALQGRYAAPELEIARCCFCFSPGGEDTEEQQPGKEGPRVIYDEKKGTVYIYSYFHFVFFLASLYVMMTVTNWFNYESANIESFFSGSWSIFWVKMASCWICVLLYLCTLVAPLCCPTREFSV

SEQ ID NO: 69065 - DNA, 1386 bp, Artificial Sequence
  derived and/or modified sequence
atgagcgcccagtgctgcgccggccagctggcctgctgctgcggcagcgccggctgcagcctgtgctgcgactgctgccccagaatcagacagagcctgagcaccagattcatgtacgccctgtacttcatcctggtggtggtgctgtgctgcatcatgatgagcaccaccgtggcccacaagatgaaggagcacatccccttcttcgaggacatgtgcaagggcatcaaggccggcgacacctgcgagaagctggtgggctacagcgccgtgtacagagtgtgcttcggcatggcctgcttcttcttcatcttctgcctgctgaccctgaagatcaacaacagcaagagctgcagagcccacatccacaacggcttctggttcttcaagctgctgctgctgggcgccatgtgcagcggcgccttcttcatccccgaccaggacaccttcctgaacgcctggagatacgtgggcgccgtgggcggcttcctgttcatcggcatccagctgctgctgctggtggagttcgcccacaagtggaacaagaactggaccgccggcaccgccagcaacaagctgtggtacgccagcctggccctggtgaccctgatcatgtacagcatcgccaccggcggcctggtgctgatggccgtgttctacacccagaaggacagctgcatggagaacaagatcctgctgggcgtgaacggcggcctgtgcctgctgatcagcctggtggccatcagcccctgggtgcagaacagacagccccacagcggcctgctgcagagcggcgtgatcagctgctacgtgacctacctgaccttcagcgccctgagcagcaagcccgccgaggtggtgctggacgagcacggcaagaacgtgaccatctgcgtgcccgacttcggccaggacctgtacagagacgagaacctggtgaccatcctgggcaccagcctgctgatcggctgcatcctgtacagctgcctgaccagcaccaccagaagcagcagcgacgccctgcagggcagatacgccgcccccgagctggagatcgccagatgctgcttctgcttcagccccggcggcgaggacaccgaggagcagcagcccggcaaggagggccccagagtgatctacgacgagaagaagggcaccgtgtacatctacagctacttccacttcgtgttcttcctggccagcctgtacgtgatgatgaccgtgaccaactggttcaactacgagagcgccaacatcgagagcttcttcagcggcagctggagcatcttctgggtgaagatggccagctgctggatctgcgtgctgctgtacctgtgcaccctggtggcccccctgtgctgccccaccagagagttcagcgtgtag

SEQ ID NO: 69066 - DNA, 1386 bp, Artificial Sequence
  derived and/or modified sequence
atgtcggcccagtgttgcgcgggccagctggcctgttgctgcggcagcgccggctgttccttgtgttgtgactgttgcccacgcatccggcaaagtctgtcaacaaggttcatgtacgccctgtacttcatcctggtagtcgtcctctgttgcatcatgatgtctactactgtggcccataagatgaaggaacacattccattctttgaagatatgtgcaaaggaattaaggcaggtgatacctgtgagaaactagttggctactcagcggtttatagagtctgcttcggcatggcctgtttcttttttattttctgtttgcttacactcaagattaacaactccaaatcttgtagggcccatatccacaacggcttctggttcttcaaactgctgctgctgggagccatgtgttctggggctttcttcattcctgatcaggacacattcctgaatgcatggcggtacgtcggagccgtgggcggttttctttttattggcattcaacttctgctacttgtagaattcgctcataagtggaataaaaattggaccgccggcactgcctcaaataagctttggtatgcgtccttagcattagttaccctgatcatgtacagcatagccactggtggattggtgctcatggcggtattttatacgcagaaggatagctgcatggagaataaaattctgctcggcgtgaacggagggctctgcctgcttatttctctagtggctatctccccatgggtacagaatcggcaaccccactctggactcctccagagtggtgtgatttcctgctatgtgacttatctgaccttctccgctctgtctagtaaaccagcggaggtcgtgttggacgagcacgggaagaacgtgactatttgcgtgcctgactttgggcaagatctctatagagacgagaacctggtcacgatcctcgggacctccctcctcattggctgtatcctctacagctgtttaacaagtaccaccaggagctctagcgatgctctgcagggccgctatgccgcccccgagctggaaatcgctcgctgctgcttttgtttttcacccggcggggaagataccgaagagcagcaacccggtaaagaaggcccccgcgtgatctatgacgagaagaaaggtacggtgtacatctacagttactttcacttcgtcttcttcttagcatcgttgtatgttatgatgaccgttacaaattggttcaactatgaatccgcaaatatcgagtccttcttctcagggtcttggtccattttctgggtgaaaatggccagttgctggatatgcgtactgctgtacctttgcacgctggtcgctcctctgtgttgtcccactcgggaattttctgtgtag

SEQ ID NO: 69067 - DNA, 1386 bp, Artificial Sequence
  derived and/or modified sequence
atgtctgcccagtgctgtgccggccagctggcctgctgctgcggcagcgctggctgcagcctgtgctgtgactgctgcccccgcatccggcagagcctgagcacccgcttcatgtatgccctgtacttcatcctggtggtggtgctgtgctgcatcatgatgagcaccaccgtggcccacaagatgaaggagcacatccccttctttgaggacatgtgcaagggcatcaaggccggggacacctgtgagaagctggtgggctacagcgctgtgtacagagtgtgcttcggcatggcctgcttcttcttcatcttctgcctgctgaccctgaagatcaacaacagcaagagctgccgggcccacatccacaacggcttctggttcttcaagctgctgctgctgggcgccatgtgcagcggggccttcttcatcccagaccaggacaccttcctgaatgcctggaggtatgtgggcgctgtgggcggcttcctgttcatcggcatccagctgctgctgctggtggagtttgcccacaagtggaacaagaactggacagctggaacagccagcaacaagctgtggtacgccagcctggccctggtgaccctcatcatgtacagcatcgccaccggcggcctggtgctgatggctgtgttctacacccagaaggacagctgcatggagaacaagatcctgctgggcgtgaatggaggcctgtgcctgctgatcagcctggtggccatcagcccctgggtgcagaaccggcagccccacagcggcctgctgcagagcggggtcatcagctgctacgtgacctacctgaccttcagcgccctgagcagcaagccagctgaggtggtgctggatgaacatggcaagaatgtgaccatctgtgtgcctgactttggccaggacctgtacagagatgagaacctggtgaccatcctgggcaccagcctgctgattggctgcatcctgtacagctgcctgaccagcaccaccaggagcagcagtgatgccctgcagggccgctatgctgcccctgagctggagatcgcccgctgctgcttctgcttcagccctggaggagaggacacagaggagcagcagcccgggaaggagggccccagggtcatctatgatgagaagaagggcaccgtgtacatctacagctacttccactttgtgttcttcctggccagcctgtatgtgatgatgacagtgaccaactggttcaactatgagagcgccaacatcgagagcttcttcagcggctcctggagcatcttctgggtgaagatggccagctgctggatctgtgtgctgctgtacctgtgcaccctggtggcccccctgtgctgccccacccgggagttctctgtgtag

SEQ ID NO: 69068 - DNA, 1386 bp, Artificial Sequence
  derived and/or modified sequence
atgagcgcccagtgctgcgccggccagctggcctgctgctgcggctcagccggctgcagcctgtgctgcgactgctgccctaggatcagacagagtctgtcaacgcgcttcatgtatgcattgtacttcatcctggtggtggtgttatgctgcattatgatgtccaccactgtcgcccacaagatgaaggagcatatacctttcttcgaggacatgtgtaagggcattaaagctggagacacgtgtgaaaagctggttggctactccgcggtgtaccgcgtgtgcttcggcatggcctgtttttttttcattttttgtctgctgacactgaagatcaataacagcaaaagctgccgcgctcacatccataacgggttttggttctttaaactgctgctactgggggcaatgtgctcgggagcattcttcatcccagaccaggatactttcctcaacgcctggaggtatgtgggggcggtcgggggctttctgtttattggaatccaacttctgctgctggtagagttcgcccataaatggaacaaaaattggaccgccggcactgcatcaaacaaactctggtacgcttctcttgctctcgttactctgatcatgtactccatagctactgggggattggtgctcatggccgtattctacactcagaaggacagctgcatggagaataaaattctacttggggtgaatggggggttgtgccttctgatctcactcgtcgccatcagcccttgggtccaaaatcgccagccccactccggtctgctccagagtggggtcatcagctgctacgtgacttacctcaccttctctgccctgagttccaaacctgccgaagtcgtgcttgatgagcacggcaagaacgtcacaatctgcgtgcctgatttcgggcaagacttatacagagatgagaacctggtaactatactggggacatctttactgatcggttgcatcctgtactcttgtctaacatccacaactcggtccagtagtgatgcgctccagggccgctatgccgctccagaactagagatcgctcggtgttgtttttgcttcagccctgggggagaggatacagaagaacagcagcctgggaaagagggcccgcgggtgatttacgatgaaaagaagggaaccgtctacatctattcctattttcactttgtgttcttcctagcctccttgtacgtcatgatgactgttactaactggtttaattacgagtcagccaacatcgagtctttcttttcaggctcctggtcaatcttctgggtcaaaatggcatcctgttggatttgtgttctattatatctgtgtacgcttgtggctcccctgtgctgccccactcgcgaattttctgtgtag

SEQ ID NO: 69069 - DNA, 1386 bp, Artificial Sequence
  derived and/or modified sequence
atgagtgcacagtgctgtgccggacagctcgcttgttgctgtggctcggcgggatgttcgctttgttgcgattgttgccctcggatccggcaaagcctctccaccagattcatgtatgccctgtatttcatactggtagtggttctttgctgcataatgatgagcactacagtagctcataagatgaaagagcatatccctttcttcgaggacatgtgcaaaggcattaaggccggtgacacatgtgagaagctggtgggctattctgccgtgtatagggtctgctttgggatggcctgttttttcttcattttctgtctcctgacactgaagatcaacaacagcaagtcgtgtagggcccatattcataatggattctggtttttcaagctgctgctgctcggagccatgtgcagcggagccttttttatcccagatcaggacacgtttcttaatgcctggcgttacgtgggggctgtgggaggatttctttttataggtattcagctcctactactcgtggagttcgctcataagtggaacaaaaattggaccgcagggaccgccagcaacaaattatggtacgcctctcttgctcttgtcaccttgattatgtacagcatcgccactggcggactagttttaatggcggttttttatactcagaaggatagttgcatggaaaacaagattctattaggagtgaatgggggactgtgcctgcttatctccctggtcgcaatcagcccttgggtacagaaccgccagccacactcaggcctcctacagtccggagtgatctcctgttatgttacgtacctaacattttccgcactgtctagcaagcctgccgaagtcgtgctggacgaacacggcaaaaatgtcaccatatgcgtccccgatttcggccaagatctctatcgtgacgagaacctggtcaccattctcggcacaagtcttctaatcgggtgtattctgtactcatgtctgacttcaacgacaagaagctcctcagacgcactgcagggccgatatgccgcacctgagctggagatagctaggtgttgcttttgtttcagcccaggaggggaggatactgaagagcagcagccgggaaaagaaggcccacgggtgatttacgatgaaaaaaagggaaccgtctacatttactcttatttccacttcgtcttcttccttgcctccctgtacgtgatgatgacagtcactaactggttcaattatgaatccgccaatattgaatccttcttctccggttcttggtcaattttctgggtgaaaatggcaagctgctggatctgtgttctcttatacctctgtaccttggtggccccactctgttgtccaacccgtgaatttagtgtgtag

SEQ ID NO: 69070 - DNA, 1583 bp, Artificial Sequence
  derived and/or modified sequence
gtttttacccaggcctcggcgcctaggcgcttcgccgaggctgatcttcgttcaagtgtgagctgcggctgagcccagcgctcgaggcgcgaggcagccaggagggcccgtgcggcgcggggagccagcgagcgcgccttcggcattggccgccgcgatgtcagctcagtgctgtgcgggccagctggcctgctgctgtgggtctgcaggctgctctctctgctgtgattgctgccccaggattcggcagtccctcagcacccgcttcatgtacgccctctacttcattctggtcgtcgtcctctgctgcatcatgatgtcaacaaccgtggctcacaagatgaaagagcacattcctttttttgaagatatgtgtaaaggcattaaagctggtgacacctgtgagaagctggtgggatattctgccgtgtatagagtctgttttggaatggcttgtttcttctttatcttctgtctactgaccttgaaaatcaacaacagcaaaagttgtagagctcatattcacaatggcttttggttctttaaacttctgctgttgggggccatgtgctcaggagctttcttcattccagatcaggacacctttctgaacgcctggcgctatgtgggagccgtcggaggcttcctcttcattggcatccagctcctcctgctcgtggagtttgcacataagtggaacaagaactggacagcaggcacagccagtaacaagctgtggtacgcctccctggccctggtgacgctcatcatgtattccattgccactggaggcttggttttgatggcagtgttttatacacagaaagacagctgcatggaaaacaaaattctgctgggagtaaatggaggcctgtgcctgcttatatcattggtagccatctcaccctgggtccaaaatcgacagccacactcggggctcttacaatcaggggtcataagctgctatgtcacctacctcaccttctcagctctgtccagcaaacctgcagaagtagttctagatgaacatgggaaaaatgttacaatctgtgtgcctgactttggtcaagacctgtacagagatgaaaacttggtgactatactggggaccagcctcttaatcggatgtatcttgtattcatgtttgacatcaacaacaagatcgagttctgacgctctgcaggggcgatacgcagctcctgaattggagatagctcgctgttgtttttgcttcagtcctggtggagaggacactgaagagcagcagccggggaaggagggaccacgggtcatttatgacgagaagaaaggcaccgtctacatctactcctacttccacttcgtgttcttcctagcttccctgtatgtgatgatgaccgtcaccaactggttcaactacgaaagtgccaacatcgagagcttcttcagcgggagctggtccatcttctgggtcaagatggcctcctgctggatatgcgtgctgttgtacctgtgtacgctggtcgctcccctctgctgccccacccgggagttctctgtgtgatgatatcggcggtcccctgggctttgtgggcctacagcct

SEQ ID NO: 69071 - protein, 1038 aa, Artificial Sequence
  derived and/or modified sequence
MVSSAQMGFNLQALLEQLSQDELSKFKYLITTFSLAHELQKIPHKEVDKADGKQLVEILTTHCDSYWVEMASLQVFEKMHRMDLSERAKDEVREAALKSFNKRKPLSLAFTETKGNVICLGKEVFKGKKPDKDNRCRYILKTKFREMWKSWPGDSKEVQVMAERYKMLIPFSNPRVLPGPFSYTVVLYGPAGLGKTTLAQKLMLDWAEDNLIHKFKYAFYLSCRELSRLGPCSFAELVFRDWPELQDDIPHILAQARKILFVIDGFDELGAAPGALIEDICGDWEKKKPVPVLLGSLLNRVMLPKAALLVTTRPRALRDLRILAEEPIYIRVEGFLEEDRRAYFLRHFGDEDQAMRAFELMRSNAALFQLGSAPAVCWIVCTTLKLQMEKGEDPVPTCLTRTGLFLRFLCSRFPQGAQLRGALRTLSLLAAQGLWAQTSVLHREDLERLGVQESDLRLFLDGDILRQDRVSKGCYSFIHLSFQQFLTALFYTLEKEEEEDRDGHTWDIGDVQKLLSGVERLRNPDLIQAGYYSFGLANEKRAKELEATFGCRMSPDIKQELLRCDISCKGGHSTVTDLQELLGCLYESQEEELVKEVMAQFKEISLHLNAVDVVPSSFCVKHCRNLQKMSLQVIKENLPENVTASESDAEVERSQDDQHMLPFWTDLCSIFGSNKDLMGLAINDSFLSASLVRILCEQIASDTCHLQRVVFKNISPADAHRNLCLALRGHKTVTYLTLQGNDQDDMFPALCEVLRHPECNLRYLGLVSCSATTQQWADLSLALEVNQSLTCVNLSDNELLDEGAKLLYTTLRHPKCFLQRLSLENCHLTEANCKDLAAVLVVSRELTHLCLAKNPIGNTGVKFLCEGLRYPECKLQTLVLWNCDITSDGCCDLTKLLQEKSSLLCLDLGLNHIGVKGMKFLCEALRKPLCNLRCLWLWGCSIPPFSCEDLCSALSCNQSLVTLDLGQNPLGSSGVKMLFETLTCSSGTLRTLRLKIDDFNDELNKLLEEIEEKNPQLIIDTEKHHPWAERPSSHDFMI

SEQ ID NO: 69072 - protein, 154 aa, Artificial Sequence
  derived and/or modified sequence
MVSSAQMGFNLQALLEQLSQDELSKFKYLITTFSLAHELQKIPHKEVDKADGKQLVEILTTHCDSYWVEMASLQVFEKMHRMDLSERAKDEVREAALKSFNKRKPLSLGITRKERPPLDVDEMLERFKTEAQAFTETKGNVICLGKEVFKGKKP

SEQ ID NO: 69073 - protein, 1062 aa, Artificial Sequence
  derived and/or modified sequence
MVSSAQMGFNLQALLEQLSQDELSKFKYLITTFSLAHELQKIPHKEVDKADGKQLVEILTTHCDSYWVEMASLQVFEKMHRMDLSERAKDEVREAALKSFNKRKPLSLGITRKERPPLDVDEMLERFKTEAQAFTETKGNVICLGKEVFKGKKPDKDNRCRYILKTKFREMWKSWPGDSKEVQVMAERYKMLIPFSNPRVLPGPFSYTVVLYGPAGLGKTTLAQKLMLDWAEDNLIHKFKYAFYLSCRELSRLGPCSFAELVFRDWPELQDDIPHILAQARKILFVIDGFDELGAAPGALIEDICGDWEKKKPVPVLLGSLLNRVMLPKAALLVTTRPRALRDLRILAEEPIYIRVEGFLEEDRRAYFLRHFGDEDQAMRAFELMRSNAALFQLGSAPAVCWIVCTTLKLQMEKGEDPVPTCLTRTGLFLRFLCSRFPQGAQLRGALRTLSLLAAQGLWAQTSVLHREDLERLGVQESDLRLFLDGDILRQDRVSKGCYSFIHLSFQQFLTALFYTLEKEEEEDRDGHTWDIGDVQKLLSGVERLRNPDLIQAGYYSFGLANEKRAKELEATFGCRMSPDIKQELLRCDISCKGGHSTVTDLQELLGCLYESQEEELVKEVMAQFKEISLHLNAVDVVPSSFCVKHCRNLQKMSLQVIKENLPENVTASESDAEVERSQDDQHMLPFWTDLCSIFGSNKDLMGLAINDSFLSASLVRILCEQIASDTCHLQRVVFKNISPADAHRNLCLALRGHKTVTYLTLQGNDQDDMFPALCEVLRHPECNLRYLGLVSCSATTQQWADLSLALEVNQSLTCVNLSDNELLDEGAKLLYTTLRHPKCFLQRLSLENCHLTEANCKDLAAVLVVSRELTHLCLAKNPIGNTGVKFLCEGLRYPECKLQTLVLWNCDITSDGCCDLTKLLQEKSSLLCLDLGLNHIGVKGMKFLCEALRKPLCNLRCLWLWGCSIPPFSCEDLCSALSCNQSLVTLDLGQNPLGSSGVKMLFETLTCSSGTLRTLRLKIDDFNDELNKLLEEIEEKNPQLIIDTEKHHPWAERPSSHDFMI

SEQ ID NO: 69074 - DNA, 3117 bp, Artificial Sequence
  derived and/or modified sequence
atggtgagcagcgcccagatgggcttcaacctgcaggccctgctggagcagctgagccaggacgagctgagcaagttcaagtacctgatcaccaccttcagcctggcccacgagctgcagaagatcccccacaaggaggtggacaaggccgacggcaagcagctggtggagatcctgaccacccactgcgacagctactgggtggagatggccagcctgcaggtgttcgagaagatgcacagaatggacctgagcgagagagccaaggacgaggtgagagaggccgccctgaagagcttcaacaagagaaagcccctgagcctggccttcaccgagaccaagggcaacgtgatctgcctgggcaaggaggtgttcaagggcaagaagcccgacaaggacaacagatgcagatacatcctgaagaccaagttcagagagatgtggaagagctggcccggcgacagcaaggaggtgcaggtgatggccgagagatacaagatgctgatccccttcagcaaccccagagtgctgcccggccccttcagctacaccgtggtgctgtacggccccgccggcctgggcaagaccaccctggcccagaagctgatgctggactgggccgaggacaacctgatccacaagttcaagtacgccttctacctgagctgcagagagctgagcagactgggcccctgcagcttcgccgagctggtgttcagagactggcccgagctgcaggacgacatcccccacatcctggcccaggccagaaagatcctgttcgtgatcgacggcttcgacgagctgggcgccgcccccggcgccctgatcgaggacatctgcggcgactgggagaagaagaagcccgtgcccgtgctgctgggcagcctgctgaacagagtgatgctgcccaaggccgccctgctggtgaccaccagacccagagccctgagagacctgagaatcctggccgaggagcccatctacatcagagtggagggcttcctggaggaggacagaagagcctacttcctgagacacttcggcgacgaggaccaggccatgagagccttcgagctgatgagaagcaacgccgccctgttccagctgggcagcgcccccgccgtgtgctggatcgtgtgcaccaccctgaagctgcagatggagaagggcgaggaccccgtgcccacctgcctgaccagaaccggcctgttcctgagattcctgtgcagcagattcccccagggcgcccagctgagaggcgccctgagaaccctgagcctgctggccgcccagggcctgtgggcccagaccagcgtgctgcacagagaggacctggagagactgggcgtgcaggagagcgacctgagactgttcctggacggcgacatcctgagacaggacagagtgagcaagggctgctacagcttcatccacctgagcttccagcagttcctgaccgccctgttctacaccctggagaaggaggaggaggaggacagagacggccacacctgggacatcggcgacgtgcagaagctgctgagcggcgtggagagactgagaaaccccgacctgatccaggccggctactacagcttcggcctggccaacgagaagagagccaaggagctggaggccaccttcggctgcagaatgagccccgacatcaagcaggagctgctgagatgcgacatcagctgcaagggcggccacagcaccgtgaccgacctgcaggagctgctgggctgcctgtacgagagccaggaggaggagctggtgaaggaggtgatggcccagttcaaggagatcagcctgcacctgaacgccgtggacgtggtgcccagcagcttctgcgtgaagcactgcagaaacctgcagaagatgagcctgcaggtgatcaaggagaacctgcccgagaacgtgaccgccagcgagagcgacgccgaggtggagagaagccaggacgaccagcacatgctgcccttctggaccgacctgtgcagcatcttcggcagcaacaaggacctgatgggcctggccatcaacgacagcttcctgagcgccagcctggtgagaatcctgtgcgagcagatcgccagcgacacctgccacctgcagagagtggtgttcaagaacatcagccccgccgacgcccacagaaacctgtgcctggccctgagaggccacaagaccgtgacctacctgaccctgcagggcaacgaccaggacgacatgttccccgccctgtgcgaggtgctgagacaccccgagtgcaacctgagatacctgggcctggtgagctgcagcgccaccacccagcagtgggccgacctgagcctggccctggaggtgaaccagagcctgacctgcgtgaacctgagcgacaacgagctgctggacgagggcgccaagctgctgtacaccaccctgagacaccccaagtgcttcctgcagagactgagcctggagaactgccacctgaccgaggccaactgcaaggacctggccgccgtgctggtggtgagcagagagctgacccacctgtgcctggccaagaaccccatcggcaacaccggcgtgaagttcctgtgcgagggcctgagataccccgagtgcaagctgcagaccctggtgctgtggaactgcgacatcaccagcgacggctgctgcgacctgaccaagctgctgcaggagaagagcagcctgctgtgcctggacctgggcctgaaccacatcggcgtgaagggcatgaagttcctgtgcgaggccctgagaaagcccctgtgcaacctgagatgcctgtggctgtggggctgcagcatcccccccttcagctgcgaggacctgtgcagcgccctgagctgcaaccagagcctggtgaccctggacctgggccagaaccccctgggcagcagcggcgtgaagatgctgttcgagaccctgacctgcagcagcggcaccctgagaaccctgagactgaagatcgacgacttcaacgacgagctgaacaagctgctggaggagatcgaggagaagaacccccagctgatcatcgacaccgagaagcaccacccctgggccgagagacccagcagccacgacttcatgatctag

SEQ ID NO: 69075 - DNA, 465 bp, Artificial Sequence
  derived and/or modified sequence
atggtgagcagcgcccagatgggcttcaacctgcaggccctgctggagcagctgagccaggacgagctgagcaagttcaagtacctgatcaccaccttcagcctggcccacgagctgcagaagatcccccacaaggaggtggacaaggccgacggcaagcagctggtggagatcctgaccacccactgcgacagctactgggtggagatggccagcctgcaggtgttcgagaagatgcacagaatggacctgagcgagagagccaaggacgaggtgagagaggccgccctgaagagcttcaacaagagaaagcccctgagcctgggcatcaccagaaaggagagaccccccctggacgtggacgagatgctggagagattcaagaccgaggcccaggccttcaccgagaccaagggcaacgtgatctgcctgggcaaggaggtgttcaagggcaagaagccctag

SEQ ID NO: 69076 - DNA, 3189 bp, Artificial Sequence
  derived and/or modified sequence
atggtgagcagcgcccagatgggcttcaacctgcaggccctgctggagcagctgagccaggacgagctgagcaagttcaagtacctgatcaccaccttcagcctggcccacgagctgcagaagatcccccacaaggaggtggacaaggccgacggcaagcagctggtggagatcctgaccacccactgcgacagctactgggtggagatggccagcctgcaggtgttcgagaagatgcacagaatggacctgagcgagagagccaaggacgaggtgagagaggccgccctgaagagcttcaacaagagaaagcccctgagcctgggcatcaccagaaaggagagaccccccctggacgtggacgagatgctggagagattcaagaccgaggcccaggccttcaccgagaccaagggcaacgtgatctgcctgggcaaggaggtgttcaagggcaagaagcccgacaaggacaacagatgcagatacatcctgaagaccaagttcagagagatgtggaagagctggcccggcgacagcaaggaggtgcaggtgatggccgagagatacaagatgctgatccccttcagcaaccccagagtgctgcccggccccttcagctacaccgtggtgctgtacggccccgccggcctgggcaagaccaccctggcccagaagctgatgctggactgggccgaggacaacctgatccacaagttcaagtacgccttctacctgagctgcagagagctgagcagactgggcccctgcagcttcgccgagctggtgttcagagactggcccgagctgcaggacgacatcccccacatcctggcccaggccagaaagatcctgttcgtgatcgacggcttcgacgagctgggcgccgcccccggcgccctgatcgaggacatctgcggcgactgggagaagaagaagcccgtgcccgtgctgctgggcagcctgctgaacagagtgatgctgcccaaggccgccctgctggtgaccaccagacccagagccctgagagacctgagaatcctggccgaggagcccatctacatcagagtggagggcttcctggaggaggacagaagagcctacttcctgagacacttcggcgacgaggaccaggccatgagagccttcgagctgatgagaagcaacgccgccctgttccagctgggcagcgcccccgccgtgtgctggatcgtgtgcaccaccctgaagctgcagatggagaagggcgaggaccccgtgcccacctgcctgaccagaaccggcctgttcctgagattcctgtgcagcagattcccccagggcgcccagctgagaggcgccctgagaaccctgagcctgctggccgcccagggcctgtgggcccagaccagcgtgctgcacagagaggacctggagagactgggcgtgcaggagagcgacctgagactgttcctggacggcgacatcctgagacaggacagagtgagcaagggctgctacagcttcatccacctgagcttccagcagttcctgaccgccctgttctacaccctggagaaggaggaggaggaggacagagacggccacacctgggacatcggcgacgtgcagaagctgctgagcggcgtggagagactgagaaaccccgacctgatccaggccggctactacagcttcggcctggccaacgagaagagagccaaggagctggaggccaccttcggctgcagaatgagccccgacatcaagcaggagctgctgagatgcgacatcagctgcaagggcggccacagcaccgtgaccgacctgcaggagctgctgggctgcctgtacgagagccaggaggaggagctggtgaaggaggtgatggcccagttcaaggagatcagcctgcacctgaacgccgtggacgtggtgcccagcagcttctgcgtgaagcactgcagaaacctgcagaagatgagcctgcaggtgatcaaggagaacctgcccgagaacgtgaccgccagcgagagcgacgccgaggtggagagaagccaggacgaccagcacatgctgcccttctggaccgacctgtgcagcatcttcggcagcaacaaggacctgatgggcctggccatcaacgacagcttcctgagcgccagcctggtgagaatcctgtgcgagcagatcgccagcgacacctgccacctgcagagagtggtgttcaagaacatcagccccgccgacgcccacagaaacctgtgcctggccctgagaggccacaagaccgtgacctacctgaccctgcagggcaacgaccaggacgacatgttccccgccctgtgcgaggtgctgagacaccccgagtgcaacctgagatacctgggcctggtgagctgcagcgccaccacccagcagtgggccgacctgagcctggccctggaggtgaaccagagcctgacctgcgtgaacctgagcgacaacgagctgctggacgagggcgccaagctgctgtacaccaccctgagacaccccaagtgcttcctgcagagactgagcctggagaactgccacctgaccgaggccaactgcaaggacctggccgccgtgctggtggtgagcagagagctgacccacctgtgcctggccaagaaccccatcggcaacaccggcgtgaagttcctgtgcgagggcctgagataccccgagtgcaagctgcagaccctggtgctgtggaactgcgacatcaccagcgacggctgctgcgacctgaccaagctgctgcaggagaagagcagcctgctgtgcctggacctgggcctgaaccacatcggcgtgaagggcatgaagttcctgtgcgaggccctgagaaagcccctgtgcaacctgagatgcctgtggctgtggggctgcagcatcccccccttcagctgcgaggacctgtgcagcgccctgagctgcaaccagagcctggtgaccctggacctgggccagaaccccctgggcagcagcggcgtgaagatgctgttcgagaccctgacctgcagcagcggcaccctgagaaccctgagactgaagatcgacgacttcaacgacgagctgaacaagctgctggaggagatcgaggagaagaacccccagctgatcatcgacaccgagaagcaccacccctgggccgagagacccagcagccacgacttcatgatctag

SEQ ID NO: 69077 - DNA, 3117 bp, Artificial Sequence
  derived and/or modified sequence
atggttagctccgcccagatggggttcaatttacaggccctcctcgagcagctgagccaagatgagctgtcaaagtttaaatacctcataaccaccttctctctcgctcacgaactgcagaagatcccacataaagaggtggacaaggctgacggaaagcagcttgtcgagattctgaccacccattgcgactcctactgggtcgaaatggcgagtttacaggtgtttgaaaagatgcacaggatggacctgtcagaaagagcgaaggacgaggtccgagaggcagcattaaaatctttcaacaagcgcaagccactgtccctcgcattcaccgaaacaaaagggaacgtaatatgcttggggaaagaagtcttcaaggggaagaagccagacaaagacaataggtgccggtacatcttaaaaacaaaattccgagaaatgtggaagtcgtggcctggagacagcaaagaagtgcaggtgatggctgaacgctacaagatgctgatcccattttccaacccccgtgtgctgcccggacctttttcctatacggtcgttttgtatggccccgctgggttggggaagaccacactggcgcaaaagctcatgctggactgggcagaagataaccttattcacaaattcaaatacgctttctatctgagttgccgcgaactctcaaggttggggccgtgcagttttgctgagctggtgtttagggactggccagaactccaagatgatatccctcatattttggcccaggcccgcaagatcctctttgtgatcgacggttttgatgagcttggcgccgctccaggagccttgattgaggacatttgcggcgactgggagaagaagaaacctgtgccagtgctcctcggctcacttctcaatcgggtcatgctgccaaaagccgcccttcttgtaaccacgcgcccacgagccctgagggatcttcgaatcctcgcagaggaaccaatctatataagggtagagggatttctcgaggaggacagacgggcttatttcctccggcactttggagatgaggaccaggcaatgagggctttcgagttgatgaggtctaacgcggcacttttccagttagggtcagctcctgccgtgtgttggatcgtctgcactacactcaagctgcagatggagaagggagaggatcctgtgcctacctgtctgacccggaccggtctattcttgcgattcttatgttcaaggtttccacaaggggctcagttgcgaggggcgttgagaactctgtcgctcctcgcagcccagggactctgggctcagacaagcgtgttgcaccgcgaggatctcgaaagattgggcgtgcaggaatccgatcttaggctgtttttagatggtgacatcctgagacaggaccgggtgtcaaaaggttgctacagctttatccacctcagcttccaacagtttctgactgcactgttctacacgctcgaaaaagaagaggaggaggaccgagacgggcatacttgggacattggggatgtacaaaaactgttgagtggcgtggagaggctgcgaaaccccgatctgatacaagccggatactacagcttcggactcgctaatgagaagcgggcaaaagagctggaagcaacattcggctgtagaatgagcccggacataaaacaggaattgttgcgctgtgatataagctgtaaaggaggccactctacggtgactgatctccaggagctacttggttgtctgtatgagagccaggaggaagagttggtgaaagaggtgatggctcagtttaaagagatttcactgcatcttaatgctgtggatgtggtgccaagttctttttgtgtcaagcactgccgaaatctacagaaaatgtccctccaggtcatcaaggaaaatttgccagaaaacgtcaccgcttctgagagcgatgccgaggtcgagagaagccaggacgatcaacacatgcttccgttctggaccgacctctgtagtatttttggcagcaataaagatctgatgggcctagctattaacgactcattcctgtccgcttctcttgtccggattctgtgtgaacaaatcgctagcgacacttgtcaccttcagcgggtggtcttcaagaacatatcacccgccgacgcccatcgtaatctgtgccttgctttgaggggccataagactgtcacgtacttaactcttcaggggaatgaccaggacgacatgtttccagctctgtgtgaggtcttgaggcaccccgagtgtaacttacgttaccttggcctggtgagctgctccgcaacaacgcagcagtgggctgatttgtcgctcgccctggaggtgaaccagagcctgacgtgcgttaacctgtcagacaacgagctcctcgatgaaggagccaagctgctctataccacattgcgacatcctaagtgttttctacaaagactgtccctagaaaactgccacttaacggaagccaactgcaaagatctggctgccgtcctcgtggtttcccgcgaattgacgcacctttgtctggcaaagaaccccattggtaacacaggggtaaaattcctatgtgaagggctgaggtacccagagtgcaagctgcaaacgctggtcctgtggaactgcgacatcacctccgatggttgttgcgacctgactaagcttttacaagagaagagctccttactgtgtttagacctgggtctgaatcatattggcgtgaaagggatgaagtttttgtgcgaggctcttaggaaacccctctgtaatttgcgctgcctgtggctctggggctgttccatccccccatttagttgtgaggatttatgtagcgctttatcctgtaaccagtcacttgtgacattggatctggggcagaaccctctcgggtcttccggcgtaaaaatgttattcgaaacactgacctgtagtagcgggacgctgcgcacgctgaggctgaagatagatgactttaatgacgaattgaataagttactggaggagatcgaggagaagaatccgcaacttattattgacactgagaagcaccatccatgggccgaacgtccaagctctcatgacttcatgatttag

SEQ ID NO: 69078 - DNA, 465 bp, Artificial Sequence
  derived and/or modified sequence
atggtatcctcggcccagatgggtttcaaccttcaggccctcttagaacagctgtctcaggatgaactgtcaaaatttaagtatctgattacaaccttctctcttgctcatgagttgcagaagatccctcacaaggaggttgacaaagctgacggcaaacagctggtggagattctgaccacccactgcgattcatactgggtggaaatggcttcactgcaggttttcgagaagatgcaccggatggatttgagcgagagggccaaggatgaggtgcgagaggcggccctcaaatcatttaacaaacgaaaacccctgagtttaggcatcaccagaaaggagcggcccccacttgatgtggatgagatgctggagcgctttaagactgaggcacaggcatttacggagaccaaggggaatgttatttgtctcggcaaggaagtattcaaagggaaaaagccatag

SEQ ID NO: 69079 - DNA, 3189 bp, Artificial Sequence
  derived and/or modified sequence
atggtgtcctccgcacagatgggctttaatctgcaggccctgctggaacagctcagccaggacgagttatccaaatttaagtacctgattaccacgttcagtttggcacatgaactccaaaagattccccacaaagaagtcgacaaggccgatgggaagcagctggtggaaattctgaccacacattgcgactcatattgggtggagatggctagcctgcaagtattcgaaaaaatgcaccggatggacctttccgagagggctaaagatgaggttcgggaagcagctttaaagtccttcaataagagaaaaccattgagcctgggaattactcgtaaagagcggccccctctggatgtggacgagatgttagaaagatttaaaacagaggctcaggccttcaccgaaaccaaggggaatgtgatctgcttgggtaaggaggtattcaagggaaagaagcctgacaaagacaatcgctgtcgttatattctgaaaactaagttcagggagatgtggaagagctggcctggcgacagcaaggaggttcaagtaatggccgagcggtacaagatgctcatccccttttcaaacccccgtgttttgcctggaccgttctcctacacagtggtcctctacggtccagccggtcttggaaagactaccttggctcagaaactgatgttagactgggcagaagataacctgatacataagttcaagtatgccttctatctaagctgccgcgaactgtcacggcttggaccatgttcattcgccgagctagtctttcgcgattggccagagcttcaggatgacattccacatatactggcccaggctagaaagatcctgtttgtcatagatgggttcgatgaattgggcgctgctccaggtgccctgattgaggacatctgcggagactgggagaagaagaaaccagtgcctgttctgctggggtcactccttaaccgggtgatgcttcctaaggcagcactgctggtgacaaccaggccccgggcactgagggatctccgaattcttgccgaagaacctatctatattcgcgtggaaggatttcttgaagaagataggagggcatactttttgcgacactttggcgacgaggaccaagctatgagggcatttgagctgatgcgcagcaacgctgcattgttccagttgggcagcgctccagccgtttgctggattgtttgcacgaccctgaaattgcagatggagaagggtgaagaccccgtgcccacgtgtttgactcggaccgggctgttcctgagattcttgtgcagcaggttcccccagggcgcacagctccgcggcgccctgcgcacgctttcccttttagctgcacagggcctctgggcccagacttctgtgttgcatagagaggacctcgagcggttgggggtccaggagtccgatctgaggctatttctggatggggatattctgcgtcaggatagagtgagtaaagggtgctattcttttattcatttgagcttccagcagttcctgactgcactgttctacaccctggagaaagaggaggaagaagatagagatggccatacttgggatatcggggatgtccagaagctgttgagtggagtcgagcgcctaagaaaccctgacctaatccaagcaggatattactctttcggtctggctaatgagaaaagagccaaggagttggaggccacctttggctgtagaatgagccctgatattaaacaagaattactgcgctgcgacatttcctgcaaaggagggcattcaaccgtgactgatttacaggagctattgggatgcctgtatgagtcacaggaggaagaactggtcaaggaagtgatggctcaatttaaagagatttccttacaccttaatgccgttgatgtagtgccctcgtcgttctgcgtgaagcactgtcggaacctgcagaaaatgtctttacaagtaatcaaggaaaaccttcccgaaaatgtaaccgcctccgagtcagacgccgaggtggagaggagccaggacgaccaacacatgctgcctttctggacagatctatgctccattttcggttctaacaaagatctaatgggtctggcaatcaacgattccttcctctcagcaagcctagttcggattctgtgcgaacagattgcctcggacacttgtcatttgcaacgagtcgtcttcaagaacattagcccggcagacgctcaccgaaacctctgcctcgcgctgcgtgggcataagacagtgacatacctgaccttacagggaaacgatcaggacgacatgtttccggcattgtgcgaggtcctgcggcaccctgaatgcaatcttagataccttgggctggtgtcttgcagcgcgactacacagcagtgggctgacctttcactggccttggaagtcaatcagtccctcacctgcgtgaacctctccgacaacgagttgctcgacgagggcgcaaagttactttatacgacgctcaggcatcccaagtgtttcctgcaacgactgtctctggaaaattgccacctcactgaagcgaactgcaaggatctggctgctgtcttagttgtctcaagagagttgactcacctctgccttgccaagaacccaatcggcaataccggcgtgaaatttctgtgcgaaggactccgctacccggagtgcaagttgcaaaccctcgtcctatggaactgtgatattacatcagatggctgctgtgatctcacgaaattgctgcaggagaagagtagcctgttgtgcttggatttagggctcaatcacatcggggtgaaaggtatgaagtttctctgcgaggcattgcgcaaacctctctgcaatctaagatgtctgtggctttggggttgtagcataccacctttcagttgtgaggatctgtgctccgctctaagctgcaatcaaagcttggtgactctcgatttggggcagaacccattgggtagctctggggtcaaaatgttattcgaaacccttacatgtagctcagggactttgcgcactttgcggctgaagattgacgatttcaacgatgagctgaacaaactgctcgaggagatagaggagaagaatccccagctaatcattgatactgaaaagcaccatccctgggctgagagaccatcgtcgcacgattttatgatctag

SEQ ID NO: 69080 - DNA, 3117 bp, Artificial Sequence
  derived and/or modified sequence
atggtgtcctccgcacagatggggttcaatcttcaggccctgctcgaacagctcagccaggacgagctgagtaaattcaagtatctaattacaacgttctcgctggcacatgaactccagaagataccacataaagaagttgataaggccgacggcaaacagctggtggagattttgactacacattgtgatagctattgggtggaaatggcgtccctacaagtgttcgaaaaaatgcatcgcatggacttatctgagcgcgcgaaggatgaggtgagggaagccgcccttaaatcattcaacaaacggaaacctctgagcctggcgtttaccgagacaaaaggtaatgtgatctgtctgggtaaagaagtatttaaaggtaagaaacccgataaagataatcgctgccggtacatcttgaagaccaaattccgcgagatgtggaaatcatggcccggggatagtaaggaagtgcaagtgatggccgagaggtataagatgctgattccgttctctaaccccagagtcttgcccggcccattcagttacactgttgtcctctacggcccagccggcctcgggaagactacactggcccagaagttgatgctggactgggcagaggacaacctgatccacaaatttaagtacgctttttacctatcgtgccgagagctgtctcgactgggcccgtgttcgttcgcagagctagtgttccgggattggccggaactccaggacgatattcctcatatacttgcacaagcacggaagatactgtttgtaattgatgggtttgacgagttaggcgcggcacctggggccctcatcgaagacatatgtggcgactgggagaagaagaagccagttcccgtactgctgggttcattgctgaatagagtgatgttaccgaaggctgccctcttggtgacgacacgaccgcgcgccctacgagacctaaggatactggccgaagagcccatctatattagggttgagggcttcctggaagaagacagaagggcttacttcctgaggcacttcggcgacgaggatcaagctatgagagccttcgagctaatgaggtctaatgcagctctctttcaattagggagcgcgcccgctgtctgttggattgtctgcacgaccttgaaactgcagatggagaaaggcgaagatccggtgccaacgtgcttgacccgaacaggactgtttttgagatttctgtgttctagattccctcagggcgctcagctgcgcggcgcattgagaacactgagcttgctggccgcccaaggcctgtgggctcaaacatccgtgctccaccgagaggacctggagaggttgggcgtgcaggaatccgatctcaggctgttcttggatggagacatccttagacaggacagggtctctaagggatgttacagcttcattcacctgagtttccagcaattccttacggcactcttctatacgctcgagaaggaagaggaggaagatcgtgacggacatacctgggacatcggagatgtgcaaaaacttctgtctggagtcgagaggctgcgcaatcccgacttaattcaggctggatactactcatttggtctggccaacgagaaacgcgcaaaggagcttgaggctacctttggttgtagaatgtccccggatatcaaacaggaactgctgagatgcgatatatcctgcaaggggggacatagcaccgtaactgatcttcaggagctgttgggatgcctctatgagagccaggaagaggagctggtgaaggaagtaatggcccagttcaaggagatatcactgcatctgaacgccgtcgacgtggtgcctagttcattctgcgtcaaacactgccgcaacttgcagaaaatgtctctacaggtcattaaggaaaatcttcccgaaaatgtcactgcctcagagtccgatgccgaagtcgagcgaagtcaggatgaccagcacatgctgccattctggactgacctgtgcagcatcttcggctccaataaagatctgatgggcctcgccatcaatgacagttttctctccgcctccctggtgcgcattttgtgtgagcagatcgctagcgacacgtgtcacctgcagcgagtcgttttcaagaacatcagccccgcagacgcacatagaaatttgtgccttgctctccggggccacaagaccgtcacctacttaaccctgcagggaaatgaccaggacgacatgtttcccgccctttgcgaagtgctacgccatccagagtgtaacctcaggtacctgggactggtttcttgcagcgccacaacacaacaatgggcggatttaagtctggcgctggaggtgaaccaaagtctgacatgtgtcaacttgtccgataatgaactcctggacgagggtgccaagctactgtacacgactctgaggcatcccaagtgcttcctccagagactctcgctggaaaattgtcacctgacggaagcaaattgcaaagacttagctgcggtgctggtcgtatctagagagctgactcacctgtgtctggctaaaaaccctatcggtaacacaggagtaaagttcctgtgcgaggggttgcggtacccagaatgcaagttgcagacgctcgtcctgtggaactgtgacataacatccgacggatgttgcgaccttaccaagctgttgcaggagaagagttccctcctttgtctggacctagggctgaatcacatcggagttaagggcatgaaatttctgtgtgaagctctgcggaagccactgtgtaacctccggtgcctctggttgtggggatgctctattcccccattttcttgtgaggatctgtgcagtgctttgtcatgtaatcagagccttgtgactctcgatttggggcagaatccactgggttcaagcggagttaagatgctcttcgaaaccttgacctgctcaagtggtactttgcgcactttgcgtctcaagattgacgattttaacgatgagctgaacaagttgctcgaggagattgaggaaaagaacccacagctcatcatagatactgaaaaacaccatccctgggccgaacgcccgtctagccacgatttcatgatctag

SEQ ID NO: 69081 - DNA, 3189 bp, Artificial Sequence
  derived and/or modified sequence
atggtcagttctgcacaaatggggtttaatcttcaggccctgcttgagcagttaagtcaggatgagctgtcaaagtttaaatatctcattactaccttctccttggcccacgagctgcaaaaaattccacataaagaagtagataaagcagatggcaagcaactggtcgagattctgactacgcattgcgacagttactgggtggaaatggcatctctgcaggtgttcgaaaagatgcataggatggacctttcggagcgggcaaaagatgaggttcgggaagcagctttgaagagtttcaacaaacgcaagccacttagcctagggataactagaaaagaacgtcctcctctggatgttgatgaaatgctggaaaggttcaaaactgaggcacaggccttcacggaaacaaaaggcaatgtgatttgcctcgggaaagaggtattcaaggggaaaaaacccgacaaggataatcgatgccgctatatcctgaagactaaattccgagagatgtggaagtcttggccaggtgatagcaaggaagtgcaagtcatggctgaacgctacaagatgctcatcccatttagcaatccccgagtattgcccggccctttttcatacaccgttgtcctttatgggcccgctggtttgggcaagacaactctcgctcaaaaattgatgctggactgggcagaagataatctaatccacaaattcaaatacgctttctatctctcttgtcgcgagctgagtcgcttaggtccctgctcttttgcagagcttgttttccgcgattggccggagctgcaggacgacatcccccatattctggcccaggcccgcaagatcctgttcgtcatagatggctttgatgaattaggcgcagctccaggggccctgatcgaggacatttgtggggactgggaaaaaaaaaagcccgtgccagtattgctcggcagtttactgaatcgcgtcatgttgcctaaggcggcactgctggttactacccggcctagggccctgcgggacttacgaattctcgccgaggaacctatatacattcgcgtagagggctttctggaggaggatcggagggcgtattttctaaggcactttggcgatgaagatcaggccatgcgcgcttttgagctgatgcggtcaaatgccgccctgttccagctcggatctgcccccgccgtgtgctggatcgtctgcaccactctgaagttgcagatggagaaaggggaagacccagtccctacatgcctcacccgaaccggcctattccttagatttctatgtagcagattcccgcagggggcccagctacgaggcgcccttagaaccctctcactgcttgccgcccagggactgtgggcccagacctctgtgctgcacagggaggatctggaaaggctgggcgtgcaggaatccgacctcaggctgtttctagacggcgatatcctcaggcaggacagagtctcaaagggatgctacagctttatccacctttccttccagcagtttctgacggccctgttctacacgctggagaaagaagaggaggaggaccgggacggccacacctgggacatcggtgacgttcagaagcttctgtctggcgtggaaaggctgagaaacccagatttaatccaggctggatactatagttttggtctggcgaatgaaaaacgcgcaaaagaactggaggccaccttcggttgccgcatgagccctgacataaaacaggagttactgagatgtgatataagctgcaaggggggacatagtaccgtgactgacctccaggagctgctcggttgtctgtacgagtcccaggaagaagagcttgtgaaagaggtgatggctcagttcaaagaaatatcacttcatctgaatgcagtcgatgtagtaccgtcttccttctgtgttaagcactgccgcaatctccagaagatgtcacttcaagtaatcaaggagaatttgcctgaaaacgtaaccgcatctgagtcagacgcagaggtggaaaggtctcaagatgatcaacacatgctgcctttctggaccgatctgtgcagtattttcggctctaataaggacttaatgggccttgccatcaacgattctttcctctcagcctcattggtgaggattctctgcgagcagatagcgagtgatacctgccaccttcagcgagtagtgtttaaaaacatcagcccggccgatgcacaccgtaacctgtgtctggctttgcgcggccataagacagtgacatacctcaccctacagggcaatgatcaggacgatatgtttcctgctctgtgtgaggtgctgaggcacccggaatgcaacctgagatacctaggcctcgtgagttgttctgccactacccagcagtgggctgacctctcccttgccttggaggtgaaccagtcgttgacctgtgtaaacctgtcagacaatgagctcctcgatgaaggagccaagcttctctacaccacccttagacacccaaaatgcttcctacagcgactcagcctggaaaactgccacttaacagaggcaaactgcaaagaccttgccgccgtcctggtcgtcagtagagaactcacccatctgtgcctggccaaaaacccaattgggaatacaggggtgaagttcttgtgtgaaggcctaaggtaccctgaatgtaagcttcagactctcgtgttatggaactgcgacattacttcggatgggtgttgtgacctaacaaaactgttgcaggaaaagtcaagtttgctctgcctcgatctcgggctcaatcacatcggggttaagggcatgaaattcctctgtgaagcgctccggaagcccctttgtaacctgaggtgcctgtggctgtgggggtgcagtattcccccattctcctgtgaagatctctgctcagcactcagctgtaaccagagcttggttactctcgacctggggcagaacccgctgggttcatcaggggttaaaatgctttttgagaccctcacttgcagcagtggcacacttagaactctccgattaaaaatagatgacttcaacgacgaactaaataaattattagaggagatcgaagagaagaacccacagctgataatcgatactgagaaacaccacccctgggcggaacgcccctcctctcatgatttcatgatctag

SEQ ID NO: 69082 - DNA, 3117 bp, Artificial Sequence
  derived and/or modified sequence
atggtgagcagcgcccagatgggcttcaacctgcaggccctgctggagcagctgagccaggatgagctgagcaagttcaagtacctgatcaccaccttcagcctggcccacgagctgcagaagatcccccacaaggaggtggacaaggcagatggcaagcagctggtggagatcctgaccacccactgtgacagctactgggtggagatggccagcctgcaggtgtttgagaagatgcacaggatggacctgtctgagcgggccaaggatgaggtgcgggaggccgccctgaagagcttcaacaagaggaagcccctgagcctggccttcacagagaccaagggaaatgtcatctgcctgggcaaggaggtgttcaagggcaagaagccagacaaggacaaccgctgccgctacatcctgaagaccaagttccgggagatgtggaagtcctggccaggggacagcaaggaggtgcaggtgatggccgagcgctacaagatgctgatccccttcagcaacccccgggtgctgcccggccccttctcctacacagtggtgctgtatggccctgctggcctgggcaagaccaccctggcccagaagctgatgctggactgggccgaggacaacctgatccacaagttcaagtatgccttctacctgagctgccgggagctgagccggctgggcccctgcagctttgctgagctggtgttccgggactggccagagctgcaggatgacatcccccacatcctggcccaggccaggaagatcctgtttgtgattgatggctttgatgagctgggcgccgcccctggggccctgattgaggacatctgtggggactgggagaagaagaagcctgtgcctgtgctgctgggcagcctgctgaacagagtgatgctgcccaaggccgccctgctggtgaccacccggccccgggccctgcgggacctgcgcatcctggccgaggagcccatctacatccgggtggagggcttcctggaggaggaccggcgggcctacttcctgcggcactttggagatgaggaccaggccatgagggcctttgagctgatgaggagcaatgctgccctcttccagctgggcagcgccccagctgtgtgctggatcgtgtgcaccaccctgaagctgcagatggagaagggggaggaccctgtgcccacctgcctgaccaggacaggcctcttcctgcgcttcctgtgcagccgcttcccccagggcgcccagctgcggggggccctgcggaccctgagcctgctggccgcccagggcctgtgggcccagacctctgtgctgcaccgggaggacctggagcggctgggcgtgcaggagagtgacctgcggctcttcctggatggagacatcctgcggcaggacagagtgtccaagggctgctacagcttcatccacctgtccttccagcagttcctgacagccctcttctacaccctggagaaggaggaggaggaggacagagatggccacacctgggacattggagatgtgcagaagctgctgagcggcgtggagcggctgaggaacccagacctgatccaggccggctactacagctttggcctggccaatgagaagagggccaaggagctggaggccaccttcggctgcaggatgagcccagacatcaagcaggagctgctgcgctgtgacatcagctgcaagggcggccacagcacagtgacagacctgcaggagctgctgggctgcctgtatgagagccaggaggaggagctggtgaaggaggtgatggcccagttcaaggagatcagcctgcacctgaatgctgtggatgtggtgcccagcagcttctgtgtgaagcactgcaggaacctgcagaagatgagcctgcaggtgatcaaggagaacctgcctgaaaatgtgacagccagcgagagtgatgctgaggtggagaggagccaggatgaccagcacatgctgcccttctggacagacctgtgcagcatcttcggcagcaacaaggacctgatgggcctggccatcaatgacagcttcctgagcgccagcctggtgcgcatcctgtgtgagcagatcgccagtgacacctgccacctgcagagggtggtgttcaagaacatcagccctgcagatgcccacaggaacctgtgcctggccctgcggggccacaagacagtgacctacctgaccctgcagggcaatgaccaggatgacatgtttcctgccctgtgtgaggtgctgcggcaccctgagtgcaacctgcgctacctgggcctggtgtcctgcagcgccaccacccagcagtgggccgacctgagcctggccctggaggtgaaccagagcctgacctgtgtgaacctgagtgacaatgagctgctggatgaaggagccaagctgctgtacaccaccctgcggcaccccaagtgcttcctgcagaggctgagcctggagaactgccacctgacagaggccaactgcaaggacctggccgctgtgctggtggtgtcccgggagctgacccacctgtgcctggccaagaaccccatcggcaacacaggagtgaagttcctgtgtgagggcctgcgctacccagagtgcaagctgcagaccctggtgctgtggaactgtgacatcaccagtgatggctgctgtgacctgaccaagctgctgcaggagaagagcagcctgctgtgcctggacctgggcctgaaccacatcggcgtgaagggcatgaagttcctgtgtgaggccctgaggaagcccctgtgcaacctgcgctgcctgtggctgtggggctgcagcatcccccccttcagctgtgaggacctgtgcagcgccctgagctgcaaccagagcctggtgaccctggacctgggccagaaccccctgggcagcagtggagtgaagatgctgtttgagaccctgacctgcagcagcggcaccctgcggaccctgcggctgaagattgatgacttcaatgatgagctgaacaagctgctggaggagattgaggagaagaacccccagctgatcatcgacacagagaagcaccacccctgggccgagcggcccagcagccatgacttcatgatctag

SEQ ID NO: 69083 - DNA, 465 bp, Artificial Sequence
  derived and/or modified sequence
atggtgagcagcgcccagatgggcttcaacctgcaggccctgctggagcagctgagccaggatgagctgagcaagttcaagtacctgatcaccaccttcagcctggcccacgagctgcagaagatcccccacaaggaggtggacaaggcagatggcaagcagctggtggagatcctgaccacccactgtgacagctactgggtggagatggccagcctgcaggtgtttgagaagatgcacaggatggacctgtctgagcgggccaaggatgaggtgcgggaggccgccctgaagagcttcaacaagaggaagcccctgagcctgggcatcaccaggaaggagcggccccccctggatgtggatgagatgctggagcgcttcaagacagaggcccaggccttcacagagaccaagggaaatgtcatctgcctgggcaaggaggtgttcaagggcaagaagccctag

SEQ ID NO: 69084 - DNA, 3189 bp, Artificial Sequence
  derived and/or modified sequence
atggtgagcagcgcccagatgggcttcaacctgcaggccctgctggagcagctgagccaggatgagctgagcaagttcaagtacctgatcaccaccttcagcctggcccacgagctgcagaagatcccccacaaggaggtggacaaggcagatggcaagcagctggtggagatcctgaccacccactgtgacagctactgggtggagatggccagcctgcaggtgtttgagaagatgcacaggatggacctgtctgagcgggccaaggatgaggtgcgggaggccgccctgaagagcttcaacaagaggaagcccctgagcctgggcatcaccaggaaggagcggccccccctggatgtggatgagatgctggagcgcttcaagacagaggcccaggccttcacagagaccaagggaaatgtcatctgcctgggcaaggaggtgttcaagggcaagaagccagacaaggacaaccgctgccgctacatcctgaagaccaagttccgggagatgtggaagtcctggccaggggacagcaaggaggtgcaggtgatggccgagcgctacaagatgctgatccccttcagcaacccccgggtgctgcccggccccttctcctacacagtggtgctgtatggccctgctggcctgggcaagaccaccctggcccagaagctgatgctggactgggccgaggacaacctgatccacaagttcaagtatgccttctacctgagctgccgggagctgagccggctgggcccctgcagctttgctgagctggtgttccgggactggccagagctgcaggatgacatcccccacatcctggcccaggccaggaagatcctgtttgtgattgatggctttgatgagctgggcgccgcccctggggccctgattgaggacatctgtggggactgggagaagaagaagcctgtgcctgtgctgctgggcagcctgctgaacagagtgatgctgcccaaggccgccctgctggtgaccacccggccccgggccctgcgggacctgcgcatcctggccgaggagcccatctacatccgggtggagggcttcctggaggaggaccggcgggcctacttcctgcggcactttggagatgaggaccaggccatgagggcctttgagctgatgaggagcaatgctgccctcttccagctgggcagcgccccagctgtgtgctggatcgtgtgcaccaccctgaagctgcagatggagaagggggaggaccctgtgcccacctgcctgaccaggacaggcctcttcctgcgcttcctgtgcagccgcttcccccagggcgcccagctgcggggggccctgcggaccctgagcctgctggccgcccagggcctgtgggcccagacctctgtgctgcaccgggaggacctggagcggctgggcgtgcaggagagtgacctgcggctcttcctggatggagacatcctgcggcaggacagagtgtccaagggctgctacagcttcatccacctgtccttccagcagttcctgacagccctcttctacaccctggagaaggaggaggaggaggacagagatggccacacctgggacattggagatgtgcagaagctgctgagcggcgtggagcggctgaggaacccagacctgatccaggccggctactacagctttggcctggccaatgagaagagggccaaggagctggaggccaccttcggctgcaggatgagcccagacatcaagcaggagctgctgcgctgtgacatcagctgcaagggcggccacagcacagtgacagacctgcaggagctgctgggctgcctgtatgagagccaggaggaggagctggtgaaggaggtgatggcccagttcaaggagatcagcctgcacctgaatgctgtggatgtggtgcccagcagcttctgtgtgaagcactgcaggaacctgcagaagatgagcctgcaggtgatcaaggagaacctgcctgaaaatgtgacagccagcgagagtgatgctgaggtggagaggagccaggatgaccagcacatgctgcccttctggacagacctgtgcagcatcttcggcagcaacaaggacctgatgggcctggccatcaatgacagcttcctgagcgccagcctggtgcgcatcctgtgtgagcagatcgccagtgacacctgccacctgcagagggtggtgttcaagaacatcagccctgcagatgcccacaggaacctgtgcctggccctgcggggccacaagacagtgacctacctgaccctgcagggcaatgaccaggatgacatgtttcctgccctgtgtgaggtgctgcggcaccctgagtgcaacctgcgctacctgggcctggtgtcctgcagcgccaccacccagcagtgggccgacctgagcctggccctggaggtgaaccagagcctgacctgtgtgaacctgagtgacaatgagctgctggatgaaggagccaagctgctgtacaccaccctgcggcaccccaagtgcttcctgcagaggctgagcctggagaactgccacctgacagaggccaactgcaaggacctggccgctgtgctggtggtgtcccgggagctgacccacctgtgcctggccaagaaccccatcggcaacacaggagtgaagttcctgtgtgagggcctgcgctacccagagtgcaagctgcagaccctggtgctgtggaactgtgacatcaccagtgatggctgctgtgacctgaccaagctgctgcaggagaagagcagcctgctgtgcctggacctgggcctgaaccacatcggcgtgaagggcatgaagttcctgtgtgaggccctgaggaagcccctgtgcaacctgcgctgcctgtggctgtggggctgcagcatcccccccttcagctgtgaggacctgtgcagcgccctgagctgcaaccagagcctggtgaccctggacctgggccagaaccccctgggcagcagtggagtgaagatgctgtttgagaccctgacctgcagcagcggcaccctgcggaccctgcggctgaagattgatgacttcaatgatgagctgaacaagctgctggaggagattgaggagaagaacccccagctgatcatcgacacagagaagcaccacccctgggccgagcggcccagcagccatgacttcatgatctag

SEQ ID NO: 69085 - DNA, 3420 bp, Artificial Sequence
  derived and/or modified sequence
caacctgcagccctcatctccgccggcgagtagggccaggtgttgggagctcccacgtgggacaagatggtgtcttcggcgcagatgggcttcaacctgcaggctctcctggagcagctcagccaggatgagttgagcaagttcaagtatctgatcacgaccttctccctggcacacgagctccagaagatcccccacaaggaggtagacaaggctgatgggaagcaactggtagaaatcctcaccacccattgtgacagctactgggtggagatggcgagcctccaggtctttgaaaagatgcaccgaatggatctgtctgagagagcaaaggatgaagtcagagaagcagctttgaaatcctttaataaaaggaagcctctatcattagcgtttacagaaacgaaaggaaatgtcatctgcctgggtaaagaagtctttaaaggaaaaaagccagacaaagacaataggtgcaggtatatattgaagacgaagttccgggagatgtggaagagctggcctggagatagcaaagaggtccaggttatggctgagagatacaagatgctgatcccattcagcaaccccagggtgcttcccgggcccttctcatacacggtggtgctgtatggtcctgcaggccttgggaaaaccacgctggcccagaaactaatgctagactgggcagaggacaacctcatccacaaattcaaatatgcgttctacctcagctgcagggagctcagccgcctgggcccgtgcagttttgcagagctggtcttcagggactggcctgaattgcaggatgacattccacacatcctagcccaagcacggaaaatcttgttcgtgattgacggctttgatgagctgggagccgcacctggggcgctgatcgaggacatctgcggggactgggagaagaagaagccggtgcccgtcctcctggggagtttgctgaacagggtgatgttacccaaggccgccctgctggtcaccacgcggcccagggccctgagggacctccggatcctggcggaggagccgatctacataagggtggagggcttcctggaggaggacaggagggcctatttcctgagacactttggagacgaggaccaagccatgcgtgcctttgagctaatgaggagcaacgcggccctgttccagctgggctcggcccccgcggtgtgctggatcgtgtgcacgactctgaagctgcagatggagaagggggaggacccggtccccacctgcctcacccgcacggggctgttcctgcgtttcctctgcagccggttcccgcagggcgcacagctgcggggcgcgctgcggacgctgagcctcctggccgcgcagggcctgtgggcgcagacgtccgtgcttcaccgagaggatctggaaaggctcggggtgcaggagtccgacctccgtctgttcctggacggagacatcctccgccaggacagagtctccaaaggctgctactccttcatccacctcagcttccagcagtttctcactgccctgttctacaccctggagaaggaggaggaagaggatagggacggccacacctgggacattggggacgtacagaagctgctttccggagtagaaagactcaggaaccccgacctgatccaagcaggctactactcctttggcctcgctaacgagaagagagccaaggagttggaggccacttttggctgccggatgtcaccggacatcaaacaggaattgctgcgatgcgacataagttgtaagggtggacattcaacggtgacagacctgcaggagctcctcggctgtctgtacgagtctcaggaggaggagctggtgaaggaggtgatggctcagttcaaagaaatatccctgcacttaaatgcagtagacgttgtgccatcttcattctgcgtcaagcactgtcgaaacctgcagaaaatgtcactgcaggtaataaaggagaatctcccggagaatgtcactgcgtctgaatcagacgccgaggttgagagatcccaggatgatcagcacatgcttcctttctggacggacctttgttccatatttggatcaaataaggatctgatgggtctagcaatcaatgatagctttctcagtgcctccctagtaaggatcctgtgtgaacaaatagcctctgacacctgtcatctccagagagtggtgttcaaaaacatttccccagctgatgctcatcggaacctctgcctagctcttcgaggtcacaagactgtaacgtatctgacccttcaaggcaatgaccaggatgatatgtttcccgcattgtgtgaggtcttgagacatccagaatgtaacctgcgatatctcgggttggtgtcttgttccgctaccactcagcagtgggctgatctctccttggcccttgaagtcaaccagtccctgacgtgcgtaaacctctccgacaatgagcttctggatgagggtgctaagttgctgtacacaactttgagacaccccaagtgctttctgcagaggttgtcgttggaaaactgtcaccttacagaagccaattgcaaggaccttgctgctgtgttggttgtcagccgggagctgacacacctgtgcttggccaagaaccccattgggaatacaggggtgaagtttctgtgtgagggcttgaggtaccccgagtgtaaactgcagaccttggtgctttggaactgcgacataactagcgatggctgctgcgatctcacaaagcttctccaagaaaaatcaagcctgttgtgtttggatctggggctgaatcacataggagttaagggaatgaagttcctgtgtgaggctttgaggaaaccactgtgcaacttgagatgtctgtggttgtggggatgttccatccctccgttcagttgtgaagacctctgctctgccctcagctgcaaccagagcctcgtcactctggacctgggtcagaatcccttggggtctagtggagtgaagatgctgtttgaaaccttgacatgttccagtggcaccctccggacactcaggttgaaaatcgatgactttaatgatgaactcaataagctgctggaagaaatagaagaaaaaaacccacaactgattattgatactgagaaacatcatccctgggcagaaaggccttcttctcatgacttcatgatctgaatccccccgagtcattcattctccatgaagtcatcgattttccaggtgttggtgaactgcctgtgactcctctcctccccggcccctacccctcagggataatgagttcattgctgggctagatgttttagccatgattctgcctctgttttatacctgcacacatccttatctttgttacatatgaaatatctgtatcacgggtatattgagagaaataaaggtgagagcattcac

SEQ ID NO: 69086 - DNA, 3117 bp, Artificial Sequence
  derived and/or modified sequence
atggtgagcagcgcccagatgggcttcaacctgcaggccctgctggagcagctctcccaggacgagctgtcaaagtttaaatatctgataaccacttttagtctcgctcacgagctccagaagatcccacacaaagaggtcgataaggccgatggtaaacaattggtagaaatcttgacaacacactgcgacagctattgggttgaaatggcgtccctgcaggtgttcgagaagatgcacagaatggacctatccgagcgggccaaggacgaagtccgggaagccgcgctgaagagctttaataagcggaagcccctttcactggctttcacagaaactaaggggaatgttatttgcctcggaaaagaggtcttcaaaggaaaaaagcctgacaaagacaatcggtgtcgctacatcctgaagaccaagttccgcgagatgtggaagtcctggcctggggattcaaaagaggtccaggtaatggcagaacgctataagatgctgattccattcagcaatccaagagtccttcccggccctttctcttacaccgttgtgctgtatgggcctgccgggctcggcaagacaacgttggcacaaaagcttatgctagactgggctgaagacaacctgatacacaaatttaagtacgcattttatttatcctgcagagagctgtctagactcggtccttgcagcttcgctgagctcgtgtttcgcgactggcccgagctgcaggacgatatcccccatatcctggcccaggcccgtaaaatcctctttgtaattgatggattcgacgaattgggggccgctcccggggccctgattgaggacatatgtggcgattgggagaagaagaagccagttcccgtgttattaggttccctcctgaacagagtgatgctccctaaggccgcactgttggtgaccacccgtccacgtgctctgcgggatttacgcatcctggcggaagaacctatatatatacgagtggagggattcttagaagaggacaggcgagcatacttcctccgccactttggtgacgaggaccaggctatgagggctttcgagcttatgaggtccaacgctgccctttttcaactgggcagtgcacctgctgtttgctggatagtgtgcaccacgctcaagctgcagatggagaaaggtgaggatcccgtgccaacttgtctaacacgcacagggctgttccttcggttcctgtgtagtaggtttccgcagggtgcccagctccggggagcactgaggacgttgagcctactggcagcgcagggtctgtgggcacagacgtcggtgctccatcgtgaggacctcgaacgactgggcgtgcaggaatctgatcttagactctttctcgacggcgacatcctgcgacaggaccgggtgtctaaggggtgttactcattcattcatctttcttttcagcagttcttgacagccctgttctatactttggagaaagaagaagaagaagatagggacggacatacttgggacattggcgacgtacagaaacttctgtccggggtggagcggttgcggaaccccgatttaattcaagcagggtactattctttcgggcttgctaatgaaaagcgagccaaggaactcgaggctacatttggctgcaggatgtcacctgatataaagcaggaattattgcggtgcgacatctcatgtaagggcggccacagcacagtaacagatcttcaggagttactggggtgcctgtacgaatcacaggaggaggagctggtcaaggaagtcatggcacagttcaaagagatcagcctacatcttaatgccgtggacgttgtgccgagctccttttgtgtgaagcattgccgcaaccttcagaagatgagcctccaagtgattaaagaaaacctgcccgaaaacgtcactgcctctgaaagtgatgccgaagtggagagaagtcaggacgaccagcatatgcttccattctggacagacttgtgctccatcttcggatcaaacaaggacttgatgggcctagccattaatgactcatttctgtccgcgtccctggtccggatcctgtgtgagcagatcgctagcgacacatgtcacctgcagagggtggtattcaaaaacatttcaccggccgacgcgcatcggaatctatgcttggctttgcgtgggcacaaaactgtcacctatctgacacttcaaggaaatgatcaggatgacatgttccccgcactatgcgaagtcctaaggcacccagagtgtaatctgcgatatctgggtctggtgtcttgtagtgctacaacccagcagtgggcggatttaagcctggcactcgaagttaatcagtctcttacgtgcgtgaatctctcagacaatgaactcctggacgagggggccaagctgctctataccaccctgagacatcccaagtgctttttgcagaggctgagtcttgagaactgccatctgacggaagcaaattgcaaagatttagccgctgtgctggtggtgagtcgcgaactcacacacttgtgcctagccaagaatccaatcgggaatacaggtgtgaagttcctgtgcgaaggcctgcgataccccgagtgcaagttgcagaccctcgtgctttggaattgtgatatcacaagtgacggttgctgcgacctgacgaaattgctccaagaaaaaagctctttactgtgtttggaccttggattgaaccacataggagtcaaaggtatgaagtttttatgcgaggctttgaggaaaccactctgcaatctgaggtgcttgtggctgtggggatgctccattccaccatttagttgtgaggatttatgttccgccctcagctgcaatcagagtcttgtaacactggatttgggacagaaccccctgggtagcagcggtgtgaagatgctgttcgagacgctcacctgctccagtgggacattgaggaccctgcggctgaagatcgatgattttaacgatgagctaaataagctgcttgaggagatcgaagaaaagaaccctcagcttatcatcgacactgagaagcatcatccctgggctgaacgtcccagtagccacgatttcatgatctag

SEQ ID NO: 69087 - DNA, 465 bp, Artificial Sequence
  derived and/or modified sequence
atggtgagcagcgcccagatgggcttcaacctgcaggccctgctggagcagttatctcaggatgaattatcaaagttcaagtatctcatcacaactttcagcctggcccacgaattacagaagattcctcataaggaggtcgacaaggccgatggcaagcagctcgtcgagattctgaccacccactgtgactcttactgggtggagatggccagcctgcaagtttttgagaagatgcacaggatggatctgtctgaacgggccaaggacgaggtgcgggaagcagccctgaaatcattcaataaaaggaaaccattaagcctgggaattacaaggaaagaacgacccccgttggatgtggatgagatgctagaaaggttcaaaacagaggcacaggcttttactgagactaaaggaaatgtcatttgtctgggcaaagaagtttttaagggcaagaaaccctag

SEQ ID NO: 69088 - DNA, 3189 bp, Artificial Sequence
  derived and/or modified sequence
atggtgagcagcgcccagatgggcttcaacctgcaggccctgctggagcaactaagccaagacgaactgagtaaatttaaatacctgataacaaccttctctctcgctcatgaattgcagaaaatcccccacaaagaggtggataaggctgatgggaaacaactggtcgaaatactcaccacccactgcgactcctactgggtggaaatggctagcttgcaagtcttcgagaagatgcaccgtatggacctcagtgagcgagccaaagacgaagttcgcgaggcagcactgaaatcattcaataagcggaaaccactgtccctcggaattacccgtaaggagcggcctcccttggacgtggacgagatgctcgagaggttcaaaactgaagcccaagcatttactgagacgaaaggcaatgtgatttgtctggggaaggaggtcttcaagggaaagaagccagacaaggacaaccgctgcagatatattctaaagacgaaattccgcgagatgtggaagtcttggccaggcgactccaaggaggtacaagtaatggccgaaaggtacaagatgcttatcccattttctaatcctcgtgtgctccccggccctttttcgtatactgtggtattatatggtccagccggcctcggaaaaactacccttgcccagaagctgatgctagattgggccgaagacaatcttatacacaagtttaagtacgctttctatctctcttgccgagagctcagccgcctgggcccctgctctttcgctgagctggtattcagggattggcctgaactgcaggatgatattccccacattcttgctcaggccagaaagatccttttcgtaattgacggcttcgatgagctcggggcagcaccaggagccttgatcgaggatatttgcggcgactgggagaaaaaaaagccggtgcccgtactgcttggatctctgctgaacagggttatgctcccaaaagctgccttgctcgtgacaacccgcccccgcgctctgagggacctgcgcattttggcagaagagcctatttacatcagggtcgaggggtttctggaagaagatcgccgtgcatatttcctgcgccactttggtgatgaggatcaggccatgcgggcatttgagctgatgcggagtaatgcagcacttttccagttgggatccgctcctgcagtgtgctggatcgtttgtacaaccctgaagctgcaaatggaaaaaggcgaggatccggtccctacatgtcttacacggactgggctgttcctcaggttcctgtgttctaggtttccacagggagctcagttaagaggggccctgcggacactctccctgctcgccgcccagggtctgtgggcccagaccagtgtccttcaccgggaggacttggagaggttaggcgtgcaagagtctgacctgcgcctgtttctagatggcgacattctgcggcaggatcgagtctccaaaggatgctatagtttcattcatttatcttttcagcagttcctgacggctctcttctatactcttgagaaagaggaagaagaagaccgggacggccacacatgggacataggagacgtgcagaagctcttgtctggcgtggaacggctgcgaaaccctgacctgattcaagccggttactatagtttcggacttgcgaacgagaaacgggccaaggaactggaggcgacttttggctgcaggatgtcacccgacattaagcaagagcttctccgctgcgatattagttgtaagggtgggcactctacagtgactgatttgcaggagttgctcggctgcctgtatgagtctcaggaggaagagcttgtgaaagaggttatggcccagtttaaggagatctcactgcatctgaatgctgtggacgtggtcccctcaagcttttgtgtgaaacactgtcggaacctacagaaaatgtcactccaggttattaaagaaaacctgccagagaatgtgacagccagcgagagtgacgctgaggtcgagaggtctcaggatgaccagcacatgctccctttctggaccgacctgtgctcgattttcggcagcaataaggatttgatgggattggcgattaacgacagcttcctgagtgcttcgctggtcagaattctgtgcgaacaaatcgctagcgacacctgtcacttgcagcgggtagtgtttaaaaacatatcccctgcagatgcacatcgcaatttatgcctagccttgcggggtcataagacagtcacctacctgactctccagggaaacgatcaggacgacatgtttccagccctgtgtgaagttttgcgacacccagagtgtaatttgaggtaccttggacttgtatcttgctccgccacaacacagcaatgggctgatctgtcactagcacttgaggtgaatcagtctctcacctgcgttaacctgtcggacaatgagttgctagacgagggcgccaaattactgtacacgactctgaggcaccctaagtgtttcctgcaacggttatctttggaaaactgccatctgactgaggctaactgcaaggatctagcagcggtgctagtggtgtcccgagaacttacacatctatgcctggccaaaaaccccattggcaacaccggggtgaagttcttgtgcgaaggcctgaggtatccggaatgcaaattgcagactctcgtgctttggaactgcgatatcacaagcgacggatgctgtgatctgactaagcttcttcaggaaaaaagctccctcctgtgcttggatcttggcctcaatcacataggggtaaaaggcatgaaatttctttgtgaggccctacgcaaacctctgtgcaatctcagatgcctgtggctgtggggttgcagcattcctcctttctcatgcgaagatctctgcagcgctctgtcctgcaaccaatctctggtgacattagaccttggtcagaaccccttgggttcttccggggtgaaaatgctgtttgagacgctgacatgttcgagcgggaccctgcgtactctgcggctgaagatagatgattttaacgacgaacttaataagctcctggaagaaatagaggagaagaatccacaactgattattgatactgagaagcatcacccttgggcagagcgcccttcttctcacgactttatgatttag

SEQ ID NO: 69089 - DNA, 3117 bp, Artificial Sequence
  derived and/or modified sequence
atggtgagcagcgcccagatgggcttcaacctgcaggccctgctggaacagctgtctcaggatgagctgtcaaagtttaaatacctgataacaactttctccctagcacacgagcttcagaagatcccacacaaggaggtcgataaggccgatggaaaacagctggtcgaaattctgactacgcattgtgacagttactgggtggaaatggccagcttacaggtctttgagaaaatgcatcgaatggatctgtcagagcgggccaaggacgaagtccgcgaagctgccttaaaaagctttaacaaacggaagcctctgagcctggccttcaccgagaccaaaggcaatgttatatgtctggggaaagaggtcttcaaaggtaagaagcccgacaaggacaaccggtgcaggtatatcttgaaaaccaagtttcgtgaaatgtggaaatcttggccaggggattcaaaagaagtacaggtcatggccgaacggtataagatgctgattccgttttctaatcccagggttctccctggcccatttagttacacggtcgtcctgtatggacctgcaggcctcgggaaaactacccttgcccaaaagctcatgctcgactgggccgaggacaacctgatccacaagtttaaatacgcgttctacctcagctgccgggaactgtccagactagggccctgctctttcgccgaactcgtatttagggactggcccgagctccaggacgatatcccacacatattggctcaggctcggaagattctgtttgttatcgatggttttgacgaactcggggctgcccctggggcactcatcgaagacatctgcggagattgggagaagaagaaacctgttcctgtgctgctaggctcattactaaacagggtaatgctgcctaaagctgccctgcttgtcaccacgaggccacgcgccctccgggacctgagaattcttgcagaggagcctatctatatccgcgtagaggggttcctggaggaggacagaagagcatattttctgcggcactttggggatgaagatcaagccatgagagcatttgagctgatgagatccaatgcagcgctattccagctcggaagcgcacccgctgtgtgttggattgtgtgcacgaccctgaaactgcaaatggaaaagggcgaagacccagtgccgacgtgtctgacacgcaccgggttgtttctcaggttcctctgttccaggttccctcagggtgctcagcttagaggggcactgaggacactgtctctcctggccgcccagggactttgggcgcagactagtgtgcttcatcgggaggatctggagaggctgggagttcaagagtccgatctgcgcctctttctggatggagacatcttacgccaggatcgcgtgtcaaaaggatgttactctttcatccacttgtctttccagcaattcctgacagcactgttctacaccctggagaaggaggaagaagaagatcgtgacgggcacacatgggacataggagacgtgcaaaagctgctctcgggtgtggaacggctaaggaaccctgacctcatccaggctggttattattctttcggattggccaacgaaaaaagggctaaggaattggaagcaacctttggatgccggatgtctccagatattaaacaggaattattgcgatgtgacatcagttgtaagggtggtcactcaaccgtgacagatctgcaggagctccttgggtgcttgtatgaatcccaggaggaagaactggtgaaggaagtcatggcgcagtttaaagaaatctcgctgcatctgaacgcagtggatgttgttccgtcctcgttctgtgttaagcattgccgcaatctccagaagatgagtttacaagtgattaaggagaatttaccagagaatgtaacggcctcagagtccgacgcagaggtcgagcgctcccaggacgatcagcatatgctgccattttggactgacctgtgttcaatctttggctccaacaaggacctgatgggactggcaatcaacgactcattcttaagcgcctctctggtgcgcattctgtgcgagcaaattgcaagtgacacttgccatttgcagcgagtggtgttcaaaaatattagccctgccgacgctcacagaaacctctgtctggccttacggggtcacaaaactgttacgtacctcaccctacaaggcaatgatcaagatgacatgttccctgccctttgtgaggtgctccggcatcctgagtgcaatctgagatacctggggttagtgagttgcagtgccactacacagcagtgggccgatctctcactggccctagaggttaaccagtccctgacctgtgtaaatctgagtgacaacgagttactggacgagggcgccaagttgctctatacaacattgcgccaccccaaatgctttctgcagaggctgagcttagaaaactgtcacctgacagaggcaaactgcaaggacttggcggccgttctggtagtgagtcgggagctcacccatctttgcttagcaaaaaatcctattggaaatacgggagtgaaattcttatgtgagggcttgagataccccgaatgcaagctccagacgctcgtgctgtggaactgtgacatcactagtgacggttgctgcgatctgacaaaactcctgcaggaaaaatccagcctgctgtgccttgatctagggctcaaccatatcggagtgaaaggcatgaaattcctgtgtgaagccctgagaaagccactatgtaatcttcgttgcctgtggctctggggctgctctattccacctttctcctgcgaggatctctgcagcgcactgagctgcaatcagagcttggtgacactggatctgggccagaacccacttggaagcagtggagtcaaaatgctgtttgagactttaacttgtagctcaggaacattacggaccctgcgcctcaaaatcgacgacttcaacgatgagctcaacaagctcttagaggagatcgaggaaaaaaatcctcagctcatcatcgacactgaaaaacatcatccttgggcggaaaggccgtcatctcacgactttatgatctag

SEQ ID NO: 69090 - DNA, 3189 bp, Artificial Sequence
  derived and/or modified sequence
atggtgagcagcgcccagatgggcttcaacctgcaggccctgctggagcagctctcacaagatgaattaagtaagttcaagtacctcattacaaccttttccctggcccatgaactgcagaagattccacataaagaggttgataaagccgatgggaaacagctggtcgaaatcctgaccacacactgtgatagctactgggtcgagatggccagcctgcaagttttcgaaaaaatgcatcgcatggacctgagcgagagggcaaaggacgaagtgagagaagctgccctgaaatcattcaacaaacggaagccactgtccctgggcattacaagaaaagagaggccccccctggacgtggacgaaatgttagagcggttcaaaaccgaagctcaagcattcactgaaacaaagggtaatgtgatctgcctggggaaagaggtattcaaagggaaaaagcctgataaggacaaccgatgtagatatatcctgaagaccaagtttagagagatgtggaaatcttggcctggggacagtaaagaagtccaagtgatggctgagcgctacaagatgttgatccctttctctaaccctcgcgtcttgcccggtccatttagctacacagtggtactgtacggccctgcagggcttggcaagaccacattggctcagaaactcatgctggactgggcggaggacaatttaatccataagtttaagtacgcattctacctcagttgcagggaattgagtagacttgggccctgctctttcgcagaattagtatttcgtgattggccagaattacaagacgatattcctcacatcctggcccaggctcggaaaatcctgttcgtaatcgacggcttcgatgagctgggcgcggcgcccggtgccctgatcgaggacatttgtggcgattgggagaaaaagaagcccgtcccggttttgctcgggagtttactgaacagggtaatgctgccaaaagccgctttattggtgacaacccgaccacgggccctacgcgatctgcgcatattggctgaggaacctatttatattcgagtggaaggattccttgaagaagatcgcagagcttatttcctgaggcatttcggggacgaagatcaggctatgagggcctttgagctgatgcggagcaacgccgccctgtttcagctgggaagtgctccagctgtgtgctggattgtgtgcaccactttaaagctgcagatggagaagggggaagacccagttcctacatgtctgacaagaacggggctattcctcaggttcctctgttcaagattcccacagggcgctcaacttagaggtgccctgcgtactttgtcgttactggcagctcaggggctgtgggcccaaacatctgtcctccacagggaagatctggaaagattgggagtacaggaaagtgacttgagactgtttttggatggggatatcctgcggcaggatagggtctccaaaggctgctatagttttatacacctgtcctttcagcaattcctcaccgctcttttctatacactagagaaagaggaggaggaagacagggatgggcacacctgggacatcggggacgtccagaaactcttgagcggagttgaacggctacgaaaccccgacctgattcaagctgggtattactcctttggcttggctaatgagaagcgagctaaggagctggaggccacgtttggatgccgcatgtcacctgatattaagcaagagctcctacggtgcgacatctcctgcaaggggggccactccaccgtcaccgacctgcaagaacttcttggctgtctttatgaatcccaggaggaggagctcgtcaaggaagtcatggcacagttcaaagagatatcattacacctgaacgctgttgacgtggtaccctctagtttttgcgttaaacattgcagaaacttgcagaaaatgtctttgcaggtaataaaggaaaatcttcctgaaaatgtgacagcatcagagtcagacgccgaagtcgaacggtcccaggatgatcagcacatgctcccattttggacagatctctgttctatcttcgggtctaacaaagacttaatgggtctggcaatcaacgactccttcctgagcgcttctctggttagaatcctatgcgaacagattgcaagcgacacatgtcatctgcagagagtagtctttaagaacattagccccgccgatgcccatcgaaacttatgcctcgcccttcgaggacacaaaactgtcacctacctgacgctccagggcaacgatcaggatgacatgttcccagctttatgcgaagtgctaagacatcctgagtgtaacctcagatacctcggtctggtgagctgcagcgccactacacagcaatgggccgatctctctctggctttggaggtaaaccagtcacttacatgcgtcaacctaagcgacaacgagttactggatgaaggcgcgaaacttctctacaccacgctcaggcaccctaagtgtttcctgcaaaggctcagcttggagaattgccatctgactgaagcgaactgtaaggacctggctgccgtactggtcgtgtctagggaactgacacatctctgtttagcaaaaaacccaatcgggaacacaggggtcaaatttctctgtgaaggcctgcgatacccagagtgcaagcttcaaactctcgtcctctggaattgcgatatcacatcagacgggtgttgcgacctcaccaaactgttacaggagaagtcaagcctcttatgtctggatctgggtctaaaccacatcggggtgaagggtatgaagttcctttgcgaagcccttcgaaaacccctatgcaaccttagatgtctgtggttgtggggatgtagcatccctccttttagctgtgaagacctttgtagcgccctgtcttgtaaccagtccctcgtgacccttgacctgggccagaatccccttgggagtagcggtgtgaagatgctgttcgaaaccctgacctgcagctctggtaccctgagaaccctccggctaaagatagacgactttaacgacgaactgaacaaactgctggaagaaattgaggagaaaaatccccagctgatcatcgatacagaaaagcaccacccatgggctgagcgcccctcgagccatgattttatgatctag

SEQ ID NO: 69091 - DNA, 3117 bp, Artificial Sequence
  derived and/or modified sequence
atggtgagctctgcgcagatgggatttaacctgcaggcacttctcgagcagcttagtcaggacgagctttctaagttcaagtaccttataactacgttttctttggcacacgaactgcagaaaattccgcacaaggaagttgataaagcggacggtaagcagctggtcgagatattgacgacccactgcgattcatattgggtggagatggcatcgctccaggtcttcgagaaaatgcacagaatggatctctctgagagagcgaaggatgaagtccgagaggccgcattgaagagctttaataaaagaaagcccctgagtctggcatttaccgagaccaaggggaacgtgatctgccttgggaaagaggtcttcaaaggaaaaaaacccgataaagacaatagatgtagatacattcttaagacaaagttcagagaaatgtggaagagctggccaggcgatagtaaggaggtccaggttatggccgaacggtacaagatgctgatacctttctctaacccgcgagtactgcctggacccttctcttatactgtagtgttgtatggaccggctggactggggaagaccacacttgcccagaaactcatgctggactgggcagaggacaatctgatccacaagttcaagtacgccttttacctgagctgtcgcgaactgtctaggctcggaccctgcagttttgccgaactggtattccgggactggcctgagttgcaagatgatataccacacatcttggcacaggcgaggaagatcctgttcgtgatagatggattcgatgaactaggagctgccccaggcgctttaatcgaggatatctgcggggactgggagaagaaaaaaccagtcccagtccttctaggatcactgctcaatagggtaatgctccccaaggccgctctgctcgtgacaacacgacccagagcactgcgggatctgcgtattttggcggaggagcccatttacatcagggtggaaggctttctggaggaagacaggcgagcatacttcctgagacactttggggatgaagaccaggccatgcgggcttttgaactcatgagatcgaatgccgcattgtttcagctgggcagcgcccctgctgtgtgttggatcgtgtgcacaacactcaagctgcagatggagaaaggggaagatccggttcccacctgtctaactaggacggggctctttttgcgtttcctgtgttcccgattcccccagggtgcccagctgaggggcgctttaaggaccctttcgcttttagcggctcagggcctgtgggctcagactagtgtactccacagggaagaccttgagagactcggcgtgcaagagagcgacctcaggctcttccttgatggcgacatcctcagacaggacagagtgagtaagggctgttactcattcatacacctcagtttccagcagttcctgacagccttgttctataccctggaaaaggaggaagaggaggacagggatgggcatacttgggacatcggggatgtgcagaagttactctcgggcgtggagcgactcagaaatcctgacctgatacaggccggatactattcattcggactggctaacgagaagagggcaaaggagctcgaagctaccttcggatgccgtatgtcccccgatatcaagcaggaactcctgcgctgcgacatcagttgtaaaggaggccactccacggttactgatctccaagagctgcttgggtgcctctatgaaagccaggaagaggagcttgtgaaagaggtcatggcacagttcaaggagatcagcctccatctgaacgctgtcgacgttgtgccaagctcattctgcgtgaaacactgtcgcaatcttcagaaaatgagccttcaggttattaaagagaacctccccgagaacgtgactgcgagcgaaagcgacgcagaggttgagagatcacaggatgaccagcacatgctgcccttttggacagatctttgctctatctttggctcaaataaagacttaatgggattggcaatcaatgatagctttctgtctgcttccctggtgcgcatcttgtgcgagcaaattgcttccgatacatgtcatctccaaagagttgtgtttaaaaatatctctccagcggatgcacatcgaaacttgtgcctggctttacgagggcacaagaccgttacgtatctgacattacagggcaacgatcaagatgacatgttccccgcattgtgtgaagtgttacggcatcccgagtgtaatctccgttatttgggcctggtgagctgcagtgccacgactcagcagtgggccgatctgtctctggccttggaggtgaaccagtcattgacatgcgtgaacctgtcggacaatgagctcctcgatgaaggcgcaaaactcttatatactaccttgagacaccccaagtgcttcctgcaaagactcagtctggaaaattgtcacctgacagaagccaattgcaaggacctggccgctgttctcgtggtgagtagagagctaacccatctgtgccttgctaagaaccccatcgggaacaccggtgtgaagtttctgtgtgagggcttacgataccccgagtgtaaactccagacccttgtgttgtggaactgtgatattacttctgatggctgttgcgatttgaccaagctcctgcaagagaagtcttcactgttatgtctcgacctgggcctgaaccacattggcgtgaagggcatgaaattcctctgtgaggcgctgaggaagcccctatgcaatttgcggtgcctttggctatggggatgctcaatccctcccttctcgtgcgaggacctttgcagtgccctttcgtgcaatcaatctctggtcacacttgatctcggccaaaacccgctcggctcttctggcgtgaaaatgttatttgaaacactgacctgttcctccggcacactcaggaccttaagattaaagattgacgactttaacgatgaactgaacaaattgcttgaggaaatcgaggaaaagaatccacagttgatcatcgacaccgaaaaacaccatccatgggcagaaagaccaagttcccacgattttatgatctag

SEQ ID NO: 69092 - DNA, 465 bp, Artificial Sequence
  derived and/or modified sequence
atggtctccagcgcacagatgggctttaacttgcaagctctgctggaacagctgagtcaggatgagcttagcaaattcaaatacctgatcaccactttctctctggcacacgagctgcaaaagattccccacaaggaggttgataaggctgacggtaagcaactggtggaaatcctgacgacacactgtgattcttattgggtagagatggccagtctgcaagtctttgagaaaatgcatcgaatggacctcagtgaacgcgcaaaagacgaggttcgggaggccgcactgaaatctttcaataagcgcaaaccccttagcttgggaattaccagaaaagaacgaccaccactcgacgtggatgagatgctggagaggttcaagacggaagcccaagctttcactgaaacgaagggcaacgtgatatgtcttggaaaagaggttttcaaaggcaaaaaaccttag

SEQ ID NO: 69093 - DNA, 3189 bp, Artificial Sequence
  derived and/or modified sequence
atggtatcgtcagcacagatgggattcaacctgcaggccttgctggagcaacttagccaggatgaactgagtaagtttaagtacctgatcaccactttctccctcgctcacgagctgcaaaagatacctcacaaagaagttgacaaagctgacggtaagcagcttgtcgagatcctcaccacacattgcgattcctattgggtcgagatggccagtctgcaagtctttgagaagatgcacaggatggacctgtctgagagggctaaggatgaagtccgtgaggccgcactgaaatcctttaataaaagaaaaccgttgtctctcggaatcacacgaaaagaacgaccccctctggatgtagacgagatgctggaacggtttaagacagaagctcaagcttttacagaaacaaagggcaacgtcatttgcctgggaaaagaggttttcaaggggaagaagccagataaagacaatcgctgtaggtacattctgaagactaaattccgagagatgtggaagtcttggcccggagactctaaagaggtccaggtcatggccgaacgctacaagatgctcattcctttttcgaaccccagggtccttccgggtcccttttcatacacggtggtcctttacggccctgctggcttaggcaaaaccactctggctcagaaactcatgctggactgggccgaagataacctgattcacaagttcaaatacgccttttatctgtcgtgcagggagttgtcccggctaggcccatgtagtttcgccgaacttgtcttcagggattggcccgagctccaggatgatatcccccatattctggctcaggctagaaagatcttgtttgttatagatggtttcgacgaacttggagccgctccaggcgctctaattgaggacatatgtggcgattgggagaagaagaaaccagtgccagtactattaggaagcctacttaatagagtcatgcttcccaaagctgctctcctggtgaccacacgcccacgcgctcttagggacctgcggattctcgctgaggagccaatctacattcgggttgaagggtttcttgaagaggataggagagcatatttcttgcggcacttcggcgacgaagaccaggccatgcgtgcattcgagcttatgaggtctaacgccgcactgttccaactcggaagcgcccctgccgtctgttggatcgtatgtacaaccctgaaattacagatggaaaaaggggaggacccagtgcccacctgcttgacaaggactgggcttttcttgcgatttctgtgttctagatttccgcagggagctcagctgcgcggagccctgagaactctgtctttgcttgctgcccagggattgtgggcccagacttctgtgctgcatcgcgaagatctcgaaagactcggggtgcaggaaagcgatttacgactgtttttggacggtgatatcctacggcaggatcgtgtaagcaaggggtgttactcttttattcacctgtcatttcagcagttccttaccgcactgttttatactctcgaaaaagaggaagaagaggaccgggatgggcacacctgggacattggcgacgtgcagaagctgctcagtggggttgagcgactgaggaatcccgatctgattcaggccggatattatagtttcggactggcgaatgagaagagggccaaggaacttgaggcgacttttgggtgtcggatgagcccagacattaaacaagagctgttaagatgcgacatcagctgcaagggaggtcactccacagtgaccgatctgcaggaactgctggggtgcttatacgaaagccaggaggaagagctagtgaaggaagttatggcccaattcaaagaaatctcccttcatctcaacgcagttgatgtagttccctcctctttttgtgtcaaacactgcaggaacctgcaaaaaatgtccctgcaggtgataaaagaaaacttacccgaaaacgttacagcctccgagtcagatgctgaggtggaacgatctcaggatgaccagcatatgctccctttttggaccgatttgtgttcaatcttcggctcgaacaaagatcttatgggcctggcgattaatgactcattcctgtccgcatctctcgtccggatcctgtgcgagcagatcgcatctgacacatgccacttacagcgggttgtattcaaaaacatctcacctgccgacgcccatcgcaacttatgtttagccttacggggacacaaaactgtaacttacttgacactgcagggaaacgatcaggacgacatgttcccagccctgtgcgaagtgttgagacaccctgaatgcaatctcaggtatctgggactggtgtcttgctctgcgacaacccagcagtgggctgatctaagcctagccttggaggtgaatcagtcactcacttgcgtcaacttaagcgacaacgagctcctcgatgagggcgctaagctactttatacaacccttagacaccctaagtgcttcctgcagcgtctgtctcttgagaactgtcaccttaccgaagccaattgcaaggacctggccgctgttctcgtcgtttctcgcgagttaacacatctctgtctggccaaaaatcctatcggaaatactggggtcaaatttctctgcgagggactgaggtatccggagtgcaagctgcaaacactggtactttggaactgtgacatcactagtgatgggtgctgcgatctcacgaagttacttcaggagaaatcttccctgctctgtctggatttgggattgaatcatattggcgtgaagggcatgaaatttctctgtgaggccctgcggaaacctctatgcaacctgagatgcctatggctgtgggggtgttcaatcccccctttctcctgtgaggacctttgtagcgcacttagctgcaaccagagtcttgtgacactggatctcgggcaaaatccattgggttcgagcggggtcaaaatgctgttcgaaaccttgacatgttcttctggcacactcagaacactaagactgaagatcgatgattttaatgacgaactcaacaagctactcgaggagatcgaagagaagaacccacaactcattattgacacggagaaacaccatccttgggctgaaaggcctagttcacatgatttcatgatctag

SEQ ID NO: 69094 - DNA, 3117 bp, Artificial Sequence
  derived and/or modified sequence
atggtcagctctgcacaaatgggatttaacctgcaggcgctgctggagcagctgtctcaggatgaactgtcaaagtttaagtaccttatcactactttttctctcgctcacgagctgcagaagataccccataaggaagttgacaaggctgacggaaaacagctcgtggagattttaaccacacattgtgattcatattgggtggagatggcctcgctgcaggtgttcgaaaaaatgcacagaatggatctcagtgagagggcaaaagatgaggtgcgtgaggcagcccttaaatcttttaacaagaggaaacctctgtctctagccttcactgagaccaagggcaatgttatctgtctgggcaaggaagtgttcaaggggaaaaaaccagataaagataatcgctgccggtatatccttaagacgaaatttcgcgagatgtggaagtcttggccaggtgacagcaaagaagttcaagtaatggcagagaggtataaaatgctcatcccgttctctaatcctagagtcttgccgggtcccttttcctacacagtagtgctatacggcccagcaggcctgggcaaaaccacactggcacaaaagctgatgctagactgggccgaggacaatctgatccataaattcaaatatgccttttacttatcttgcagggagcttagtaggctcggcccttgttctttcgccgaactggtgttccgggattggcccgagctccaggatgacatcccacacatcctggcccaggccagaaaaatattatttgtaattgacggcttcgatgaactgggagctgcgccaggcgctcttatcgaagatatttgcggtgattgggaaaaaaaaaaaccagtgccagtgctcttagggtcactgttaaaccgcgtaatgctgcctaaagccgcattgctggtgaccactcgccctagagccttgcgggaccttaggatcctcgccgaggaaccaatctatatcagagtagagggatttttggaagaagatagaagggcttatttcctgagacatttcggcgacgaggatcaggccatgagagcattcgaacttatgagatccaacgctgcactctttcagcttgggagtgccccagccgtatgctggatcgtctgtaccacactgaagcttcagatggaaaaaggggaagaccctgtacccacctgcctgacaagaaccggcctcttcctccggttcctgtgctccagatttccccaaggggcacagcttagaggcgctctccgtactctgtccctgctcgcggctcagggactgtgggctcagacaagcgtgctccatcgggaagacctggaaaggctcggcgtgcaagagagcgacctgagactctttctggacggcgacatcttacggcaggaccgcgtgtcaaagggttgctacagctttatacacctctcctttcagcagttcctcaccgccttgttctacactctggaaaaggaagaggaagaggatagagatggacacacctgggatattggggacgtccagaagctgctctccggcgtggaacgcctcagaaatcctgacctgattcaagccggttattacagttttggcctggccaacgaaaaaagggcaaaagagctggaggcaacctttggctgtaggatgtccccggacattaaacaagaactgctaagatgcgatatctcctgcaagggcggacattcaaccgttacagatctccaggaactcttgggatgtctatacgagtctcaggaggaagagcttgttaaggaagtcatggcacagtttaaggaaattagtctccatctgaacgctgtggatgtcgtcccgtctagtttttgcgtgaagcactgccggaaccttcagaaaatgagccttcaggttataaaggagaatctgccagaaaacgtgacagcatcagagagcgatgcggaagtggaacgctcacaggatgatcaacacatgctgcctttttggacagatctctgttcaattttcggcagcaataaagaccttatgggtttggcaattaatgattctttcctcagtgccagtctggtgcggattctgtgcgaacagatcgcgtccgacacttgtcatcttcagagggtcgttttcaaaaatatctcacctgccgatgctcaccgaaacctgtgtctagccctgagaggacacaagaccgttacatacctcacgctgcaaggcaacgatcaggacgacatgttccccgctctttgtgaagtcttgagacaccctgagtgtaatcttcggtacctggggctcgtttcttgcagcgccactacacagcagtgggctgacttgtcgttggctcttgaggtgaaccagtctcttacttgtgtcaacttaagcgataatgagcttctggatgagggcgcaaagcttctctacactacactccggcacccaaaatgttttctgcaacgactttcccttgagaattgccatctgacagaggccaactgtaaagatctagcagcagttctcgtagtcagcagggagctgacccacctttgcctcgcaaaaaatcctatcggaaacaccggcgtcaagttcctatgtgaaggcctgcggtaccccgagtgcaagctgcagacgttagttttgtggaattgtgacatcacgagcgatgggtgctgtgacctcacaaaattgttacaagagaagtcttctctgctgtgccttgaccttggcttgaatcatattggagtgaaaggaatgaaatttctgtgtgaagctttacgcaagcctctttgcaatctcaggtgtctgtggttatggggttgtagtattcccccatttagttgcgaagacctctgcagcgcgctgtcatgtaaccaaagccttgtaaccctcgacttggggcagaatcccctggggagcagcggcgtgaaaatgctcttcgaaacgctgacatgctcaagtgggacgcttcgcactctccgccttaagatcgatgacttcaatgatgaactgaataagctcctcgaggagatcgaggagaagaacccccaactcataatcgacaccgagaaacaccacccctgggctgagcgcccttcctcccacgacttcatgatctag

SEQ ID NO: 69095 - DNA, 3189 bp, Artificial Sequence
  derived and/or modified sequence
atggtaagcagtgcgcagatggggttcaacttgcaggccttgctcgagcagttgagccaggatgagttatctaaattcaaatacttgatcaccaccttcagtcttgcccacgaacttcagaagatcccacataaagaggtcgataaagccgacggaaagcagctggtggagatcttgacgacccattgcgacagttactgggttgaaatggcctctttacaggtgttcgagaaaatgcatcggatggatctatccgagagggccaaagatgaggtccgggaagccgctctgaaatcatttaataagcgcaaacctttaagtttgggcataacccgcaaggaaaggccacctctcgacgtggacgaaatgctggagagattcaagactgaagcccaggcctttacggagaccaaaggcaacgtcatctgtttagggaaggaagtttttaaagggaagaagcctgacaaagataaccggtgcagatacatcctcaagactaagttcagagagatgtggaagtcatggcctggagactcaaaagaggtccaggtaatggccgaacgctacaagatgcttataccctttagtaacccaagggtattgcccggtccattttcctatacagtggtcctgtacggtcccgctggactaggaaagaccactctcgctcaaaaattgatgctggattgggccgaagataaccttattcacaagttcaaatatgctttctacctgtcatgcagagagctatcgcgcctaggaccatgtagcttcgccgaacttgtgtttcgggactggcctgaactgcaggatgatataccacacatcctggctcaggccagaaagatccttttcgtgatcgacggattcgatgagctgggcgcagcacctggcgctctcattgaggacatctgtggggattgggaaaagaagaagcccgtaccggtgctcctggggtcccttttgaaccgcgtgatgctgcccaaagcggctctgctggtgacaacccgcccacgggcactcagggatctgcgtatcctggcagaagagccaatctatattagagtcgaaggtttccttgaggaggacaggcgtgcttattttctcagacactttggcgatgaggatcaggcgatgcgcgctttcgaacttatgcgttcaaatgcggctctttttcagctgggctccgctccggctgtatgttggatagtgtgcacaactttaaagctgcagatggagaagggtgaggatcctgttccaacgtgcctgactagaaccggcttgtttctccgatttctttgttctaggttcccgcagggcgctcagctccgcggagcacttcgtacactgagcctgctggcagcgcaaggcctgtgggcccagaccagcgtcctgcatcgggaggacttggagcggctgggcgttcaagagtcagacctccggctgttcctcgacggtgatatcctgagacaggacagagtgtccaagggctgttactcttttattcacctgagtttccaacagtttttaacggccctattctacacactggaaaaagaagaagaggaagacagagatggccacacttgggatattggcgatgtccagaaactgctgtctggcgtcgagagactgagaaaccctgacctaattcaagcagggtattattctttcggtctggccaacgaaaagcgcgcaaaggaactggaagctaccttcgggtgcaggatgtctcccgatatcaagcaagagctgctcagatgtgacataagttgtaaaggcggacattcaactgtgacagatcttcaggagttacttgggtgcctctatgaatcccaggaagaagaactggtgaaggaggtaatggcccagtttaaggaaatttccctacatctgaatgcagtagacgttgtgcccagctcattctgtgtgaagcactgccgaaacctacagaaaatgtctctccaagtgattaaggagaatcttcccgagaatgtgaccgcaagcgaaagcgacgctgaggtggagcggtcccaagatgaccagcacatgttgcccttttggaccgacttgtgttctatctttggatcaaataaagatctcatgggtctcgccatcaatgacagcttcctgagtgcctctctcgtccgcatcctgtgtgaacaaattgcttccgacacgtgccatctgcagagggtcgtatttaagaatatcagccccgctgacgcacacaggaacctctgtctggccctcaggggccacaaaactgttacttacttaaccctgcagggaaatgatcaagatgacatgtttccggcactgtgcgaagtccttcggcaccctgagtgtaatcttagatatctgggcctggtgtcttgtagtgcgacgacccagcaatgggccgatttaagcctggcattagaggtgaaccagagcctcacttgtgtgaatctgtctgataacgaactactcgacgaaggcgctaaactgctttacactacccttaggcaccccaaatgcttcctgcagcgactgtccctggagaattgccacctgacagaagctaactgtaaggatctggccgcagttctcgtagtgtcacgtgaactgactcatctgtgcctggcaaagaatccaataggaaacaccggggtgaagtttttgtgtgaaggccttagatatccagagtgtaagctgcagacattagtcttatggaactgtgatataacctctgatggttgctgtgaccttaccaaactgctgcaggagaagtcttccttgttgtgtctggatctgggactgaaccacatcggagtgaagggtatgaagtttctttgcgaggctcttaggaaaccactgtgcaacctgagatgcctctggctttggggatgttcaattccccctttctcctgtgaagatctctgttctgccttaagttgcaatcagtcgctggtaacactcgatctcggacagaatccactgggcagttcgggggtcaagatgctgttcgaaacgctgacgtgtagtagtggcactctgagaacattgaggctgaagattgatgattttaatgatgagctgaacaaattgctcgaggagatcgaagagaagaacccacagcttataatcgacaccgaaaaacaccatccttgggccgaacgccctagttcccatgacttcatgatctag

SEQ ID NO: 69096 - DNA, 540 bp, Artificial Sequence
  derived and/or modified sequence
agtgtaaccaatcaagcagaatctctaggcgttcgtgctttgaaatgaggctccacatagctcccacgtgggacaagatggtgtcttcggcgcagatgggcttcaacctgcaggctctcctggagcagctcagccaggatgagttgagcaagttcaagtatctgatcacgaccttctccctggcacacgagctccagaagatcccccacaaggaggtagacaaggctgatgggaagcaactggtagaaatcctcaccacccattgtgacagctactgggtggagatggcgagcctccaggtctttgaaaagatgcaccgaatggatctgtctgagagagcaaaggatgaagtcagagaagcagctttgaaatcctttaataaaaggaagcctctatcattagggataacacggaaagaacgaccacctctagacgtggacgaaatgctggagcgcttcaaaacagaagcacaagcgtttacagaaacgaaaggaaatgtcatctgcctgggtaaagaagtctttaaaggaaaaaagccag

SEQ ID NO: 69097 - DNA, 3573 bp, Artificial Sequence
  derived and/or modified sequence
agtgctcagcaacgattacgccccgagggccaatcacagggctgcggccgagagagaagccttattagagctttctcaacctgcagccctcatctccgccggcgagtagggccaggtgttgggagctcccacgtgggacaagatggtgtcttcggcgcagatgggcttcaacctgcaggctctcctggagcagctcagccaggatgagttgagcaagttcaagtatctgatcacgaccttctccctggcacacgagctccagaagatcccccacaaggaggtagacaaggctgatgggaagcaactggtagaaatcctcaccacccattgtgacagctactgggtggagatggcgagcctccaggtctttgaaaagatgcaccgaatggatctgtctgagagagcaaaggatgaagtcagagaagcagctttgaaatcctttaataaaaggaagcctctatcattagggataacacggaaagaacgaccacctctagacgtggacgaaatgctggagcgcttcaaaacagaagcacaagcgtttacagaaacgaaaggaaatgtcatctgcctgggtaaagaagtctttaaaggaaaaaagccagacaaagacaataggtgcaggtatatattgaagacgaagttccgggagatgtggaagagctggcctggagatagcaaagaggtccaggttatggctgagagatacaagatgctgatcccattcagcaaccccagggtgcttcccgggcccttctcatacacggtggtgctgtatggtcctgcaggccttgggaaaaccacgctggcccagaaactaatgctagactgggcagaggacaacctcatccacaaattcaaatatgcgttctacctcagctgcagggagctcagccgcctgggcccgtgcagttttgcagagctggtcttcagggactggcctgaattgcaggatgacattccacacatcctagcccaagcacggaaaatcttgttcgtgattgacggctttgatgagctgggagccgcacctggggcgctgatcgaggacatctgcggggactgggagaagaagaagccggtgcccgtcctcctggggagtttgctgaacagggtgatgttacccaaggccgccctgctggtcaccacgcggcccagggccctgagggacctccggatcctggcggaggagccgatctacataagggtggagggcttcctggaggaggacaggagggcctatttcctgagacactttggagacgaggaccaagccatgcgtgcctttgagctaatgaggagcaacgcggccctgttccagctgggctcggcccccgcggtgtgctggatcgtgtgcacgactctgaagctgcagatggagaagggggaggacccggtccccacctgcctcacccgcacggggctgttcctgcgtttcctctgcagccggttcccgcagggcgcacagctgcggggcgcgctgcggacgctgagcctcctggccgcgcagggcctgtgggcgcagacgtccgtgcttcaccgagaggatctggaaaggctcggggtgcaggagtccgacctccgtctgttcctggacggagacatcctccgccaggacagagtctccaaaggctgctactccttcatccacctcagcttccagcagtttctcactgccctgttctacaccctggagaaggaggaggaagaggatagggacggccacacctgggacattggggacgtacagaagctgctttccggagtagaaagactcaggaaccccgacctgatccaagcaggctactactcctttggcctcgctaacgagaagagagccaaggagttggaggccacttttggctgccggatgtcaccggacatcaaacaggaattgctgcgatgcgacataagttgtaagggtggacattcaacggtgacagacctgcaggagctcctcggctgtctgtacgagtctcaggaggaggagctggtgaaggaggtgatggctcagttcaaagaaatatccctgcacttaaatgcagtagacgttgtgccatcttcattctgcgtcaagcactgtcgaaacctgcagaaaatgtcactgcaggtaataaaggagaatctcccggagaatgtcactgcgtctgaatcagacgccgaggttgagagatcccaggatgatcagcacatgcttcctttctggacggacctttgttccatatttggatcaaataaggatctgatgggtctagcaatcaatgatagctttctcagtgcctccctagtaaggatcctgtgtgaacaaatagcctctgacacctgtcatctccagagagtggtgttcaaaaacatttccccagctgatgctcatcggaacctctgcctagctcttcgaggtcacaagactgtaacgtatctgacccttcaaggcaatgaccaggatgatatgtttcccgcattgtgtgaggtcttgagacatccagaatgtaacctgcgatatctcgggttggtgtcttgttccgctaccactcagcagtgggctgatctctccttggcccttgaagtcaaccagtccctgacgtgcgtaaacctctccgacaatgagcttctggatgagggtgctaagttgctgtacacaactttgagacaccccaagtgctttctgcagaggttgtcgttggaaaactgtcaccttacagaagccaattgcaaggaccttgctgctgtgttggttgtcagccgggagctgacacacctgtgcttggccaagaaccccattgggaatacaggggtgaagtttctgtgtgagggcttgaggtaccccgagtgtaaactgcagaccttggtgctttggaactgcgacataactagcgatggctgctgcgatctcacaaagcttctccaagaaaaatcaagcctgttgtgtttggatctggggctgaatcacataggagttaagggaatgaagttcctgtgtgaggctttgaggaaaccactgtgcaacttgagatgtctgtggttgtggggatgttccatccctccgttcagttgtgaagacctctgctctgccctcagctgcaaccagagcctcgtcactctggacctgggtcagaatcccttggggtctagtggagtgaagatgctgtttgaaaccttgacatgttccagtggcaccctccggacactcaggttgaaaatcgatgactttaatgatgaactcaataagctgctggaagaaatagaagaaaaaaacccacaactgattattgatactgagaaacatcatccctgggcagaaaggccttcttctcatgacttcatgatctgaatccccccgagtcattcattctccatgaagtcatcgattttccaggtgttggtgaactgcctgtgactcctctcctccccggcccctacccctcagggataatgagttcattgctgggctagatgttttagccatgattctgcctctgttttatacctgcacacatccttatctttgttacatatgaaatatctgtatcacgggtatattgagagaaataaaggtgagagcattcacaaatg

SEQ ID NO: 69098 - DNA, 3438 bp, Artificial Sequence
  derived and/or modified sequence
aagccttattagagctttctcaacctgcagccctcatctccgccggcgagtagggccaggtgttgggagctcccacgtgggacaagatggtgtcttcggcgcagatgggcttcaacctgcaggctctcctggagcagctcagccaggatgagttgagcaagttcaagtatctgatcacgaccttctccctggcacacgagctccagaagatcccccacaaggaggtagacaaggctgatgggaagcaactggtagaaatcctcaccacccattgtgacagctactgggtggagatggcgagcctccaggtctttgaaaagatgcaccgaatggatctgtctgagagagcaaaggatgaagtcagagaagcagctttgaaatcctttaataaaaggaagcctctatcattagcgtttacagaaacgaaaggaaatgtcatctgcctgggtaaagaagtctttaaaggaaaaaagccagacaaagacaataggtgcaggtatatattgaagacgaagttccgggagatgtggaagagctggcctggagatagcaaagaggtccaggttatggctgagagatacaagatgctgatcccattcagcaaccccagggtgcttcccgggcccttctcatacacggtggtgctgtatggtcctgcaggccttgggaaaaccacgctggcccagaaactaatgctagactgggcagaggacaacctcatccacaaattcaaatatgcgttctacctcagctgcagggagctcagccgcctgggcccgtgcagttttgcagagctggtcttcagggactggcctgaattgcaggatgacattccacacatcctagcccaagcacggaaaatcttgttcgtgattgacggctttgatgagctgggagccgcacctggggcgctgatcgaggacatctgcggggactgggagaagaagaagccggtgcccgtcctcctggggagtttgctgaacagggtgatgttacccaaggccgccctgctggtcaccacgcggcccagggccctgagggacctccggatcctggcggaggagccgatctacataagggtggagggcttcctggaggaggacaggagggcctatttcctgagacactttggagacgaggaccaagccatgcgtgcctttgagctaatgaggagcaacgcggccctgttccagctgggctcggcccccgcggtgtgctggatcgtgtgcacgactctgaagctgcagatggagaagggggaggacccggtccccacctgcctcacccgcacggggctgttcctgcgtttcctctgcagccggttcccgcagggcgcacagctgcggggcgcgctgcggacgctgagcctcctggccgcgcagggcctgtgggcgcagacgtccgtgcttcaccgagaggatctggaaaggctcggggtgcaggagtccgacctccgtctgttcctggacggagacatcctccgccaggacagagtctccaaaggctgctactccttcatccacctcagcttccagcagtttctcactgccctgttctacaccctggagaaggaggaggaagaggatagggacggccacacctgggacattggggacgtacagaagctgctttccggagtagaaagactcaggaaccccgacctgatccaagcaggctactactcctttggcctcgctaacgagaagagagccaaggagttggaggccacttttggctgccggatgtcaccggacatcaaacaggaattgctgcgatgcgacataagttgtaagggtggacattcaacggtgacagacctgcaggagctcctcggctgtctgtacgagtctcaggaggaggagctggtgaaggaggtgatggctcagttcaaagaaatatccctgcacttaaatgcagtagacgttgtgccatcttcattctgcgtcaagcactgtcgaaacctgcagaaaatgtcactgcaggtaataaaggagaatctcccggagaatgtcactgcgtctgaatcagacgccgaggttgagagatcccaggatgatcagcacatgcttcctttctggacggacctttgttccatatttggatcaaataaggatctgatgggtctagcaatcaatgatagctttctcagtgcctccctagtaaggatcctgtgtgaacaaatagcctctgacacctgtcatctccagagagtggtgttcaaaaacatttccccagctgatgctcatcggaacctctgcctagctcttcgaggtcacaagactgtaacgtatctgacccttcaaggcaatgaccaggatgatatgtttcccgcattgtgtgaggtcttgagacatccagaatgtaacctgcgatatctcgggttggtgtcttgttccgctaccactcagcagtgggctgatctctccttggcccttgaagtcaaccagtccctgacgtgcgtaaacctctccgacaatgagcttctggatgagggtgctaagttgctgtacacaactttgagacaccccaagtgctttctgcagaggttgtcgttggaaaactgtcaccttacagaagccaattgcaaggaccttgctgctgtgttggttgtcagccgggagctgacacacctgtgcttggccaagaaccccattgggaatacaggggtgaagtttctgtgtgagggcttgaggtaccccgagtgtaaactgcagaccttggtgctttggaactgcgacataactagcgatggctgctgcgatctcacaaagcttctccaagaaaaatcaagcctgttgtgtttggatctggggctgaatcacataggagttaagggaatgaagttcctgtgtgaggctttgaggaaaccactgtgcaacttgagatgtctgtggttgtggggatgttccatccctccgttcagttgtgaagacctctgctctgccctcagctgcaaccagagcctcgtcactctggacctgggtcagaatcccttggggtctagtggagtgaagatgctgtttgaaaccttgacatgttccagtggcaccctccggacactcaggttgaaaatcgatgactttaatgatgaactcaataagctgctggaagaaatagaagaaaaaaacccacaactgattattgatactgagaaacatcatccctgggcagaaaggccttcttctcatgacttcatgatctgaatccccccgagtcattcattctccatgaagtcatcgattttccaggtgttggtgaactgcctgtgactcctctcctccccggcccctacccctcagggataatgagttcattgctgggctagatgttttagccatgattctgcctctgttttatacctgcacacatccttatctttgttacatatgaaatatctgtatcacgggtatattgagagaaataaaggtgagagcattc

SEQ ID NO: 69099 - DNA, 3576 bp, Artificial Sequence
  derived and/or modified sequence
aagtgctcagcaacgattacgccccgagggccaatcacagggctgcggccgagaaagaagccttaatagagctttctcaacctgcagccctcatctccgccggcgagtagggccaggtgttgggagctcccacgtgggacaagatggtgtcttcggcgcagatgggcttcaacctgcaggctctcctggagcagctcagccaggatgagttgagcaagttcaagtatctgatcacgaccttctccctggcacacgagctccagaagatcccccacaaggaggtagacaaggctgatgggaagcaactggtagaaatcctcaccacccattgtgacagctactgggtggagatggcgagcctccaggtctttgaaaagatgcaccgaatggatctgtctgagagagcaaaggatgaagtcagagaagcagctttgaaatcctttaataaaaggaagcctctatcattagggataacacggaaagaacgaccacctctagacgtggacgaaatgctggagcgcttcaaaacagaagcacaagcgtttacagaaacgaaaggaaatgtcatctgcctgggtaaagaagtctttaaaggaaaaaagccagacaaagacaataggtgcaggtatatattgaagacgaagttccgggagatgtggaagagctggcctggagatagcaaagaggtccaggttatggctgagagatacaagatgctgatcccattcagcaaccccagggtgcttcccgggcccttctcatacacggtggtgctgtatggtcctgcaggccttgggaaaaccacgctggcccagaaactaatgctagactgggcagaggacaacctcatccacaaattcaaatatgcgttctacctcagctgcagggagctcagccgcctgggcccgtgcagttttgcagagctggtcttcagggactggcctgaattgcaggatgacattccacacatcctagcccaagcacggaaaatcttgttcgtgattgacggctttgatgagctgggagccgcacctggggcgctgatcgaggacatctgcggggactgggagaagaagaagccggtgcccgtcctcctggggagtttgctgaacagggtgatgttacccaaggccgccctgctggtcaccacgcggcccagggccctgagggacctccggatcctggcggaggagccgatctacataagggtggagggcttcctggaggaggacaggagggcctatttcctgagacactttggagacgaggaccaagccatgcgtgcctttgagctaatgaggagcaacgcggccctgttccagctgggctcggcccccgcggtgtgctggatcgtgtgcacgactctgaagctgcagatggagaagggggaggacccggtccccacctgcctcacccgcacggggctgttcctgcgtttcctctgcagccggttcccgcagggcgcacagctgcggggcgcgctgcggacgctgagcctcctggccgcgcagggcctgtgggcgcagacgtccgtgcttcaccgagaggatctggaaaggctcggggtgcaggagtccgacctccgtctgttcctggacggagacatcctccgccaggacagagtctccaaaggctgctactccttcatccacctcagcttccagcagtttctcactgccctgttctacaccctggagaaggaggaggaagaggatagggacggccacacctgggacattggggacgtacagaagctgctttccggagtagaaagactcaggaaccccgacctgatccaagcaggctactactcctttggcctcgctaacgagaagagagccaaggagttggaggccacttttggctgccggatgtcaccggacatcaaacaggaattgctgcgatgcgacataagttgtaagggtggacattcaacggtgacagacctgcaggagctcctcggctgtctgtacgagtctcaggaggaggagctggtgaaggaggtgatggctcagttcaaagaaatatccctgcacttaaatgcagtagacgttgtgccatcttcattctgcgtcaagcactgtcgaaacctgcagaaaatgtcactgcaggtaataaaggagaatctcccggagaatgtcactgcgtctgaatcagacgccgaggttgagagatcccaggatgatcagcacatgcttcctttctggacggacctttgttccatatttggatcaaataaggatctgatgggtctagcaatcaatgatagctttctcagtgcctccctagtaaggatcctgtgtgaacaaatagcctctgacacctgtcatctccagagagtggtgttcaaaaacatttccccagctgatgctcatcggaacctctgcctagctcttcgaggtcacaagactgtaacgtatctgacccttcaaggcaatgaccaggatgatatgtttcccgcattgtgtgaggtcttgagacatccagaatgtaacctgcgatatctcgggttggtgtcttgttccgctaccactcagcagtgggctgatctctccttggcccttgaagtcaaccagtccctgacgtgcgtaaacctctccgacaatgagcttctggatgagggtgctaagttgctgtacacaactttgagacaccccaagtgctttctgcagaggttgtcgttggaaaactgtcaccttacagaagccaattgcaaggaccttgctgctgtgttggttgtcagccgggagctgacacacctgtgcttggccaagaaccccattgggaatacaggggtgaagtttctgtgtgagggcttgaggtaccccgagtgtaaactgcagaccttggtgctttggaactgcgacataactagcgatggctgctgcgatctcacaaagcttctccaagaaaaatcaagcctgttgtgtttggatctggggctgaatcacataggagttaagggaatgaagttcctgtgtgaggctttgaggaaaccactgtgcaacttgagatgtctgtggttgtggggatgttccatccctccgttcagttgtgaagacctctgctctgccctcagctgcaaccagagcctcgtcactctggacctgggtcagaatcccttggggtctagtggagtgaagatgctgtttgaaaccttgacatgttccagtggcaccctccggacactcaggttgaaaatcgatgactttaatgatgaactcaataagctgctggaagaaatagaagaaaaaaacccacaactgattattgatactgagaaacatcatccctgggcagaaaggccttcttctcatgacttcatgatctgaatccccccgagtcattcattctccatgaagtcatcgattttccaggtgttggtgaactgcctgtgactcctctcctccccggcccctacccctcagggataatgagttcattgctgggctagatgttttagccatgattctgcctctgttttatacctgcacacatccttatctttgttacatatgaaatatctgtatcacgggtatattgagagaaataaaggtgagagcattcacaaatgaa

SEQ ID NO: 69100 - DNA, 3189 bp, Artificial Sequence
  derived and/or modified sequence
atggtcagcagtgctcagatgggtttcaacctgcaggcattgcttgaacagttgagccaggacgaactgagcaaattcaagtatttaatcactacattctctctggcacatgagctccagaagattccacataaggaggttgataaggctgatggtaaacagctcgtcgagatattgactactcactgtgattcctattgggttgaaatggccagtctccaggtcttcgagaaaatgcacagaatggatctgtctgaaagagccaaggatgaagtgcgggaggccgccctgaagtcttttaacaagcgcaaacctctgtcactcggtataactcgcaaagaacggcccccactggatgtagacgagatgctggagcgctttaaaacagaggcacaggcctttaccgaaacaaagggcaatgtcatctgtctggggaaagaggttttcaaggggaaaaagcctgacaaagataaccggtgtcgttacattctaaaaacaaagtttagagaaatgtggaagtcctggcccggcgattccaaggaagtgcaggtcatggcagaacgttataaaatgctgatccctttctctaacccccgggtgctgccaggcccgttctcatatactgtcgtcctgtacggccccgctggtctgggcaagaccaccttggctcagaaactaatgctcgactgggccgaggacaatcttatacacaagtttaaatacgcattctaccttagctgcagagaactgagtcggttgggtccctgttcttttgctgaattagtgttcagagactggccagagctgcaagatgacatccctcacattctggcacaggccagaaaaattttattcgtgatcgacggcttcgacgaattaggggccgccccaggggcactgatcgaagatatttgtggagactgggagaagaagaagcccgtgccagtgttgttgggaagcttgttaaatcgcgtaatgctgccaaaagcagctctgttggtcacaacaagaccgcgtgctctcagagacttgagaattctggctgaggaaccgatttacataagggtggaggggttcctggaagaggatcgcagggcttattttctaaggcactttggcgacgaggaccaggctatgcgcgcctttgagttgatgcgtagcaacgcagctctctttcagctgggcagcgccccagcggtctgctggatcgtgtgcaccacactcaaactccagatggagaaaggcgaggaccccgttccgacctgcctcacacgaacagggttgttcctgaggttcctgtgttcgaggttcccccagggcgcccagctccgaggggccctgaggactctatctctcctggccgctcaggggctgtgggcccaaaccagtgtcctccacagagaggatctcgagaggcttggcgtgcaggaatcagacctgagactgttcctggatggggacatcctgaggcaggacagagtctctaagggatgctacagctttatccatctgtcctttcaacagttcctgactgccctgttctatacacttgaaaaagaagaggaggaggaccgagatggacatacctgggacattggcgatgttcaaaaactgctgtccggcgtggagcgactcaggaatccagatttgatccaggccggctattactccttcggcctggctaacgaaaaacgggccaaagagcttgaggccactttcggctgccgcatgtcaccagacattaagcaggaactgctgcgttgtgatatttcatgtaagggaggacacagcacagtcactgacctccaggagctgctgggatgtctctatgagtcacaggaggaagagcttgtgaaggaggtgatggcacagttcaaagagattagcctgcacttaaatgctgtggacgtggtgccttcatcattttgcgtcaaacactgccggaatctccaaaagatgtcgctgcaggttattaaggaaaacctccccgaaaatgtgacagcgtcggagagtgatgctgaagtcgaaagatcccaggatgatcagcacatgctgccattctggaccgatctttgttcaatctttggctccaacaaagatctcatggggctggctatcaatgattctttcttgagcgcaagccttgttagaattctctgtgagcagatcgcttccgatacctgccacctccaacgcgtggtgtttaagaatatctctccagctgatgctcatcggaatctgtgtcttgctctcaggggacataaaactgtcacatatctgacccttcagggtaatgatcaggatgatatgtttcctgcattgtgcgaggttttaaggcatcccgagtgcaacttgaggtacctagggctggtgtcatgctccgccactacacaacaatgggctgacctctcattggccctggaagtcaaccagtccctcacctgtgtcaacctctctgataatgaactgcttgatgaaggagctaagctcctgtatacgaccctcagacaccccaagtgctttctgcagcgcctgtcgcttgagaattgtcacctcactgaggcgaactgtaaggacttagccgctgtgctggttgtgtccagggaactaactcatctatgcctggcgaagaacccgattgggaatactggagtaaaattcttgtgtgaaggactcagatacccagaatgcaagcttcagacactcgtgctgtggaattgtgacatcactagtgatggatgttgcgatctcactaagctgctgcaggaaaaaagtagtctgctgtgtctggatctgggcctgaatcacatcggggttaaaggaatgaaattcctatgcgaagctttgcggaaacccctctgcaacttgaggtgcctgtggctttggggctgttccatccctccattcagttgcgaggacctgtgtagcgctcttagttgcaatcagtccctggtaacattggacctgggacagaatccactgggcagctcaggggtgaagatgttgttcgaaactttgacatgcagtagtggaacccttcgcactctgcgactgaagattgatgacttcaacgatgaactcaacaagctcctcgaggagattgaagagaagaatcctcagctgataatcgatacagagaagcatcacccttgggccgagaggcctagctcccatgattttatgatttag

SEQ ID NO: 69101 - DNA, 3189 bp, Artificial Sequence
  derived and/or modified sequence
atggttagttccgcccagatgggctttaacctccaggctttactggagcaattgtctcaggatgaactaagcaaatttaaatatttgattaccactttcagtctagcccatgaattgcaaaaaatcccgcataaggaagtggacaaagccgatgggaaacagctggtggagattctgactactcactgtgacagttactgggttgagatggcctccttacaggtttttgaaaagatgcaccgtatggacttgtcagaaagagcaaaagatgaggtgcgtgaagctgctctgaagagcttcaacaagcgaaagccgctaagcctaggtattacacggaaggagagaccacctctggatgtggatgagatgctcgagcggttcaaaactgaggcccaagctttcaccgagaccaaaggaaacgtgatttgtctggggaaagaggtctttaaagggaaaaagcccgacaaggacaacaggtgccgttacattcttaaaacgaagttccgggagatgtggaaatcatggccaggggactcaaaggaggtacaggtaatggccgaacggtacaaaatgcttatccctttctcaaaccccagggtacttccgggcccattcagctacaccgtagtcctgtacggccccgcaggcctagggaaaactacgctcgcccagaagttaatgctggattgggctgaagataatctgatacacaagttcaagtatgctttttacctctcttgccgtgagctcagtcggttggggccttgttctttcgcagagcttgtcttcagagactggccagaactgcaggacgacatcccacatattctcgcccaagctcgcaagatcctttttgttatagatggatttgatgagctcggtgccgccccaggggccttgatcgaggatatatgcggtgattgggagaagaagaagccagtacccgttctgctggggagcttgttgaaccgcgtcatgctacccaaggccgccttgctggtgaccacccgacctcgggcattacgagatctgagaatcctcgccgaagaaccaatatacatcagggtggagggatttctggaggaagaccggcgagcctacttcctgcgccactttggagatgaagatcaagcaatgagagcctttgagttaatgaggagtaacgccgccctgtttcagctcggttccgctccagctgtgtgttggatcgtgtgcaccaccttgaaattacagatggagaaaggagaggatcctgtccccacctgcctgacccggactggtttgtttttgcggttcctgtgctctagattcccacagggcgcccagctgcgaggcgccttgcgtacactgtccctgctcgccgcccaggggttgtgggctcagacatccgtgctccaccgggaggatctcgagaggttgggcgtgcaggaaagtgatctgagactgttcctagatggagatattctgaggcaggatcgtgtgagcaagggctgttattcctttatccacctgagttttcagcagttcctgaccgccctgttttatacactagagaaggaggaggaagaggacagggacggccatacatgggatatcggggacgtccagaaattactctccggagtcgagcggctgagaaacccagatcttatccaggcaggttattactcctttgggctagccaacgagaagcgcgctaaagaactggaagccacgttcgggtgcaggatgtctcccgatattaaacaagagctgctgagatgcgatatctcctgcaaggggggccattcaactgtgacagacctccaggaactactcgggtgtctttatgagagtcaggaagaagagctggtgaaagaggtgatggcccagtttaaggagatatccttacacctgaacgccgttgacgtggtgccatcatctttttgcgtgaagcattgccggaaccttcaaaagatgtcactgcaggtgatcaaggagaatcttcccgagaatgtaactgcatctgaatccgacgcagaagtggaacggtcccaggacgaccagcacatgctgcctttctggactgatctgtgttctatcttcggctctaataaggacctgatgggacttgctatcaatgatagctttctaagtgccagccttgtcaggatcctttgcgaacagatcgctagcgacacctgtcacctccagagagtggtattcaaaaacatctctccggctgacgcccaccgcaacctgtgcctcgcattacggggacataaaactgtcacttacttaacactgcagggcaacgaccaagacgatatgttccctgccctttgtgaggtgctgcgacaccctgaatgtaatctgcggtatctcggccttgtttcttgtagtgctaccacccaacagtgggccgatttgtctcttgccctcgaggtgaaccagagtctgacttgtgtaaacttgagcgacaatgagctactcgacgaaggggccaagctactgtacaccacactcaggcaccccaaatgctttctgcagcgtctgtccctcgagaactgtcacttaacagaggccaactgtaaggacctcgcagccgttctggtggtatctagagagctgacacacctttgtttagcgaagaacccgattggtaatactggagtcaaattcctgtgcgaggggctacgctaccctgaatgcaagctgcagactctggtgctgtggaattgtgacattacaagcgacggctgctgcgacctcaccaagcttctgcaggagaagagctccttactctgcctggacctgggcttgaaccatataggtgttaaaggcatgaaattcttgtgcgaggcactcaggaagcctctgtgtaatttgaggtgtttgtggctgtggggatgtagtattccacctttcagttgtgaagacttgtgttccgccctttcctgtaaccagagcctcgtgacactcgacttaggacaaaacccactgggttcttccggggtaaaaatgctctttgaaacactcacctgttcctcaggcaccttgcgcacacttcggctgaaaatagacgacttcaacgatgaactgaataagttattagaggaaatagaagagaagaacccccagctgattatagacaccgaaaaacaccacccgtgggccgaaagaccatctagccacgatttcatgatctag

SEQ ID NO: 69102 - DNA, 3189 bp, Artificial Sequence
  derived and/or modified sequence
atggtctcatccgcccagatggggttcaaccttcaagctctgctcgagcagttatctcaggacgagcttagcaagttcaaatatctgatcaccacattctcccttgcccacgagcttcagaaaatacctcataaggaggtcgacaaagcggacggtaagcagctggtggaaatcttaaccacgcactgtgacagttattgggtagaaatggccagcctgcaagtcttcgaaaagatgcaccgcatggatctgtcagaacgggcaaaggacgaggtgagggaggccgccctaaaaagctttaataagagaaaacctctgagtctcggaattactcgcaaagaaaggccaccgctggatgttgatgagatgctggagcggttcaagactgaggcacaagcatttaccgaaacgaagggaaatgtaatttgtctgggaaaggaggtgttcaagggcaagaagcccgacaaggacaatcgttgcagatacatcctgaagaccaagttccgcgaaatgtggaagagctggcccggcgacagcaaagaagtccaggtaatggcagagcggtataaaatgctcatcccattctccaaccccagggtgctgcccgggccgtttagttacactgttgtgctctacggaccagccggcttaggaaaaacaactctcgcccagaaactgatgctggactgggcagaggataacttgattcataagttcaaatatgccttttatctgagttgtagagagctgtccaggctgggcccatgcagttttgcagagttggtcttccgtgattggccagagctccaggacgatatcccacacatactagctcaagccaggaagattctgtttgtaatcgatggtttcgatgagttgggcgcagctcccggagctcttatagaggacatctgtggggactgggaaaagaaaaagccggttccggttctgctgggaagcctccttaatcgggtcatgctgccaaaggccgctctgctggtaactactaggccaagagccctgcgcgatctcaggattcttgccgaggagcctatctacatccgcgttgaagggtttctggaagaagatagaagggcctactttctgcgccactttggcgatgaggaccaggctatgcgggcctttgaactgatgagaagtaatgcagccctgttccagctcgggagtgcccccgcagtatgttggattgtctgcactacactgaaactccagatggagaagggagaagaccccgtccccacgtgcctgacaagaactggacttttcctgcgttttttgtgtagcaggttccctcaaggggcgcagctgcgcggcgcactgaggactttaagtttgctggcagcccaaggcctgtgggcgcagacttctgtgctgcatcgtgaggatctggaacgcctgggggtacaggagagcgatctccggttgtttttggatggtgacatactaagacaagacagagtcagtaaaggatgctactctttcatccatctaagtttccagcagttcttgactgccctgttttacactttggaaaaggaggaggaggaggaccgggatggacacacctgggacattggtgatgtgcagaaactgctctctggcgtcgagaggctgagaaacccagacctaatccaggctggatactacagcttcggtctagccaacgaaaaacgtgccaaggagctggaagctacatttgggtgccggatgtcacctgacatcaagcaggagttgctacgttgcgacatttcatgcaagggaggacactctactgtgaccgacctgcaggaactgttggggtgtctgtacgagtcccaggaggaagagcttgtgaaagaggtaatggcacagttcaaagagataagcctccatctgaacgccgtggatgtcgttccatcttccttttgtgtaaagcactgtaggaacctacagaagatgagcttacaggtcataaaggaaaacctacctgagaacgtgactgcatccgagagcgatgctgaagttgagcgatcgcaggacgaccaacacatgctgcctttttggacagacttgtgttctatttttggtagcaataaagatctcatgggtctagccatcaatgactccttcttgtccgccagcctggtgcgtatactatgtgaacagatagcatctgacacctgccatctccaaagggtggtttttaaaaatatctcccctgctgacgctcataggaatttgtgtctggcccttagaggccacaagacggttacttacttgaccctgcagggcaatgatcaggatgacatgtttcccgcactctgtgaggtgctcaggcaccctgaatgcaacctcaggtacttaggcctggtgtcgtgtagcgcgaccactcaacagtgggccgacttatccctggctctggaagtcaatcagtccctgacatgtgtgaatctatccgacaacgaactgctggatgaaggggcaaaattactatacactacgttgcggcaccccaaatgctttttacagcggctgtcactcgagaactgtcacctgacagaggccaattgtaaagacctggccgccgtgctcgtcgtgtccagggagctaacccacctttgtctggcgaagaaccctataggaaatactggtgtgaagtttctttgcgagggtttaaggtatcccgaatgtaaactgcaaaccctggtgttatggaactgcgacatcacttccgacggctgttgtgatttgaccaaactgctgcaggagaaaagctcattactctgtttggacctgggcctgaaccatatcggcgtcaagggcatgaagtttctctgcgaggctctgcgcaaacctctgtgtaacctgaggtgcctgtggctgtggggctgctcaatccccccatttagttgcgaggatttatgtagcgccctgagttgtaaccagtctctggtcactttagacctgggccagaacccgttgggctctagtggtgtgaaaatgttgttcgagacactgacttgctccagcggaactttgagaaccctccggctcaagatcgacgattttaacgacgagctgaataaattgctcgaagagatcgaagaaaaaaatcctcagctgatcattgacactgagaagcaccatccctgggccgagagaccctctagtcatgacttcatgatatag

SEQ ID NO: 69103 - DNA, 3189 bp, Artificial Sequence
  derived and/or modified sequence
atggtgtccagcgcccagatgggatttaatctccaggcgctgcttgagcaactgtcccaagacgaactgagcaaatttaagtatctcatcactaccttctctctggctcatgaactccagaaaattccacataaagaggtggacaaggcagacggcaaacagttggtagagatcctgaccacccattgtgactcatactgggtcgagatggcctcattgcaggtctttgagaaaatgcatcgaatggacctatctgagcgggccaaggacgaggtgagagaagcagctctcaaatcgttcaataagcgcaaaccactatctcttggcatcaccaggaaggagcggccccctctggatgtggacgaaatgttagaaagatttaagacagaagcccaagcctttaccgaaacgaagggtaatgtcatatgcctcgggaaggaggtatttaagggcaaaaaacctgataaagacaaccggtgtagatacatcctcaagaccaaatttcgggagatgtggaagtcttggcccggtgactcaaaagaagtgcaggtcatggctgagcgctataagatgctcatacccttttctaaccctcgggtactacctgggccattttcctacaccgtggtactgtatggacctgctgggctgggaaaaacaacccttgcacagaagttgatgctagactgggcggaagacaacctgattcacaaatttaagtacgctttctacctctcctgccgcgagctgtctcgcctggggccctgcagtttcgcggaactagtgtttcgggattggcctgagctgcaggacgacattcctcacatactcgcccaagcgcgaaaaatcttgtttgtgattgatggcttcgacgaactgggtgcagcgcctggggcactgattgaggatatctgtggtgactgggagaaaaagaaacccgtgcctgtccttttagggtctctcctgaatcgcgtcatgctgccaaaagccgctctattagttaccaccaggcctcgggctcttagagaccttcgcatcctggccgaagagccaatatacatccgagtagaaggttttctggaagaggaccgccgagcttatttccttcggcatttcggggacgaggatcaggccatgagagcgtttgagctcatgagatctaacgccgccttgttccaactggggagtgccccagccgtctgttggattgtctgcactacgctcaaactgcagatggagaagggagaagaccctgtacccacctgcctgactcggactggcctctttctgaggtttctgtgcagcaggttcccccagggcgcccagctgagaggtgccctgcgtacactttctctgctggccgcccaaggcctttgggcccaaacttccgtcctgcaccgtgaggacctcgagcgcctaggcgtgcaggagagcgacctgcgcctgtttcttgatggggatatcctcaggcaggatcgggtttcaaagggatgttattctttcatccacctaagctttcagcagttcttgacggccctattctacactctggaaaaagaggaagaggaggacagggatgggcatacatgggatatcggcgacgtgcaaaaactactctccggtgttgaacggctgagaaatccggacctgattcaggccggatactatagttttggtctcgcaaacgaaaagagggcgaaagagctggaggctacctttggatgtaggatgtctccggatatcaaacaggagctgctgcgatgcgacatcagctgcaagggaggtcatagcactgtcacggatctccaggaactgctaggttgtctgtatgagtcccaggaagaagaactcgttaaggaagtgatggcacaatttaaagagatttctctgcacctgaatgctgtggacgttgtgcctagttctttctgtgtaaagcactgtcgcaacttgcaaaaaatgtctttgcaggtgataaaagagaatttgccagagaacgtgaccgcatccgaatcagatgctgaggttgagagatcccaggatgatcagcatatgcttccgttttggaccgatttgtgtagcattttcggaagtaataaggatctgatgggattggcgattaacgacagctttctgtcagcctcgcttgtgcggattctgtgtgagcagattgcatctgacacatgtcatctccaaagggttgttttcaaaaacatttcgcctgccgatgcacatcgaaatctgtgcctagcccttagaggacataagactgttacttatctgaccctgcagggcaacgaccaggatgatatgttcccggcattgtgcgaggtgcttcgacaccccgagtgcaacttgagatacctgggactggtgagctgctcggcaaccactcagcaatgggccgatctcagtctggctctggaagtaaaccagtcactgacgtgtgtgaacttatcagacaacgagcttttggatgaaggcgccaaactgctatacacaactttgagacacccgaaatgttttctgcagaggctcagccttgagaattgccacctgacggaggcaaactgtaaggacctcgctgcggtcttggtggtcagcagagaactgacgcacttatgtcttgcaaagaatccaataggcaacactggggtgaagtttctatgcgagggcctgcgctacccagaatgcaaattgcagaccctcgtgctgtggaactgtgatatcacctctgatggatgttgcgacctcacaaagctcctgcaggagaaaagctctctcctgtgcttagatctgggtcttaaccatatcggcgtgaagggtatgaagtttctctgtgaggcacttcgcaaacctctgtgcaacctacgatgtctctggctgtggggctgttcgattccgcctttcagttgcgaagacctgtgctcagccttgtcctgtaaccagtcactggtgaccctggatctcgggcagaacccacttggaagtagcggcgtgaagatgttattcgagaccctcacatgttcaagtgggacgctgcgcaccctgagacttaagattgacgactttaacgacgagctgaataaactgctggaagaaattgaagagaaaaacccgcagcttattattgacaccgaaaagcaccatccgtgggcagaacggcccagctctcacgacttcatgatttag

SEQ ID NO: 69104 - DNA, 3189 bp, Artificial Sequence
  derived and/or modified sequence
atggttagttcagcccagatggggttcaatctgcaagcactgctagagcagctgagccaggacgaactgagcaagttcaaataccttataacgaccttttccctagctcacgaattacaaaaaattccacataaggaggtcgacaaggctgatggcaagcagctagttgagattctcactactcattgcgactcttactgggttgagatggcttcattgcaggtgtttgaaaaaatgcaccgtatggatctctccgaaagggctaaggacgaggtacgcgaggccgcattgaagtcttttaataaaaggaagcccttatctctgggcattacccggaaggaacggccccctctggacgtagacgagatgctggagcgatttaagaccgaggctcaagcctttactgagaccaagggcaacgtcatatgcttagggaaggaggtttttaagggtaaaaagccagataaagacaataggtgtcggtatatactgaagacaaaatttagggagatgtggaaatcatggccaggcgatagtaaggaagtgcaggttatggctgagcgttataaaatgcttattccattttccaacccccgggtgcttcccgggcccttttcttataccgtggtgttgtacggtccagctgggctgggaaagaccacgcttgcccagaagttgatgctcgattgggccgaagataacttgatccataagttcaaatacgctttttacctgagttgcagagaactttcccgcctaggaccttgttccttcgccgaattggttttccgagactggccagagctgcaggacgatattccacatattcttgcccaggcccggaaaatactttttgtaattgatgggttcgacgagctcggcgcggcaccaggggccttgatcgaggacatctgtggcgattgggaaaagaagaaacccgtgccagtgttgctgggcagtcttctgaacagagtaatgctaccgaaagccgcgctgctggtgacaacacggccccgtgcccttcgagacctccggatactggccgaggaaccgatttatattcgtgtcgaagggttccttgaggaggacagacgggcttacttcctgcggcactttggcgatgaggaccaggccatgagagcctttgagctaatgagaagcaatgcggccttgttccagctgggcagcgcccccgctgtctgttggatagtttgcacaaccctgaaattgcagatggaaaagggcgaggatccggtgcccacctgcttaacacgtaccggtttgtttctgcggttcctctgctcaaggtttccacaaggtgcccagctgaggggcgctctgaggactctgagcctactggcagctcagggtctgtgggcccaaacatcagtcttacatcgggaggatttggagcgcttgggagtgcaggaaagcgacctgcggttgtttcttgacggcgatatcctccgccaagacagagtgtccaaagggtgctattcatttatccacctaagttttcagcaattcttaacagcgctgttttacacccttgaaaaggaggaagaagaagaccgtgatggtcacacatgggacattggagatgtccagaaactgctgtcaggagtggaacgcctcaggaacccggacctgattcaagctggctactatagcttcggccttgcaaacgagaagcgagcgaaggaactcgaagcaacttttggctgcagaatgagccctgatataaagcaagaattgttgcgctgcgatatatcttgcaagggtgggcatagcactgtcaccgacctacaagaactgctgggatgcctatacgagagccaggaagaagaattagtgaaagaggtcatggcccagtttaaggagatttctttgcatttgaatgcggttgacgttgtgccctcgtcattctgcgtgaagcattgcagaaatctgcagaagatgagccttcaggttatcaaagaaaatctgccagagaacgtgactgcttccgaatcagacgccgaggtcgagagatcacaggacgaccagcatatgcttccgttctggacagatctgtgttcaatctttggctccaacaaggatctgatgggattagccatcaatgactcattcctttcagcctctttagtacgcattctgtgtgagcaaattgccagcgacacatgccacctgcaacgcgtagttttcaaaaatattagtcccgcggacgctcatcgaaacttgtgcctggctttaaggggacacaaaacagtcacctacttgaccctgcagggtaatgaccaggacgatatgttcccagctctttgtgaagtgctacgccaccctgagtgcaatctgaggtatctcggattagtgtcatgcagtgcaacaactcaacaatgggccgacttgtccctggctttagaagtgaatcagtcgttaacttgcgtcaacttgagtgacaatgagttgctcgacgagggcgccaagctgttatatacaaccttaagacatcccaagtgcttcctgcagcggctgtctctggaaaattgccacttgaccgaagcgaattgtaaggatctggccgccgtgctggtggtctctagagaactgacacatttgtgcctcgcaaagaatccaatcgggaataccggcgtgaaatttctttgtgaggggcttagatatcccgaatgcaaactgcagaccctggtgctgtggaattgtgatataacgtcagacgggtgctgcgaccttaccaagctgcttcaagaaaaatcctccctgctctgtctcgatttgggtcttaaccatattggagtcaaggggatgaagttcctttgtgaggctttgcggaaaccactgtgcaacctgcggtgtctctggctgtggggatgctcaatcccacctttcagttgcgaagacctttgtagcgccctgagttgcaatcagtctttggttacacttgatctgggccagaatcccctggggtcttccggtgtgaaaatgttatttgagactctaacttgctccagcggcacgcttagaacactgaggttgaaaattgacgacttcaatgatgagctcaacaagctcctcgaggaaatcgaagaaaagaaccctcagctgatcattgacactgaaaagcaccacccgtgggccgagcgaccttcctcccacgactttatgatttag

SEQ ID NO: 69105 - DNA, 3189 bp, Artificial Sequence
  derived and/or modified sequence
atggtcagcagcgctcaaatgggcttcaatcttcaggctctgttagaacagctgtcacaggatgagcttagcaaattcaaatatctgattacgaccttttccctggcgcatgaattgcagaagattccccacaaagaagtagataaagctgatggaaagcagctagtggagattcttacaacacattgcgattcttattgggtggaaatggcgagcttgcaggtgtttgagaagatgcaccgtatggatttgagcgaaagggccaaagacgaagtccgcgaagcagcgcttaaaagcttcaataaaaggaagcctctgtccctcgggataactcggaaggaacggcctcctttagatgtggacgaaatgcttgagaggtttaagactgaggcccaagcttttaccgaaaccaagggaaacgtgatctgtctgggaaaagaggtattcaagggtaagaagcctgacaaggacaacagatgtagatatatcttgaagacgaaatttcgtgagatgtggaagtcatggcctggagacagcaaagaggttcaggttatggccgagcgatacaaaatgctcataccctttagtaatccgcgcgtactgcctgggccattctcttacacggtggtcctgtatggcccagctggtctggggaagacaacactggcccagaaactgatgctggattgggccgaggataaccttatccataagtttaagtacgccttttatctatcatgtcgggagctcagtcgtctcgggccatgttcttttgctgagctggtgtttagagactggccagagctccaggatgatatcccgcacatactggcacaggccagaaaaatacttttcgtgattgatggcttcgacgagctgggagccgcccctggcgccttgatagaggacatctgtggcgattgggaaaagaagaagccagtgcccgtcttgctcggatctcttcttaatcgagttatgctgcctaaggcagcgctccttgtcacaacgcgccctagggccctgcgggatctgaggatcctagccgaggagcccatttacatacgcgtggagggattcttggaggaagatcgccgtgcttacttcctgaggcacttcggtgatgaggatcaggctatgagggcctttgaactcatgcggagtaatgccgccttatttcagctgggctccgcacccgcagtgtgctggatcgtctgcaccactctgaagcttcagatggagaagggggaggatcccgtccccacgtgtctgacaaggactggtctgtttctgcgatttctgtgttcccgattccctcaaggagcacagctgaggggtgcactgcggacactctccctgctcgccgcccaaggactgtgggcacagacctccgttctccatagggaagacctggagcggctcggcgtccaggaatcagatctgcgcctgttcttagacggggatatcctgagacaggaccgagtctccaaagggtgttatagtttcatccatctgtcattccagcagtttttgaccgccctgttttacaccctagaaaaggaagaggaagaggatagggacggccatacttgggatatcggcgacgtccagaagctgctctcaggcgtcgaacgcctgagaaaccccgacctcattcaggccggatactactcctttggcctggctaacgagaagcgggcaaaggaactggaagcgacttttggatgtagaatgtcaccggatataaaacaggagctattaaggtgcgatattagctgcaagggtggccactcgactgtaacagatttacaggagttgctaggttgtttatatgaatcacaggaagaagagctggttaaggaagtgatggcccagttcaaggaaattagcctgcatcttaatgccgtggatgtggttcctagctccttttgcgtgaaacattgccggaacctgcaaaaaatgtccctacaggtcattaaggagaacctgccagaaaatgtgacggctagcgagagcgatgccgaagttgagcggagtcaggacgatcagcacatgctccccttctggacagacctgtgctctatttttggcagtaacaaggatctgatggggctcgccattaatgattcgtttctgtccgcctctctagtaaggattttgtgcgagcagattgcgagcgatacttgccacttacagcgcgtagtgtttaagaacatcagccccgctgatgcccacaggaatttgtgccttgccttgcgaggccataagaccgtgacataccttactctgcagggcaatgatcaggacgacatgtttccagccctctgtgaagttttgagacatcccgaatgcaacttacggtacctcgggctggtaagctgctcagcaacaacccaacagtgggctgacctctctctggccctcgaagtgaaccagtcacttacctgcgtcaacctgagtgacaacgaactcctcgacgagggggccaaactgctatacacaacgcttcgccatccaaaatgctttctgcaacggctgagcctggagaactgtcatctcactgaagcaaattgcaaggatctggccgccgtgctcgtggtctcaagggaattaacccacctgtgcctggccaaaaatccaatcggtaatacgggagtaaagttcctctgtgagggactgagataccccgagtgcaagctccagactctggtgttatggaattgtgacatcacctctgacggatgttgcgatctcaccaagcttctacaggaaaaatcctctcttctgtgcctggacctgggacttaaccatattggtgtgaaagggatgaagttcttgtgtgaggctctgcgcaagccgttatgtaatctgagatgtctgtggttgtgggggtgttccattcccccttttagttgcgaggacctgtgctcggccctgtcttgcaaccagtctctggtaactctggacttagggcagaatccactgggatctagcggcgtgaagatgctgttcgagaccttaacttgtagcagcggtaccctgcggacattaaggctgaaaattgatgatttcaatgacgaactgaataagctcttagaagaaatagaagagaagaatccccagctgattatcgacacagaaaagcaccacccgtgggctgagaggccatcctctcacgactttatgatttag

SEQ ID NO: 69106 - DNA, 3189 bp, Artificial Sequence
  derived and/or modified sequence
atggtgagctccgcacaaatgggattcaatctgcaggcactgttagaacagttgtctcaagatgagctttcaaaatttaaatacctcataacaacattcagccttgcgcacgaactgcagaaaatccctcacaaggaggtggataaggcagatggcaagcagctggtggagatcctcactacgcactgcgactcgtactgggtggaaatggcatccctccaggtgtttgaaaagatgcaccgaatggacctgtctgaacgggccaaggacgaggttagagaggccgcccttaagtccttcaataagcgaaagccactctcactaggtattacacggaaggaaaggcccccattggacgtagacgagatgctggaacgcttcaagacagaagctcaggcttttactgagaccaagggaaatgtgatctgcctaggcaaggaagtgttcaaaggtaaaaagcctgataaagataacagatgcagatacattttaaaaactaagtttcgggagatgtggaagtcttggcctggagactccaaagaagtgcaggtaatggccgagcggtacaagatgctgattcctttttcaaatccacgggtcttgccaggaccttttagttatacagtagtgctgtatggccccgctggcttaggaaagaccaccctggcccagaaactaatgctggactgggcagaggacaatctgattcataaattcaagtacgccttttatttgtcatgcagagagttgagtagattggggccgtgcagcttcgccgaacttgttttccgggactggcccgagttacaggacgacatcccccatatattggcccaggctcgcaagatattattcgttatcgacggcttcgacgaacttggagctgcgcctggcgctctcatagaggatatctgtggggattgggaaaagaagaagcccgttcccgtgctcctgggcagcctgctcaatagggtaatgttgccaaaagcggctttgctggtgactacaaggccgcgcgcacttagagatcttaggatacttgctgaagagcctatttatatcagagtggaggggttccttgaggaagataggagggcctattttctgcggcatttcggggatgaggatcaggcaatgagggcctttgagttgatgcgctcaaatgcagctctcttccaattaggttccgcacccgctgtctgctggattgtctgcacaaccttgaagttacagatggaaaagggcgaggaccctgtccccacctgtctgacaaggactggactcttcctgagattcttatgttccaggtttccccagggcgcacagctgcggggcgccctgaggactctgagtctgctcgccgctcagggactgtgggcacaaacaagcgtgctccaccgggaggatttggaaaggctgggagtgcaggagtctgacttacgtctgttcctcgacggagacattctgagacaagacagagtatccaaaggttgctactcctttatacacctgtcattccagcagtttctgacagctctgttttatacgttggagaaggaagaggaagaggaccgagatgggcacacctgggatattggggacgtgcagaaactcctgagtggtgtggagcgcctgcgaaatcctgacctgatccaggcagggtactactcctttgggctcgctaatgagaagagggcaaaggagctggaagcaaccttcggctgccgcatgtcacctgatatcaagcaggaattgctcagatgtgacatctcctgtaagggcgggcactctaccgtaacagacctgcaggaactgctgggctgcttgtacgagtcccaagaagaggaactagtaaaagaggtgatggcccagttcaaagagatttctctccacttgaacgccgtggacgtagtgccatctagcttctgtgtgaagcactgccgtaacttacagaagatgagtctacaagtcataaaggagaatctgcccgagaacgtgactgctagcgagtccgacgccgaggtggagaggtcacaggacgatcagcatatgctgccattctggaccgatctgtgttcaatatttggctccaataaggatctgatgggcttggcgatcaacgacagtttcttgagcgcatcacttgtacgcatcctatgtgagcaaattgcgtcagacacctgtcatcttcagcgagtcgtgttcaaaaacatctcacctgccgatgcacaccgtaatctctgtctagcgctgcgggggcacaaaactgttacatacctgactctccaagggaatgatcaggatgatatgtttcctgccctgtgcgaagtcctacgccatcccgagtgtaatctgagatacctgggtttggtttcatgttccgcgactacacagcagtgggccgacctctcactcgcgcttgaggtgaatcagtcactgacgtgtgtgaatcttagcgataacgagctgttggatgaaggcgcaaaactcctctacaccaccctgagacatcccaagtgtttcctccagcgtctctcactggagaactgccatctgaccgaggctaactgcaaagatctggccgcagtgctggtcgtaagtagagagttaacacatctgtgcctggctaaaaatcccatcggtaacacgggggtcaagtttctgtgcgaaggcctgagatacccggaatgcaaactgcagaccctagtgctttggaactgcgacatcacctccgacggctgttgcgatctgactaaactcctgcaggaaaagtcgtctctgctatgtttagatctgggcctgaatcacattggcgtgaaaggaatgaagtttctttgtgaggccttgcggaaaccactgtgtaatctgcgctgcctctggttgtggggctgctctatcccccctttcagctgtgaggacctgtgctcggctctcagttgtaaccagtcacttgtcacactcgatctgggccaaaatcccctcggatcttccggtgtcaaaatgctgtttgagaccctgacctgtagttccggtaccctcaggacactgagattgaagatcgatgacttcaacgatgagctgaacaaactgttggaggagatcgaagagaagaatccacaacttataattgataccgagaagcatcacccctgggctgaacgccctagcagccacgacttcatgatttag

SEQ ID NO: 69107 - DNA, 3189 bp, Artificial Sequence
  derived and/or modified sequence
atggtttcctccgcccagatggggtttaacctgcaggcactcttggagcaactttcccaggacgagctcagtaagtttaagtatctcatcaccacattcagcttggcacatgagctacagaagatcccacataaagaggttgacaaagctgacgggaagcagctggtcgagattctgacaacccactgtgattcatattgggtggagatggcgtccttacaggttttcgagaagatgcacaggatggatttaagtgagagagccaaagatgaagtgcgggaagcagcactgaaatcctttaataagcggaaaccgctcagtctcggaatcacaagaaaggagagaccccctcttgatgtggacgagatgctcgaaagattcaaaacagaggctcaggcttttactgaaactaagggaaatgtcatatgcctcggcaaggaggtgttcaagggaaaaaagcccgacaaagacaaccgatgcagatacatcctgaaaacaaaattcagggagatgtggaaatcctggccgggcgattctaaggaagtccaggtcatggctgaaaggtacaaaatgctaataccatttagcaatcccagagttctcccagggcccttctcgtataccgttgtcctttacggacctgctggcctgggcaaaactactttggctcagaaattgatgcttgactgggcagaagataacttgattcacaagttcaagtacgcattctaccttagctgccgagaactgtctaggctcgggccctgttctttcgccgagctggtctttagggactggcctgagctgcaggatgatattcctcatatactggcccaagcaagaaagattctctttgtcatcgatgggttcgatgaactcggcgcagcgcctggggcgttgattgaagatatctgcggggattgggagaagaagaagcctgttcccgtgctactggggtctcttctcaaccgggtgatgctaccgaaggcggcattattagtgactacaaggccgcgagctttgagggacctacgcattcttgcagaagagcccatctacatccgcgttgaggggtttttggaggaagaccgtcgcgcatattttctgcggcacttcggggacgaagaccaagcaatgcgggcgttcgagctgatgagatccaacgcagctttgtttcagctgggaagtgcccctgctgtgtgttggatcgtgtgtactacactgaaacttcagatggagaagggagaggatccagtccccacctgccttaccaggactggactatttttaagatttctttgcagtagatttccgcagggcgcccagctgcgaggggcgctgcggacactgagcctgctggccgcccaaggtctgtgggcgcagaccagcgtgctccacagagaagatctggagagactgggtgtgcaggaaagtgaccttaggttattccttgatggagatattcttaggcaggaccgggtgtccaaaggctgctatagcttcatccacctgagtttccagcagtttttgactgctctgttctacaccttggaaaaggaggaagaagaagatcgcgatggccacacctgggatattggtgatgtacagaaactgctgtcaggcgtggagcgcctcaggaacccagacttaatccaggcaggatattactcattcggtctggccaatgagaagagagctaaagagctggaggcaaccttcggatgcagaatgtcccctgacatcaaacaggaactacttagatgcgatatttcttgcaagggagggcactcaactgtaactgacctccaggaacttctgggctgtctctatgagagccaggaagaggagctagtgaaggaagtcatggctcagttcaaggagataagcctccacttgaacgctgtcgacgtagtgccttcaagtttttgcgtcaagcactgccgtaacctgcagaaaatgagcctccaagtgatcaaagaaaatctcccagaaaacgtaactgctagcgaatcggatgcagaggtcgaacgatcccaggacgatcagcatatgctccctttttggaccgatctttgttcgatctttgggagcaacaaggacttgatgggcctcgcgatcaacgactcctttctgagcgcgtcactcgtcaggatactatgtgaacagatcgcttctgatacttgccacttacaaagggtcgtctttaaaaacatttctcctgctgacgcccaccgcaatttgtgcttggcactcagaggccacaaaacagtcacatatctgactctgcagggcaatgaccaggacgacatgttccctgctctctgtgaggtgctgagacaccccgaatgcaacctgcgatatctaggcctggtgtcttgttccgcgacaacccagcagtgggcggacctttcactggcgctcgaggtgaatcagagtcttacctgtgtgaatttgtctgataatgagttgctggacgagggggcaaaactgctatacacaacactcaggcatccaaagtgcttcctgcaacgactcagcctcgagaattgtcacctgaccgaggcaaattgtaaggatttagcggctgtgttggtggtgtcccgtgagctgacacatctgtgcctggccaaaaaccccattggaaatactggcgtgaaatttctctgcgaggggctaaggtatcccgaatgcaagctgcagactctcgttctctggaactgtgatatcacaagcgatggttgttgcgatttgaccaagcttctgcaggaaaagagtagcttactctgcctggacctcggtctcaaccacattggtgtgaaaggaatgaagttcctatgtgaggcactgagaaaacccttgtgtaacctcaggtgtctatggctctggggatgcagcatcccccctttctcgtgcgaggatttatgctcagcattaagttgtaaccagtcgctagtgacactggacctcgggcagaaccctttggggagctcaggggtcaagatgctatttgagactctgacttgttcctccggcaccttgagaacgctgcgactgaagatcgacgacttcaatgatgaacttaataaactgcttgaagaaatcgaggaaaagaaccctcaactgatcatagacaccgagaagcaccatccttgggccgagcgtccatcttcccatgacttcatgatatag

SEQ ID NO: 69108 - DNA, 3189 bp, Artificial Sequence
  derived and/or modified sequence
atggtgtcgtctgctcagatgggcttcaacctgcaggccctgctggaacagttatctcaagacgagttgtcaaagtttaaatatctcattaccaccttttccctggctcacgagttgcaaaaaatcccccataaggaggtcgacaaggcggatgggaaacagctggtggagatactgaccacacactgcgactcctattgggtcgagatggcctctctgcaggttttcgagaagatgcataggatggatctgtcagaaagggctaaagacgaggtgagggaagcagcgctcaaatcattcaataaaagaaagcccttaagtttgggaattacaagaaaagagaggcccccactcgatgtggatgaaatgctggagcgatttaagacagaggcccaggccttcactgagacgaagggaaacgtgatttgcctggggaaggaagtctttaaagggaagaaacccgacaaagataacagatgccgttatatccttaagacaaagttcagggagatgtggaaatcctggcctggggattcaaaagaggtgcaagtgatggctgagcggtataagatgctcattcccttctccaatcccagagtactgcccggaccattctcatataccgttgtcctctacgggcccgccgggttgggcaaaaccaccctcgcacagaaactgatgcttgattgggccgaggataatctgatccataagttcaagtacgcgttttatctgagctgccgcgaactcagcagactgggtccctgtagctttgctgagttagtgttcagagactggcccgagctccaagacgatattccacacatcctggcacaagctcgaaaaattttgttcgtgattgatggcttcgatgaacttggcgctgctcccggagcccttatcgaggacatctgcggcgactgggagaagaaaaaacctgtgcctgtcctattagggtccctgctgaatagggtgatgctgcctaaggctgcactgctggtgaccacccggccccgggctcttcgagacttgcgcatccttgcagaagagcctatctatatccgtgtggaggggttcctggaagaagatcggagggcatattttctccgccacttcggcgatgaagaccaggcaatgcgtgccttcgagctcatgagatctaacgccgctttgttccagctcgggtcagcgcctgccgtgtgttggatcgtgtgcactaccctaaagctgcaaatggaaaaaggtgaggaccccgtccctacctgtctgactcgaaccggcctcttcctccgtttcctgtgttcaagattccctcagggtgcccagctgcggggagccctgcgcaccctgtctcttctggctgcacaaggactttgggctcaaacctctgttttacaccgcgaggatttggagagattaggggtgcaggagtctgacctccggctgtttttggatggcgatattttgaggcaggacagagtctcaaaaggatgctacagtttcatacacctctctttccaacagttcttgaccgccttattctacaccctcgaaaaggaggaggaagaggatagggatggccatacatgggacattggagacgtacaaaagctgctgtccggagtggaaaggcttcgcaaccctgacctcatccaggcggggtattattcctttgggctagccaatgagaagagagccaaagaactggaggctaccttcggctgtcgaatgtcacccgatattaagcaggaactcctgagatgtgatattagctgcaaaggtggtcattccacggttacagacttacaggaattgctgggctgtctttatgaatctcaagaagaggaacttgtgaaggaggtcatggctcagttcaaggagataagtttacacctgaatgctgtcgacgtggttccatcttctttctgtgtcaagcattgcaggaacctacagaagatgtccctgcaggtcattaaagagaacttgcctgagaatgtcacagctagcgagtccgacgcagaggtcgagaggagtcaggatgaccagcacatgctccccttttggacagacttgtgctctatattcgggtctaacaaggatctgatgggcctggccatcaatgacagcttcttgagcgccagtctggtgcggatattatgtgagcagattgccagtgatacttgccacctgcagcgggtggtgtttaaaaacatttcacccgccgacgcccacagaaacctctgtctggccctgaggggacacaagaccgtgacctacttaaccttgcagggcaacgaccaggacgacatgttccccgctctgtgcgaggtgttgaggcaccctgagtgtaatctcaggtatctgggtctggtttcttgttctgccaccacccaacaatgggccgatttatccctcgctcttgaggttaaccagagtctcacctgtgtcaatttatccgacaatgaactgctggacgaaggagctaagctgctgtacacgacgctccgacacccgaagtgttttctgcaaagattgtctcttgaaaactgtcatctgacagaggcaaattgtaaggatctcgcggccgtccttgtggtcagccgagaactgacacatttgtgtctggcaaagaatcccatcgggaatactggggttaagtttctgtgcgagggcctaaggtacccggagtgcaagctgcagactttggtgttgtggaattgcgacatcacatccgatggatgctgtgaccttactaagctgctgcaggagaagagttctctgctttgcctggacctcgggcttaaccatatcggagtaaaaggaatgaagttcctttgcgaggcattgagaaagcctctatgcaatttgcgatgcctctggctctggggctgctctattccaccctttagctgcgaagatctctgctctgctctgtcctgcaaccagagtttggtgactttagaccttggacagaatccgctgggctcctcaggagtcaaaatgttgtttgaaacactgacatgtagctctggtacactcaggactctaaggctcaagattgacgactttaatgacgagctgaacaaactcctggaagagatcgaagagaagaacccccagctgattatcgataccgagaaacaccatccctgggctgaacggccttcctcccacgatttcatgatctag

SEQ ID NO: 69109 - DNA, 3189 bp, Artificial Sequence
  derived and/or modified sequence
atggtgtcaagcgcccagatggggttcaacttgcaggcattgctagaacagctgagccaggatgaattgagcaagtttaagtacttgatcacaactttttccctggctcatgagctgcagaagattccacacaaggaggtggataaggccgacggcaaacaacttgttgaaatattaacaacccattgtgacagttactgggtcgagatggcgtcgctacaggtgttcgagaaaatgcaccgcatggacttaagcgagcgtgcgaaagatgaggtccgagaggcagctctaaagagctttaataaacgaaaaccactttccttaggcattacacgaaaagagagaccccccttggatgtagacgagatgctggaaaggttcaagactgaagcacaggccttcacggaaactaagggaaacgtgatctgtctggggaaggaggtgttcaaaggcaagaaacctgataaagataaccgttgcagatatatcctcaagaccaagttcagggagatgtggaagtcttggcccggagactcgaaggaagttcaggtgatggctgagcgctacaagatgctaattcccttcagcaatcctcgggttctcccaggcccgttcagttataccgtagttctgtacggccccgccggactcggcaagaccactctggcacagaaactgatgcttgattgggctgaggataatctgatccataagtttaaatacgccttttatctgtcgtgccgagagctttcaagacttggcccctgtagctttgctgagctagtctttcgagactggcctgaactccaagatgacattcctcatattttagctcaggctcgcaaaatcctgtttgtgatagacggatttgatgagctcggcgctgcccccggtgcgttgatagaggacatctgtggagattgggagaaaaagaagcccgttcctgtgctgctcggaagcctcctgaatcgggtaatgctgccaaaggcagccctgctcgtgacaactcgacccagagcattgagggaccttaggattcttgccgaggagcccatatatatccgagtggagggctttctggaagaggaccgcagggcctatttcctccgccattttggagatgaggatcaggccatgcgagcctttgagttgatgcgcagcaatgccgcgctgtttcagttgggctcggccccagccgtctgttggatcgtatgtaccacactgaagctacaaatggagaaaggtgaagaccctgtaccaacatgcctgacccgaactggactttttctcagatttctgtgcagccgatttccgcaaggtgcccagttaagaggggccttaagaacacttagccttctggccgcccaggggttgtgggctcaaaccagtgtgttgcatagagaggacctggagagactaggcgtccaggagtccgacctgcgcctgttcctcgacggtgacatattacgccaagaccgagtatcaaaggggtgctactcctttatacatctgtcgtttcagcagtttcttacagccctgttctatacactcgaaaaagaagaagaggaggaccgcgatggacatacttgggatataggagatgtgcagaagctattgagtggcgtggagcgactgaggaaccctgacttgattcaggcgggatactattcattcggactcgcaaatgagaaacgggctaaagagctggaggcgacctttggatgtcgcatgtctcctgacattaagcaggagcttctccgatgcgatatttcctgtaagggggggcactcaaccgtgactgatctgcaggaattgctgggatgcttatacgagagtcaggaggaggaactcgtgaaagaggtgatggctcagttcaaggaaatcagccttcacctgaatgctgtcgatgtggttccgtcctcattttgtgtgaaacattgccgtaacttgcagaagatgtcgcttcaagtgatcaaagagaatctgcccgagaacgtgactgcaagcgaatctgatgcagaagtagagcggtctcaggatgatcagcacatgctgccattctggacagacctgtgtagtatctttggctcaaacaaggacctgatgggtttagccataaacgattcattcttgtcagctagcctcgtgcgtattctgtgcgagcagatcgcctccgatacctgccatctgcagagagtggtatttaaaaacattagccctgccgatgcgcataggaacttgtgcctggctcttcgcggccataagaccgtcacttatctgactctgcagggaaatgaccaggatgatatgttcccagctctgtgcgaggtgctgcgccacccagagtgcaatttgcgttacctggggttggtgtcctgcagcgccaccacacagcagtgggcagatctgagcctagcgttggaggtgaaccagagccttacatgcgtcaacctctcagataacgagctgctggacgaaggggccaagttactatatacaaccctacgccaccctaaatgctttcttcagcgactgtctttagagaactgccacctcaccgaggctaattgtaaagacttggcagccgttttagtggtcagccgagagctgacgcatctgtgtctggctaagaaccctattggcaatacaggggtaaaattcctatgcgagggtctgaggtaccctgagtgcaaacttcagaccttggttctctggaattgcgacatcacatccgatggttgttgcgatctgacaaagctgctgcaggaaaagtcatcactcctctgcctggacctcggacttaaccacatcggcgtcaaaggtatgaagtttctgtgtgaggctttaagaaaaccactatgcaatctgcggtgcctatggttatggggatgttccattcctcctttcagctgtgaggacctctgctcggccctgagctgcaaccagagcctggtcaccctggacctcggtcaaaatccgctgggcagttctggcgttaagatgctgttcgagacccttacttgcagtagcgggacactaaggactctgcgcttaaaaatcgacgacttcaatgacgagttaaataagctgctggaggaaattgaggaaaaaaatccacagctgatcatcgatacagaaaaacaccacccatgggcggaacggcctagctcccatgacttcatgatctag

SEQ ID NO: 69110 - DNA, 3189 bp, Artificial Sequence
  derived and/or modified sequence
atggtctctagtgcacagatgggattcaatttgcaggcactgctcgaacaactatcccaagatgaattaagcaaatttaaatacctgattacaacctttagcttggcccacgaattacagaaaatcccccataaggaggtggacaaggcggacggaaaacagttggttgaaatccttactactcactgtgactcttactgggtggaaatggcttcacttcaggtgtttgagaaaatgcaccgaatggacttatcagaaagggccaaagacgaggtgagagaggctgcactgaagtcctttaataagaggaagccactgtcactaggcattacaagaaaagagagaccccccctcgacgtcgatgaaatgcttgaaagattcaagacagaagctcaggcctttactgaaaccaagggcaacgttatttgcctgggcaaagaggttttcaagggaaagaagcccgataaagataatcggtgtcgatacatcctcaaaaccaagtttagggagatgtggaaatcttggccaggcgactctaaggaggtgcaggtcatggctgagaggtacaagatgctcatccccttctccaatccaagagtcttgccaggacccttttcctacactgtagtgctgtacgggcctgcaggcctggggaagaccaccctggcacagaaactgatgctggactgggctgaggacaatctcatccacaagtttaagtacgccttctatctaagttgtcgggagttgtcccggctaggaccatgcagctttgccgaactggtcttcagagactggccggaattacaggacgacatcccgcatatactggcccaggctagaaagatcctcttcgttatcgacggctttgacgagctgggcgcagctccgggtgcactgatcgaggatatctgcggcgactgggaaaaaaagaaacccgtacccgtgctgcttggctccctcctgaaccgcgtgatgctgcccaaggctgcgctattggtgacaacccgccctcgcgcactgagggatctgagaatcctggccgaagagcctatctacatccgggtggaaggattcctggaggaagaccgcagagcctacttcctgcgacacttcggcgacgaagaccaagctatgagggcttttgagctgatgcggtctaacgcagctctgtttcaactgggatctgctccagccgtctgttggatcgtttgtactacccttaagctacagatggagaagggagaagatccagtccctacctgtttgacccggacgggtctgttcttgcgctttctttgctccagattcccacagggggcccagctgcggggcgcccttcgcaccctttcgctgctcgcagctcagggcctctgggcacagacaagcgtcttgcatcgcgaggacctggaaagacttggcgtccaggagtcagatctgcgcctgtttcttgatggcgacatcttaaggcaggatcgcgtctcaaagggctgttatagcttcatccatctgagctttcagcagtttttaaccgcactgttctatacactggaaaaggaggaggaggaggaccgggatggccacacttgggatattggagacgtgcagaagctcttgtctggcgtggaacggcttcgcaacccagatctgatacaggcaggttattactcctttggtctcgctaacgaaaagagagccaaagagctcgaagcaacgttcggctgcaggatgagtcccgacatcaaacaagagctgctgcgctgtgatatctcctgtaagggcggacacagcaccgtgactgatctccaggaactgctgggttgtctatacgagtcgcaggaggaagagctcgtgaaggaggtcatggcgcagttcaaggagatctccctgcatttgaacgcagtggatgttgtcccgagcagcttctgcgttaaacattgtcgcaacctccaaaaaatgtccttgcaagttatcaaagagaacctgccagaaaatgtcacagcatccgagtctgatgccgaggtcgaacgttcccaggatgatcagcatatgttgccgttctggacggacctctgctctatctttggttctaacaaggacctgatggggttggccatcaacgattcctttctgtctgccagcctcgttcgtatactgtgcgaacaaatcgcaagtgacacctgccacctacagcgcgtggtatttaaaaacatttcccccgcggacgcacacagaaatctttgcctcgcacttcgcggtcacaagacagtgacctatctgacacttcaagggaatgatcaggacgacatgtttccagcattgtgcgaggtgcttaggcatcctgaatgtaatttgcggtaccttggcctggtgagttgttctgccacaactcaacaatgggcagacttaagcctcgccctcgaggtgaatcagtcgctcacctgcgtgaatctgtcagacaacgaactcctcgacgaaggagccaagttattatacaccactcttaggcacccaaagtgcttcctgcagaggctctcgctggagaactgccatctgaccgaggccaactgtaaagatcttgcggccgtgctcgtagtgagccgcgaattgactcacttgtgcctggcgaagaatcccatcggaaacacaggcgtgaagttcctgtgtgaggggctgcgctatccagagtgcaagctgcaaacactggtcctctggaattgtgatatcacgtctgacgggtgttgtgatctgactaaactattgcaggagaagagctcccttctttgcctggatcttggactcaatcacattggcgtgaagggtatgaagtttctgtgtgaagccctcaggaagccattatgtaatttacgctgtctctggttgtggggatgctccatcccaccattcagctgcgaagacttgtgctcagcgctgtcctgcaatcagagtcttgtgaccctcgacctcggtcaaaacccacttggatcaagcggggtcaaaatgttgttcgagactctcacctgtagttcaggcacactcagaacgctgcgactcaagattgatgacttcaatgatgaactaaacaagctcctcgaagagatcgaggagaaaaatcctcagctgatcatcgacacggagaagcatcacccctgggcagagaggcctagctcacatgactttatgatttag

SEQ ID NO: 69111 - DNA, 3189 bp, Artificial Sequence
  derived and/or modified sequence
atggtgtctagtgcacagatggggttcaacttgcaggctctattagaacagctctcccaggatgagttgagcaaatttaaatacctgatcacaacattcagtttggcccatgagcttcaaaaaatcccccacaaagaagtcgacaaagctgatggcaaacagctggttgagattcttacaacccactgtgattcctattgggttgagatggccagtctacaagtatttgaaaaaatgcacaggatggacttgagcgagagagcaaaagacgaggtgcgcgaggctgccctgaaaagtttcaataaacgcaagcccctgagccttggaatcacacgtaaagagcgtccccctcttgatgtggatgaaatgctggagcggtttaagaccgaggcccaagcctttacagaaacaaagggcaatgtgatctgcctcggtaaggaagtgtttaaagggaagaagccggacaaggacaaccggtgtcggtatatattgaaaactaagttccgggagatgtggaaatcatggcctggtgactcgaaggaggtgcaagtcatggctgaacgctataagatgctgatcccattctccaatcctcgcgtgctaccaggaccattttcctatactgtggtcctgtacggccccgcagggctgggtaagactactttggcccagaaactcatgcttgactgggccgaagacaatctgattcataaattcaagtacgcattctacctctcatgtagagagctgagtagattagggccatgttctttcgccgagctcgtgtttcgggactggccggaactacaggatgatataccgcatatcttggcccaagcaagaaagattctgttcgtgattgacgggtttgatgaactcggcgcagcgccaggggccctcattgaggatatctgtggcgattgggaaaagaaaaaaccggtccccgtgttgctgggatcactactcaacagggtcatgcttccaaaggcggcacttctggtcaccacccgacctcgagcgctgagggatttgcgcattctggctgaggagccaatctacattcgggtggaaggattcctggaggaggataggcgtgcatatttccttcgacacttcggtgacgaagatcaggctatgcgtgccttcgagcttatgaggtccaacgcagcactcttccagttgggcagtgcacctgccgtgtgttggattgtgtgtacaaccctgaaattgcagatggaaaagggcgaggaccccgttcccacttgcctaactagaaccggcctctttctgcggttcctgtgttccagattcccacaaggcgctcaactgcgaggagcccttcgcacactgtctctgctcgccgctcaaggactatgggcgcagacctctgtgctgcatagagaagacctcgagcgtttaggcgtccaggaaagtgatctgcgcctgttcctggatggggacatattgcgacaggacagggtgtccaaaggctgttactcatttattcatctctcttttcagcaattcttgactgcacttttttatacactcgagaaagaggaagaagaggacagagatggtcatacgtgggacatcggagacgtgcagaagttactctcaggtgtggagaggttaaggaaccctgacttaattcaggccggttattattctttcggactggccaacgagaaaagggctaaagagttggaggccaccttcggctgtaggatgagcccggacattaaacaggaattgctgcgttgtgacataagctgcaaaggcggccactctaccgtgaccgaccttcaggagctgcttgggtgcctgtatgaaagtcaggaagaggagctagtaaaggaagtgatggctcagtttaaagagatttctttgcacctgaacgcagttgacgtggtgcccagctcattctgtgtcaagcactgcagaaatcttcagaagatgagtcttcaggtgatcaaggaaaacctgccagaaaatgtgaccgcttctgaatccgacgcagaggtggaaaggtcacaagatgaccagcatatgctgccattctggaccgacctgtgtagtatcttcggaagcaacaaagatctcatgggactggcaatcaacgacagtttcttgtccgcaagtctggtgaggattctgtgcgaacagattgcctccgatacttgccacctccagagggtggtcttcaagaatatcagcccggccgacgctcataggaacctgtgtctcgcactgcgcggacataaaacagtgacctatcttaccctccagggtaacgatcaggatgacatgtttcctgctctgtgcgaggttctgaggcaccctgaatgtaatttgcggtatctcgggctggtgagctgtagcgctaccactcagcaatgggccgacctatcgctggccctcgaggtgaaccagtccctgacctgcgtcaatctcagcgataatgagttattggacgagggcgccaagttattgtatacaaccttgcgacacccgaaatgctttctacagagattgagcttggaaaactgccatctgactgaggcgaattgtaaggacttagcggcagttctcgtagtgagtagagagctgacacacctctgcctggcgaagaaccctatagggaatactggggtcaagtttttatgcgagggcctgagataccccgaatgcaaattacagactcttgtcttatggaactgcgacattacgtccgatggctgttgtgacctcactaaacttctgcaagagaagtctagtctgctttgtttagacttgggcctcaatcacatcggcgtaaaaggcatgaaattcctctgcgaggccctgcgcaaacctttatgcaatcttcgctgtctctggctctggggctgctcaattccacccttttcctgcgaagatctgtgttcagcactttcatgtaaccagtctctagttaccctggacctaggtcagaatcccctaggatcctctggcgtgaagatgctttttgagaccctcacctgctccagcggtactcttcgcaccctgagactgaaaattgatgatttcaacgatgaactcaacaaactcctggaggagatcgaagaaaaaaacccgcaactgattatagatacagaaaaacaccacccgtgggccgagagaccatcctcccatgactttatgatttag

SEQ ID NO: 69112 - DNA, 3189 bp, Artificial Sequence
  derived and/or modified sequence
atggttagttccgctcaaatgggctttaatctacaggcgctgctggagcagctcagtcaggatgaactgagcaaattcaagtatctgattacaacattcagtctggcccacgagctgcaaaaaatcccccataaggaagtagataaagccgacggtaaacagctggtggaaattctcacgactcattgcgattcctactgggtcgagatggcttcattacaagttttcgaaaagatgcataggatggatctgtccgagcgggccaaagatgaggtccgtgaagcagctttgaaatcctttaataagaggaagccgttatcactgggtattacccggaaggaaagacctccattggacgtcgatgagatgctggaacgttttaagactgaggcacaggcttttactgagacgaagggcaacgttatatgtttgggtaaagaggtcttcaaggggaaaaaacccgacaaggataatagatgtcgctacatcctcaagacaaagtttcgggaaatgtggaaatcttggcctggcgacagtaaagaggtgcaggtgatggccgagcgctataaaatgttaattcccttttcgaaccctagagttctccccggcccctttagctacacagtcgtgttgtacggaccagccggcctggggaagaccactctggcccagaagctgatgcttgactgggccgaggacaatttgatccacaagttcaagtatgccttttacctgtcatgcagagagctgtccagactcggcccctgctccttcgccgagctggtttttagagactggcccgagcttcaggatgacattccccatatcttggcccaggcacggaaaatactgttcgtgatcgacggcttcgatgagctcggtgcggcacctggtgcgctcatcgaggatatctgtggcgattgggagaaaaagaaacccgtacccgtcttactgggatcccttctgaacagggtgatgcttcccaaggcagccttactcgtgaccacaagacctagagctctccgagaccttaggatactcgcagaggaacccatctacatacgggtggaaggctttctggaggaagacaggcgggcatatttcttacgtcacttcggcgacgaggaccaagctatgcgagcttttgaacttatgagatccaacgccgccctgtttcaactgggctccgctcccgcggtgtgttggatcgtatgtacaacccttaagttgcagatggagaagggagaggatccagtgcccacctgcttgacaaggaccgggctgttcttaagatttctatgttctagattccctcagggtgcccaattacggggcgcactcaggaccctgagcctgttggcggcccaaggcctttgggcccagacgagcgtgctgcaccgagaggacctggagagactgggtgtgcaggaaagcgatctgaggttgttcctggacggcgatattctccggcaggaccgggttagtaaaggctgctactcgttcatccatctttccttccagcagtttctgactgccctgttttatactttagaaaaggaagaggaggaggatagggacgggcatacctgggatattggagacgtgcagaagcttcttagtggcgtcgaaaggctgcgtaaccctgacctcatccaggctggatactattctttcgggctggcgaatgagaagcgcgctaaagagcttgaagctacattcggctgcagaatgtcacctgacattaaacaagaacttcttagatgcgacatatcatgcaagggggggcattctactgttaccgacctccaagagctcctgggatgtttgtatgagagccaggaagaggagctcgttaaggaggtgatggctcaatttaaagagatttctctgcatttaaatgcggtggacgtggtgccgtcttccttttgcgtgaagcattgccgtaatctgcagaaaatgtccttgcaagtcatcaaagagaatttacctgaaaatgttaccgcttcggaatctgacgccgaggtggagcggtcccaggatgaccagcacatgctgccattttggaccgacctctgtagcatattcggttctaataaggacctcatggggttggccataaacgattccttcctcagtgcttctctggttcggatcctgtgcgaacagatcgcatccgacacctgccatctgcagcgggtggtgtttaagaacatctccccagccgatgcacaccggaacctatgtcttgccctgcgcggccacaaaaccgtgacgtacctcacactacagggcaacgaccaggatgacatgttccccgccctttgcgaggtcctaaggcacccggagtgtaatctgagatacctcggactcgtcagctgcagcgctacaactcagcagtgggcagatttgagcctggccctggaggtgaatcagagtttgacttgtgtgaatctttccgacaacgaattattggacgagggtgccaagctcctctatactaccctacgccacccaaagtgctttctccagaggctctctctcgagaattgccatctcacagaggccaactgcaaagatctggctgcagttctggtcgtctccagagaactaactcatctgtgcctggcaaaaaaccctatcggaaacaccggcgtgaaattcttatgtgaggggctcagatacccggaatgtaaactccagacccttgttttatggaactgcgacattacttcagatgggtgctgcgatctgaccaagctgctccaggagaagtcctccctgctgtgcttagacctcgggctcaaccatattggtgtcaaaggaatgaagttcctttgcgaggcattacggaaacccctctgtaatcttaggtgtctgtggctgtggggctgcagcattcctcccttctcgtgcgaggacctatgtagcgccctgtcatgtaatcagtctcttgtaaccctggacctggggcagaatcctttaggctcgtcaggcgtgaaaatgctctttgaaacattaacttgcagcagcgggaccctccgcaccttgcggctgaaaatcgatgatttcaatgacgaactgaataagctcctggaagaaatagaagaaaagaatccccaattgattatagataccgaaaagcaccacccttgggccgagagaccaagttcgcacgattttatgatatag

SEQ ID NO: 69113 - DNA, 3189 bp, Artificial Sequence
  derived and/or modified sequence
atggtgagtagcgcccagatggggtttaacctgcaggcactacttgaacagctgtcccaggacgaactgtcaaaattcaagtaccttattaccacctttagtttagcacacgaactgcaaaaaatacctcacaaggaagtggacaaagcagatgggaagcagttagtggagatcctcactacacattgcgacagctactgggtcgagatggcctctctgcaggtgttcgaaaaaatgcaccggatggatctctctgagagagctaaagatgaagttagagaagcagcactgaagtcattcaacaagcgcaagccgctttctctcgggattacacggaaggaaaggccaccgctcgatgtggatgagatgcttgagagattcaagaccgaagctcaggccttcactgagactaagggaaacgttatttgtctcggcaaagaggtgttcaagggtaagaaacctgacaaagacaaccgctgcaggtacatcctgaaaacaaaattccgggagatgtggaaatcatggccaggcgactcaaaagaagtgcaggtgatggcagagcggtacaagatgctcatccccttcagtaacccacgcgtcttgccgggaccattctcctacacggtggtgctgtacgggcctgccggcttgggcaagactaccttagctcagaagttaatgttagactgggccgaagacaatcttattcataagtttaagtacgctttctacttatcgtgtcgcgagctgagccgcctggggccatgctccttcgccgaactcgtcttcagggactggcctgaactgcaggacgacatccctcacatccttgctcaggccagaaagatcctgtttgtcattgacgggtttgacgaactcggagctgctcccggagctctcatagaggacatatgcggggactgggagaagaagaaaccggtccctgtcctactgggatccctgttaaaccgtgtgatgctcccaaaagctgcattactggtcactacaagaccacgcgctctgcgcgacttacggatcctcgcagaggagcctatttacattagggtggagggattcctggaggaggataggcgagcttacttcctcagacacttcggcgacgaggatcaggccatgcgagccttcgagctgatgcgcagcaacgccgcactatttcagttgggaagcgcgcccgctgtttgctggatagtctgcacaacgctcaaactccagatggagaaaggcgaagaccctgtcccgacctgccttacacgaacgggtctgtttctaaggtttctgtgcagcaggttcccccagggcgctcaactccgcggagctctccgcactctgagccttttggcagcacaaggcctatgggcgcagacaagcgtcctccaccgggaggatctggaacgactgggagttcaggaatccgatctgagattgttcttggacggagacattctcagacaggaccgtgtgtcaaagggttgttacagttttattcacctgagtttccagcagttcctgacagcgttgttctataccctggagaaagaggaagaggaggaccgggatggacacacatgggacatcggcgacgtgcaaaaactgctgagcggcgttgaaaggctgcgcaatccggatctaattcaggccggctactactcgttcgggcttgccaacgaaaagcgggctaaagagctggaggcaacctttggctgccgtatgtccccagatattaagcaagagcttctgcggtgcgatatctcttgtaagggggggcacagtactgttacagaccttcaggagttgttgggatgtctgtacgagtcccaggaagaggaactggtcaaggaagtcatggcacagtttaaggaaatttcattgcacctgaatgctgtggacgtggtgccctcatctttttgtgtcaagcactgcaggaacttacagaaaatgagccttcaagtgatcaaggagaatctgcccgagaacgtcacagcttccgaaagcgacgctgaagtcgagcgaagtcaggatgaccagcacatgttacccttctggaccgatttatgcagcatcttcggcagcaataaggatctgatgggcctggccataaatgatagcttccttagcgcctcacttgtgcgaattctttgtgaacagattgcttccgatacatgccatcttcagcgagtagttttcaaaaatatctcacccgccgatgcccaccggaacctgtgcctcgctctccggggccataagacggtcacgtatctcaccttgcagggtaacgatcaggatgacatgttccccgctctgtgcgaggtcctgcgccacccagagtgtaatctcagatatttaggcttagtgagctgcagtgccacgacccagcagtgggccgatctatcactggctctggaagttaaccagagcttgacttgcgttaacttgagcgataacgaactcctcgacgagggcgcaaagttactgtacactactctgcgccaccccaagtgcttcctccagaggctctcattggaaaattgccacctgactgaggccaattgcaaggatctggctgcagtgcttgtggtctcacgagagctgactcatctgtgtctggccaagaaccccattgggaataccggcgtaaaattcctctgcgagggtctccggtaccccgaatgtaaactgcagactctcgtcctctggaattgcgatataactagtgatgggtgctgcgatctgaccaagctgctgcaagagaaaagttccttgctgtgccttgacctcggactgaaccatattggagtgaagggtatgaagttcctctgtgaggcactccgcaagccattatgcaacctgcggtgcttgtggctgtggggctgcagcattcctccatttagctgtgaagacctgtgcagcgctctgtcctgcaaccagtccctggtcacactcgatttggggcagaacccactgggctcaagcggcgtgaaaatgcttttcgagaccctcacgtgctcgtccggtaccctaaggacccttcgcctaaagattgacgattttaatgacgagctgaacaagcttttggaagagattgaggagaaaaatccccaactgattatcgacaccgagaagcaccacccgtgggcagagcgccccagttctcatgatttcatgatttag

SEQ ID NO: 69114 - DNA, 3189 bp, Artificial Sequence
  derived and/or modified sequence
atggtgagcagcgcccagatgggcttcaacctgcaggccctgctggagcaactctcccaagatgaactttctaaatttaaatatcttattaccactttttcactggcacatgagctgcagaaaattccgcacaaggaggtggataaagctgatggtaaacagctggtggagattctgaccactcactgtgacagctactgggtggagatggcaagtctgcaggtctttgagaagatgcaccgcatggacttgagcgaacgcgccaaggatgaggtccgggaagcagccctcaaatcatttaacaaaagaaagccgctgtctctgggtatcacccgcaaagaacgcccccctctagatgtggatgagatgctggaacgatttaaaacggaggcccaggcctttactgagacgaaagggaacgtcatttgcttggggaaagaggtgttcaaagggaagaagccagataaggacaatcggtgcaggtatatattgaagacaaagttccgagagatgtggaagtcctggcccggagacagtaaagaagtgcaggtgatggccgagagatacaaaatgctcatacccttctctaatccgcgcgtgttgccggggcccttctcgtataccgtggttttatacggacccgctggactggggaagaccaccctggcacaaaagctaatgctggactgggcagaggataacctgatacataagtttaagtacgctttctacctgagctgcagagaactttccaggttgggcccctgctcttttgcggaactcgtctttcgtgattggcccgagttacaggatgatattcctcatatactggcccaggccaggaagattctgttcgtgattgatggtttcgatgaactgggcgctgcacccggcgcactgatcgaagacatttgcggagattgggaaaagaagaagcctgtgccagtcctgctcgggagcctccttaaccgcgtgatgcttcccaaggctgcgttgttggtgaccaccagaccccgcgcattaagagatcttcgcattctggccgaggaacctatctacatccgcgttgaaggctttctggaggaggaccgtcgtgcttactttctccgccattttggggacgaggatcaggctatgagggccttcgagctcatgcgtagtaatgccgccctgttccagctcggatctgccccggccgtgtgctggatcgtgtgcactacgctgaaactccagatggaaaagggcgaggaccccgtaccaacttgccttactcgcacgggactgttcctacgattcctgtgtagtagatttccccagggcgcccagctaagaggcgctttaaggacactcagcttgttggcagctcagggcttatgggcccaaacaagcgtgttacaccgggaagatttagagagattgggcgttcaggagagtgatctgagactttttctggatggggatatacttagacaggacagagtatccaaaggatgctattccttcatccatcttagctttcagcaattcctgacggctttgttttacaccctcgagaaggaggaggaagaagaccgtgacgggcacacatgggacatcggtgacgtgcaaaagctactttctggcgtggaaagactacgcaatcctgatctcattcaggctggctactattcctttggtctggcgaatgagaagcgcgccaaagaactggaggcaacattcggatgtcgtatgtctcccgacattaaacaggaactattaaggtgtgacatctcatgtaagggcggccattcgacggtcaccgatctccaggagctcctcggctgcctgtacgagagccaggaggaggagctggtgaaagaagtaatggcgcagttcaaggaaatctctctgcacctgaacgcagtggacgttgtgccctcttctttctgtgtcaagcactgcagaaacctgcaaaaaatgtccttgcaggtaatcaaagaaaatctaccagagaatgttacagcctccgagtccgacgcagaagttgagcgctctcaggacgaccagcacatgctgcccttctggaccgacttgtgctctatatttggaagtaataaggatctgatgggactggccataaatgactcctttttaagcgctagtctggtgcgtatcctgtgcgagcagatcgccagcgatacatgccatctgcaaagggtggtcttcaaaaacatttcgcctgctgacgcccacaggaatctttgtctggcccttcggggccataagaccgtgacctacttgacacttcagggcaatgaccaagacgacatgttccctgcactctgcgaggtcctgaggcaccctgagtgcaatctgcgctacctgggactggtgagctgctcggctacaactcaacaatgggcagatctgtccctcgcactagaggtgaatcagtctttaacatgcgtgaaccttagcgataacgagctcctagatgaaggggccaaattgctctatacaactctgaggcaccctaaatgcttcctgcaacggctctctctggaaaactgccatctaactgaggcgaactgcaaagatctggctgcagtgctggtggttagccgcgaactgacccatctttgcctcgctaaaaatcccatcggtaatacgggagtgaagtttctctgcgaagggctgaggtaccccgagtgcaagctccagacactggttctctggaattgcgatattacaagcgatgggtgttgtgaccttaccaaactgctacaagaaaagtcgtctctactgtgtctggacctgggcctgaatcatatcggagtcaaggggatgaagttcctttgtgaagcactgcggaaacctctttgtaacttacggtgcttgtggctgtgggggtgttctatccctccttttagctgtgaagacttgtgctctgcgttgtcctgtaatcagagtctggttacacttgacctggggcagaatcccctgggaagcagtggcgttaagatgctgttcgagactcttacctgctctagtggaacactgcggaccttaagactgaaaatcgatgatttcaatgacgagctgaacaaactgctcgaggaaattgaggaaaagaaccctcagctgatcatcgacaccgaaaagcatcatccatgggccgagcgcccgtcatcacacgatttcatgatttag

SEQ ID NO: 69115 - DNA, 3189 bp, Artificial Sequence
  derived and/or modified sequence
atggtgagcagcgcccagatgggcttcaacctgcaggccctgctggaacagctgtcacaggatgagcttagcaaattcaaatacttaatcaccaccttttcactcgcccacgagctccaaaaaattccacacaaggaagtggacaaggcagacggcaaacagctggtggagatcctcacaacacattgcgatagttactgggtcgagatggcttcgctgcaggttttcgagaaaatgcaccgcatggacctatctgagagggctaaagacgaagtccgcgaggccgctctaaaatcatttaataagagaaagccgttgtcactgggcattacccggaaggagcgtccccctctcgacgtcgatgagatgttagaaagatttaagacagaagcccaagcctttactgaaactaagggcaacgtgatctgcctagggaaagaggtgtttaaggggaagaaaccagataaggataaccgatgtagatacatactcaaaaccaaatttcgcgagatgtggaaatcctggccgggagattcaaaggaggtgcaagtaatggctgaacggtataagatgttgataccattttctaatcctcgcgtcctgcctgggccgttctcctacactgtggtgttatacgggcccgctggcctgggcaagacgaccttggcccagaagctgatgctcgactgggcggaagataacctaatccataagtttaagtacgcattctacctgagttgcagggagctgtctagattgggtccctgcagctttgcggaactggtgtttcgagactggcccgaactgcaggatgatatcccccatatcctggcacaggctcggaaaatcctcttcgtcatagacggattcgatgaattgggcgctgcacctggagccctgattgaggacatctgtggagattgggaaaagaaaaagccagtccctgtgcttctggggtctctgctgaatagggtgatgcttccaaaggccgccctactggtgactacccgccctcgagccttgagggatctgagaatacttgcagaggagccaatttacatcagagtggaagggttccttgaagaggaccgccgcgcttatttcttgcgccatttcggagatgaggaccaagctatgagagcttttgagctgatgaggtcaaatgccgccctgtttcagctggggagcgcccctgccgtctgttggattgtctgtaccacccttaaacttcagatggagaagggtgaggatcctgttccaacatgtcttactcgcactggtctatttcttcgatttttatgctccagattcccacaaggcgcacagctgaggggagccctccggacgttatctctgctggccgcccagggactttgggctcagacaagcgtgctccaccgagaggatctagagcgcctgggggtgcaggagtccgatctgcggttgttcttggatggggacatcctgcgacaggatagggtgagcaaggggtgttattcattcattcacttgtctttccagcagtttttaaccgctcttttctacacccttgaaaaagaagaggaagaggatcgagacggccacacctgggacatcggagatgtccagaagctcctgtccggagtcgagagacttcggaaccccgatctgattcaggcgggctattacagcttcggcctcgctaacgagaaaagggcgaaagaacttgaggctaccttcggatgtaggatgagccccgacatcaaacaggagctcctgagatgtgacatctcctgcaagggcggccactccactgtcacggacctgcaggaactgctcggttgtctgtacgaaagccaggaggaggagctcgtaaaggaagtgatggcccagtttaaggagatctccctgcacctgaacgccgtcgacgtggtcccctcttcattttgcgtgaaacattgtcggaatcttcagaagatgagcctgcaggttataaaggagaatttgcccgaaaatgtgaccgcctccgaatccgacgccgaagtcgagcgaagccaggacgatcagcacatgctgcccttttggacggatctgtgcagtatttttggttccaataaggacctgatgggccttgccattaacgatagcttcctgagcgcgtcgctggtgcgcatcctctgcgagcagatcgcatccgacacttgccacctccagagggtagtgttcaagaatatcagccctgccgacgcacatagaaacctgtgtctcgcgctccgcggacacaaaacagttacgtaccttacactgcagggtaatgatcaggatgacatgtttcccgcactgtgtgaggttctgagacaccccgagtgtaatctgcgttacttaggcctcgtctcttgcagcgcgacaacacagcagtgggctgacctttctctggctcttgaagtgaaccagagcctgacatgtgtgaacctgtccgataatgaacttttggacgagggggctaagctgctgtacactaccctgcgtcacccgaaatgtttccttcagcgtctgagcctggagaattgtcatctgacagaggctaactgcaaagaccttgccgccgttttggtggtgtccagggaattaacccacctttgtcttgccaaaaacccaatcggcaacactggtgtcaaattcctctgtgagggactgcggtacccagagtgcaagctgcagacacttgtactgtggaattgcgatataaccagcgacggatgctgcgacttaactaagctcctgcaggagaaatcctcgctactctgcctggacctcggactcaatcatattggggttaagggaatgaagttcctttgcgaggctctgcggaaacccctttgtaacctgcgctgcctgtggttgtggggctgctccatcccaccattttcttgcgaggatttgtgttctgccctgagctgtaatcaaagcttagttacattagacctggggcagaaccctctgggttcctcgggcgtgaaaatgctttttgaaaccctcacttgctccagcggaaccctcagaacactaagactaaagatcgatgactttaatgatgagctgaacaagcttctagaggagattgaggagaagaaccctcagctgatcattgacaccgagaaacatcacccatgggctgagcgaccaagctcccacgacttcatgatttag

SEQ ID NO: 69116 - DNA, 3189 bp, Artificial Sequence
  derived and/or modified sequence
atggtgagcagcgcccagatgggcttcaacctgcaggccctgctggagcagctctcacaggacgagctaagtaagttcaagtatctgattacgactttctctctggcccacgagctgcagaagattccacacaaagaagttgacaaggccgatggaaagcagctcgtggagatcctgactacccactgtgactcctactgggtggagatggcgagcctgcaggtcttcgaaaagatgcaccgcatggacctctcggagagagccaaggatgaagtgagggaagctgccctgaagagctttaataagagaaaaccgcttagtctggggattacaagaaaagaacgccccccattagacgtggatgagatgttggagaggttcaaaaccgaggcccaggccttcaccgaaaccaaggggaatgtgatctgtctgggcaaggaggtgttcaaaggaaagaaaccagataaggacaatcgctgcagatacattctgaaaacaaagttccgcgagatgtggaagtcatggcccggagatagcaaggaggtccaggtgatggcggaaaggtacaagatgctgattcctttcagcaacccccgggtcctgcctggcccattcagttatacagtggtactttacgggcctgctgggctagggaagacgactctggcacagaaactaatgctagattgggctgaggataatctgatccataagttcaagtatgctttctatttaagttgccgagaactttctcgtctcgggccttgttcattcgctgaactggtgttccgggactggccagagctgcaagatgacatcccacacatcttggcacaagctcggaagattctttttgtgatcgatggctttgacgaacttggtgctgctccgggtgcactgattgaagacatctgtggtgactgggaaaagaaaaagcccgttccagtgctcctgggatccctattgaaccgagtaatgctccctaaagctgctctcctggtgaccacgcggccaagggctctgagagatcttagaatcctggctgaggagccaatttacatacgggtcgaagggtttctcgaagaggacagaagggcctacttcctgcgacactttggcgacgaggatcaggccatgcgtgcattcgagctgatgagatccaacgcagccctctttcagttaggttcagccccagctgtatgctggatagtctgcaccactctgaaactccagatggaaaaaggcgaggaccccgtaccaacttgtctcactcgtacaggtctgtttcttcgatttctgtgcagccggttccctcagggagcgcagttacgcggcgctctcaggaccctgtccctgcttgccgcacaaggtttgtgggcgcagacctcggtgctgcacagggaggacctggaaagattaggtgttcaggagtcagacctacgcctcttccttgacggggacatcctgcgccaggatagagtgagtaagggatgttatagctttatacatttgtctttccagcagttcctgacagctcttttttacacccttgaaaaagaggaggaggaggatcgcgacggccatacgtgggacatcggcgatgtccagaagctgcttagcggcgtggagaggctgagaaaccctgatctaatccaggctgggtactatagctttggtcttgctaacgagaaaagagccaaagagctggaggccacttttggttgtcgcatgagcccagatattaaacaggaattgttgaggtgcgatatctcttgcaagggcggtcatagtactgtgactgatcttcaggaactgctgggctgcctctacgagtcgcaggaagaggagttggtaaaagaggtgatggcacaattcaaagaaatctcactgcatcttaacgccgtcgacgttgttccaagtagcttttgtgtaaaacactgcagaaacttgcagaaaatgtcgctgcaggtcatcaaagagaacctgccggagaacgttaccgcaagcgagagtgacgccgaagtggagcgctctcaagatgatcagcatatgttgccattttggaccgacttgtgttctatctttgggtcgaacaaggatctgatgggcctagccataaacgattccttcctatccgcaagtttggtcaggatcctgtgcgaacagatagctagcgacacttgtcacttgcagagagtggtttttaagaacattagtcctgccgatgcgcatagaaacctgtgcttggccctgcgaggtcataagactgttacctacctgacactccaggggaacgatcaggatgacatgtttccggccctgtgcgaggtcctacggcatcccgagtgcaacctgcggtacttgggcctcgtttcctgtagcgcgaccacccagcagtgggccgatctatccctggccttggaggtcaaccagtcactgacttgcgtcaatctgtcagataacgagctgctggacgagggagcaaaattactgtatacaacccttaggcaccccaagtgctttctgcagcgactgagcctggagaattgccacctcaccgaggccaattgtaaggacttggcggcggtgcttgtagtgtcccgggagttgactcacctttgcttggctaagaaccccatcgggaataccggggtcaagttcctgtgtgagggcttgcggtatccagaatgtaaactccagacccttgtgttatggaactgtgacatcacatccgacggttgttgtgatctcacaaaattgcttcaagagaagtcatctctcctgtgcttggatctcggtctgaaccacatcggggtgaaaggaatgaagttcctttgcgaggcgctccgaaaacctctgtgtaatttgagatgcctgtggctgtggggttgctccataccgccgttctcttgcgaagacctgtgctctgccctgagctgcaatcagagcctggttacactggacctgggccagaatcccttagggtcttccggggtaaagatgttatttgaaaccttaacctgttcctcaggaacattgaggacactcagactgaagatcgatgactttaatgacgaattgaataagctgctcgaggaaatcgaagagaagaatcctcagctgatcattgacactgagaaacaccacccatgggcagaacggcctagctcacacgactttatgatttag

SEQ ID NO: 69117 - DNA, 3189 bp, Artificial Sequence
  derived and/or modified sequence
atggtgagcagcgcccagatgggcttcaacctgcaggccctgctggagcagttatcacaagatgaattgagtaagttcaaataccttattactaccttctccctcgctcacgagctgcaaaagatcccacacaaggaagtggataaggcagatggcaagcagctggtagaaattctaacaacacattgtgactcttactgggtagagatggcctcccttcaagtattcgaaaagatgcataggatggacctcagcgagagggccaaagatgaggtccgcgaggccgctttgaaatcttttaacaaacgcaaaccgctcagcttaggcatcacacgaaaggagcgcccgccccttgatgtcgacgaaatgctggaacggttcaagactgaagcccaagcctttacagagaccaagggaaacgtgatttgtttagggaaagaagtgttcaaggggaagaaacctgacaaggataacaggtgtcgctacatccttaagacaaagtttcgggagatgtggaaatcctggccgggggacagtaaggaagtgcaggttatggctgaacggtataaaatgctgattccttttagtaatcccagagtactgcccggcccgttttcctacacagtggttctttacggacccgctgggctgggaaagacaaccctggcccagaaattgatgcttgactgggcagaagacaacctcatccacaagtttaagtacgccttctatttgagctgccgggaactgagcaggttaggcccctgcagttttgccgaattagttttccgtgattggcccgaactacaggatgacattccacatatcctcgcccaggcacggaagatcctgtttgtgatcgacggtttcgatgaacttggggcagccccaggggcgctgattgaagacatctgcggtgattgggagaaaaagaagcccgttccagttttgctgggctcgctcctcaaccgggtcatgcttccaaaggccgctctcttggttacaactcggccacgagcattgagagacttgcgtatcctggccgaggagcctatatatattcgcgtcgagggtttcttagaggaggacagaagagcttacttcctcaggcactttggcgatgaggatcaggccatgagggctttcgaactcatgaggtccaatgcggcgctatttcagctgggaagcgcccctgcggtatgttggatcgtttgcactaccctgaaactccagatggagaagggagaggacccggttcccacatgcttgaccaggaccggtctattcctcagatttctgtgttctagatttccgcagggtgcacagctgcgcggcgccctccggaccctcagcctgttagcagctcagggcctttgggcccagacatcggtgcttcaccgggaggatttagagagactgggggtgcaggagagtgacctccggttgttcttggatggtgacatcttgcggcaggacagagtcagtaaggggtgttactccttcattcatctgagtttccaacagtttctgaccgcattattttatactttggaaaaagaggaggaggaggatagagacggccatacttgggacattggcgacgtgcaaaagttattaagtggcgtagagcgactgcgcaatccggatctaatccaggccggttactacagctttggcctcgctaatgaaaagagagccaaagagttggaagccaccttcggttgcagaatgtccccagatatcaaacaggagctgctgagatgcgacatctcgtgcaaagggggccacagcacggtaaccgacctgcaggagcttctgggttgcctctatgagagccaggaggaagaactggtaaaggaggtaatggcacagtttaaagaaatatccctgcacttaaacgctgtagatgtcgtcccatctagtttttgcgtgaagcactgtcgcaatcttcaaaaaatgtcacttcaagtgatcaaggagaacctaccagaaaacgtaactgcatccgagtctgatgccgaggtggaacggtcacaggatgaccagcatatgctgcccttctggaccgatctgtgttctatttttggttcaaacaaggacttgatgggcctcgcgataaacgacagtttcttgtctgccagtctagttcgcatcttgtgcgagcaaattgcgagcgatacctgccacttacagcgagttgtcttcaaaaatatcagcccagctgacgcccaccggaatctctgtcttgccttaagagggcacaaaacagtgacatatctgacgctacaggggaatgatcaggacgatatgttccccgccctgtgtgaggttctccgccacccagagtgcaacctccggtacctgggtcttgtgtcatgttccgcaactactcaacaatgggcagacttgagcctggctctagaggtcaaccagagtctgacatgcgttaatctttcggataacgagcttctagatgaaggagcaaaactcctttacaccaccctgcggcatccaaaatgtttcttgcagcggctgagtctcgaaaattgccatctaaccgaggctaattgtaaggatcttgccgccgttctcgtggtctcccgtgagcttactcacctgtgtctcgctaagaatcccatagggaacacgggggtgaaattcctttgcgagggactgaggtatccggagtgcaagctacagacccttgttctgtggaactgcgatatcacatcagacgggtgctgcgacctcacaaaactgcttcaagagaaatctagtttactatgtctcgacctggggctaaaccacatcggcgtgaagggcatgaagttcctgtgcgaagctctccggaagcctctctgcaatcttcggtgtctgtggctgtggggctgctctataccaccgttcagctgcgaggacttgtgttctgcattatcatgtaatcaatctcttgtgactttggatctcggccagaatcccctgggtagctctggcgtcaagatgctgtttgagacgcttacctgttcatcaggaaccctgaggactctacgcctaaagatcgacgacttcaacgacgaattaaataaacttctggaggagatagaagaaaagaaccctcagctgattatcgacacagagaagcaccacccatgggcagagcgaccctcttctcacgattttatgatatag

SEQ ID NO: 69118 - DNA, 3189 bp, Artificial Sequence
  derived and/or modified sequence
atggtgagcagcgcccagatgggcttcaacctgcaggccctgctggaacagctgtcccaggatgagctttctaaatttaaatatttgatcaccactttttctctggcacacgagctgcagaaaatcccccacaaggaggtggacaaggccgacggcaaacagcttgtcgaaatactgactacacattgtgactcttactgggtagagatggcctccctgcaagtgttcgagaagatgcaccgcatggacctgagcgagagggccaaggacgaggtgagagaggctgccttgaagtctttcaacaagcgcaaaccactgtctctcgggattaccagaaaggagcgtccacctctcgacgtggacgaaatgctcgagcgctttaaaacggaggctcaggcatttactgaaactaaaggtaatgtcatttgtttaggtaaggaagtttttaaggggaagaagccagataaggacaatcgctgcaggtacatactgaaaacaaaattcagggagatgtggaagtcttggcccggagactcaaaagaagttcaggtaatggccgaacgctacaaaatgctgatacccttctcaaatcctcgtgtcttaccgggaccattcagttacactgtcgtgttgtacggccctgctggcctgggaaaaacaactctggcacagaagttgatgctggattgggccgaagacaatctcattcacaagttcaaatacgccttctacctgagctgcagagaattatctcgtctcggcccatgtagttttgcagagctggtgttccgggattggcccgagctgcaagacgatattccccacattttagcccaggccaggaagatcctattcgtcattgacgggttcgacgagctcggggcagctcccggagccctgatcgaggatatctgcggggactgggagaagaagaagcccgttcccgttttgctgggaagcttgctaaatagggtaatgttgcccaaggccgcgctgctcgtgacaacacgtccccgggccttgcgggatctgaggatactggctgaggaacccatctacatccgcgtggaaggattcctggaagaggatcgaagagcctacttcctccgccattttggcgatgaagatcaggctatgcgtgctttcgagctcatgcggagcaatgcggccctgtttcagctcggctccgcccccgctgtttgttggatcgtttgtaccactctcaaactgcagatggaaaagggtgaggacccagtgcctacatgtctgacccgcactggactgtttcttcgcttcttatgttctcggttcccccagggggctcagctccggggtgccttgaggactctgtccctgctggcggcccagggcctgtgggcgcagacaagtgtcctgcaccgggaggacctggagagactgggagtgcaggagtccgatctccgactgttcctcgatggcgatattctccggcaggaccgcgttagcaaagggtgttacagcttcatccatctgtcttttcagcagtttctaaccgccctgttttacacattggagaaggaagaagaggaagatagggatggccatacctgggatataggagacgtgcagaaactgctttcaggcgtcgaaagacttcggaacccagacctgatccaggcaggctattattccttcgggctggcaaacgaaaagcgggcaaaggagctcgaggcaacattcggatgccgaatgtctccagatatcaagcaggaattgctccggtgcgacattagttgcaaaggcgggcatagcaccgtcactgacttgcaggagctactgggatgcctttacgagtcgcaggaagaggaactggttaaggaagtgatggcgcagttcaaggaaatatccctccatctcaatgcagtcgacgttgtcccttcatccttctgtgtgaagcattgtcggaatcttcagaagatgagtttgcaagttattaaagagaacctgcccgagaatgtcaccgcatctgaatctgacgcggaggtggaacggtcccaggatgatcaacatatgctacccttctggacagatctgtgcagtatttttggcagtaataaagaccttatgggtctggctattaatgacagctttttgagtgccagcctcgttcgcatactgtgtgagcagattgcatcagatacctgtcacctgcagagggtagtatttaaaaatatatctcccgccgatgctcacaggaacttgtgcctggccctgagagggcacaaaacagtgacgtatcttacgcttcagggcaacgatcaggatgacatgtttcccgctttatgcgaggtcctccgccatccagaatgtaacctgaggtacctggggttggtgagttgtagcgcaacaacccaacaatgggccgatttgtccctggcactggaagtgaaccaatctctaacatgcgttaaccttagcgataatgagctgttggacgagggcgcgaagctgctgtataccactctgaggcaccccaaatgctttctccagcgattatcactggaaaattgtcatctgacagaggctaactgcaaagacctggcggccgtgttagtggtcagccgggaactgacgcacttatgcctggccaaaaaccctatcgggaacacaggagtgaagtttctttgtgaggggctcagatatccagaatgcaaactacaaaccctggttctctggaactgcgatatcacctcagacgggtgttgtgacctcactaaactgttgcaggagaagagctccctgctctgcctcgacctggggttgaatcacattggtgtgaaaggcatgaaattcctctgcgaggctctcagaaaaccactttgtaacctgcgctgcctctggttgtggggctgcagcattccccccttctcatgtgaggatctttgttctgccttgtcttgcaaccagagcctggtaacgctcgatctcggccaaaaccccctaggctcctcaggcgttaagatgctctttgagactctcacatgtagtagtggtacactgagaaccctgcgactgaagatagacgacttcaatgatgagctgaataagctgctggaggaaatcgaggagaaaaaccctcaactgataatcgacactgagaagcatcacccttgggcggaacgcccttcctcccacgacttcatgatctag

SEQ ID NO: 69119 - DNA, 3189 bp, Artificial Sequence
  derived and/or modified sequence
atggtgagcagcgcccagatgggcttcaacctgcaggccctgctggaacaactatctcaagacgagctcagcaaattcaagtaccttattacaactttctctctcgcccacgaattacagaagattccacacaaagaggtcgataaggcggacgggaaacagctggtcgagattctgaccactcactgcgattcctattgggtggagatggcctccctacaagtctttgaaaaaatgcatcgaatggatcttagcgagcgagcaaaggatgaggtccgggaggcagcactgaaatccttcaataagagaaagcctctctcactggggatcaccaggaaggaacggcctcctctggacgtggacgagatgcttgagcggtttaagacggaggcacaggcctttacggaaacgaaaggcaatgtcatttgccttggtaaggaagtgttcaaaggaaaaaagccagacaaggataatcgttgtaggtatatcctgaagactaagtttagggagatgtggaagtcttggcccggagacagcaaagaggtccaggtgatggcggagcggtacaaaatgcttatacccttttctaacccccgagtcttgcccggccccttcagttacactgtggtgctgtatggacctgccggactaggcaagacaacactggctcagaagctcatgctcgattgggccgaagataatctcatccataagttcaaatacgccttttatttgagctgtcgcgagctgagccgcctaggcccatgttcatttgctgaactggtctttcgagattggccagaactacaggacgatatcccccacatcctggctcaggcccgcaagatactgtttgtcattgacgggtttgacgaactgggcgccgctcctggagcgctgatcgaggacatttgcggggattgggaaaagaaaaaacccgtgccagtcttactcggaagcctgctgaaccgcgtgatgctgccaaaggccgcactgctggtgactactcggcccagagcactgagggaccttcgcattttagccgaggagcctatatatattagggtggagggatttctggaggaggatcggagggcctactttctccgtcactttggtgacgaggaccaggcaatgcgggctttcgagctgatgagatctaacgccgccttatttcaattgggaagcgcaccagctgtatgctggatcgtttgcaccaccctcaaactacagatggagaagggcgaagacccagtgccgacttgtctgaccaggactgggctgttcctgagattcttgtgctcccggtttcctcaaggtgcgcaactgagaggcgcactccgcaccctgagcctcctcgcggcacaaggtctttgggcacagacctccgttctgcacagggaggacctggaacgcctgggcgtgcaggaatccgacctccggctatttctggacggcgatatcctgcgccaggaccgagtatctaagggctgctacagctttatacatctgtccttccagcagttcttaacggccctcttctacacactggagaaggaggaggaggaagaccgagatggccacacatgggatatcggcgacgttcagaaacttttgtccggtgtggagaggctcaggaatccggaccttattcaggccggctattacagtttcggcctggccaacgagaagcgagccaaggaattggaggccacctttgggtgtcgtatgtcccccgacatcaagcaagagctgctgcggtgtgatattagctgcaagggcgggcacagtaccgtgaccgacctgcaggagcttctgggatgtttgtacgaaagccaggaggaggagctggtcaaagaggtgatggcgcaattcaaggagataagcctgcatttaaatgccgtggacgtagttccttcctccttctgtgtaaagcattgccgtaatctgcagaagatgagtttgcaagtgattaaagagaatttaccagagaacgttaccgcctccgagagtgatgcggaggtggagcgatcacaggacgatcaacatatgctccctttctggaccgacctgtgctccatctttggatccaacaaggacctgatggggctggcaatcaatgatagcttcctaagcgcctcgctagtcagaatcctgtgtgagcagatcgcttcagacacctgccacctgcagagggtggtattcaagaacatatcccccgccgatgcacatcgtaacctgtgcctagcccttcgcggccataagacagttacatatttgaccctgcaaggaaacgatcaggatgacatgtttccagcgctctgcgaggtactgaggcaccccgagtgtaaccttcgatatctggggctggtctcatgctctgcgactactcagcagtgggcggatctctcattggccctggaggtgaatcagtcactgacctgcgttaatttgtcagacaacgaactgctcgatgagggcgcaaagctgctgtacactacgctgaggcacccaaaatgctttcttcagcgactaagccttgaaaattgtcacttgactgaggctaattgtaaggatctcgccgctgtgttagtagtgtcaagagagctgacccacctgtgtttggcaaaaaaccctattggcaacacaggagtgaagtttctgtgcgaagggctgaggtatcccgagtgcaagctacagaccctggtgttatggaattgtgacatcaccagcgacgggtgctgcgaccttacaaaactcctgcaggagaagtccagcctgctttgtctcgatttgggactgaatcacatcggcgtgaaagggatgaaattcctctgcgaagcgctgcgcaaacccctgtgcaatctccgttgtctgtggttgtggggctgttctataccacctttctcttgcgaagacctatgctcggcactctcttgcaatcagtcattggttaccttggacctgggacagaatcctttaggcagctccggcgtcaagatgctgttcgaaacattaacctgttcttctggcacgttgagaacactcagactcaaaatcgacgactttaatgacgaactcaacaaattgttagaggagatcgaggagaagaacccacaactcattattgacaccgagaaacatcacccatgggccgagaggcccagcagtcacgattttatgatctag

SEQ ID NO: 69120 - DNA, 3189 bp, Artificial Sequence
  derived and/or modified sequence
atggtgagcagcgcccagatgggcttcaacctgcaggccctgctggagcagctgtcacaggatgaactgagcaaatttaaataccttatcacgacctttagcctggcccacgagctccagaaaatccctcacaaagaagtcgacaaggcagatgggaaacaattagtggagatactcacaacccactgcgattcctattgggtagagatggcgtcactgcaggtgttcgagaagatgcaccgcatggacttgagcgagcgagccaaagatgaggttagagaggctgcgctgaaatctttcaataaaaggaaaccattatcactgggaataacaagaaaagagcggccccccctggacgtggacgaaatgcttgaacggtttaaaaccgaagcccaggcattcaccgagactaagggcaacgttatctgcttagggaaagaggtgtttaagggcaagaagccagacaaggataataggtgcaggtacatcctcaaaaccaagttccgcgagatgtggaagtcttggcccggagactcgaaggaggtccaggttatggcagaaagatacaagatgttgattccattttccaacccccgcgtgctccctggcccattcagctatacagtcgtgttgtatggccctgccggtttggggaagacaaccttggcacagaagctcatgctcgattgggctgaagataaccttattcataaattcaaatatgccttctacctctcatgccgggagctgtcaagattagggccttgctctttcgcagagctggtctttcgtgactggcctgaacttcaagacgatattccccacattttagcccaagcccggaagatcctgttcgtgatcgacggtttcgatgaattaggagctgctcctggtgctctgattgaagacatctgcggggactgggagaaaaagaagcccgtccccgtgctactcgggtccttgctaaatcgggtaatgctgcccaaggcagctttactagttacaactagaccacgggcgctgcgggacctgcgcatccttgcggaagagcccatttacatccgggttgaggggtttcttgaggaggataggagggcctacttcttgaggcactttggcgatgaagatcaggccatgagggcattcgaactgatgcggtccaacgccgctttattccagctcggctcagcgccggccgtgtgctggatcgtgtgcacaacactcaagttacagatggagaagggcgaggatccagttcctacatgtctgacacgtactgggctattcttacggtttctgtgttccaggtttccacaaggggcccagctaaggggcgctcttcgtaccctgtcactgttggccgcccagggtctgtgggctcaaacttcagtattgcacagagaggacttggaacgcctgggcgtccaggaatcagatttgcgactattccttgacggggacatcctgagacaagaccgagtgtccaaagggtgttacagctttatacatctgtcatttcagcaattcctcaccgctctgttctacacattagagaaggaggaggaagaggaccgagacggtcatacgtgggatatcggagacgtgcagaagttgctatcaggagtagaacggctcaggaaccctgatctgattcaagccggctactactcattcggcttagctaatgaaaaaagagccaaggagctggaggccaccttcggttgtcggatgtctccagacatcaagcaagagttactacgatgcgacatctcctgcaagggcggtcatagcacagttacagatttgcaggagctgctgggatgcctttatgagtcacaggaggaagagctagtcaaagaagtgatggctcaattcaaggaaattagtctccacctcaatgctgtggatgtggtcccgtcaagtttttgcgtgaaacattgtcgtaatctgcaaaaaatgtcactgcaggtgattaaggaaaatctaccagagaatgttactgccagtgaatcagacgcagaagtcgagagatcccaggatgatcagcacatgctgcctttttggactgatctctgcagcatcttcggtagtaacaaagatctgatgggtttagcgatcaatgatagcttcctctctgcgagcttggtgaggattttgtgcgagcaaattgcctcggatacatgccacctgcagcgggtggtgtttaaaaacatcagtccagccgacgcccacaggaacctgtgccttgctctcaggggccataagactgtgacttatctgacccttcagggaaacgaccaggacgatatgttccctgctctgtgtgaagtgctccggcaccctgaatgcaacctgagatatctgggccttgtcagctgctccgcaactacacaacagtgggcagacttgtctttggcactggaggtgaatcagagtctgacgtgtgtgaatctcagcgacaacgagctcctcgatgaaggggccaaactgctgtataccaccctgaggcatcccaagtgcttcttacagcgtctgtctttggagaactgtcatctgactgaagcgaattgcaaggatttggcggccgtccttgtagtgagtcgggaattgacacacctgtgcctcgccaagaaccccattggaaacactggcgtgaaattcctgtgcgaaggcttgagatatccagaatgtaaactccagactctcgtattatggaactgcgatattacctccgacggctgttgcgatctcaccaaacttctccaggagaaatccagccttttgtgtctagacttaggattgaatcatatcggcgtgaagggcatgaagtttctctgcgaagctcttcggaagcctctgtgtaatctgcgctgcctctggctgtgggggtgtagcatcccgcccttttcctgcgaagacctatgttcggcgttgagctgtaatcaatctctggtcactctcgacctcggtcaaaacccactcgggagctctggcgttaaaatgctttttgagaccctgacgtgcagctccggcactctacgaactctgcgactgaagattgacgactttaatgatgaactgaacaagctcctcgaggaaatagaagagaagaacccccagttgattatcgacaccgagaagcatcacccttgggccgaacggccatctagtcacgatttcatgatctag

SEQ ID NO: 69121 - DNA, 3189 bp, Artificial Sequence
  derived and/or modified sequence
atggtgagcagcgcccagatgggcttcaacctgcaggccctgctggaacaactgagtcaggacgagctcagcaaattcaagtacttgatcacaaccttctcattggcccacgaactgcagaagattccgcacaaagaggtcgacaaagcagatggcaaacaactggtggagatactgaccacccactgcgattcatactgggtggaaatggctagtctgcaggtctttgaaaagatgcatcggatggacttatccgagagggcaaaagatgaggtgagggaggctgcactcaagtcatttaataagaggaaaccgctgtctttgggtatcactcgaaaagaaagacccccactggatgtggacgaaatgctagaacggttcaaaacggaagcccaagctttcacagaaactaaagggaacgtgatctgtctcggaaaagaagtatttaagggtaagaaacctgacaaagacaatcgctgcagatatatacttaagacgaagtttagggagatgtggaaatcctggcctggtgacagcaaagaggttcaggtgatggctgaacggtataaaatgctgatcccttttagcaaccctcgcgtgctacctgggcccttcagttataccgtggtactctatggtccggccgggcttggaaagaccaccctggcccagaagcttatgctcgattgggcggaggataacctgattcataaatttaagtacgcattctatctgtcttgtcgggagctgagtagattgggcccctgttcgttcgcagaacttgtattcagagattggcccgaactgcaggatgatatcccgcatattttagcacaggcgaggaagatattatttgttattgatggttttgatgagctcggggccgcacctggagcgttgattgaagacatatgtggagattgggagaaaaagaaacctgtcccagtacttctgggctctctgttgaatcgcgtgatgctccctaaagcagcgctgttggtgaccacacggccccgagcacttcgcgatctgcgaatcctggcagaagaacccatctacattagagtggaaggctttcttgaggaagatagaagagcatactttcttcgccactttggtgacgaggaccaggctatgagagcgtttgagctgatgcgcagtaatgctgctctgtttcagctaggctctgctcctgctgtatgttggatcgtgtgcactacactcaaacttcagatggagaagggtgaagaccctgtacctacttgcctgacgcgaacgggactattcttacgctttctgtgtagtcgtttcccccagggtgctcagcttcggggcgctctgaggaccctctccctcttggccgcacagggcctatgggcccagacgtcggtgctgcaccgagaggacctagagcggctcggagtgcaggagtccgatctgaggttgtttctggatggtgacatcctgaggcaagatcgtgtgtctaaggggtgctatagcttcatccacttgagctttcagcagttcctgaccgcccttttctataccctggagaaagaagaggaggaagacagggacggtcatacctgggatataggtgacgtacagaaacttctaagcggcgtggagcgcctgaggaaccctgacctgatacaggctggctattactctttcggacttgcaaacgagaaaagggccaaggagttggaggcaactttcgggtgccgcatgtcaccagacatcaagcaggaactgctgagatgcgatatcagttgcaaggggggacactcaactgttaccgacctgcaggaactcctgggatgtctctatgagagccaggaggaagagctggtgaaagaagtgatggcacagttcaaggaaatttccctacacctgaatgctgtggacgtggtgccatccagtttttgtgtgaagcattgccggaaccttcagaaaatgtccctgcaggtgattaaggagaacctgcccgaaaatgtaacggcctccgagagtgatgccgaagtggagcgatctcaggacgaccagcatatgctgcccttttggacagacttgtgtagtatcttcggatctaataaggatctgatgggtctggcaatcaatgactctttcctctccgctagcctggttcggatcttgtgtgagcagatcgcttctgatacctgccacctccagcgcgtcgtttttaagaatattagtcccgccgacgcccaccgcaacctctgcttggccctgcggggacataaaacggttacttacctgactttgcagggaaacgaccaggatgacatgttccccgcactgtgcgaggttcttcgccaccctgaatgtaatttaagatacctggggctcgtttcgtgcagtgctaccacacaacagtgggccgatctgtctctagccctggaggtcaaccagtcccttacgtgtgtcaatctgtcggataatgagctcttagacgagggggctaaactcctgtacactacactgcgccaccctaagtgttttctgcagagacttagcttggaaaactgccacttgacagaggccaactgcaaagatctcgcggccgtgctcgtggtgtctagagagttaactcatctgtgcttagctaagaaccccataggaaacactggggttaagtttctgtgcgaagggctgcggtaccctgagtgtaagttgcaaaccctggtgctgtggaattgcgatattacaagcgacgggtgttgcgacttgaccaagctgctccaggagaaaagctcattgttgtgcctagatctgggactgaatcatatcggcgtcaaaggcatgaaatttctctgcgaagctctcaggaaaccactttgtaatttgaggtgtctgtggctctggggttgctccatacctccattctcatgtgaggatttgtgctctgccctgagttgtaatcagagcttggtcactctcgacttggggcagaatccattgggtagctccggggtcaagatgctctttgagaccctgacctgcagttcaggaaccctgcgcactctcaggctgaaaattgacgacttcaatgacgaactgaataaactgcttgaggaaatcgaggagaagaacccgcagctgatcatcgataccgagaaacaccatccatgggccgaacggccctcgtcgcacgatttcatgatttag

SEQ ID NO: 69122 - DNA, 3189 bp, Artificial Sequence
  derived and/or modified sequence
atggtgagcagcgcccagatgggcttcaacctgcaggccctgctggaacaattgtctcaggatgagctttcgaaattcaaatatctgatcactacgttcagcctagctcacgagctgcaaaaaattccccataaggaggttgacaaggcagatggcaaacagctggtagagatcctgacaactcattgtgattcgtactgggtggaaatggcaagccttcaagtcttcgagaaaatgcatcgtatggatctgtccgagagggccaaggatgaggtccgagaggctgccctgaagtccttcaataaacggaagcctctgtcactgggaattaccaggaaggaaagaccgcccctggatgtcgatgagatgttagagaggttcaagaccgaggcgcaggcctttaccgaaactaaggggaatgtcatctgcttgggcaaagaggtgttcaaggggaaaaaaccagataaggataacaggtgccgttacatcttgaaaacaaagtttcgggaaatgtggaaaagctggccaggagactccaaagaagtgcaggtgatggccgaacgttataaaatgcttattcctttctcaaatcctagggtgcttcctggtccatttagctacacagtagtgctgtacgggcccgccgggctggggaaaaccaccctcgcacaaaagcttatgctggattgggcagaggacaatctgatccataaattcaagtacgcattctaccttagctgccgcgagctaagtcgcctagggccttgtagttttgcagagttagtgtttcgggattggcccgagttgcaggacgacatccctcatatcctcgcacaggcccgcaaaatcctgtttgtaattgatgggtttgacgaactcggtgctgctccgggagccctgattgaggatatttgcggggactgggagaagaagaagcccgtgcccgtcctactgggctcgctgctaaatagagtgatgttacccaaggccgcactgctggttaccacgcggcctcgagctctgcgcgatctccgtatcctggcagaagaacctatctacatccgggtcgaggggtttctggaggaagaccgacgagcatactttctgcgccactttggcgatgaggaccaggccatgagggccttcgagctgatgcggagcaacgccgccctttttcaattgggtagcgccccggcagtctgctggattgtgtgcacaaccctcaagctgcagatggagaagggagaggatcctgtgccaacttgtctcaccagaacaggtctattcttaaggttcctgtgctcccgattcccccagggggcccagctccgaggcgccctccggaccctgagcctgctggccgcccaaggtctgtgggcgcagaccagtgtcttgcaccgagaagacctggagcgactgggcgtgcaagagagtgacctgcgcttgtttctcgatggcgacattcttcgtcaagatagagtttccaaaggttgctactccttcattcacctgtctttccagcaatttttgactgcccttttctacacccttgagaaagaggaggaggaagatcgtgacggtcacacctgggatatcggcgacgtccagaaattgctctcgggtgtggaaaggctcagaaatccagacttaattcaagccgggtattacagctttggcctcgcgaatgaaaagagagcaaaagaactggaggcaacatttggttgtcgcatgtcccctgacatcaagcaggaactgcttcggtgtgacatcagctgcaagggaggacactcaacagtgactgacctgcaggagctccttggctgcctgtacgagagtcaagaggaggaactcgtgaaagaagtgatggcacagttcaaggaaatcagtcttcacctgaacgccgtcgacgtagtgccctcctccttttgtgtcaaacactgtagaaatctccagaagatgtccctgcaggtgatcaaagaaaaccttcccgagaatgtgacagcttctgagtctgacgccgaagtggagcgttcccaggacgatcagcatatgttacctttctggacggacctgtgctcaatcttcggaagtaacaaggatcttatgggtctggcaatcaatgactctttcctttcagcctctctggttagaatcttgtgcgagcagatagcgtctgacacctgtcacctccagagggtggtgtttaagaatatctctcctgcggatgcccatcgtaacctatgcctggccctgcggggacataagacagtgacatatctgaccttgcagggcaacgaccaggacgacatgtttccagccctttgcgaggtgctcaggcacccagaatgtaacttgcggtatcttggtctcgtgagttgctcggccacgacccagcagtgggccgacctttcactcgccctggaagttaatcaatccttgacatgcgtcaacctgtctgacaatgaactgctggatgaaggggccaagctgctctacacgaccttacggcaccctaagtgctttctccagcgactaagtttggaaaattgtcatctgaccgaagcgaattgtaaggacctggccgcagtgcttgtcgtgtcacgagagctcacacacctgtgcctcgccaagaaccccattggaaatacgggggttaaatttctgtgtgaaggcctcaggtacccggagtgtaagctgcagacactagtactgtggaattgcgatataacctcagacgggtgctgcgacctgaccaaactgctacaggaaaaaagctccctgctgtgcctcgatctcgggctgaaccatattggcgtgaaaggcatgaaattcctgtgcgaggcactgcgaaaaccactgtgcaacttgaggtgcctgtggctgtggggatgtagtatcccacctttcagctgcgaggacctctgttctgccttgagctgtaatcagagtcttgtgacacttgatttaggccagaatcccctgggctcttccggagttaaaatgctattcgagacactgacctgttcctccggcaccctccgcaccctgagattaaaaatagatgacttcaacgacgaactgaacaaattgctcgaagagattgaagaaaagaatcctcagctgattattgataccgagaaacaccacccctgggccgaaagaccaagctctcatgatttcatgatctag

SEQ ID NO: 69123 - DNA, 3189 bp, Artificial Sequence
  derived and/or modified sequence
atggtgagcagcgcccagatgggcttcaacctgcaggccctgctggagcagctgagccaggatgagctcagtaaattcaagtatctgattacgacttttagtctggcccatgaacttcagaagattcctcacaaagaagttgacaaggctgacgggaagcaactggtggaaatcctcaccacgcactgtgactcttattgggtggagatggcatccctgcaggtattcgaaaagatgcaccgaatggacttgagcgagagggctaaagacgaggtgagggaggcggcgctgaagagcttcaacaaacggaagcccctgtcattgggtatcacacggaaagagagacctccactagacgttgatgagatgctggaacggtttaagacggaggcgcaagccttcacagaaaccaagggcaatgtcatatgcctggggaaggaggtgtttaaaggcaagaaacccgacaaagataatcggtgccggtatatcctgaagacgaaatttcgtgagatgtggaagtcatggcctggagattctaaagaagttcaagtgatggccgaacgatataaaatgttgatccctttttccaatccacgcgtgctaccaggacctttcagttatactgtagttttatatggccccgctggtctgggaaaaacaacattggctcagaagctgatgttggactgggccgaggataatctgattcataaattcaagtatgctttctatcttagctgtcgggaattaagccgcttaggcccctgcagcttcgccgagctggttttcagagactggcctgagctacaggacgatatcccgcatattcttgcgcaagctaggaaaattttgttcgtcatcgacggcttcgacgaattgggcgccgcacctggcgctctgatagaggatatatgtggtgattgggagaaaaaaaagcctgtgccagttctactcggcagcctcctcaatcgcgttatgctccccaaagcagccctcctcgtcaccacgaggcctagagcgttgcgtgatttaaggatccttgccgaagaacctatctacatacgcgtggaggggttccttgaggaagatcgtcgggcttacttccttagacattttggagacgaggaccaagccatgagagcgttcgaactcatgcgcagtaatgctgctctgttccaattgggaagcgctcctgctgtttgttggatagtgtgcactacattgaaacttcaaatggagaagggcgaggatcctgtgcccacttgcttaacgcggacgggcttatttctgaggttcctttgtagccggttcccacaaggagctcaattaaggggagcgctacggaccctgagtctacttgccgcgcagggcctctgggcgcagacgtcagtcttgcaccgagaggacctcgagcgtttaggcgtgcaggaaagtgatcttcgattgttcctagacggcgatattctgagacaggatcgcgtgtccaaaggatgttactctttcattcacctgagttttcaacagtttctgactgctttgttttacacactagagaaagaggaggaagaggatcgcgacggacacacttgggacatcggtgatgtgcaaaagctgctgagtggagtggagcgtctccgtaatcccgacttgattcaggctggctactacagcttcggtctggctaatgaaaaaagagccaaggaactggaggccacgtttggttgcagaatgtcaccagatattaagcaggaattgctcaggtgtgatatttcatgcaaaggtggacacagcacagtaacagacctacaggaactactcggttgtctttacgaaagccaggaagaagaactcgtgaaagaagtcatggcccagtttaaggaaatttcactccacttgaacgccgtggatgttgtcccaagctcattctgcgtaaagcattgtcgaaatctgcagaagatgagtctgcaggtaatcaaggagaaccttccagagaacgttactgcttctgagagtgatgccgaggtcgaaaggtcacaagacgaccagcacatgctcccattctggaccgatctgtgtagcatcttcggatcaaacaaggatctgatgggactggcaattaacgactccttcttatctgcttccttggtgcgcattctgtgcgagcagattgcctctgatacatgtcatcttcagcgggtagtgttcaagaacatcagccccgccgacgcacaccgaaatttgtgtcttgcattgcgaggccataaaaccgtgacctacctgacactgcagggaaatgatcaggacgatatgtttccggcactgtgcgaagttctgcggcaccccgagtgtaaccttcggtacctcggcctggtctcgtgctccgcaaccacacagcagtgggccgatttgagccttgcactggaggttaaccagtccctgacgtgcgtgaacctttctgataacgagcttctggacgaaggggctaagttactctacaccacactccgacaccctaaatgttttctgcagaggttatccctggagaattgccacctgaccgaggccaattgcaaagacctggccgcagtgctggttgtgtcacgggagctaactcacttgtgtctggctaagaatccaattggtaacaccggagtgaagttcctttgcgagggactccgatatcccgaatgcaaactgcagacactggtcctgtggaattgtgatattacgtcagacgggtgttgtgatctgactaagctgctgcaggaaaagagtagcctcctttgtttggatcttggactcaatcatataggagtaaagggaatgaagttcctttgcgaggctctgcgcaaaccattgtgtaatttgcgatgcctatggctttggggttgctcaattccgcctttttcctgcgaggatttgtgcagtgccctcagttgtaaccagtcactggtgaccctagatctgggtcagaatccactcggaagtagcggagtcaagatgctgtttgagacactgacctgttcaagcggtactttgcgaactctgaggctaaagattgatgactttaatgatgagctgaataaattactggaagagatcgaggaaaagaacccgcagttgattattgatacggagaaacatcatccctgggcagagcgtccttcctcccacgattttatgatttag

SEQ ID NO: 69124 - DNA, 3189 bp, Artificial Sequence
  derived and/or modified sequence
atggtgagcagcgcccagatgggcttcaacctgcaggccctgctggagcagttgagtcaggacgagctatctaagttcaaatacctcattactactttctcattagcacacgagttgcagaagatccctcataaagaagtggacaaagccgacggcaagcagttggtggaaatcctgacaacccattgcgactcctattgggtggagatggcttctttgcaagtgttcgagaagatgcacaggatggatttaagtgaaagagcgaaagacgaggtcagagaggctgctctgaaatctttcaataaaagaaagcctttatcacttgggattaccaggaaggagcgtccccctttagacgtagacgaaatgttggaaaggtttaagaccgaggctcaggccttcacggaaaccaaagggaatgtgatttgccttgggaaagaggtatttaaagggaagaaacccgataaagataatagatgccgatatatcctaaaaactaagtttcgggagatgtggaaatcctggccgggagatagcaaggaggtgcaggtcatggcagagaggtacaaaatgctgattcccttttctaaccctcgggtcctgccggggccattttcttacacagtcgtcctttacgggccagcagggttgggcaaaacaaccctggctcaaaagctcatgcttgactgggcagaagacaatttaattcataagttcaagtatgctttttacctgtcatgcagagagctgagcagacttggcccatgttcattcgctgagctggtgttccgggattggccggaactgcaagatgacattccgcatatcctggcccaagcccgcaagatacttttcgttatcgacggcttcgacgagttaggggccgcccctggcgcacttattgaggatatctgtggagattgggagaagaagaaacccgtgccagtactgttaggatcgctgctcaatcgggtgatgctacctaaagccgctctgctggtgactacccgcccccgagctctcagggacctcaggatcctcgcagaagagcccatttatatccgcgtggagggcttcttggaagaggatcgtagagcttacttcctgcggcactttggcgacgaagatcaggctatgagagcctttgagttgatgcggagcaatgctgctctcttccagctcggatctgcccctgccgtatgttggatcgtctgcactacccttaagctacagatggaaaagggtgaggacccagttccaacctgccttaccaggaccggtctgtttcttaggtttctatgttcgagatttcctcagggggcccagcttcgcggcgccctacggacactgagcctattggcggcgcagggcctgtgggcgcaaacttcagtgctccatcgagaagatttggaacgcctcggcgtgcaggaaagtgaccttaggttattcctggatggggatatactgcggcaagaccgtgtcagtaaaggatgctattcattcattcacctgtctttccagcagttcttgacagcgttgttctacaccttggagaaggaagaggaagaggaccgtgacgggcacacttgggatattggagacgtgcagaagcttctgtcgggtgtcgagaggcttcgaaatcccgatctcatacaagccggctactacagctttgggctggccaacgaaaaaagggccaaagaattggaagccacttttggctgccgtatgtcccctgacatcaaacaggagctcctgaggtgcgacatctcttgcaagggcggtcacagcacagtgacagatctgcaggagctattggggtgcctctatgaaagccaagaggaggagctggtgaaagaagtgatggcgcagttcaaagaaattagcctgcatctgaatgcggtggatgtggttcctagctcattctgcgtcaaacattgccgtaacctgcagaagatgagcctgcaagtgatcaaagagaatctgccagagaatgtcaccgcctccgagagcgatgctgaagtggagaggtctcaggacgaccagcacatgttgcccttctggaccgatctctgtagcatctttggctccaataaggacctgatggggttagctattaatgactcattcttgtctgccagcctcgtgcgcatcctctgtgaacaaatcgcatcagatacctgccaccttcagagagtggtgttcaagaatatttctcctgccgatgcccaccgcaacctgtgcctggcgctccgcgggcataagacagttacgtacttgactctgcaaggaaatgaccaggatgacatgttccctgccctatgtgaagtgcttcgacatccagaatgtaatctgcgctatctgggattagtatcttgttctgctacaacccagcagtgggccgacctgtctttagccctcgaggtgaaccagagcctgacctgtgtaaatctgtcagacaacgaactgcttgatgagggcgctaaacttttgtatacaaccctgagacatcccaaatgttttttgcaacgtttaagcctggagaattgccaccttacggaagctaactgcaaagatctcgccgcggtattagttgtctcacgggaactaactcacctgtgcttagccaagaacccaattgggaataccggcgtcaagtttttatgtgaagggttacggtatcccgagtgcaagctgcaaacccttgtattgtggaactgtgatattacaagcgatggttgctgcgacctgacgaagctgctgcaggaaaagagcagtctgctttgccttgacctcggactgaatcacatcggggtgaagggaatgaagttcttatgtgaggctcttaggaagcccctatgcaacttgcgctgcctctggttgtggggatgtagcataccaccctttagctgtgaggatttgtgctctgccctgtcttgcaaccagagcctcgtgaccctggacctgggccagaatcccctcgggagttccggagtgaagatgctcttcgaaacacttacttgttccagtggtacactccggactctgaggttaaagattgacgacttcaacgacgagcttaacaagctgctggaggagattgaggagaaaaatcctcagctcataatcgacactgaaaagcaccatccctgggcggagcgaccctccagtcatgattttatgatctag

SEQ ID NO: 69125 - DNA, 3189 bp, Artificial Sequence
  derived and/or modified sequence
atggtgagcagcgcccagatgggcttcaacctgcaggccctgctggagcaactctcccaggacgagctgtccaaattcaagtatcttatcacaaccttcagtcttgcccacgaacttcaaaagatccctcacaaggaggtggacaaggcagacgggaagcagctggtggaaattctcacaacgcactgcgattcgtattgggtagagatggcatccctccaggtgttcgagaaaatgcatcgcatggacttgagcgaaagagcgaaggacgaagtaagggaggccgccctgaaatccttcaataaaagaaagccactgtcactcggaattacccgaaaggagagacccccccttgacgtggatgaaatgttggaaagatttaaaaccgaggctcaagccttcaccgagactaagggcaatgttatatgtctgggcaaagaggtgttcaaaggaaaaaaacccgataaggataatcgctgccgatacatcctgaaaacaaaattccgtgagatgtggaagagctggccgggcgattctaaggaggtgcaagtgatggcagaacggtacaagatgctgattccatttagtaaccctagagtcctgcccggcccctttagttacactgtagtgctgtacggaccagccggcctgggcaaaactacactggcccaaaaacttatgcttgactgggcagaagacaatttgatccacaagtttaagtatgccttctaccttagctgtagagagctctccaggcttgggccatgcagcttcgcagaactggtgttccgcgattggcccgaattgcaagatgatattcctcacatcctagcccaggctcggaagatcctgttcgtgattgacggctttgatgagctgggggcagctcctggggcgctcatcgaagacatctgcggggattgggaaaagaagaagcccgttcccgttctgctcggaagcttactgaatagggttatgttacctaaagcagctctgctcgtaaccacccggcctagagcgcttcgggacttgaggatcctcgcggaggagccaatctacattcgcgttgaaggctttctggaggaagatagacgggcctacttcttacgacactttggggatgaagatcaggccatgagagcgttcgaattgatgcgctctaacgctgcattattccaacttggtagtgcccccgctgtgtgctggatcgtgtgtacaaccctcaaactgcagatggaaaagggcgaagatccagttcctacctgtctgacccgcaccggtctgttcctccgcttcctgtgcagccggttcccacagggcgcccagctaagaggcgctctgagaacactttcacttttggccgctcagggactgtgggcacagacaagtgtcctgcaccgtgaggacttggaacgcttgggagtacaggagtctgacctccggttgttcttggatggtgacatcctgagacaggatagagtatctaaaggctgttatagctttattcatctctcctttcagcaatttcttacggccctgttctatactctggaaaaggaggaggaggaagatcgggatggacacacgtgggacattggggatgtccaaaaactgttgagtggcgtggaacgactaagaaaccccgatctcattcaggcgggatattactccttcggccttgccaatgaaaagagagctaaagagcttgaggccactttcgggtgccggatgtctcctgacatcaagcaggagctcctgagatgtgacatttcctgcaaaggcgggcattccaccgttacggatcttcaagaactcctgggatgcctctacgagagtcaggaagaggaacttgtaaaggaggtgatggcccagtttaaggagatctctctgcacctgaatgccgtggatgtggttccaagttctttttgtgtgaaacactgtcggaacttacaaaaaatgtccctgcaagtgatcaaggagaatctgcctgagaacgtaaccgcctcagaatctgatgcggaggtggagcggagccaggacgaccaacatatgctgcccttttggaccgacctatgttccattttcgggtcgaataaagacttgatggggttggcaattaacgactctttcttgtcggcctcattggtccggatcttatgcgagcagattgctagtgacacgtgccacttgcagcgtgtggtatttaaaaacatctcaccagctgatgctcatcgaaatctgtgtttggcccttcgaggccacaagaccgtcacgtacctcacattgcaaggcaacgaccaagacgacatgttcccagcactctgcgaagtcctcagacaccctgaatgtaaccttaggtaccttggcctggtttcctgcagtgcgaccacgcagcaatgggccgacttatcactcgcactggaagtgaatcagtccctcacctgtgtcaatctgtcagataacgaattacttgacgagggtgccaaactactgtatactaccctgagacatcctaaatgtttcctccagcgcctgagcctcgagaactgtcatttgaccgaggccaattgtaaagacctggcagccgtgctagtggtcagtcgggaactgacccatctctgcttagccaaaaacccgatcggcaacaccggggtgaagttcctttgtgaaggcctgagatatcctgaatgcaagctgcagaccttggtgctctggaattgcgatatcacaagtgatggatgctgtgacctcactaaattgcttcaagagaaatccagtcttttgtgccttgacctgggactgaatcacataggggtgaaaggcatgaaatttttgtgcgaagcactcagaaagccactttgtaatttgcgctgtctctggctgtggggttgttccataccccctttctcctgtgaagatctatgcagcgccctcagctgtaatcagtctttggtgacccttgaccttggccagaaccccctgggatcatctggtgttaaaatgctgtttgagacgctcacctgttcttccggaacgttgcgaactctgagactgaagatcgacgactttaatgacgaactcaataagttacttgaggaaatcgaggaaaagaacccccagctgatcattgatactgaaaagcatcacccatgggccgaacggccttcttcccacgatttcatgatttag

SEQ ID NO: 69126 - DNA, 3189 bp, Artificial Sequence
  derived and/or modified sequence
atggtgagcagcgcccagatgggcttcaacctgcaggccctgctggaacaactctcccaggacgagctctctaagtttaaatacctgattaccacattcagcctggctcatgagttgcagaagattccacacaaggaggtggacaaggcagacggcaagcaattggtggagattttgaccacacattgcgattcttactgggtggaaatggcttccctgcaggtttttgaaaagatgcaccgaatggatctgtcggaaagggccaaggacgaagtgcgcgaggccgccctgaagagcttcaacaagcggaagcctctgtcactgggcattacccgcaaggagagaccccctctagacgtggacgagatgctcgagaggttcaagaccgaagcccaggcgttcacagaaaccaagggaaatgtcatttgcctaggcaaggaagtgttcaaaggcaaaaagccagacaaagacaatcgctgcaggtatattctgaagactaagttccgagaaatgtggaaatcctggccaggtgactctaaggaagttcaggtaatggcagagaggtacaagatgctgatcccatttagcaatcccagagtactgcctgggccattcagctatactgtggtcttatatgggcccgcaggcttgggaaaaaccaccttggctcaaaagctcatgttagactgggcagaggacaacctcatccacaagttcaagtacgccttttacctatcttgccgcgaactgtctcgccttggcccatgctcctttgcagagctggtgttccgtgattggccagagctgcaggacgacatcccacacatactggcacaagcgagaaaaattctcttcgtcatcgatggattcgatgaactcggcgctgcacctggcgccctaattgaagacatttgtggcgattgggaaaagaagaagcctgtgcctgtccttttgggatcccttctgaatagagtgatgctacctaaggctgccctgctggtaactactcgtcctcgcgccctcagggatctgcgcatccttgcagaggagcctatctacattagagtagaaggcttcctggaagaagataggcgggcctatttcctgcgtcatttcggagacgaagaccaggccatgagagcgtttgagttgatgaggtccaacgccgctctgtttcagctcggctcagccccagccgtttgttggatcgtttgcaccaccctcaaactgcagatggaaaagggcgaggaccccgtgccaacatgtctgacaagaacaggcctgttcctaagattcctctgctccaggtttccacagggagctcaactccggggcgcattgaggaccctttcactgctcgctgctcagggtctgtgggcgcaaacatccgtgctgcatcgagaggacctagagagattaggagtgcaggaaagcgacctgaggctgttcttagacggagacatcctgcggcaggaccgggtttctaaggggtgctatagctttattcatctctcctttcagcagtttctgaccgcccttttctacaccctcgaaaaggaggaagaggaggaccgtgacggtcatacctgggatatcggggacgtgcagaaactgctgtcgggcgtggagcgcctgcgcaatcccgatctaatacaggcggggtactactcattcggtctcgccaatgagaaaagggcaaaggagctggaggctaccttcggctgtcggatgtccccagacatcaagcaggagcttcttaggtgtgatattagttgtaaaggagggcactccacagtaacggatctccaggaactcttaggttgcttatacgagagtcaggaggaggagctggtcaaggaagttatggcccagttcaaagagatctctctccacctgaacgcggtcgatgtggtgccctcatccttttgtgtcaaacattgccggaatctccagaagatgagtctgcaggtcatcaaagagaaccttccggaaaatgtgacggccagcgagagtgatgcagaggtggaacggtcgcaggatgaccagcatatgctgcccttttggacagatttatgctcaatctttggttccaataaagacctcatgggtttagccataaatgattcgttcctgtcggccagtttagtcagaatcctgtgcgagcagatcgcatccgatacttgccatttgcagcgcgtggtctttaagaatatcagcccagctgacgcgcaccgtaacttgtgccttgcactccggggacacaaaactgtgacttacctgacactgcaaggcaatgatcaggatgacatgtttcccgccctgtgcgaagtgctgcggcacccagaatgcaatctgaggtatctcgggctggtatcttgtagcgccacaacgcagcagtgggcagatctatctctcgcactggaggtgaaccagtccctgacgtgcgtgaatctgtctgataatgaactcctcgatgagggcgctaagctcctctatacaacgctgaggcaccctaagtgttttctccagcgccttagccttgagaactgtcatctgacagaagccaactgcaaagatctggcggccgtactggttgtgagccgtgagctcacccacctctgccttgcgaagaatccaattggtaatactggcgttaaattcctgtgtgagggactgcggtaccccgagtgtaagttacaaaccctcgtgctgtggaactgtgatatcacaagcgacggctgttgcgatctaactaagcttttacaggaaaagagctctctgttgtgcttggaccttggcctcaatcacatcggagtcaaaggaatgaaatttctgtgcgaggcgctacggaagccgctctgcaatctgcgttgcctgtggctatgggggtgttccatccccccattttcatgcgaggacctgtgcagcgctttgtcctgcaaccaatccctcgttactttagacctgggacaaaacccactgggatcatccggggtcaagatgctgtttgagacactcacttgttctagtggaactctgagaactctgcggctgaagatcgatgactttaacgacgagcttaacaaactgcttgaggagattgaggagaaaaatccgcaacttatcattgataccgagaagcatcatccatgggccgagcggcccagtagtcatgattttatgatctag

SEQ ID NO: 69127 - DNA, 3189 bp, Artificial Sequence
  derived and/or modified sequence
atggtgagcagcgcccagatgggcttcaacctgcaggccctgctggagcagctgagccaggacgagctctccaaattcaagtacctcataacaactttttcactggcccacgagctgcaaaaaatcccgcataaagaagtagacaaggcagatggcaagcagctggtggaaattctgactacccactgcgattcttattgggtggagatggccagcttacaggtctttgagaagatgcatcgcatggatttgtctgaacgagccaaagatgaggtcagagaggccgctttgaaatcgttcaacaagcggaaacctctgagcttgggcattaccaggaaagagaggccacccctggatgtcgacgagatgctagagcgctttaaaacagaggcccaggcattcactgaaaccaagggcaatgtgatttgcctaggcaaagaggtcttcaaagggaagaagccggacaaagacaacagatgtcggtacatcctgaaaaccaagttccgagagatgtggaagtcctggcccggtgactccaaagaagttcaggttatggcagagagatataagatgctcatcccatttagcaatccaagggttctgcctggccccttttcatatacggtggtgttgtatggacctgctggtttgggaaagactacactggctcaaaagctgatgctggactgggctgaggacaacctgattcataagtttaaatacgcattctacctatcatgccgtgaattatcacgactgggcccttgctcattcgccgaactggtctttagggactggcctgagctgcaggacgatatcccccacattctggcccaagcccggaagatactcttcgtaatcgacggatttgacgagctgggagcggcacccggcgcgctgatcgaggatatctgtggcgactgggagaagaagaaacctgtcccagtgctgttggggagcttattaaaccgggtgatgctccccaaggcagccctgctggtgaccactagacctagggccctgcgggatctgcgcattctagctgaggagccaatttatatcagggtcgaaggctttttagaggaagaccgtcgagcatacttcctgagacattttggggatgaagaccaggctatgagggccttcgaactcatgcgcagcaacgccgccctctttcagctgggtagcgctccagcggtctgttggatcgtgtgtacaacacttaagctgcagatggaaaaaggcgaagatcccgtgccgacgtgtctcactagaactgggctatttctcaggtttctgtgttcccgattcccgcagggagcccagcttcggggagcgttgcgaaccctgtccctgctagcggcacagggtttatgggcacagacatccgtgctgcaccgcgaagacctggaacggctcggcgtacaggaatccgacctgaggttgtttttggacggcgatattctccgccaggaccgcgtaagtaagggatgttatagttttatccatttgtcgttccagcagtttttaaccgcactgttttacacactcgaaaaagaggaggaggaggatagagatggccatacctgggatatcggcgacgtgcagaagttacttagcggagtcgagagattacggaaccctgatctaatccaagccggctactactcctttggactggcgaatgagaagcgagcgaaggagctggaagcgacgtttggatgtcgcatgtctcccgatataaaacaggaattactgcgatgcgacatttcctgcaagggagggcactcaactgtgactgacttgcaggagctactgggctgtttgtacgaaagccaggaggaggaattggtgaaggaggtgatggcacagttcaaggagatctctctccacctcaacgccgtggacgtggtcccatctagtttctgtgttaagcactgtaggaacttacagaagatgagcttgcaggtcatcaaggaaaacttacccgagaacgtgaccgcatctgaaagtgatgccgaggttgaacgctcacaagacgatcagcacatgctccccttctggaccgacctgtgcagcattttcggatcaaacaaggatctgatgggactcgcaattaatgatagcttcttatcagcatctctcgtgcggatcctctgtgaacagatcgctagtgacacttgtcacctgcagcgggtcgtgtttaaaaacatctcacctgcagatgcacatagaaacctctgcttggctctgcggggccacaaaactgtcacttatctcacgttgcaagggaacgaccaggacgacatgtttccagccctgtgcgaggtgttgcggcatcctgagtgtaacctcagatatcttgggctggtctcctgtagcgctacaacacagcaatgggccgatctgtccctcgccttggaggtgaaccagtcactgacttgtgtgaatctgagcgacaatgagcttttggacgaaggtgctaagctgctttacacaactcttaggcaccctaagtgcttcctgcagcggctctctctggaaaattgccaccttacagaagcaaattgtaaagaccttgccgctgtattggtcgttagcagagaattgactcatctatgtttggccaaaaaccctatcggaaatacaggtgtgaagttcttgtgcgaagggttgcgataccctgagtgcaaactgcagactctggttctgtggaactgcgatatcacgtcagacggatgctgcgatctgacaaagcttctccaggagaaatcatccctcctgtgcttagacctagggctgaaccacatcggggtcaaaggaatgaagttcctctgtgaggccctgaggaagccgctgtgtaatctccggtgcctatggctgtgggggtgcagcatcccccccttctcttgcgaggacttatgctctgcactgtcctgcaaccagtccttagtgactctagacctcggacagaaccctctgggctcctcgggtgtgaaaatgttgttcgaaactttaacttgtagtagcgggaccctgaggactctgcgcctcaaaattgacgattttaacgacgaattgaacaagctgctggaagaaatcgaggaaaaaaaccctcagcttataatcgacaccgagaagcaccatccctgggctgagcgcccatccagtcacgattttatgatatag

SEQ ID NO: 69128 - DNA, 3189 bp, Artificial Sequence
  derived and/or modified sequence
atggttagcagcgcacagatgggattcaatctccaggctttactggaacagctatcccaagatgagttgtccaagtttaagtatctgatcacaacgttttcactggcccacgaactgcagaagatcccccataaggaggtggacaaagcggacgggaagcagttggtggagatactcaccacacattgcgattcctactgggtagaaatggcctccctgcaggtgttcgaaaagatgcatcgaatggatttatctgagcgagcgaaggacgaagtccgggaggcagccctgaagtcgtttaacaagcggaagcccctctccctgggaatcacacgcaaagagagacctccactggacgtggacgaaatgttggagagatttaagactgaggcccaggcctttaccgaaaccaaggggaatgttatatgcctgggtaaagaggtcttcaagggcaagaaaccagataaggataatcgatgcaggtatatcctcaaaactaagttcagagagatgtggaaatcttggcccggtgacagcaaagaggttcaggtgatggccgaacggtacaaaatgctcatcccattttcaaacccgagagtgcttcccggaccatttagctacaccgttgttctgtacggccctgcgggattagggaaaactaccctggcgcagaagctaatgcttgactgggccgaggataatttaatccataagttcaaatacgctttctatctctcctgtagagaactaagcaggttgggcccttgttcgtttgccgaactcgtgtttcgcgactggccagaattacaggacgacatcccgcacattcttgcccaggccagaaaaatcctattcgtcatcgacggctttgacgagctgggcgctgctcctggcgcattaattgaagacatatgtggtgactgggagaaaaagaagcccgtgcctgttctgcttgggagcctgcttaaccgggtgatgcttcctaaagccgctctgcttgttacaacccggccaagagcactaagggatctccggatcctcgctgaagaacctatatatatcagagttgagggcttcttagaagaggatcgaagggcctatttccttaggcacttcggcgatgaggatcaggccatgcgggcttttgagctgatgcgctcaaacgccgcactcttccagctcggctccgccccagccgtctgctggattgtttgtactactttgaagctgcagatggaaaaaggtgaagatcccgtgcctacctgtttaactcggaccggcctctttttacgattcctttgctcacggtttccacagggagcccagttgaggggggcacttcgaactttaagcctgctggccgctcaagggctctgggctcagacatcggtgctgcatcgggaggatttggagcgcctaggcgtgcaggaatccgatctgaggctgtttctggatggtgacatcctccgccaggacagggttagcaaagggtgctatagctttatacatcttagctttcaacaatttctcacggccctgttttacactctcgagaaggaggaagaagaggaccgagatggacacacgtgggatattggggacgtccagaaactgctaagcggcgtcgagaggcttagaaatccggacttgatacaggcgggttattactcctttgggttggccaatgagaagcgcgcaaaagaactggaagccacttttggctgtagaatgtcacctgacataaagcaggagctgctcagatgtgacattagttgcaagggcggtcactctaccgtgacagatctgcaggagctgctggggtgtctgtacgagtctcaagaggaagagctcgtgaaggaagttatggcgcagttcaaggaaatttccctgcatctcaatgctgttgacgttgtaccgtcaagcttctgtgtgaagcattgccgcaacctccagaaaatgtcactccaggtgatcaaggaaaacttgcctgaaaacgttaccgcctctgagtcagatgctgaggtcgagagaagccaggacgatcaacatatgcttcctttttggaccgacctttgtagcatcttcgggtcaaataaagatttaatgggactggcaatcaacgactcctttctgagcgcaagtctcgtgcgtatcctgtgtgagcagattgcgagtgatacatgccatttacaaagggttgtgttcaagaacatcagtccagccgacgcacaccgcaacctctgcctggctctgcggggacataagactgtgacttatctgaccttgcagggtaacgaccaggacgatatgtttcccgcactctgcgaagtcttgaggcatcccgagtgtaaccttagatacctgggtctagtcagttgctccgccaccactcaacagtgggctgacctgtcactggctttagaagtgaaccaatcgctcacatgtgtcaatctttcagacaatgaactcctggacgagggtgccaaacttctgtacaccacgttgcggcatcccaaatgtttcctccaacgcttgtcattggagaactgccaccttacagaggcgaattgtaaggatctggctgccgtgctcgtggtgagtcgcgagctaacccacctctgtttggctaaaaacccaatcggtaatactggagtcaaatttttatgtgagggcctgcggtatcccgagtgcaaactgcagacgctggttctgtggaattgcgatatcacttcagatggatgttgcgacttgactaaacttttacaggagaaatcttctctcctatgcctcgacctcggcctgaatcacatcggcgttaagggcatgaagttcctctgcgaggctctgaggaagcccctgtgcaatctgaggtgcctatggttgtggggctgtagcatccctccattctcctgtgaagacttgtgttccgcactaagctgcaatcagtcgctcgtgacactggacctgggtcaaaatcctctcgggtctagtggggtgaaaatgctctttgaaacactaacctgctcttcagggactctgaggaccctgcgcttgaaaattgacgacttcaatgacgaactgaacaaactgctggaagaaatcgaagaaaagaaccctcaacttatcatcgacacagagaagcaccatccctgggccgaaaggccatcctcgcacgacttcatgatttag

SEQ ID NO: 69129 - DNA, 3189 bp, Artificial Sequence
  derived and/or modified sequence
atggtatcgtctgcccaaatggggttcaatctccaagccctgctagagcagctgtcccaggatgagcttagtaaattcaagtaccttatcacaacattctcattggctcatgaactccagaaaattcctcataaagaggtggacaaagcagacggaaagcagctggtggaaatcctgacgacacattgtgattcctattgggtggaaatggcatccttgcaggtgttcgagaaaatgcataggatggacctttcggagagagctaaggatgaggtgagagaggccgctctgaaatcttttaataagaggaaaccattatctctgggaatcacacggaaagagaggcctccactggatgtagatgaaatgcttgaaagattcaagacagaggctcaggcattcaccgagactaaggggaatgttatatgcctgggcaaagaggtttttaaggggaagaaaccggataaggacaaccggtgtcgctacatactgaagacaaagttcagagagatgtggaaatcctggcctggtgactcaaaagaggtccaggttatggcagagcgctacaagatgctcatcccattttccaacccccgagtattaccagggcctttcagttacacagtggtactgtatggaccagcgggtctaggaaagaccactttggcacagaaattaatgctggactgggctgaggataatctcatacacaaattcaaatatgccttttacctctcgtgtagagagctcagtagacttggcccttgctcctttgctgagctcgtgttccgcgattggcctgagctgcaagatgatatcccacacatcctcgcacaggctagaaaaatcctctttgtgatcgatggttttgacgagctgggtgcagcccctggcgcactgatcgaggacatctgtggggattgggagaagaaaaagcccgtgcctgtcctgctgggatcacttttaaatcgtgtgatgctgcccaaagccgctctgctggtcactacacggcctcgtgctttgcgggatttgagaatcctggccgaggagccaatctatattagggtagaaggctttttagaggaagacagacgtgcttacttcttacggcactttggcgacgaagaccaggcaatgagagcctttgaactcatgagatcgaatgccgcactattccagctgggctccgcacccgcagtgtgctggattgtgtgtaccaccctgaaactgcagatggaaaagggcgaggatcctgtgcctacgtgccttactcggacggggcttttcctccgctttctgtgcagcagatttccgcagggagctcagctccgcggagccctgcgaactctgtctcttctagctgcccaaggcctgtgggctcagacctccgttctgcaccgagaggacctggagagactaggggtccaagaatctgacctaaggttgttcctcgatggggatattctccggcaggaccgcgtcagcaagggatgctattcttttatccatctgtcttttcagcagttcctgacagccttgttttatactctcgaaaaggaggaagaagaggatcgcgatggacatacttgggacatcggagatgtccagaaactgctatctggggttgagagactgcgtaatcctgacctgatccaggccggttactactccttcggcctggccaacgaaaagagggccaaagagttagaggccacctttggctgcagaatgagtccagatataaagcaggaattgctacgctgcgacataagctgcaaaggtggccattctaccgttaccgacctccaggagttgctgggatgcttatatgaatcccaggaggaggaattagtaaaagaagtgatggcacagttcaaagaaattagcctgcatctcaatgccgtcgacgtggtcccatcctcattttgcgtgaaacattgcaggaaccttcagaaaatgagcttacaggtgatcaaggaaaacctccctgaaaacgtgaccgctagcgaatcagacgccgaggtggagagaagccaggatgatcagcacatgctgcccttctggacagacctctgctcaattttcggtagtaacaaagatctgatgggactcgctattaacgacagctttctgagtgcctccctggttagaatcctgtgtgagcagatcgctagtgacacatgtcatctccagagggtagtgttcaagaacatttcccctgccgatgctcacagaaacctatgtttagccctgcggggtcacaaaactgttacataccttactttacaagggaatgatcaggacgacatgttccccgcactttgcgaagtccttcggcatcctgaatgtaaccttagatatctgggactggtgtcctgtagcgcaaccacccagcagtgggcagacctgagtctagctctggaggtgaaccagtccttaacatgtgtaaatctatccgataatgaactgcttgatgagggcgctaagctcctttacactactcttaggcatcccaagtgttttctccagaggttatcccttgaaaattgtcatttgacagaagcgaattgtaaagacctggcagccgttctagtcgtatcaagggaactcactcacttgtgtctcgccaagaatcccataggaaatactggtgtcaagttcctgtgcgagggcctgagataccccgagtgcaaactccaaaccctggtgctgtggaattgcgatataactagcgacggctgttgcgacttaacaaaattgctgcaggagaaaagttcattactgtgcctggacctagggctcaaccatattggggttaagggaatgaagttcctgtgcgaggccctgcggaaaccactctgcaatctccgatgtctgtggctctggggctgtagcattcctccgtttagttgcgaagatttatgtagtgctctttcctgtaaccaaagcttggtcactctcgatctgggccagaaccccttaggaagctctggcgtcaagatgctctttgagacccttacctgcagttcaggcacccttaggaccctgaggctgaagatcgacgacttcaacgatgaactcaacaaactgctggaggaaatcgaggaaaagaatcctcaattaatcattgacacagaaaagcaccacccctgggctgagagaccaagctcccatgatttcatgatatag

SEQ ID NO: 69130 - DNA, 3189 bp, Artificial Sequence
  derived and/or modified sequence
atggtgtcaagtgcacagatgggattcaatctccaagcgctacttgagcagctaagccaggacgaattgtccaaatttaaatacttaattaccacattttctcttgcccacgaattgcagaaaatcccccacaaggaggtcgacaaagccgacggtaagcagctagtggaaatcctcacaacccattgcgattcctactgggtcgagatggcaagcctgcaagtatttgaaaaaatgcaccgcatggacctgtctgagagagccaaggacgaggtaagggaagcagccttaaaatccttcaataaaagaaagcctctctctctcggaattacacggaaagaacggccacccctggatgtggacgaaatgttggagagattcaagaccgaggcccaggccttcactgagaccaaaggtaacgtcatctgtctgggtaaggaggtttttaaaggaaaaaagccagacaaggataaccggtgtagatatatcctgaaaacaaaattccgtgagatgtggaagagctggcccggtgatagcaaagaggttcaggtgatggccgagcggtataagatgctgattcccttctcaaaccccagggtgctgcctgggcctttctcctataccgtggtgctttacgggcctgcaggtctggggaagaccacactcgcccagaaactgatgctggattgggcagaggataatcttatacacaagttcaaatatgcattttacctcagctgtagggaactgtctcgcttgggcccatgtagctttgccgaacttgtattccgcgactggcccgagctgcaggacgacattccccacatcttagcacaggccagaaaaatcctgtttgttatcgacgggttcgatgaattgggagccgctcccggagccctgatcgaggacatctgtggtgactgggagaagaagaagccagttccagtgctattgggctcccttctgaatcgcgtgatgctcccaaaggccgcactcctagttactactcggccacgggcactaagagacctgaggatcctggccgaggagcccatatacattcgcgtcgagggatttcttgaggaagaccgaagggcatatttcctgcggcactttggtgacgaggaccaggcaatgcgggcttttgagttaatgcgaagcaacgccgctctgttccagctcggctcagcgccagctgtgtgctggatcgtttgcacgaccctgaagctgcagatggagaagggggaggacccggtcccaacgtgcctgacgaggacaggcttattcctgcggttcttgtgttcccgattcccgcagggggctcagttgagaggagcgctccgcaccctcagcctgctcgccgcacaagggctttgggctcagacgagtgtgctccacagggaggacttggaaaggctcggggtccaggaatccgatttgagactttttctggacggcgacatacttcggcaagatcgcgtgagtaaaggatgctacagctttattcatttgtctttccaacaattcctgacagcgctgttttacactctagaaaaagaggaggaagaagacagggacggccatacgtgggacatcggtgatgtgcagaagctactgagcggcgtggagcggctgaggaacccggatctgatccaggccggatattactcttttggtctcgcgaacgaaaaacgcgctaaggagttagaggcaacattcgggtgccgtatgtcccccgacattaagcaggagctgctccggtgcgacatctcctgcaaaggtggacattccacggtcacagacctccaggaactacttggctgcttgtatgagagccaggaggaagagttagtaaaggaggtgatggcccagttcaaggaaataagcctgcatcttaacgcggtcgatgtcgtgccttcgtcattctgcgtaaagcactgcaggaacctgcagaagatgtcactccaggtgataaaagagaatctaccagaaaatgtgacagcgtcggaatcagatgcagaagtcgagcgatcacaggacgatcagcatatgctgcccttttggacggatctgtgtagcatttttggcagcaataaggacctcatgggcctggctattaatgattcctttctgagtgccagcctggtcagaatactctgcgaacagatcgcgtctgatacctgtcacctccaacgggtcgtcttcaaaaacatcagtccggcagacgcccacaggaacctttgcctcgccctacgcggacacaagacagtgacctacctgactctgcaagggaacgaccaggacgatatgtttccagctttatgcgaggttttgcgacatcccgagtgtaacttacggtacctgggattggtgagttgctctgcaactacccagcagtgggcagatctgtcgctggctcttgaggtcaatcagtccctgacttgtgttaatttgtcagacaacgagttattggatgaaggcgcaaagttactctatactaccctccggcatccaaagtgcttcttacaacgcctctccctggagaactgtcacctcacagaagcaaactgcaaggacctcgccgctgtgctcgttgtgagtagggagcttacacacctctgcttggccaagaacccaattgggaataccggcgtgaaattcctttgcgagggtctccgatatcctgagtgtaagctgcagacgctggtgctctggaactgcgacattacaagtgacggttgctgcgacctgaccaagttgcttcaggaaaaaagttccctgctatgtctggatttgggcctgaaccatattggggtcaagggcatgaagttcctgtgtgaagctctccggaaaccactatgcaatctcagatgtttgtggctgtgggggtgtagtatacccccatttagttgcgaggatctatgttctgcactatcctgcaaccagagcctggtgaccctggacttaggacagaacccattgggcagcagcggagtgaaaatgctgttcgagacactgacatgttctagtggcaccctcagaaccctgcgcttgaaaatagacgactttaacgacgagctgaataagctactcgaagagatcgaggagaaaaacccacagctgatcatagataccgaaaaacatcacccctgggcggaacggccaagtagccacgatttcatgatctag

SEQ ID NO: 69131 - DNA, 3189 bp, Artificial Sequence
  derived and/or modified sequence
atggtgagctcagcacaaatgggcttcaatctgcaggcccttctggaacagctatcacaggacgagttatccaagtttaaatacctgattacgaccttttctctcgcgcacgagcttcagaagataccccacaaggaagtggacaaggcagatggtaaacagctggttgagatcctgacaactcactgtgattcttactgggtcgaaatggcttctcttcaggtttttgagaaaatgcatcgcatggatttaagcgaaagagccaaagacgaagtgcgggaggccgcactgaagagcttcaataagcggaaacccctctccctggggataacaaggaaagaacgtccacctctggacgtggatgagatgctggaacggttcaaaacagaggcccaggcttttaccgagactaaggggaacgttatctgccttggcaaggaggtgttcaaaggtaagaaacctgacaaagataacagatgtaggtacatcctgaagactaaatttcgagagatgtggaaaagttggccaggcgattctaaagaagtacaggttatggcggaacggtataagatgcttatccccttttcaaatccaagagtgctccctggacccttttcttatactgtggtcctctacgggcctgctggactgggcaagaccactctcgcgcaaaagcttatgctggactgggccgaggacaacctgatccataaatttaagtacgccttctatctaagctgccgggagctttccaggctgggaccctgttccttcgccgaactggtgttccgcgactggcctgagcttcaagatgatattccccatatcctggcacaggcgaggaaaattctttttgtgattgatggattcgacgaactgggcgctgcccctggcgctttgatcgaggacatctgcggcgactgggagaagaagaagcccgtccctgtgctgctgggctccttacttaaccgggtaatgctgcctaaggcagcattattagtaaccacccgacctcgagccctgagggatctgcgaatcttagccgaagagcccatttacatccgcgtggaaggattccttgaagaagaccgccgtgcatattttctacgtcactttggagacgaggaccaggctatgcgggctttcgaactgatgcgaagtaatgccgctctatttcagctgggctctgctccagctgtgtgttggatcgtgtgtacaaccttgaaattgcagatggagaagggcgaggatcccgtacccacctgcctcacgagaactgggctcttcctaagattcttgtgctcaaggtttccccagggagctcagctccggggagcattacgtacgctatctcttctcgctgcccagggcctgtgggcacagacctccgttcttcacagagaagatttggagaggttgggcgtacaggagagcgacctcagattatttttggatggggatatcttgcgccaggaccgagtctctaaaggttgttatagtttcatccacctcagcttccagcagttccttactgccctgttttacacactagagaaagaggaggaagaagaccgggacggacatacatgggatattggagatgtgcagaaactcctgtctggcgtcgagcgcctgcgaaatccagacctcatacaggcaggctactactcattcggcctggcaaacgagaaacgagcgaaggaactggaggccacatttggctgtagaatgagtccggacattaaacaagagctgctgagatgcgatatttcatgcaaggggggtcactctacagtcactgacctccaagaactactgggctgcctctatgagtcacaggaagaggagctggtgaaggaggtgatggctcagttcaaggagattagcctccaccttaacgccgtggatgtagtgccctccagtttctgcgtgaaacactgccgtaatctgcagaaaatgtcactgcaggtaataaaggaaaatctcccagagaatgtgacagcatccgagagcgacgctgaggtggagcgaagtcaagatgatcagcacatgcttcccttctggaccgacctttgtagtatatttggatctaacaaggacctgatggggctggctataaacgacagcttcctgagtgcatcccttgtgcggatcctgtgtgagcagattgccagtgatacatgccacttgcagcgggttgtgtttaagaacatctctcctgcagatgctcaccgaaatttgtgtctggccctccgaggacataaaacagtcacctacttaaccctgcagggcaacgatcaggatgatatgttccctgctctgtgtgaagtgttaaggcatccagagtgtaatctgcggtacctgggtctcgtgtcctgttctgctacgactcagcagtgggctgatctttctctggctttggaagtgaatcagtccctaacctgcgttaatctgagcgacaacgaactgctcgacgaaggagccaaattactgtataccaccctgcgccatccgaagtgctttctgcagcggctgagccttgagaattgccacctgactgaggccaactgtaaagacctagccgctgtgctggtcgtatcccgcgaactaacacacctctgccttgcgaaaaaccccatcggcaatacaggagtcaagtttctgtgtgaagggttacgatatcccgagtgtaagctgcaaaccttggtgctctggaactgtgacattacctcagatggctgttgtgacttgactaagctgctacaggagaaatccagcttgctgtgtctggatctagggctcaatcacattggtgttaaaggaatgaagtttctgtgcgaagccctgcgcaaacccctgtgcaacctgcggtgtctttggctctggggctgctccatccctccattctcctgtgaagatctatgctccgctttatcatgtaatcaatctttggtgacgcttgatctgggacaaaaccccctgggcagtagtggggtgaagatgctctttgagacacttacttgctcaagcgggactctgagaacccttcgtctgaagatcgatgattttaatgatgagttgaacaaattacttgaagagattgaagaaaaaaatccacagctgattattgacactgagaaacaccacccttgggcggagaggccatctagccacgattttatgatctag

SEQ ID NO: 69132 - DNA, 3189 bp, Artificial Sequence
  derived and/or modified sequence
atggtgagttctgcacagatggggtttaatctgcaggcccttctggagcagctgagtcaggatgaattgtcaaagtttaaatatctcattaccactttttccctcgctcacgaactgcagaaaattccgcacaaagaggtggacaaggctgatggtaagcaactggtggagatcctcactacacactgcgatagttactgggttgaaatggcctcactacaagtatttgaaaaaatgcatcggatggacctttctgagcgcgctaaggacgaagtgagagaggctgcccttaaatcattcaacaagcggaagcctctgagcctcgggataacacgcaaggagcgccctccattagacgtggatgaaatgctggaacgttttaaaaccgaggctcaagccttcacagaaaccaagggcaacgtgatttgtttgggcaaggaggtatttaaagggaagaaacccgacaaagacaaccgttgtcgctacattctgaagactaaatttcgagaaatgtggaagtcctggcctggcgactctaaagaggtccaggtgatggcagaaaggtacaagatgttgattccgtttagcaaccctagggtgcttcctggacccttctcgtacaccgtagtgctatatggccctgcgggtctcggaaaaactaccctcgctcaaaaacttatgttagactgggcagaggataatttgatacacaagtttaaatacgccttctacttgtcttgtagagagttatccaggctgggtccatgctcgtttgccgagcttgtctttagggactggcctgagcttcaggacgatattccgcacatcctcgcccaggctcgaaaaatccttttcgttatcgacggtttcgacgagctgggtgccgctcccggagccctgatcgaagacatttgcggtgattgggaaaaaaaaaagccggtacccgtgctgctgggctccctgctcaatagggtgatgctgccaaaggcagctttgcttgtcacgaccaggcctagggctcttcgggatcttaggatcttagcagaggagccaatctacatcagggtcgaggggttcctggaagaagatcgcagggcttattttctgcgccactttggcgatgaagaccaggcaatgcgagcctttgagctcatgagatccaacgctgctcttttccaattggggtctgccccagcggtctgctggattgtgtgcacaacgttgaagcttcagatggaaaaaggggaggacccagtgccaacctgcttgactcggaccgggctatttctgagattcctatgcagcagattccctcagggggcacagttgcgcggagccctacgcacactgtcacttttggccgctcagggactgtgggcccagacctccgtcttacacagggaagatcttgagaggctaggcgtccaggagtccgatcttcgactgtttctggacggcgacatcctaaggcaggatagagttagcaagggttgctatagcttcatacacttaagcttccagcagttcctgactgctctgttctacaccttagagaaggaggaggaggaggaccgggacggacacacctgggatatcggggacgttcagaaactactgtcgggtgtcgaacggctgcgtaaccctgatctaatccaggcaggctattactcgtttggattggcaaatgagaagagagctaaagaactggaagccaccttcggatgcaggatgtctcccgacatcaaacaagagctgctgcgttgcgatatatcctgcaagggcggtcactctactgtcaccgacttacaggagttactgggttgtttatacgaatcacaggaggaggaactagtcaaggaggtgatggcccagtttaaggagatatctctccacctgaacgccgtggatgtggttcccagctcattctgcgtcaagcactgtcgcaacctgcagaagatgtccctgcaggtcatcaaagaaaacttacccgagaatgttactgcctcagagtccgacgccgaggtagagaggtcccaggatgaccagcacatgctgcctttttggactgacctctgtagcatcttcggttccaataaggacctgatggggttggccatcaacgacagctttcttagcgccagtttagtgcgcattctgtgtgaacagatcgcatcagacacctgtcatctccagagggtggtcttcaagaacattagccctgccgatgcacaccgcaatctgtgtctggctcttcgaggacacaagaccgtgacctacctgactctccagggcaacgaccaggacgatatgtttcctgccctgtgcgaggtcctgcggcacccagaatgcaacttaaggtacctcggcttggtgagttgcagtgcgacaactcagcaatgggcagacctctccctagctttggaagtgaatcagtccctgacctgtgtgaatctgtctgataatgaattgctcgacgagggcgctaagcttctgtatactactctgagacacccaaagtgttttctccagcgactcagcctggaaaactgccacttgaccgaagccaactgcaaggacctggccgctgtgctggttgtgtctagggaacttacccatctttgcttggcgaagaatcccattggtaacactggagtgaagtttctttgcgagggcctgcgctaccccgaatgcaagttgcaaaccctcgtgctgtggaattgcgatatcacgtcagacggatgttgcgatctgacaaagctcttgcaggagaaaagttctctgctctgtcttgacttgggacttaaccacattggcgtcaaggggatgaagtttctttgcgaggcccttagaaagccgctgtgcaatttacggtgcctctggctgtgggggtgcagcatcccacctttcagttgcgaggacctgtgcagcgcgctgagttgcaaccagtcactcgttacgctggacctcggtcagaatcctctcggcagctccggggtgaaaatgctctttgaaacccttacatgttcttccggaaccctgcgcaccttgcgtctgaaaattgacgattttaatgacgaactgaacaaactcttagaggagattgaggaaaagaatccccagctgattattgacactgagaagcaccatccttgggccgagcggccttctagtcacgacttcatgatctag

SEQ ID NO: 69133 - DNA, 3189 bp, Artificial Sequence
  derived and/or modified sequence
atggtaagcagcgctcagatggggttcaacctccaggctctattagagcaattatcacaggatgagctgtcaaaatttaagtatcttattaccacgtttagcctggcgcatgagctccagaaaatccctcacaaagaggttgataaggccgacgggaagcagctggtcgaaatcctcacaacccattgcgactcatattgggtcgaaatggcctctctgcaggtgttcgagaaaatgcataggatggatctgagcgagagggccaaggatgaagttagagaagccgctctgaaatccttcaataaaaggaaacccctgagcctgggaattactcggaaggagagaccacctttagatgtagatgagatgttggagaggttcaagacagaggctcaggcattcacggaaactaagggcaatgttatctgtctgggcaaagaggtatttaaaggcaagaaaccggacaaagataacaggtgcagatacatccttaagaccaaatttagagagatgtggaagtcatggccgggagactcaaaggaggttcaggtgatggccgagcggtacaaaatgcttattccattttcaaatcccagggtcctcccagggcctttttcatacaccgtggtgctttacggacccgcagggctggggaagacgaccctggctcaaaagctaatgctcgactgggcagaggataaccttattcataaatttaaatacgcattctatcttagctgtcgagagctgtctcgtcttggcccttgttcatttgccgagctcgtttttcgagattggccggagctacaggacgatatcccacacattcttgctcaggcacgaaaaatccttttcgtcatcgatgggttcgacgagctgggggctgcgccaggcgcactgatcgaagatatttgtggcgattgggaaaagaaaaaaccggtgcccgttctgctgggcagtctgctcaacagagtaatgttgcctaaggctgcattactggtgacaactagaccaagagccttacgtgacctgcgtattttagctgaggagcccatttatatccgcgtagagggcttcctggaggaggataggcgtgcctatttcctcagacactttggggatgaagatcaggcaatgagggctttcgaactgatgagatctaatgccgctttgttccaactcggttctgctcccgcagtctgctggatagtttgcactacactcaaactgcagatggagaaaggagaagaccctgttcctacctgtctaacaagaaccgggctcttcctccgctttctttgcagtcgatttcctcagggcgcacagctgcgtggagcattgaggacgctgtctctgctagctgcccagggtctgtgggcccagacatccgtgctccatagggaagatttagaacgacttggcgtgcaagaatccgatttgcggcttttcctggacggcgatattttgcgacaagaccgcgtgtcaaagggttgttattcctttattcacttgtcctttcagcaatttctgactgctctcttttacacgttagaaaaggaggaggaagaggatcgggacgggcacacatgggacatcggagacgtgcagaagctgctttccggagtcgaaagacttcgcaatcctgatcttatccaagctggatactactcttttggcctagctaatgaaaagcgtgccaaggaattggaggctacgttcggatgtagaatgtccccagatattaagcaggagctcctccgctgtgacatctcatgtaaggggggacattccacagtcacagatttgcaggagctgctgggctgtttgtatgaatcccaggaggaagagctagtcaaggaggtcatggctcagtttaaagagattagcctacatctgaacgccgtcgacgtggtcccttctagcttctgcgtcaagcattgtcgtaatctgcagaaaatgtctctgcaggtgatcaaggagaatcttcctgaaaatgtgaccgcttcagagtccgatgctgaggtcgaacgttctcaggatgatcaacacatgctccccttctggacagatctgtgctcaatcttcggtagtaataaggatctcatggggctggccattaatgattcatttctatccgcgagcctggtgagaatactgtgcgaacagatcgctagtgatacatgccaccttcagcgagtggtttttaaaaatatcagtcccgctgatgcacaccgaaatttgtgcctagcgctgaggggtcataagacagtcacttacttgaccctgcagggcaatgatcaagatgatatgtttccagcgctgtgcgaggtcctaagacaccccgagtgtaatttgcggtatctcggactagtatcttgctcagccactacacagcagtgggcagacctgtctttggcccttgaagttaaccagagccttacctgcgtaaatctgagcgataacgagctcctggatgagggggcaaaactcttgtataccacacttcgacatcccaagtgtttcctacaacgactctccctggagaactgtcatctgacagaggctaactgcaaagatctcgccgctgtcctagtggtttccagagagcttacacacctgtgtctcgctaaaaatcctatcggtaacaccggtgtgaaattcctgtgtgagggtctccgatatcccgagtgcaagctgcagactttggttctttggaactgcgacatcactagtgacggctgctgcgacctgaccaaacttcttcaggagaaatcttcacttttgtgcttagatctaggcctaaatcatataggcgtgaaaggtatgaaatttttgtgcgaggctctgcgcaagccactatgcaatttacgttgcctctggctgtggggatgttccatccccccattcagctgtgaggacctttgttcagccctgagttgtaaccagtccctggtgacgctcgaccttggacagaacccactcggatcaagtggagtgaaaatgctattcgagacgctaacttgtagtagcggcactctgcgcacactgagactgaaaatcgacgactttaacgatgagttaaacaaactgctggaagagattgaggagaagaacccccaactcattatcgatacagagaaacaccacccttgggctgagcgacctagcagccatgacttcatgatctag

SEQ ID NO: 69134 - DNA, 3189 bp, Artificial Sequence
  derived and/or modified sequence
atggtaagtagcgcacagatggggttcaatctgcaagctctacttgagcagctgtcccaagatgagttatctaagtttaaataccttattacgacttttagcctggcccacgagttacaaaaaatcccacataaagaggttgacaaggcagatgggaaacaacttgtagaaatcctcactacccattgtgactcttattgggtcgagatggccagtctacaggtatttgaaaagatgcatcgaatggacttatccgaacgtgcgaaagacgaagttcgcgaagcagccctgaagtcatttaacaaacggaaacccctctcattgggcattacgcggaaagagaggccgccactggatgtggatgagatgctcgagagattcaagaccgaggctcaggcatttaccgagactaaggggaacgtgatctgtctggggaaggaagtgtttaaaggcaagaagcctgacaaggataaccgctgtcgctacatcctcaagacgaagtttagagagatgtggaaatcatggccaggagactccaaggaggttcaggtgatggctgaaaggtacaagatgctgattcccttttcaaacccacgggtgttgcctgggccattctcctatacagtcgtgctctacgggccagccggacttggaaaaacaacattggcacaaaaattaatgcttgactgggcagaagataatctgatccacaagtttaaatacgctttttacctctcctgtcgagagcttagccggctgggcccatgctcctttgcagaattggtgtttagggactggccggaacttcaggacgacatccctcatattctggcacaagctagaaagatcctgtttgtgatcgacggttttgacgaactgggcgctgctcctggagctcttatagaggacatttgcggcgactgggaaaagaagaagccagtacccgtcctgctgggatcacttctaaatcgggtcatgctgcccaaggcggctctcttggtgactaccagaccaagagccctccgcgacctcagaatcctggctgaggaacccatatacatcagagtcgagggattcttggaggaagatagaagagcttatttccttaggcatttcggtgacgaagaccaagccatgagagcctttgaattgatgagatccaatgccgcactcttccagcttggtagtgcaccggcagtgtgttggattgtatgcacaacgctgaagctgcagatggaaaaaggggaagatccagtgccaacatgtctgactcgtaccggcctgtttcttcgctttttatgctcccgcttccctcagggggctcagctgaggggagccttgagaacacttagtctgctggccgctcagggactgtgggctcagactagcgtcctgcaccgggaggatctagaaaggctcggggtgcaggagagtgatctgaggctgttcctagatggagacatcctccgccaggaccgcgtgagtaagggctgctactctttcatacacttgtctttccagcagtttctgaccgcactgttctacactctcgagaaagaggaggaagaggatcgtgacggtcatacatgggatattggtgatgtacagaagctcttgtccggcgtggagagactgcggaaccctgacctgattcaagcgggatattacagttttggcttggccaatgaaaagagggccaaagagctagaagcgaccttcggatgccgcatgagccctgatatcaagcaggaactgctccgctgtgacatcagttgcaagggcggtcattctactgtgacggatctgcaggagctgctcggctgcctctacgagagccaagaggaggagctggtgaaggaggtaatggcccagtttaaggaaatcagtttgcacttgaacgccgtcgatgtggttccctcttccttctgcgtgaaacattgccgcaatctccagaagatgagcctgcaggtaatcaaagaaaatctacccgaaaatgtcactgctagcgagtctgatgctgaggtggagagatcacaggacgaccagcacatgctccccttttggacagatctttgcagcatctttggctctaataaggatcttatgggacttgcaattaatgatagcttcctcagcgcgtccctggtgagaatcctttgcgagcagattgccagcgacacctgtcacctgcagcgcgtggtgtttaagaatatatcccccgctgatgctcatcggaacctgtgtcttgctctcagaggtcacaagacagtgacctatttaacactccagggaaacgaccaggatgacatgttccccgctctatgcgaggttttgcgacacccagaatgtaatttacggtacctaggcttggtatcttgttcagcgaccacccagcagtgggccgatttaagcctggccctggaagtcaaccaatcactgacttgtgtgaatctcagtgataacgagctacttgacgagggcgctaaacttctgtacacgacacttcggcaccccaagtgtttcctccaacgattgtctctggaaaactgtcacctgactgaagccaactgtaaggatcttgccgctgttctggtggtatctcgcgagcttacccatctttgcctggctaaaaacccaatcggtaacactggagtcaaatttttgtgcgagggactgagatatccagaatgcaaacttcagacgctggtgttatggaactgtgacattactagcgatgggtgctgcgacctgacaaagttgctgcaggagaagagtagtctcctttgcctcgacctgggcttgaatcacatcggcgtgaaggggatgaagttcttgtgcgaggcgttaaggaagccgctgtgcaatttgcggtgcctctggctgtggggttgctcaataccgcctttctcctgcgaggacctttgttctgcccttagctgcaaccaatccctggtaactcttgacctgggccagaatccattgggctcatctggtgtgaagatgctctttgaaacattaacctgttcgagtgggacactgcggaccttgcgccttaaaatcgacgatttcaatgacgagctaaacaaattactggaggagattgaagagaagaacccccagcttatcattgataccgagaaacatcacccctgggctgaacggccttcatcccatgatttcatgatctag

SEQ ID NO: 69135 - DNA, 3189 bp, Artificial Sequence
  derived and/or modified sequence
atggtgagcagcgcacaaatggggtttaacctgcaggccttgcttgagcagctgtctcaggatgagctgagcaaattcaagtacctgatcactaccttcagccttgctcacgaactgcagaagatccctcataaggaagtcgataaggcggacggaaaacagctggtcgagatcctgacaacccactgtgattcctactgggttgaaatggcatctctccaggtattcgagaaaatgcaccgcatggatctgagtgaacgggcaaaggacgaggtcagagaagctgcactcaagtcattcaacaagagaaaaccactctctctcggcatcaccaggaaggagaggccgccactggacgtggacgagatgctggagaggttcaaaaccgaggcacaagcctttactgagacgaagggcaatgtcatatgcctgggaaaggaggtctttaagggcaaaaagcctgataaggacaacaggtgtcgttacatcctcaagaccaagttccgcgaaatgtggaaatcttggcctggggactctaaggaggtccaggtgatggccgagagatacaaaatgctcatcccttttagtaacccccgagtgctgcctgggcctttcagttatactgttgtactctacgggccagccggtttgggtaagacgactttagcccagaagctgatgcttgattgggcagaggacaatttgattcacaaatttaaatacgctttctaccttagctgtcgggagctctcccgccttggcccatgttcctttgctgaattggtctttagggactggcctgaactgcaggacgacatccctcatatcctggcacaggccaggaaaatactgtttgtaatagatggtttcgatgaactgggggcagcgccaggagccctgatcgaagatatctgtggggactgggagaagaaaaaacccgtcccggtcctactgggatcgctgctgaacagagtgatgctgcccaaagctgccctcttggtgactacaaggcctcgtgccctaagagacttgcgcatattagctgaagaacctatctatattcgggttgaaggctttctcgaagaggaccgtcgagcttatttcttgcgccactttggggatgaggaccaggccatgagagcgttcgagctgatgcgctccaacgcagcccttttccagctgggttccgccccagctgtctgctggattgtgtgcactacattaaaacttcagatggaaaagggcgaggatccagtgcctacttgcctgacaagaacaggcctgtttcttcggttcctgtgctctcgatttccccagggcgctcaactgaggggagccctgaggaccctgtccttacttgcagcccagggtctgtgggcacagaccagcgtccttcaccgagaagatctagagcgccttggggttcaggaatccgaccttcgtctgtttttagacggggatatccttcgccaggaccgcgtctccaagggttgctattcctttatacacctgtcctttcagcagttcttaaccgcactgttctacaccctcgagaaggaagaggaggaagatagagatgggcacacatgggatataggcgatgtgcagaaattgttatcaggtgtggagcggctgcgcaaccctgatctcatacaggcaggctactattcattcgggttagctaatgagaagagagctaaagaacttgaagccacatttggctgtcgtatgagccccgatattaagcaggagctactgcggtgtgacatctcatgcaagggtggacattccacagttaccgatctgcaggaactgctcggatgcctatacgagagccaggaagaggagctggtgaaggaggttatggcgcaattcaaggagatatccctgcacttgaacgccgtggatgtggtacccagttctttctgcgtgaaacattgccggaacctacaaaaaatgagtctccaggtgatcaaggagaacctgccggaaaatgttactgcttccgagagtgatgccgaagtggagcgctcccaagatgatcagcatatgcttccgttttggacagacctttgttccatttttggatcgaataaggatcttatgggactagccatcaacgacagttttctgtccgcctccctggtgcgaatcctgtgtgagcagattgccagtgacacttgccatctacaacgagtggtgtttaagaacatatctcccgctgatgcccatagaaacctgtgccttgccttacgcggtcacaagaccgtgacctatctgactctgcaaggcaatgatcaggacgacatgtttcccgcactctgtgaagtcctcaggcatcctgaatgcaacctacggtacctgggcttggtgtcctgtagtgccaccacccaacagtgggctgacctcagcctggcactcgaggtgaaccagagcctaacctgtgtgaacttgtccgataacgaattattggacgaaggcgcaaagttactttacacaacactcagacatcccaagtgcttcctccaacggctgagcttggagaattgtcatctgaccgaagcgaattgcaaggatctggcagcagtcctcgtcgttagcagagagttgacacacctatgcttagcgaaaaaccctataggcaacactggggtgaagttcctgtgcgaaggactgcggtaccccgaatgcaagctgcagaccctggtgctgtggaattgcgacatcacctcggatgggtgctgcgacctgaccaagctgttacaggaaaagagttccctcctgtgtttggacttgggattgaaccatataggcgtaaagggaatgaaatttctctgcgaagctctcagaaagccattatgcaatctccgttgcctatggctgtggggctgctcaatccctcctttttcgtgcgaggatctgtgctcggcgctgtcctgcaaccagtcgctggtgacccttgacctcggacagaatcccctcgggtcgtctggcgtgaagatgctttttgaaaccctcacatgttcaagcggcactctaagaacactgcgcctgaagatcgacgacttcaatgatgagcttaacaagctgctggaggaaatcgaggaaaagaacccccagctgatcatcgataccgagaagcatcatccttgggctgagcgaccttcatcacatgactttatgatttag

SEQ ID NO: 69136 - DNA, 3189 bp, Artificial Sequence
  derived and/or modified sequence
atggtctcctctgcccagatgggatttaatcttcaggctttgttagaacagttatcccaggacgagctctccaagtttaaatacctgataaccactttcagcctggcccacgagctccagaagatcccacacaaggaggtggacaaagccgacggcaagcagttggtagaaattctgactacacactgtgatagctattgggtcgagatggcttcattgcaggtttttgaaaagatgcatcgcatggatttatctgagcgggcaaaagacgaggttcgagaggcagccttaaagagtttcaataaacgaaaacccctcagtctggggattacccgaaaggagcgtccacccctggatgtggatgaaatgctggaacggtttaagaccgaggcacaggccttcacagaaaccaaagggaacgtaatatgcctgggcaaagaagtgtttaaaggcaagaagccggacaaggataaccgctgccgctacattctcaagaccaaattcagggaaatgtggaaatcgtggccaggcgacagtaaggaggtgcaagtgatggcagaaagatataaaatgctcattccctttagcaaccccagggtcctgcctgggccattttcatacacagtcgtcctctacggcccagccggtctcggcaagactactctagctcagaaactgatgttggattgggccgaggataacttaattcacaagtttaaatatgccttctatttgagttgtcgagagctctctaggctgggtccctgctcctttgctgaactcgtttttagggactggcctgaacttcaggacgacattccacacatcctcgctcaggctcgcaagattcttttcgtgatcgacgggttcgacgagctcggcgctgctccaggagcactcattgaagacatttgtggagactgggaaaagaaaaagcctgttcctgtacttcttgggagccttctgaaccgggtgatgcttcctaaagccgctctcctagtaaccacacggcctagagccctccgagatttgcggattctcgcggaggagcccatctatattagggtcgaaggatttctcgaggaggatcgcagagcgtacttcttacggcacttcggtgatgaggaccaggccatgcgcgctttcgagctcatgcggtcgaacgcagctctgttccagttgggttctgcgccagccgtgtgttggattgtctgtacgactttgaaattgcaaatggaaaaaggggaagatcccgttccaacttgcctaaccaggacgggcctcttcctccggtttttatgcagccgcttcccccaaggggcacagttgcgcggtgcgcttcgcacattatcgctcctagctgctcaggggctttgggcgcagactagcgtgttacatcgcgaagacctggagagactgggcgtgcaagaaagcgatttacgcctattcttggatggcgacattttgcggcaggaccgggtgtcgaagggatgttattcgttcattcacctttcttttcaacaatttctgacagcccttttttacacacttgaaaaggaggaggaggaagatagagatggacatacctgggacatcggcgacgtgcagaaactgttgtctggagttgagcgcctacggaacccagatctcattcaggcaggctactactcattcgggctggcaaatgaaaaacgcgcaaaagagctggaagctacatttggctgtagaatgtcgcccgatataaagcaggagctactgcgctgtgatatctcctgcaaaggcggacatagtacagtgacggacctgcaggagcttctggggtgtctctacgaatctcaggaggaggagctggtcaaggaggtcatggcccagttcaaggagatttcgctgcacctaaacgcagtggatgtggtgcctagtagcttttgtgtcaaacactgccgaaacctgcaaaaaatgtctttgcaggttattaaagaaaaccttcccgaaaatgtgaccgcatccgaatctgacgctgaggtagagagatcacaggatgatcagcacatgcttccgttttggactgacctctgctccatcttcggctctaacaaggacctcatgggactggcgattaacgactcgtttctgtctgcctccctagtgcggattctctgtgaacaaatcgcatccgatacctgccacctgcaacgagtggtcttcaaaaatatttcccccgcagacgctcacaggaacctgtgccttgcacttcgtggacataaaaccgtgacctatctgacgttgcaaggaaatgaccaagacgatatgttccctgccctttgtgaggtactgagacaccctgagtgcaatctgcgctacctgggcctcgtgtcatgttctgcgacgacacagcaatgggccgacctgagcctggccctggaagttaaccaaagccttacgtgcgttaacctgtctgataatgagctgctcgacgagggcgcaaaactactctatactacattgcgccatccaaagtgcttcctgcagcgtctgtctctggagaattgccacctgacagaggctaattgtaaagacctcgctgctgtgctggtcgtctcacgggagttaacccatctctgcctcgcaaaaaaccctatcggaaacaccggtgtgaaattcttgtgcgaagggctgcgttaccccgagtgcaagctacagacactggtactctggaactgtgatatcactagtgatggatgctgcgacctcaccaagcttttgcaggagaagagctcgctactttgcctcgatttaggtctgaatcacatcggggtcaagggtatgaagtttctgtgcgaagcactcaggaagcctctgtgcaatctgcgatgtctctggttgtggggctgctctatcccgccattttcatgcgaggacctttgctccgctctttcatgcaaccaatccctggttacccttgacttgggtcagaaccccttaggaagcagcggcgtgaagatgctgttcgaaacattaacttgctcatctggcacacttaggacgttacgccttaagatcgacgatttcaatgacgagctgaacaaactcctcgaggaaattgaggagaagaaccctcagctgattattgacaccgagaagcaccacccatgggctgagcgtcctagcagccatgactttatgatatag

SEQ ID NO: 69137 - DNA, 3189 bp, Artificial Sequence
  derived and/or modified sequence
atggtaagctccgctcagatggggttcaatcttcaggcactgttggaacagttgagtcaggatgagctgagcaagtttaagtatttgatcactacgttcagtttagctcatgagttgcaaaagatccctcataaggaggtcgacaaggcagatgggaagcaacttgtggaaatactgacaacgcactgtgacagctactgggttgaaatggcctccctgcaggtgttcgagaaaatgcaccgcatggatcttagtgaacgagcaaaggatgaggtaagggaggccgctctgaagtcttttaacaaaaggaaaccactgtccctcggcattactcgtaaggaaaggcctcctctggatgtagacgaaatgctagaacggttcaaaaccgaggcccaagcattcacggagaccaaggggaatgtaatttgcctcggcaaggaggtgttcaagggcaaaaagcccgataaagataatcgatgtaggtacattctaaagactaagttccgcgaaatgtggaagagttggcctggcgacagcaaagaggtgcaggtgatggccgagcgatacaaaatgttgattcccttttcgaatcctcgggtgctgcccggacccttctcctacactgtggtgttgtatggtcccgcaggtctgggcaagactactcttgcccaaaagctgatgcttgattgggcagaggacaaccttattcataaattcaagtatgctttttatttgagctgccgagaactgagtcgacttggcccttgttctttcgccgaactggtgtttagggactggcccgaactacaggacgatataccacatattcttgcacaagccagaaagatcctgttcgttatagatggctttgacgagctgggtgcggcacctggggcattgatagaagacatttgcggcgattgggaaaagaagaaaccagtacctgtgttgttagggagcctgctcaatcgggtcatgttgcccaaagctgcgctgctcgttactacccgaccacgcgctttgcgagacctgagaattctggccgaagagccaatctatattcgagtggagggattcctagaggaggaccgtcgagcttacttccttaggcactttggagacgaagatcaggctatgagagcatttgagctcatgaggagtaatgccgctttgttccagcttggttcagctcctgccgtgtgttggatcgtctgcacaactttaaaactccagatggaaaagggagaagaccctgttccgacatgcttgactcggactggcctgttcctgcgttttctctgttcgagatttccccagggcgctcagttgcggggagctctgcggactctcagcttgctcgcggcacaggggctgtgggctcagacatccgtgctgcaccgggaggacttggaaagacttggcgtacaagagtccgatcttcggctgttcctggacggagacattttgagacaggatagggtgagcaagggatgctattcatttattcacctgagcttccagcagttcctgacagctctgttctacactttagaaaaagaggaggaggaggatagggacggccacacatgggatatcggtgacgttcagaagctacttagcggggttgaaagactgcgaaaccccgatctcatccaggccggatactactcattcgggctcgcaaacgagaaaagggccaaagaactggaggctacattcggttgcaggatgagtccagatatcaagcaggaactgctacggtgcgacatttcctgtaagggcggacattccacagtgactgatctgcaggagctacttggttgtctgtacgagagccaggaggaggagttggttaaggaggtgatggctcaattcaaggagatttccctgcatctgaacgctgtggacgtggtgccctcttctttctgtgtgaaacactgccgtaacttacagaagatgagcttgcaagtgatcaaggagaatctgcctgagaatgtgacagcgtcggagtctgatgcagaagtcgagagaagccaggatgaccagcacatgctgcctttctggacagacttatgttccatcttcggaagcaataaggatttgatgggactggccattaatgattctttcctgtcagccagtctcgtaagaatcctttgtgaacagatcgctagcgacacctgtcatctgcagcgcgtagtctttaaaaacatttcgcccgcagacgcccatcggaacctctgtctggccctgaggggacacaagactgtgacctatctaacactgcaggggaacgatcaggacgatatgtttccagcgctctgcgaggtcttaaggcatccagagtgtaacctaaggtaccttggactggtatcttgctcagcaaccactcagcaatgggcagatttatctctagctcttgaggtgaatcagtccttgacttgcgtgaacctgtccgataatgagttgctggatgaaggcgcaaaactcctgtatacaacattgcgacaccctaaatgctttttacagaggctctcactggaaaactgtcatttaaccgaagccaactgtaaggatctggctgcggtgctggtggtgagccgtgagctcacacacctctgtttagcaaagaaccccattggtaacactggggtgaagtttctgtgcgaaggcctccgttatcctgaatgcaagctgcagaccttggtgctctggaattgcgacatcacctcggatggatgctgcgatctgaccaagctgctgcaggagaagtcctcccttttatgtttggacttaggactcaaccacataggcgtaaaaggaatgaaattcctctgtgaggccttgcgcaaacctctctgcaatctgcgctgcctttggctgtggggatgtagtatacccccattctcttgcgaggacctgtgctcagccctgtcctgcaaccaaagcctcgtgacccttgatctggggcagaatcctctgggaagttccggggtgaagatgttgtttgaaaccctcacttgcagctccggtacacttcgcactctccgtttgaagattgacgacttcaacgacgaactcaataagctgctggaggagattgaggagaagaatccccagctgattatcgatacagaaaagcatcacccctgggcagaaagaccatctagccatgatttcatgatttag

SEQ ID NO: 69138 - DNA, 3189 bp, Artificial Sequence
  derived and/or modified sequence
atggtgtcttctgctcagatgggcttcaacttgcaggccctgctggagcagttgtcccaggatgagttgagtaaatttaaatatctgattacgacattttccctcgctcacgaactgcagaagatcccccacaaggaagtcgacaaggccgacgggaagcagctcgtggagatactcaccacgcactgcgacagctattgggttgaaatggcctccctccaagtcttcgagaagatgcaccgaatggacctttccgagcgggctaaagacgaagtccgcgaggcagctcttaaaagcttcaacaaaagaaaacccttgagtctcggcattaccaggaaagagagaccaccattggacgtcgacgaaatgctggaaaggttcaaaacggaagcacaagcattcacagagaccaagggaaatgtgatctgtcttggtaaggaggtgttcaagggcaaaaagcctgacaaggataaccggtgtcgctacattctgaagactaagttcagggagatgtggaagagctggcccggagatagtaaagaagtacaggtcatggctgaaaggtataagatgcttattccattttccaaccctagggtcctgcctggaccattctcttacacggtcgtcttgtatgggccagccggtctggggaagacgactttggcgcagaagttgatgctggactgggctgaggataaccttattcacaaattcaagtacgcgttttacctgtcctgccgcgagcttagccggctcggcccatgttcctttgccgagctcgtattccgcgactggcccgagcttcaggatgacattcctcatatcctggcccaggccaggaagatattgttcgtaatagacggttttgacgaactgggcgctgctcctggtgccttaattgaagacatctgtggagactgggagaagaagaagcccgtccctgtgctgctgggctccctgttgaatagggtgatgctccccaaagccgctttactggtgacgacccgtccccgagccttgcgtgacctaaggatcctggcagaggaacccatatatattcgcgtcgaaggctttctggaggaagaccgcagagcgtactttctgcggcacttcggtgacgaggaccaagccatgcgtgcctttgaactaatgcggtctaacgccgcattattccagctgggcagtgccccagccgtttgctggattgtctgcaccaccctgaaactgcagatggagaagggagaagacccagtgccgacttgcttgacccggaccggtttattcttacgttttctgtgcagtagatttccccagggcgctcaactgaggggagccctgagaacgcttagtctcttggctgcccagggcctatgggcacaaaccagtgtcctacacagagaagacctcgagcgcctgggcgttcaggagtctgacctgagactgttcctggacggcgatattcttaggcaagacagggtgagtaaaggttgttatagcttcatacacctgagctttcaacagttcctaactgctttattttacaccttggaaaaagaggaggaagaagacagagatggacacacgtgggacatcggtgacgtgcaaaaattactaagtggcgtagaacggttaagaaaccccgatctaatccaagctggttactattctttcggcctagctaacgagaagcgggcaaaggaactggaagctacctttggatgcagaatgtctccggatatcaaacaggaattactgagatgcgatatctcatgcaaaggcggtcattccaccgtcactgatctgcaagaactcctggggtgcttgtacgaaagccaagaggaggaacttgtgaaagaggtcatggcccagtttaaggaaattagcttacacctgaacgccgtggatgttgtgccatcatcgttctgcgtgaagcactgccggaatctgcagaagatgtcactccaagttataaaggagaacctcccagagaacgtgacagccagcgaatccgacgcggaagtggagcggtctcaggacgaccaacacatgctgccgttttggacagatctatgctccatctttgggagtaataaagatctcatgggtcttgccattaacgatagcttcctaagcgctagtctggtgcggatcctgtgcgaacagatcgcttctgatacctgccacctccagcgggttgtgttcaaaaacatctcacccgctgatgctcaccgaaatctgtgtctggcactgcgaggacataaaaccgtgacatacctcacgttacagggaaacgatcaagatgacatgttccccgctctctgcgaagtgttgcgccaccccgaatgcaacttgcgctatctgggtctggtgagttgcagcgcaacaacgcagcaatgggctgatctgagcctagcactggaagttaatcaatccctgacatgcgtgaatctctcggataacgagctcttggacgaaggcgctaaacttctatacaccacactccggcacccaaaatgcttccttcaacgcttatccctagaaaattgtcatttgacagaggccaactgcaaggacctggctgcagtactggttgtgagcagagagctcactcacctttgtcttgctaagaatccaattgggaatactggggtcaaatttctatgtgagggccttaggtatccggaatgtaaactgcagaccctggtcctttggaactgtgatataacaagcgacgggtgttgtgacttgacaaaattgctacaagaaaagagctctctgctctgcctggatttgggtcttaaccacattggagtcaagggaatgaaattcctctgcgaggccctaagaaagcccttatgtaatcttcggtgtttatggctgtggggttgtagcatacctccgttctcctgcgaagacctgtgtagtgcacttagctgcaaccagagtctggtgaccctggacctcggtcagaatccattaggaagctctggggtgaaaatgctattcgagaccttaacctgtagctcaggaacactgcgtacactcagactcaaaatcgacgacttcaatgatgagcttaataagctgctggaggaaatagaggaaaagaatccccagttaattatcgatacagagaaacaccacccatgggccgagcgaccctcttcacatgattttatgatatag

SEQ ID NO: 69139 - DNA, 3189 bp, Artificial Sequence
  derived and/or modified sequence
atggtgtcatcagcgcagatggggttcaatcttcaggccctgttggagcagctgtcccaagacgaattgagtaaattcaagtacctgataactacgtttagccttgcacatgaattgcagaaaattcctcacaaagaagtggataaagcagatgggaaacaactggttgagattcttactacccattgtgactcgtactgggtggaaatggcgagcttgcaggttttcgagaaaatgcatagaatggatcttagtgagcgggcaaaagatgaggtgagggaagcagctctgaaatcatttaacaagcgcaagcctctgtcacttggtatcactcggaaagaacgaccacctcttgacgtcgacgagatgctagaacgctttaagactgaagctcaagcgttcacggaaaccaaaggcaatgttatctgtctgggtaaagaggtcttcaagggcaaaaagccagataaagacaaccggtgccgatacattctgaagacgaaatttcgtgagatgtggaagtcctggcccggagactctaaagaggttcaggtgatggccgaacgttacaaaatgttgatccccttttcaaacccccgagtgctgccgggacctttttcttataccgttgtgctctacggtccagccggattgggcaagaccacgttagcccagaaacttatgctcgattgggcagaggataatttgattcataaatttaagtatgctttttacctcagttgtagggaactgtcacgtctgggcccatgctctttcgctgagcttgtgtttcgagactggcctgagctgcaggacgatatcccccatatcctggcacaggccagaaaaattctgtttgtgatcgacggctttgacgaattgggggctgctcctggtgcgctcatagaggatatctgtggcgattgggaaaaaaagaaacccgtgccagtgctgctggggtcacttctgaatagggtcatgttgccaaaggctgccctattagtaacaacccggcctcgggcactgagagacctccgtattttagccgaggagccaatatatatcagagtagagggcttcctcgaggaagacagacgagcgtacttcctcaggcatttcggggatgaagaccaggctatgcgcgcattcgagctgatgagaagcaatgcagccctgtttcagctgggctctgcaccagcagtgtgctggatcgtgtgcaccacgctaaaacttcagatggaaaaaggcgaagatcctgtgccaacttgtctgactcggactgggctgttccttcgctttctctgcagtagatttcctcagggcgcacaactgaggggagcattacggaccctcagcctgttggctgctcagggcctctgggcacagacttccgtcctgcacagagaagacctggagcggctgggggtccaagaatctgatttacgcctatttctggatggtgatatcctgagacaggaccgagtgtccaaggggtgttactctttcatccatttaagctttcagcagttcctgaccgccctgttctatacacttgagaaggaagaggaggaagacagagacgggcacacttgggacattggagatgtccagaaactcctctcgggagtagaacgattgcgcaatcccgatctcatacaagcaggctactactctttcggtctggccaacgagaagcgtgctaaagagctcgaggcgacgttcggctgccgcatgtcccccgacatcaagcaggagctcctgagatgtgatatcagctgtaaggggggtcactcaaccgtgactgatctgcaagagctgctgggctgcttgtatgagtcgcaggaggaggagttggtcaaggaggtcatggcccaattcaaggagatctccttacatctgaatgctgtagacgtcgtcccttctagtttttgtgtaaagcactgtcgcaatctccaaaagatgtctctccaagtcattaaagagaatctcccagaaaatgtcacagctagtgagagtgatgctgaagtcgagaggtcccaggatgaccagcacatgctgcctttttggacagatttgtgcagcatatttggcagcaacaaggatctaatgggtttagctatcaacgatagcttcctttcagcttctttggttagaatcttatgtgagcagatcgcatctgatacgtgtcatttgcagagagttgtgttcaaaaatatcagtcccgctgatgcccaccgcaacctatgcttagcactaagaggccataagacagttacgtacctcacgttgcaggggaatgatcaggatgacatgttcccggctctctgtgaagtacttcgccatcccgagtgtaatctgagatatctgggcctggtctcttgttctgccaccacacagcagtgggcagatctgtctctcgccttggaggtgaaccaaagcctcacatgcgtcaacttgtcagacaacgagctactggacgagggggctaagctgctgtacaccactctgcgacaccctaaatgctttctgcagcgcctgtccctggaaaactgccatctgacagaagctaactgcaaggaccttgcagcagtcctggttgtcagtagagaactcacccatctctgcttggctaagaatccaatcgggaacacaggagtgaaatttttatgcgaaggtttgagatatcccgaatgtaaattacagactcttgtcctctggaattgcgacatcacctccgacggctgctgtgacctcacaaaactgctgcaggaaaagtcatctcttctgtgtctggatctcggcctaaatcacattggggttaagggaatgaaattcctctgtgaggccctgcgcaaacctctctgcaatctgaggtgcctctggctatggggctgctcaattccaccattctcttgcgaagacctttgcagtgccctttcctgtaaccaatctctagtgaccctcgacctcgggcagaaccctctgggttcctcaggtgtcaaaatgttgtttgagaccctcacctgcagctccgggacccttagaaccctgcgtctgaaaattgacgactttaatgacgaattaaacaagctgcttgaagagatcgaggagaaaaacccacagctgatcatcgataccgagaaacatcatccttgggctgaaagaccttcctcgcacgacttcatgatctag

SEQ ID NO: 69140 - DNA, 3189 bp, Artificial Sequence
  derived and/or modified sequence
atggtttcatcggcacagatgggctttaatctccaagctctcctggaacagttatctcaggacgaactgtctaaattcaagtatttgatcacaacctttagtcttgctcacgaactacagaagataccccataaagaggtcgataaagcagacggaaaacaactcgtggagattctcactacccattgcgacagctattgggttgaaatggccagtctgcaggttttcgagaaaatgcaccggatggatctgtcagaaagggctaaagacgaagtgagggaagccgctcttaagagctttaacaaacggaagcccctgtccttgggaatcactcggaaggaaagacctccactggatgtggatgagatgttagagagattcaaaacagaagcccaagccttcaccgagaccaaggggaatgttatttgtttggggaaagaagtgtttaaaggcaagaagcccgataaggacaatcggtgcaggtacattctgaaaacaaagttccgggaaatgtggaagagttggccaggggattccaaagaagtacaggtgatggccgaacgctataaaatgctgatcccatttagcaacccaagggttctgcctgggcctttcagctacaccgttgtcctatacggacctgcaggtctgggcaagacgaccctggcccagaaattgatgcttgactgggccgaagacaatctgattcacaagttcaagtacgccttttatctgagctgccgggagctaagccgactcggaccttgctcctttgccgagctggtgttccgcgactggcccgagctgcaggatgacattccccacatactggcccaggcaaggaagatactattcgtgatcgacggctttgatgaattgggggctgcccctggggcactgattgaggatatctgcggagattgggagaagaagaagcccgtgcccgtgttactgggatctctgctgaatcgtgtcatgttgcctaaagcagcgctgctggtgaccacccggccacgggctcttagagatctgaggatcctggctgaggagcccatatacatccgcgtggagggcttcttagaggaggaccgaagggcctacttccttcggcattttggggacgaggaccaagctatgagagccttcgagttgatgagatccaatgccgctctgtttcaactggggtccgcacccgctgtgtgctggattgtctgtactaccctgaaattacagatggaaaagggtgaggatccagtgcctacttgccttacgcgtacagggttgtttttgcgatttttgtgctctcgatttccccagggagcccaattaaggggcgctctgaggaccctctccttactggctgctcaggggttatgggcgcagacttctgtgctgcatcgcgaagacctagagcggctgggggtgcaggaatcagatttaaggctattcctggatggagatatcctgcggcaggatagagtctccaagggatgctatagcttcatccacctgagtttccagcagttcctaaccgccttattttatactttggagaaggaggaggaggaagatagggacggccacacatgggatatcggcgatgtccagaagctgttgagtggggttgagaggctccgcaaccctgaccttatccaggccggatactattctttcggtctcgcaaacgaaaagcgagcgaaggaactcgaggctacatttggttgcaggatgtcccccgacatcaaacaggagttgctgaggtgcgacatatcctgcaaggggggtcattccacagttacagacctccaggaactgctggggtgtttgtatgagtcgcaagaggaggagctggtcaaggaagtgatggcccagttcaaagaaataagtctgcatctgaacgcagtggacgttgttccgagttcattttgtgtcaaacattgtaggaacttgcagaaaatgtcattgcaggtcatcaaagaaaacctgccagagaatgtcacagcaagcgagtccgatgccgaggtggaaagatcccaagacgatcagcacatgttacctttttggaccgatctctgtagcattttcgggagcaataaggatctgatgggtcttgctatcaacgactcatttctgagtgcgtccctggttaggattttatgcgagcagatagctagcgacacgtgccacctccagagggtcgtgtttaaaaatatctcccccgcagatgcacacagaaacctgtgcttagcgcttagaggtcataagactgtgacatatctcacgctgcagggaaacgaccaggatgacatgtttcctgctttgtgtgaggtgctgaggcatcccgagtgcaatttaagatacctgggactggtctcttgcagcgccacaacacagcagtgggcagacctgagcctagctctggaagtgaaccaatccctgacatgtgttaacctgtccgataatgagttactggatgagggagccaaactgctctacacaacactgaggcaccccaaatgtttcctgcaacggctgtccctggaaaattgccaccttaccgaagcaaattgcaaggatctggccgctgttctggttgtgtctcgggagctgacacatttatgcctcgccaagaaccctataggcaatactggagtgaaattcttgtgcgagggacttcggtaccctgagtgcaagctgcagacccttgtgctgtggaattgtgatattactagcgacggctgctgcgacctcacaaaactgttacaggaaaagtcttccctcctgtgtctggatctgggacttaaccatatcggcgtgaagggcatgaagttcctatgcgaggccctgcggaagccactgtgcaacctaagatgcctctggctctggggctgttccatccccccattttcttgtgaggacctgtgctcagccctgagctgcaatcagagtctggtgaccctggacctcggccagaaccctcttggcagtagcggagtgaaaatgttgtttgagacgctcacatgttcttccggcactctccgtacgcttcgccttaaaattgatgattttaatgacgagcttaacaaattgctcgaagagatcgaggagaagaacccccaattgatcattgacaccgagaagcatcatccctgggccgagagaccttcctctcacgacttcatgatctag

SEQ ID NO: 69141 - DNA, 3189 bp, Artificial Sequence
  derived and/or modified sequence
atggtgagcagcgcccagatggggttcaatctccaggccctcctggaacagctgtcacaagacgagctctccaagtttaagtatttgataacgacattttccttggcgcacgaactgcagaaaatccctcacaaggaagtcgataaggccgacggtaaacagttagtggagatacttactacccactgcgacagctactgggtggaaatggcgagtctgcaagtctttgagaagatgcaccgcatggacctgagcgagcgggcaaaagatgaggtgagagaagcagcactaaagtccttcaacaagaggaagcctctctcccttgggattacacgcaaagaacggccacccctagacgtggacgagatgctggaacggttcaagactgaggcacaagccttcaccgagaccaagggcaacgtgatttgcctggggaaggaagtatttaaagggaagaaaccggataaggataacagatgcaggtatatactaaaaacaaaatttagggagatgtggaaaagttggccgggtgacagcaaggaagtgcaggtgatggctgaacgatacaaaatgctgattccgttttctaatccacgtgtgctgcccggtcccttcagttacacagtagtcctgtatggtccagctggtctgggcaaaactactctggctcagaaattaatgctggactgggctgaagataacctgattcataagtttaagtatgctttttacctctcatgtcgggaactatcaaggctcggcccttgcagttttgcggaactcgttttcagagattggccggagctacaggatgatatacctcacatcctggcccaggcccgtaagatcctgttcgtgatcgacggtttcgatgagctcggtgctgcaccaggggctctgattgaggatatctgcggggattgggagaagaagaagcctgtccctgttcttctgggcagtctgttgaatcgagtcatgctgcccaaggcggcacttctggtgaccaccagacccagagcgctgagagatctgaggattcttgcggaggaaccaatttacatacgggttgagggattcctagaagaggaccggagagcctacttcctacgacacttcggggatgaggatcaggccatgcgcgctttcgagctgatgagatcaaatgcggcacttttccagttaggcagcgcacctgcagtctgctggatagtgtgtacaactctgaaactccagatggagaaaggtgaagatcccgtgcccacatgtctgactaggacaggtcttttcttgaggtttttgtgcagcagattccctcagggcgctcaactgcgcggtgcattacgcaccctcagcctgttagctgctcagggcctgtgggcgcagactagcgtgttgcacagggaggacctcgaaagactcggggtgcaggaaagtgacctcaggctctttttagacggagatattctgagacaggacagagtgtctaaaggatgttatagttttattcatcttagctttcaacaattccttacagcactgttttatactttagagaaagaagaggaagaggatcgcgatgggcacacctgggacatcggtgatgtgcaaaagttgcttagcggggttgaaagattaaggaacccagacctgattcaggctggctattactcgtttggcttagccaatgagaagcgtgccaaagagcttgaagcaacatttgggtgtagaatgtcgcccgatattaagcaggagctcttacgctgtgatatttcctgcaagggaggccactcaaccgttaccgatctgcaggagctgttaggttgcctctatgagtcccaagaggaagaattagtgaaggaagtcatggcgcaatttaaggagattagcttgcacctcaacgccgtcgacgtcgttcccagcagcttctgcgtcaaacattgtaggaacttacagaaaatgagccttcaggtaatcaaggaaaatctccctgaaaacgttaccgcttccgagagtgatgctgaagtggagcgcagtcaagatgaccagcacatgctgcccttttggactgatttgtgcagcatcttcggcagcaacaaggatcttatggggctagcaataaatgattctttcttatccgcttcgttggtgcggatcttgtgcgagcagatcgcctcagacacgtgtcatctacaacgggtggtctttaaaaatatttcgcccgctgatgcccaccgtaacctctgtttggctctgcgcggtcacaagacagtaacctatcttacattacaaggaaacgaccaggacgatatgttccctgcgctgtgtgaagtgttgcgccatccagaatgcaatctgaggtacctcggactggtgtcatgctcagctaccacacagcaatgggcagatctgagcctggcactggaggtcaatcagtcgctgacatgcgtaaatttaagtgacaatgaactcctggatgaaggggctaagctgctgtacacaaccctccgccacccaaagtgtttcttgcaacggctcagcctcgagaactgccatcttacagaggccaattgtaaggacctggcagctgttctggtagtcagccgggaactgacgcacttgtgcctcgccaagaacccaattggcaataccggagtcaagtttctctgcgagggcttgcggtacccagaatgtaaattacagaccttagtgctctggaattgtgatatcaccagtgacggttgctgtgacctgacgaaactgctgcaggaaaaatcaagcctcttgtgcttggacctgggccttaaccacattggcgtgaagggcatgaagttcctctgcgaggctctgagaaagccactgtgcaacctgcgatgtttgtggctgtgggggtgctcaatccccccattttcctgcgaagatctttgctctgccctgagttgcaaccagtcactagtgacgctggaccttggtcagaaccctctaggatcctccggcgtgaagatgctgtttgagacattgacatgttcaagcggaactttgcgcacactgcgactgaagattgatgatttcaatgatgaacttaacaagctgctcgaggagattgaggaaaagaatccgcagctgataattgacactgagaagcaccatccttgggcagagcgtcccagttcacatgactttatgatctag

SEQ ID NO: 69142 - protein, 1040 aa, Artificial Sequence
  derived and/or modified sequence
MVSSAQMGFNLQALLEQLSQDELSKFKYLITTFSLAHELQKIPHKEVDKADGKQLVEILTTHCDSYWVEMASLQVFEKMHRMDLSERAKDEVREAALKSFNKRKPLSLGITRKERPPLDVDEMLERFKTEAQDKDNRCRYILKTKFREMWKSWPGDSKEVQVMAERYKMLIPFSNPRVLPGPFSYTVVLYGPAGLGKTTLAQKLMLDWAEDNLIHKFKYAFYLSCRELSRLGPCSFAELVFRDWPELQDDIPHILAQARKILFVIDGFDELGAAPGALIEDICGDWEKKKPVPVLLGSLLNRVMLPKAALLVTTRPRALRDLRILAEEPIYIRVEGFLEEDRRAYFLRHFGDEDQAMRAFELMRSNAALFQLGSAPAVCWIVCTTLKLQMEKGEDPVPTCLTRTGLFLRFLCSRFPQGAQLRGALRTLSLLAAQGLWAQTSVLHREDLERLGVQESDLRLFLDGDILRQDRVSKGCYSFIHLSFQQFLTALFYTLEKEEEEDRDGHTWDIGDVQKLLSGVERLRNPDLIQAGYYSFGLANEKRAKELEATFGCRMSPDIKQELLRCDISCKGGHSTVTDLQELLGCLYESQEEELVKEVMAQFKEISLHLNAVDVVPSSFCVKHCRNLQKMSLQVIKENLPENVTASESDAEVERSQDDQHMLPFWTDLCSIFGSNKDLMGLAINDSFLSASLVRILCEQIASDTCHLQRVVFKNISPADAHRNLCLALRGHKTVTYLTLQGNDQDDMFPALCEVLRHPECNLRYLGLVSCSATTQQWADLSLALEVNQSLTCVNLSDNELLDEGAKLLYTTLRHPKCFLQRLSLENCHLTEANCKDLAAVLVVSRELTHLCLAKNPIGNTGVKFLCEGLRYPECKLQTLVLWNCDITSDGCCDLTKLLQEKSSLLCLDLGLNHIGVKGMKFLCEALRKPLCNLRCLWLWGCSIPPFSCEDLCSALSCNQSLVTLDLGQNPLGSSGVKMLFETLTCSSGTLRTLRLKIDDFNDELNKLLEEIEEKNPQLIIDTEKHHPWAERPSSHDFMI

SEQ ID NO: 69143 - DNA, 3123 bp, Artificial Sequence
  derived and/or modified sequence
atggtgagcagcgcccagatgggcttcaacctgcaggccctgctggagcagctgagccaggacgagctgagcaagttcaagtacctgatcaccaccttcagcctggcccacgagctgcagaagatcccccacaaggaggtggacaaggccgacggcaagcagctggtggagatcctgaccacccactgcgacagctactgggtggagatggccagcctgcaggtgttcgagaagatgcacagaatggacctgagcgagagagccaaggacgaggtgagagaggccgccctgaagagcttcaacaagagaaagcccctgagcctgggcatcaccagaaaggagagaccccccctggacgtggacgagatgctggagagattcaagaccgaggcccaggacaaggacaacagatgcagatacatcctgaagaccaagttcagagagatgtggaagagctggcccggcgacagcaaggaggtgcaggtgatggccgagagatacaagatgctgatccccttcagcaaccccagagtgctgcccggccccttcagctacaccgtggtgctgtacggccccgccggcctgggcaagaccaccctggcccagaagctgatgctggactgggccgaggacaacctgatccacaagttcaagtacgccttctacctgagctgcagagagctgagcagactgggcccctgcagcttcgccgagctggtgttcagagactggcccgagctgcaggacgacatcccccacatcctggcccaggccagaaagatcctgttcgtgatcgacggcttcgacgagctgggcgccgcccccggcgccctgatcgaggacatctgcggcgactgggagaagaagaagcccgtgcccgtgctgctgggcagcctgctgaacagagtgatgctgcccaaggccgccctgctggtgaccaccagacccagagccctgagagacctgagaatcctggccgaggagcccatctacatcagagtggagggcttcctggaggaggacagaagagcctacttcctgagacacttcggcgacgaggaccaggccatgagagccttcgagctgatgagaagcaacgccgccctgttccagctgggcagcgcccccgccgtgtgctggatcgtgtgcaccaccctgaagctgcagatggagaagggcgaggaccccgtgcccacctgcctgaccagaaccggcctgttcctgagattcctgtgcagcagattcccccagggcgcccagctgagaggcgccctgagaaccctgagcctgctggccgcccagggcctgtgggcccagaccagcgtgctgcacagagaggacctggagagactgggcgtgcaggagagcgacctgagactgttcctggacggcgacatcctgagacaggacagagtgagcaagggctgctacagcttcatccacctgagcttccagcagttcctgaccgccctgttctacaccctggagaaggaggaggaggaggacagagacggccacacctgggacatcggcgacgtgcagaagctgctgagcggcgtggagagactgagaaaccccgacctgatccaggccggctactacagcttcggcctggccaacgagaagagagccaaggagctggaggccaccttcggctgcagaatgagccccgacatcaagcaggagctgctgagatgcgacatcagctgcaagggcggccacagcaccgtgaccgacctgcaggagctgctgggctgcctgtacgagagccaggaggaggagctggtgaaggaggtgatggcccagttcaaggagatcagcctgcacctgaacgccgtggacgtggtgcccagcagcttctgcgtgaagcactgcagaaacctgcagaagatgagcctgcaggtgatcaaggagaacctgcccgagaacgtgaccgccagcgagagcgacgccgaggtggagagaagccaggacgaccagcacatgctgcccttctggaccgacctgtgcagcatcttcggcagcaacaaggacctgatgggcctggccatcaacgacagcttcctgagcgccagcctggtgagaatcctgtgcgagcagatcgccagcgacacctgccacctgcagagagtggtgttcaagaacatcagccccgccgacgcccacagaaacctgtgcctggccctgagaggccacaagaccgtgacctacctgaccctgcagggcaacgaccaggacgacatgttccccgccctgtgcgaggtgctgagacaccccgagtgcaacctgagatacctgggcctggtgagctgcagcgccaccacccagcagtgggccgacctgagcctggccctggaggtgaaccagagcctgacctgcgtgaacctgagcgacaacgagctgctggacgagggcgccaagctgctgtacaccaccctgagacaccccaagtgcttcctgcagagactgagcctggagaactgccacctgaccgaggccaactgcaaggacctggccgccgtgctggtggtgagcagagagctgacccacctgtgcctggccaagaaccccatcggcaacaccggcgtgaagttcctgtgcgagggcctgagataccccgagtgcaagctgcagaccctggtgctgtggaactgcgacatcaccagcgacggctgctgcgacctgaccaagctgctgcaggagaagagcagcctgctgtgcctggacctgggcctgaaccacatcggcgtgaagggcatgaagttcctgtgcgaggccctgagaaagcccctgtgcaacctgagatgcctgtggctgtggggctgcagcatcccccccttcagctgcgaggacctgtgcagcgccctgagctgcaaccagagcctggtgaccctggacctgggccagaaccccctgggcagcagcggcgtgaagatgctgttcgagaccctgacctgcagcagcggcaccctgagaaccctgagactgaagatcgacgacttcaacgacgagctgaacaagctgctggaggagatcgaggagaagaacccccagctgatcatcgacaccgagaagcaccacccctgggccgagagacccagcagccacgacttcatgatctag

SEQ ID NO: 69144 - DNA, 3422 bp, Artificial Sequence
  derived and/or modified sequence
cagccctcatctccgccggcgagtagggccaggtgttgggagctcccacgtgggacaagatggtgtcttcggcgcagatgggcttcaacctgcaggctctcctggagcagctcagccaggatgagttgagcaagttcaagtatctgatcacgaccttctccctggcacacgagctccagaagatcccccacaaggaggtagacaaggctgatgggaagcaactggtagaaatcctcaccacccattgtgacagctactgggtggagatggcgagcctccaggtctttgaaaagatgcaccgaatggatctgtctgagagagcaaaggatgaagtcagagaagcagctttgaaatcctttaataaaaggaagcctctatcattagggataacacggaaagaacgaccacctctagacgtggacgaaatgctggagcgcttcaaaacagaagcacaagacaaagacaataggtgcaggtatatattgaagacgaagttccgggagatgtggaagagctggcctggagatagcaaagaggtccaggttatggctgagagatacaagatgctgatcccattcagcaaccccagggtgcttcccgggcccttctcatacacggtggtgctgtatggtcctgcaggccttgggaaaaccacgctggcccagaaactaatgctagactgggcagaggacaacctcatccacaaattcaaatatgcgttctacctcagctgcagggagctcagccgcctgggcccgtgcagttttgcagagctggtcttcagggactggcctgaattgcaggatgacattccacacatcctagcccaagcacggaaaatcttgttcgtgattgacggctttgatgagctgggagccgcacctggggcgctgatcgaggacatctgcggggactgggagaagaagaagccggtgcccgtcctcctggggagtttgctgaacagggtgatgttacccaaggccgccctgctggtcaccacgcggcccagggccctgagggacctccggatcctggcggaggagccgatctacataagggtggagggcttcctggaggaggacaggagggcctatttcctgagacactttggagacgaggaccaagccatgcgtgcctttgagctaatgaggagcaacgcggccctgttccagctgggctcggcccccgcggtgtgctggatcgtgtgcacgactctgaagctgcagatggagaagggggaggacccggtccccacctgcctcacccgcacggggctgttcctgcgtttcctctgcagccggttcccgcagggcgcacagctgcggggcgcgctgcggacgctgagcctcctggccgcgcagggcctgtgggcgcagacgtccgtgcttcaccgagaggatctggaaaggctcggggtgcaggagtccgacctccgtctgttcctggacggagacatcctccgccaggacagagtctccaaaggctgctactccttcatccacctcagcttccagcagtttctcactgccctgttctacaccctggagaaggaggaggaagaggatagggacggccacacctgggacattggggacgtacagaagctgctttccggagtagaaagactcaggaaccccgacctgatccaagcaggctactactcctttggcctcgctaacgagaagagagccaaggagttggaggccacttttggctgccggatgtcaccggacatcaaacaggaattgctgcgatgcgacataagttgtaagggtggacattcaacggtgacagacctgcaggagctcctcggctgtctgtacgagtctcaggaggaggagctggtgaaggaggtgatggctcagttcaaagaaatatccctgcacttaaatgcagtagacgttgtgccatcttcattctgcgtcaagcactgtcgaaacctgcagaaaatgtcactgcaggtaataaaggagaatctcccggagaatgtcactgcgtctgaatcagacgccgaggttgagagatcccaggatgatcagcacatgcttcctttctggacggacctttgttccatatttggatcaaataaggatctgatgggtctagcaatcaatgatagctttctcagtgcctccctagtaaggatcctgtgtgaacaaatagcctctgacacctgtcatctccagagagtggtgttcaaaaacatttccccagctgatgctcatcggaacctctgcctagctcttcgaggtcacaagactgtaacgtatctgacccttcaaggcaatgaccaggatgatatgtttcccgcattgtgtgaggtcttgagacatccagaatgtaacctgcgatatctcgggttggtgtcttgttccgctaccactcagcagtgggctgatctctccttggcccttgaagtcaaccagtccctgacgtgcgtaaacctctccgacaatgagcttctggatgagggtgctaagttgctgtacacaactttgagacaccccaagtgctttctgcagaggttgtcgttggaaaactgtcaccttacagaagccaattgcaaggaccttgctgctgtgttggttgtcagccgggagctgacacacctgtgcttggccaagaaccccattgggaatacaggggtgaagtttctgtgtgagggcttgaggtaccccgagtgtaaactgcagaccttggtgctttggaactgcgacataactagcgatggctgctgcgatctcacaaagcttctccaagaaaaatcaagcctgttgtgtttggatctggggctgaatcacataggagttaagggaatgaagttcctgtgtgaggctttgaggaaaccactgtgcaacttgagatgtctgtggttgtggggatgttccatccctccgttcagttgtgaagacctctgctctgccctcagctgcaaccagagcctcgtcactctggacctgggtcagaatcccttggggtctagtggagtgaagatgctgtttgaaaccttgacatgttccagtggcaccctccggacactcaggttgaaaatcgatgactttaatgatgaactcaataagctgctggaagaaatagaagaaaaaaacccacaactgattattgatactgagaaacatcatccctgggcagaaaggccttcttctcatgacttcatgatctgaatccccccgagtcattcattctccatgaagtcatcgattttccaggtgttggtgaactgcctgtgactcctctcctccccggcccctacccctcagggataatgagttcattgctgggctagatgttttagccatgattctgcctctgttttatacctgcacacatccttatctttgttacatatgaaatatctgtatcacgggtatattgagagaaataaaggtgagagcattcacaaa

SEQ ID NO: 69145 - DNA, 3123 bp, Artificial Sequence
  derived and/or modified sequence
atggtctctagcgcgcaaatgggattcaacctccaggctctgctcgagcagctgagccaagatgaactgtccaagttcaaatatctcatcacgacattttctttggctcatgaactgcaaaaaattccccataaggaagtggacaaggcagatggtaagcaacttgtagaaattttaaccacccactgcgacagttactgggtagaaatggcctccctgcaggttttcgaaaaaatgcaccgcatggatctgtctgagagggcaaaggatgaggtgcgagaagctgctttaaaatctttcaacaagcgaaaaccactaagcctcggaatcacccgcaaagaaagaccgcccttagatgtagatgaaatgctggaacgttttaaaaccgaggctcaggacaaagacaataggtgcagatacatcctcaaaacgaaatttcgtgaaatgtggaaatcgtggcctggagattcgaaagaggtccaggtgatggccgagagatacaagatgctgatacctttctccaacccgagggtgctgcccggtcctttcagctataccgttgtgttgtacggacccgctggcctggggaaaactaccctggcccagaagttgatgcttgactgggctgaagataacctgattcataagttcaagtatgccttctatttgtcctgtagagaactgtcccgtctcgggccctgcagtttcgccgaattagtcttcagagattggccagaactgcaggacgatattccacacattctcgctcaggcccgtaagattttattcgtaattgacgggttcgacgagctcggtgctgcccctggagccctcatcgaggacatctgcggcgactgggagaagaagaaaccagttcctgtactgctgggctccctgctgaaccgggtgatgctccctaaggcagctctgctagttaccacccggccaagggctttgcgcgacctgcggatccttgccgaagaacctatttacatccgggtcgagggttttttagaggaggacagaagggcctactttctccggcacttcggcgacgaagatcaagctatgcgagctttcgagctgatgaggtcaaatgctgcacttttccagctgggctcagcccccgctgtgtgttggatcgtatgcacaaccctgaaactccaaatggagaaaggcgaggaccccgtacctacatgtctaactaggaccggattgttcctgcgatttctatgttccagattcccacagggcgcccaattgcgaggcgccctgcgtacactgtcgctgttagcggcccaaggactttgggcccagaccagcgtgctgcatagggaagatctcgaaagactgggagtgcaggaatctgacttgaggctgttcttggatggagatattctaagacaggatcgtgtctcgaagggctgctatagtttcatccatctgtcttttcagcagtttttgacagcactcttctacacccttgagaaagaggaggaggaagatcgcgacgggcacacttgggatatcggggatgtgcagaagctactcagtggcgttgagcgccttcggaaccctgatttgatccaggcaggatattatagcttcggtctggccaacgaaaagagggctaaggagctggaagccacatttggatgtaggatgagtcctgatatcaaacaggaactgctgaggtgtgacatatcctgtaagggcggccactcaacggtcaccgacttacaagagctgttggggtgtctatatgagagccaggaggaggagctagtaaaggaagtgatggcccaatttaaagaaatctcactccacttgaatgcagtagatgtggtgccaagttccttctgcgtgaagcactgcagaaaccttcagaagatgagccttcaggttatcaaagagaacctgcctgagaacgttaccgccagtgagagcgatgctgaagtagagcgcagccaggacgatcagcatatgctgcccttttggaccgatctgtgctcaatctttggatctaataaggacctgatgggactcgccatcaatgatagcttcctttcagcaagtctggtgcgcatactctgcgaacaaatagccagcgacacttgtcacctccagcgtgttgtgttcaagaatatttccccagctgacgcccaccgaaatctgtgtttagctctgcggggccacaaaactgtgacctatctgactctgcaaggaaatgatcaagacgacatgtttccagctctgtgtgaggtcttgagacatcccgaatgtaacctgcggtacttgggtctcgttagctgttcagccacaacacagcagtgggcggatctctccctcgccttggaggtcaatcagtcactgacttgcgtcaatctgtcagataacgaactgcttgatgaaggggccaaactgctttacaccaccctgcgacacccaaagtgttttctgcaacggctttcattagagaactgtcatttgaccgaggccaactgtaaagatcttgcagccgttctcgtggttagccgggaactgacccatctgtgtctagcaaaaaaccccatcgggaatactggggtcaaattcctgtgcgaaggcttaaggtaccctgagtgcaagctgcagaccttggtgctttggaattgcgacatcacgagtgatggctgttgcgacctcaccaagcttcttcaggaaaagtcttctctgttatgcctggatctcggcctaaaccatataggcgtgaagggcatgaaatttttgtgcgaggcactgcggaagccactctgcaacctgaggtgcctgtggttatggggctgctccattccccctttctcttgcgaagacctgtgttctgcgttgagttgcaaccagtcactggtgactctcgacctaggccagaatcccctggggtctagcggtgtgaagatgctctttgagacactgacttgctctagtggtaccctgcgtactttgaggctgaagatcgacgacttcaacgacgaactgaacaaactattagaagaaattgaggaaaagaacccccagctgattattgataccgaaaagcaccacccctgggctgaacgtccatcctctcacgacttcatgatctag

SEQ ID NO: 69146 - DNA, 3123 bp, Artificial Sequence
  derived and/or modified sequence
atggttagcagtgcacagatgggctttaacctgcaagctttgctggaacagctgtcccaagacgaattgtccaaattcaagtacctgataacaactttttcgctggctcatgaactgcagaagatcccacacaaagaggtggataaagccgacggtaagcagttggtcgaaatattaactacacattgtgatagctattgggtagagatggcctccttacaagtgttcgaaaagatgcaccgaatggatttaagtgagcgcgctaaggacgaagtgagggaggccgctctgaagtcctttaacaaaagaaaacctcttagcttgggcatcacacggaaagaacgcccccctcttgacgtggacgaaatgttagagaggtttaagacagaggcacaagacaaagataatagatgtagatacatactgaagaccaagtttcgagagatgtggaaatcatggcctggggactccaaagaagtgcaggtcatggcagagagatacaagatgctgattccctttagtaacccacgggttctccctggaccctttagctatacagtggtcctgtacggtcctgctggcctgggtaagacgactttagcacagaagctcatgctggactgggcggaagacaaccttatccataagttcaagtatgcattttacctaagctgtagagagctatcccggctaggcccctgttctttcgccgaactggtcttcagggactggcccgagcttcaagatgatatacctcatatcctggcccaggcccgcaagatcctgtttgtgatcgacgggttcgacgaactcggggcagcaccaggcgcgctgatagaggacatatgtggggattgggagaagaagaagccagtaccagtgttgctgggttcactattgaatagggtgatgctgcctaaagctgcccttttggtgacaactcggccacgagctctgagagacttgcgtatccttgcagaggaacccatttatatccgcgtggagggcttcctcgaagaggaccgaagggcttacttcctgaggcactttggcgacgaagatcaagcgatgagggcgttcgagctgatgcgctctaacgcagccctgttccagctgggttcagcccccgccgtgtgttggattgtctgcacaacactgaaactgcagatggaaaaaggggaagaccccgtacccacatgtctgactcgtactggtctgtttctgcgcttcctgtgttcgagatttcctcagggcgctcagctgcgcggcgccctccgaactctgtctttactcgcagctcaggggctgtgggcccagaccagtgttctgcatagagaagatcttgaaaggctgggtgtccaagaatcagatttacggcttttcttggatggagacattctgcggcaggacagggtgagtaagggttgttactccttcatccatctcagtttccagcaatttcttacagcattgttctacacactcgaaaaggaggaagaagaagatcgcgatggacatacctgggacattggtgacgttcagaagctgctgtctggcgtcgagcggttgagaaatcccgacctaatccaggcaggctactactcctttggccttgccaatgagaagagagcgaaggagcttgaggccacgttcggctgtagaatgagtcccgacatcaaacaagagttgctgaggtgcgatatttcgtgcaaggggggccatagtaccgtgaccgacctgcaggaattgttaggatgtctttacgaaagtcaggaagaggaactagtcaaggaagtgatggcacagttcaaagagatctccctgcacctgaacgccgtagatgtggtgccatcttccttttgtgttaagcactgtcgaaacctgcagaagatgtccctgcaggtgataaaggaaaatttgccggaaaacgtgacagcatctgagtcagacgctgaagtagaaagaagccaggatgatcagcatatgctgccgttttggacagacctttgtagtatttttggttctaacaaagaccttatgggtctggcaatcaacgactcctttctgtccgcttccctagtgaggatcctgtgcgagcagatcgcttcagatacttgccaccttcaacgcgtcgtgtttaaaaacatcagcccagccgatgcccataggaacctctgcctggccttacgtggtcataaaactgtcacatacctcactctccagggcaatgaccaagatgacatgtttcctgccttatgcgaggtgctcaggcatcctgaatgcaatttgaggtacttgggccttgtgtcttgttccgccactacccagcagtgggcagatctgagtttggcactcgaagtcaatcagtcccttacctgcgtgaacctgagcgacaacgagctcctggacgagggagccaagctgctgtatacaactctgcgccacccaaaatgctttctgcagagacttagtttggaaaactgccacctgacggaagccaattgcaaagatctggctgcagtcctggtggtgtcccgagaactaacacatctgtgtttggctaaaaaccccatcggcaatactggggtgaaattcttgtgcgaggggcttagatatcctgagtgcaagctgcaaaccttagtcctttggaattgcgacatcacttccgatggatgctgcgatcttacgaaattgctgcaggagaagagctctctgctgtgcctcgacctgggcctcaatcacataggggtgaaagggatgaaattcctgtgcgaggctctcaggaagccactttgtaacctgcgttgtctgtggctgtggggctgttcaatccctccattctcctgcgaagatctttgctctgccttgtcttgtaaccagtcactggtgacgttggatctgggccaaaatccccttggctcctcgggcgttaagatgctgttcgaaacactgacgtgctcctctggaacattgaggactttgcgattgaaaattgatgatttcaatgacgagctcaataagctgctcgaggaaatagaggaaaagaaccctcagctgatcattgacacagaaaagcatcatccgtgggccgagcgcccgtcgtcacacgattttatgatttag

SEQ ID NO: 69147 - DNA, 3123 bp, Artificial Sequence
  derived and/or modified sequence
atggtgagcagcgcccagatgggcttcaacctgcaggccctgctggagcagctgagccaggatgagctgagcaagttcaagtacctgatcaccaccttcagcctggcccacgagctgcagaagatcccccacaaggaggtggacaaggcagatggcaagcagctggtggagatcctgaccacccactgtgacagctactgggtggagatggccagcctgcaggtgtttgagaagatgcacaggatggacctgtctgagcgggccaaggatgaggtgcgggaggccgccctgaagagcttcaacaagaggaagcccctgagcctgggcatcaccaggaaggagcggccccccctggatgtggatgagatgctggagcgcttcaagacagaggcccaggacaaggacaaccgctgccgctacatcctgaagaccaagttccgggagatgtggaagtcctggccaggggacagcaaggaggtgcaggtgatggccgagcgctacaagatgctgatccccttcagcaacccccgggtgctgcccggccccttctcctacacagtggtgctgtatggccctgctggcctgggcaagaccaccctggcccagaagctgatgctggactgggccgaggacaacctgatccacaagttcaagtatgccttctacctgagctgccgggagctgagccggctgggcccctgcagctttgctgagctggtgttccgggactggccagagctgcaggatgacatcccccacatcctggcccaggccaggaagatcctgtttgtgattgatggctttgatgagctgggcgccgcccctggggccctgattgaggacatctgtggggactgggagaagaagaagcctgtgcctgtgctgctgggcagcctgctgaacagagtgatgctgcccaaggccgccctgctggtgaccacccggccccgggccctgcgggacctgcgcatcctggccgaggagcccatctacatccgggtggagggcttcctggaggaggaccggcgggcctacttcctgcggcactttggagatgaggaccaggccatgagggcctttgagctgatgaggagcaatgctgccctcttccagctgggcagcgccccagctgtgtgctggatcgtgtgcaccaccctgaagctgcagatggagaagggggaggaccctgtgcccacctgcctgaccaggacaggcctcttcctgcgcttcctgtgcagccgcttcccccagggcgcccagctgcggggggccctgcggaccctgagcctgctggccgcccagggcctgtgggcccagacctctgtgctgcaccgggaggacctggagcggctgggcgtgcaggagagtgacctgcggctcttcctggatggagacatcctgcggcaggacagagtgtccaagggctgctacagcttcatccacctgtccttccagcagttcctgacagccctcttctacaccctggagaaggaggaggaggaggacagagatggccacacctgggacattggagatgtgcagaagctgctgagcggcgtggagcggctgaggaacccagacctgatccaggccggctactacagctttggcctggccaatgagaagagggccaaggagctggaggccaccttcggctgcaggatgagcccagacatcaagcaggagctgctgcgctgtgacatcagctgcaagggcggccacagcacagtgacagacctgcaggagctgctgggctgcctgtatgagagccaggaggaggagctggtgaaggaggtgatggcccagttcaaggagatcagcctgcacctgaatgctgtggatgtggtgcccagcagcttctgtgtgaagcactgcaggaacctgcagaagatgagcctgcaggtgatcaaggagaacctgcctgaaaatgtgacagccagcgagagtgatgctgaggtggagaggagccaggatgaccagcacatgctgcccttctggacagacctgtgcagcatcttcggcagcaacaaggacctgatgggcctggccatcaatgacagcttcctgagcgccagcctggtgcgcatcctgtgtgagcagatcgccagtgacacctgccacctgcagagggtggtgttcaagaacatcagccctgcagatgcccacaggaacctgtgcctggccctgcggggccacaagacagtgacctacctgaccctgcagggcaatgaccaggatgacatgtttcctgccctgtgtgaggtgctgcggcaccctgagtgcaacctgcgctacctgggcctggtgtcctgcagcgccaccacccagcagtgggccgacctgagcctggccctggaggtgaaccagagcctgacctgtgtgaacctgagtgacaatgagctgctggatgaaggagccaagctgctgtacaccaccctgcggcaccccaagtgcttcctgcagaggctgagcctggagaactgccacctgacagaggccaactgcaaggacctggccgctgtgctggtggtgtcccgggagctgacccacctgtgcctggccaagaaccccatcggcaacacaggagtgaagttcctgtgtgagggcctgcgctacccagagtgcaagctgcagaccctggtgctgtggaactgtgacatcaccagtgatggctgctgtgacctgaccaagctgctgcaggagaagagcagcctgctgtgcctggacctgggcctgaaccacatcggcgtgaagggcatgaagttcctgtgtgaggccctgaggaagcccctgtgcaacctgcgctgcctgtggctgtggggctgcagcatcccccccttcagctgtgaggacctgtgcagcgccctgagctgcaaccagagcctggtgaccctggacctgggccagaaccccctgggcagcagtggagtgaagatgctgtttgagaccctgacctgcagcagcggcaccctgcggaccctgcggctgaagattgatgacttcaatgatgagctgaacaagctgctggaggagattgaggagaagaacccccagctgatcatcgacacagagaagcaccacccctgggccgagcggcccagcagccatgacttcatgatctag

SEQ ID NO: 69148 - DNA, 3123 bp, Artificial Sequence
  derived and/or modified sequence
atggtgagcagcgcccagatgggcttcaacctgcaggccctgctggaacagctgtcccaggacgaactgagcaaattcaaatacctgattacaaccttcagcctcgctcacgagctgcagaaaatccctcacaaggaagtcgataaggcagacggcaaacagcttgtggaaattctgacaacccattgtgactcttactgggtcgagatggcatcactccaggtgtttgaaaagatgcatagaatggacctgtctgagcgggcaaaggacgaagttagagaagcggcactcaaatcttttaacaagcgcaaacccctgtccctggggatcactcggaaggagcggcctcctctggacgttgatgaaatgctggagcgtttcaagacagaggcccaggacaaggataacaggtgtcgctatatattgaaaacaaaatttcgagaaatgtggaaatcttggccgggcgacagcaaggaagtacaggtgatggcagagcggtacaagatgctcatcccattctctaatccacgagtgcttccagggcctttctcatatacggtcgtcctctatgggcccgctggcctcggcaaaacgaccctggcacaaaagttaatgctcgattgggcagaggacaatttgattcataagtttaagtacgcgttttatctctcatgtcgcgagttatcccggctaggcccatgttctttcgctgaactcgttttccgggactggcctgaactgcaggatgatatcccccacattcttgcccaggccaggaagatcctgtttgtcatcgacggctttgatgaactgggtgcagcccccggggcattaattgaagatatctgcggtgattgggagaagaagaaacctgtcccagttctgttaggatctttgcttaaccgtgtcatgctgcccaaggccgccctgttagtcacaaccaggccaagggcactccgcgatctcagaatacttgcagaggaaccaatctatattcgcgtggaagggtttctagaggaggacagacgcgcgtacttcctgcgacacttcggcgacgaagatcaagccatgcgcgccttcgagctcatgcgctctaatgctgctctgttccagcttggcagtgcacccgccgtctgttggatagtatgtacaaccctgaagcttcaaatggagaagggtgaggacccggttcccacctgcctgactcggacaggactgttcctgcgctttttgtgttcgagatttccccagggagctcagttgaggggcgcactgaggacattatctctccttgcagcccaaggactctgggctcaaacaagtgtgctacaccgagaggacctggaacgtctgggagttcaggaatccgatctgaggttgttcctggacggggatatcctacgacaagatcgggtaagtaagggctgctacagcttcattcacttatcatttcagcagttcctcaccgcgctgttctacaccttggagaaagaagaagaagaagaccgtgatggccacacttgggacattggcgacgtgcaaaaactcctgagtggggtcgaacgactccgcaatcccgacctcatccaggctggctactatagcttcggcttggctaacgagaaacgggctaaggagctggaggccacattcggttgtaggatgagtccagacatcaagcaggagcttctaaggtgcgatatttcatgcaagggcggtcacagcacagtgaccgatctgcaggagcttttggggtgcctgtatgaatcccaagaagaggagctcgtgaaggaagttatggctcagtttaaggagatttccctgcacctgaatgcggtcgatgtggttccatccagtttttgcgtcaagcactgcaggaatctccagaagatgtcactgcaggtgataaaggagaatctgccagaaaatgtcaccgcaagtgagagcgatgccgaagttgagaggtcacaagatgatcaacacatgctgcctttttggacagatctctgttcaattttcgggtccaataaggacttaatgggcctggccattaatgactcatttctgtccgctagtctggtccggattctgtgcgaacaaattgctagtgacacttgccatcttcaacgggttgtctttaaaaatatctccccggccgatgcccatcggaacctttgtcttgccctccgggggcataagaccgtgacgtatttgacactgcagggtaatgatcaggacgatatgttccccgcgctatgtgaggttttaagacacccagaatgcaacctgaggtaccttggtttggtctcatgctccgctacgactcagcagtgggctgatctgtcattagccctggaagttaatcagtctctgacgtgtgtcaatctgagcgacaacgaactgttagatgagggtgccaagctgttatacacaactcttcgacacccaaaatgcttcttacagaggttatcactcgagaattgccacctgacggaagccaactgcaaagacttggctgccgttctcgtggtatccagagaattaacccacctgtgcctcgccaagaatccaatagggaacacaggcgtgaagtttctgtgcgaggggctcagataccctgagtgcaaactgcagacccttgtactatggaactgtgacataacgagtgacggctgctgtgatcttaccaaactcctacaggaaaaaagttccctgctttgcctggacctaggcttgaatcacattggcgtgaaaggaatgaaattcctgtgcgaggccctgcgtaagcccctgtgcaaccttcgatgtctctggctctgggggtgctccattcctcccttctcatgcgaggacttgtgctccgcactgagttgcaaccagagtcttgtaactcttgatctggggcagaatcctctggggagtagcggagtcaagatgctatttgagaccctgacatgctcgagcggaacactcagaactcttcggctcaagatcgacgacttcaacgatgagctcaataaattgctcgaggagattgaagagaaaaaccctcagctaattattgacacagaaaagcaccacccttgggcagaaaggccatccagccacgactttatgatctag

SEQ ID NO: 69149 - DNA, 3123 bp, Artificial Sequence
  derived and/or modified sequence
atggtgagcagcgcccagatgggcttcaacctgcaggccctgctggagcagctgtctcaggatgagctgagtaagtttaaatacctgattactactttctccctggcccatgagctgcagaagattcctcacaaggaggttgataaggccgatggaaaacaactggtggaaatacttacgacccactgcgactcgtattgggttgaaatggcgtccctccaagtgtttgagaaaatgcaccgcatggacttgagcgagcgagcaaaagatgaggttcgtgaggctgccctgaaaagctttaataagagaaagcccttgtccctgggaattaccagaaaagaacgcccaccattggatgtggacgaaatgttggagaggttcaaaaccgaagcacaggacaaggataaccgatgtcggtacatcctgaagaccaagtttagggaaatgtggaaaagttggccgggggattcaaaagaggtccaggtgatggctgaaaggtacaagatgctgattcccttcagcaaccctagagttctgcctgggccattcagctatacagtggttctgtacggccccgctgggctgggcaagacgaccttagctcagaagttgatgttggattgggctgaagacaacctcattcataaatttaaatacgcgttctatctttcttgtcgagaattgtccaggctgggtccatgttcctttgctgagctagtgtttagggactggccagaactgcaggacgacatcccacatatcctagcccaagctcgcaagatcctgttcgtgatcgatggctttgacgagctgggggcagctccaggggccctgatcgaagatatctgcggtgactgggaaaagaaaaagcctgtgccggtgctcttgggctccttgcttaacagggtgatgctgcccaaagctgccctgctggtgacgacgcggccgagggccctgagggacctacggatcttagccgaggagccaatttacatacgcgtggaggggttcctcgaggaagaccggcgtgcttactttctccgtcactttggcgatgaagaccaagctatgcgcgcgtttgagctgatgcggtcaaacgctgccctttttcaactcggaagtgcccccgccgtttgttggattgtctgcactacactgaagctgcagatggagaaaggggaagacccggtgccgacctgcctgacacggactggtctctttctccgctttctatgttcaagatttcctcaaggcgcgcagttgcgcggcgctcttcgcaccctgtccctgctggccgcgcagggactatgggcacaaacctcagtgcttcaccgcgaggaccttgaacggctgggagtgcaggagtcagacttgaggctctttttggacggtgacatactgagacaggatcgcgtttcaaaggggtgctattccttcatccacctgtctttccagcagttccttaccgccttgttctacactctagaaaaagaagaagaagaggacagggatggccacacttgggacattggggacgtgcagaagctcctcagcggggtggagcgcctcaggaacccagatctgattcaggccggctactactcatttggactggctaacgaaaagagagcaaaagagctcgaggccacattcggctgccgtatgtcacctgacataaaacaggaactcctgcgttgcgatatttcctgtaagggtgggcatagcacggtgaccgatctgcaggaactgcttggctgtttgtatgagagccaagaagaagaattagtgaaagaggtgatggcgcagtttaaggaaatatctctgcatctgaatgcagtagacgtggttccctcaagcttttgcgtgaagcattgtcggaacttacagaaaatgtccttgcaggttataaaagagaacctgccggagaatgtaacggccagcgaatccgacgcagaggtggagcgctctcaggatgaccaacacatgctaccattctggacagacctctgttccatcttcggatccaacaaggatttgatggggcttgctattaacgactccttcctgtctgcgtccctggtacggattctatgtgagcagattgcgtctgacacttgccacctgcagagagtcgtgtttaagaatatttcccccgccgatgcacaccggaacctatgccttgctttgagaggccacaaaacggtaacttacctgaccttacagggaaacgatcaggatgatatgtttcccgccctgtgcgaggtcctgaggcaccccgaatgcaacctcaggtaccttggtctggtatcctgctcagcgacaacgcagcagtgggccgatttatcactggcactggaggtgaatcagtcactgacttgtgtgaacctctccgataatgaactgttggacgaaggggcaaaactgctttatacaactttgcgccatccgaaatgcttccttcaaagattgtccctagagaattgtcacctcactgaagctaattgtaaagatttggccgctgtcctcgtagtttccagagaactgactcacctgtgcctcgctaaaaaccctatcgggaacacaggagtgaagttcctatgtgagggtctgcggtatcctgaatgcaaactgcagactcttgtgctctggaattgtgacattacctctgatgggtgctgtgacctcaccaagctgctgcaggagaagagttccttactgtgtctggatctgggcctgaaccacatcggggtcaagggcatgaagtttctgtgtgaggccctcaggaaacccctctgtaacctgagatgtctttggttatggggctgcagtatccctcctttctcttgcgaggacctgtgttccgcgcttagctgtaatcagagcctcgtgacactggatctaggacagaatcccctgggctcaagcggagtgaagatgctgtttgagaccctgacgtgctcaagcggaactctgaggacactgagattaaagatagatgacttcaatgacgaactaaacaaactacttgaagaaatcgaagagaagaacccacagcttattattgacaccgaaaaacaccacccttgggccgagcggccctcatcccacgacttcatgatctag

SEQ ID NO: 69150 - DNA, 3123 bp, Artificial Sequence
  derived and/or modified sequence
atggttagttccgctcagatgggctttaacctccaggcactcctggaacagctttcccaggatgagttatccaagtttaagtatctcataaccaccttttccctggcacacgagcttcagaaaattccacacaaagaggtggacaaggctgacggaaagcagctagtggagattctgaccacccattgcgactcgtactgggtagagatggcttcacttcaggtgttcgaaaagatgcataggatggatctgtctgagcgcgctaaagacgaggtgcgggaggcagccctgaaaagtttcaacaaaagaaaacccctgtcccttggaataactagaaaggaacggcctccccttgacgtggatgagatgctggagcgcttcaagaccgaggctcaggacaaggacaacagatgcaggtacattctaaagacaaaatttcgggagatgtggaagtcctggccaggcgatagcaaagaggtgcaggtgatggccgagcgctacaagatgttaatcccattttccaacccgcgtgtgcttcctggcccattttcttacaccgtggtgttgtatgggcctgcaggtctgggtaaaactactctggcacagaagctgatgttggactgggcggaggacaacctcatccacaagtttaagtatgccttttacctcagttgccgagaattgagccggttgggcccttgttcgttcgccgagttggtgtttcgggattggcccgagttacaagacgatattccccacatccttgctcaggctcgaaaaattctgttcgtaatcgacgggtttgatgagctcggtgccgctcctggagccctgatagaagatatttgtggtgactgggagaaaaaaaaacccgtgcccgtgcttcttggttccctcctgaacagggtgatgctgcccaaggccgcactcctggtgactacgcgccctcgcgctcttcgcgacttgcggatcctggccgaagaacctatttacatcagagttgaggggtttttagaagaagataggcgagcctattttcttcgccactttggggatgaggaccaggcaatgcgcgcttttgagttgatgcgctctaacgcggctttgttccaattgggcagcgcgcctgccgtgtgttggatcgtctgcacaactctgaagttgcagatggaaaagggagaggaccctgtgcccacttgtctgaccaggaccgggttgtttttgcgcttcctgtgttcacgctttccgcagggggctcagctgaggggggcactccggacgctgagtttactggccgctcaaggactttgggcccaaacctctgttcttcatcgggaggacttggagagactgggggtccaggaatctgatctgcgtttgttcttagacggcgacatcctccgacaagatcgcgtttcaaagggctgttatagtttcatccatctgtccttccagcagttcttgacagctcttttctacacccttgagaaagaagaagaggaagatcgcgacgggcacacatgggacatcggcgatgtgcagaaactcctgtcgggagtggagaggctgcgcaatcccgatctgatccaggcaggctattactccttcggccttgcaaatgaaaagagagccaaggagctcgaggccaccttcgggtgtaggatgagtccggacatcaagcaggagctacttaggtgtgacatttcctgcaagggcggtcattctacagtaacagacctgcaagagctgttaggctgcctgtatgagagccaggaggaggaattggtaaaggaagttatggctcagtttaaggagatctctctccacttgaacgccgttgacgttgtgcccagcagcttctgtgtgaagcactgccgaaatctccaaaaaatgtccctgcaagtgatcaaggagaatctgccagagaatgtgacagctagcgaatccgatgccgaggttgagagatcacaggatgatcagcatatgctgcctttttggacggacctttgctccattttcgggtctaacaaggatctcatgggactggccatcaatgattccttccttagcgcctctctggttcggatcttgtgcgagcagatcgctagtgatacctgtcatctgcagagggtggtgtttaaaaacatctcccctgccgacgctcacagaaatctgtgtctcgccctgcgcggtcataaaaccgttacctatttaacactgcaggggaacgatcaagacgacatgttccccgcactgtgcgaggttctgcggcaccctgaatgcaatctgagatacttaggacttgtgtcttgctcagcgacaacccaacagtgggctgatctctctctcgcactggaagtgaatcaatcccttacctgtgtcaatctgagtgataatgagttacttgacgaaggagcaaaactgctttatactactttgagacaccctaaatgctttctgcagcgtctttcgttggaaaactgccaccttaccgaagccaattgtaaagacctggccgctgtgctggtcgtttctagagaacttacccacctgtgcctcgcaaaaaatccgattggaaacaccggagtgaagtttctgtgtgaaggcctgagatatcccgaatgtaaactgcagacactcgtgctctggaactgtgatattacctctgatggttgttgtgatctgaccaagctgcttcaggaaaaaagctccttgctgtgcttggatctgggactgaatcatattggagtaaagggcatgaagtttctgtgtgaggctttgcgaaagcccctgtgcaatttgcgttgcctgtggctctggggatgttctatacctcccttcagctgcgaagatctgtgctccgcactctcatgtaaccagtccctcgtcacgttagacctggggcagaaccctttagggagttccggagtgaaaatgctgttcgagaccctcacatgttcatccggaaccctccgcaccctgaggctgaagatcgacgattttaatgacgagctgaataagcttctggaggaaatcgaggagaaaaacccacaactcatcatcgacaccgagaagcaccacccttgggccgaaagaccttcttcgcatgactttatgatttag

SEQ ID NO: 69151 - DNA, 3123 bp, Artificial Sequence
  derived and/or modified sequence
atggtgagcagcgcccaaatgggatttaatctgcaggctctactggagcagctcagccaggacgagttgagtaagttcaaatatcttataactactttttccttggcccatgaattgcagaaaataccacacaaggaggtggacaaagctgatggcaagcagctcgtggaaattctcaccacacactgtgactcatattgggtggagatggcaagtctgcaggtattcgagaaaatgcacagaatggatctgtccgaaagagctaaagatgaggtgcgcgaggccgcactgaagtcttttaataagcgcaagcccctctcactggggattactaggaaggaacgcccacctctggacgtggatgaaatgttggagagattcaaaacagaagcacaggataaggataataggtgtcgctacattctgaagactaaattccgtgagatgtggaaaagttggccaggcgattccaaggaggtgcaagtgatggccgagcgctacaaaatgctgatccccttctccaacccaagggttttacctgggcctttcagctacactgtggttctgtacggaccagcaggcctgggcaagactaccctcgcccaaaaactgatgctggattgggccgaggacaacctcattcacaaatttaaatacgccttttacctctcatgcagagaactgagcagactcgggccatgttctttcgccgagctggtattccgcgattggcctgaattgcaagacgacataccccacatcctggcccaggctcgcaaaattctgttcgtgatcgacggattcgacgagctgggggctgcacccggtgcattgatcgaagatatctgtggggactgggaaaagaagaagcctgtgccagtacttcttggcagcctgctcaatcgtgtcatgctgccaaaggctgctctgcttgtgacgacgcgtcccagagcccttagagatctaagaatactggctgaagaacccatctacatcagggttgagggatttctggaggaagatcgcagggcttattttctgagacactttggggatgaggatcaggcaatgagggccttcgaacttatgcgtagcaatgccgctctgttccagttgggcagtgcccctgccgtgtgttggatcgtttgcactaccctgaaattacagatggaaaagggggaggaccctgttcccacatgcttgacacggaccggcttgttcctcagattcttgtgtagccggtttccacagggcgctcaattgcgcggtgccctgcgcacgctctctcttctggccgcacaggggttgtgggcgcagacgtctgttctgcaccgcgaggatctcgagcggctgggcgtgcaggagtcagaccttcgactattcctcgacggcgacatccttagacaggacagagtctccaaaggatgttacagttttatccacctgtcatttcagcagtttctgaccgcactcttttacactcttgagaaagaagaggaagaggatagggatggccacacatgggacatcggcgatgtccaaaagcttctaagtggggttgaacggctcagaaacccagaccttatccaagccggatactatagtttcggtctggccaatgaaaaacgcgcaaaggaactagaagccacttttggttgcaggatgagcccggacatcaagcaggagctcctgcgctgcgacatctcgtgcaagggcggacactctactgtcaccgatctccaggagttgttagggtgcctgtacgaaagccaggaggaagagctggttaaggaagtgatggcacagttcaaagaaatctccctccatctaaatgccgtagatgtagtgccaagcagtttctgcgtgaaacactgcaggaaccttcagaagatgtcactgcaagtaatcaaggaaaatttaccggagaatgtgacagcctccgagtccgatgctgaggtggaacgtagtcaggatgatcagcacatgctgcctttctggaccgacctttgctccatcttcggctctaacaaagacttaatgggccttgcaatcaatgactccttcctctcagcaagcctggtgcgaatcctgtgcgaacagattgctagtgatacttgtcatctgcagcgggttgtgtttaaaaacataagtccggctgatgcccatcggaatctctgtctggcgttaagagggcataaaactgtgacttatctgaccctgcaggggaacgaccaggatgatatgttccccgctctgtgtgaggtcttaaggcatcctgaatgtaatctgcgttacttaggcctggtttcttgcagtgcaactactcagcagtgggcagatttgtctctggccctagaagttaatcagtcccttacttgtgttaatttgagcgacaacgagctgctggatgaaggcgctaagctgctgtacactactctgcggcaccccaaatgcttccttcagagactctcactggagaactgccacttaacggaggccaactgcaaagatttagccgcagtgctcgtggtgtcccgggagctaacgcatctgtgcctggccaaaaaccctatcggaaatacaggcgtgaagttcttatgcgaaggactgcgctacccagagtgcaagctccagacactcgtgctctggaactgcgacattaccagtgacggatgttgcgatctgactaaacttttgcaggagaagagcagtttattatgtcttgacctgggtctgaaccatataggggtgaagggtatgaaattcctctgcgaggcactgcgaaagcccctgtgtaatcttcggtgcctgtggctttggggttgctcgattcctccttttagctgcgaggacctctgttctgctctgagctgcaatcagagcctagtcacactggacttgggccagaacccactcggtagttctggagtgaaaatgttatttgagactctcacttgcagttccggcaccctgcggacactccggttgaagatcgatgatttcaatgatgaactgaataagctgctggaagaaatcgaggagaagaacccccaactgattatcgatacagaaaaacaccacccttgggctgagaggccatcatctcacgatttcatgatttag

SEQ ID NO: 69152 - DNA, 3507 bp, Artificial Sequence
  derived and/or modified sequence
agtgctcagcaacgattacgccccgagggccaatcacagggctgcggccgagagagaagccttattagagctttctcaacctgcagccctcatctccgccggcgagtagggccaggtgttgggagctcccacgtgggacaagatggtgtcttcggcgcagatgggcttcaacctgcaggctctcctggagcagctcagccaggatgagttgagcaagttcaagtatctgatcacgaccttctccctggcacacgagctccagaagatcccccacaaggaggtagacaaggctgatgggaagcaactggtagaaatcctcaccacccattgtgacagctactgggtggagatggcgagcctccaggtctttgaaaagatgcaccgaatggatctgtctgagagagcaaaggatgaagtcagagaagcagctttgaaatcctttaataaaaggaagcctctatcattagggataacacggaaagaacgaccacctctagacgtggacgaaatgctggagcgcttcaaaacagaagcacaagacaaagacaataggtgcaggtatatattgaagacgaagttccgggagatgtggaagagctggcctggagatagcaaagaggtccaggttatggctgagagatacaagatgctgatcccattcagcaaccccagggtgcttcccgggcccttctcatacacggtggtgctgtatggtcctgcaggccttgggaaaaccacgctggcccagaaactaatgctagactgggcagaggacaacctcatccacaaattcaaatatgcgttctacctcagctgcagggagctcagccgcctgggcccgtgcagttttgcagagctggtcttcagggactggcctgaattgcaggatgacattccacacatcctagcccaagcacggaaaatcttgttcgtgattgacggctttgatgagctgggagccgcacctggggcgctgatcgaggacatctgcggggactgggagaagaagaagccggtgcccgtcctcctggggagtttgctgaacagggtgatgttacccaaggccgccctgctggtcaccacgcggcccagggccctgagggacctccggatcctggcggaggagccgatctacataagggtggagggcttcctggaggaggacaggagggcctatttcctgagacactttggagacgaggaccaagccatgcgtgcctttgagctaatgaggagcaacgcggccctgttccagctgggctcggcccccgcggtgtgctggatcgtgtgcacgactctgaagctgcagatggagaagggggaggacccggtccccacctgcctcacccgcacggggctgttcctgcgtttcctctgcagccggttcccgcagggcgcacagctgcggggcgcgctgcggacgctgagcctcctggccgcgcagggcctgtgggcgcagacgtccgtgcttcaccgagaggatctggaaaggctcggggtgcaggagtccgacctccgtctgttcctggacggagacatcctccgccaggacagagtctccaaaggctgctactccttcatccacctcagcttccagcagtttctcactgccctgttctacaccctggagaaggaggaggaagaggatagggacggccacacctgggacattggggacgtacagaagctgctttccggagtagaaagactcaggaaccccgacctgatccaagcaggctactactcctttggcctcgctaacgagaagagagccaaggagttggaggccacttttggctgccggatgtcaccggacatcaaacaggaattgctgcgatgcgacataagttgtaagggtggacattcaacggtgacagacctgcaggagctcctcggctgtctgtacgagtctcaggaggaggagctggtgaaggaggtgatggctcagttcaaagaaatatccctgcacttaaatgcagtagacgttgtgccatcttcattctgcgtcaagcactgtcgaaacctgcagaaaatgtcactgcaggtaataaaggagaatctcccggagaatgtcactgcgtctgaatcagacgccgaggttgagagatcccaggatgatcagcacatgcttcctttctggacggacctttgttccatatttggatcaaataaggatctgatgggtctagcaatcaatgatagctttctcagtgcctccctagtaaggatcctgtgtgaacaaatagcctctgacacctgtcatctccagagagtggtgttcaaaaacatttccccagctgatgctcatcggaacctctgcctagctcttcgaggtcacaagactgtaacgtatctgacccttcaaggcaatgaccaggatgatatgtttcccgcattgtgtgaggtcttgagacatccagaatgtaacctgcgatatctcgggttggtgtcttgttccgctaccactcagcagtgggctgatctctccttggcccttgaagtcaaccagtccctgacgtgcgtaaacctctccgacaatgagcttctggatgagggtgctaagttgctgtacacaactttgagacaccccaagtgctttctgcagaggttgtcgttggaaaactgtcaccttacagaagccaattgcaaggaccttgctgctgtgttggttgtcagccgggagctgacacacctgtgcttggccaagaaccccattgggaatacaggggtgaagtttctgtgtgagggcttgaggtaccccgagtgtaaactgcagaccttggtgctttggaactgcgacataactagcgatggctgctgcgatctcacaaagcttctccaagaaaaatcaagcctgttgtgtttggatctggggctgaatcacataggagttaagggaatgaagttcctgtgtgaggctttgaggaaaccactgtgcaacttgagatgtctgtggttgtggggatgttccatccctccgttcagttgtgaagacctctgctctgccctcagctgcaaccagagcctcgtcactctggacctgggtcagaatcccttggggtctagtggagtgaagatgctgtttgaaaccttgacatgttccagtggcaccctccggacactcaggttgaaaatcgatgactttaatgatgaactcaataagctgctggaagaaatagaagaaaaaaacccacaactgattattgatactgagaaacatcatccctgggcagaaaggccttcttctcatgacttcatgatctgaatccccccgagtcattcattctccatgaagtcatcgattttccaggtgttggtgaactgcctgtgactcctctcctccccggcccctacccctcagggataatgagttcattgctgggctagatgttttagccatgattctgcctctgttttatacctgcacacatccttatctttgttacatatgaaatatctgtatcacgggtatattgagagaaataaaggtgagagcattcacaaatg

SEQ ID NO: 69153 - DNA, 3123 bp, Artificial Sequence
  derived and/or modified sequence
atggtgtcttccgcacagatgggctttaatttgcaagcgctccttgaacaactgtctcaagatgagttgagcaagttcaagtacctgatcacgaccttcagtctggcacacgagttacagaagatcccgcacaaagaggtggataaggccgacggaaaacagctggttgaaatcctgacgactcactgtgattcatactgggtcgaaatggcttccctacaggtatttgagaagatgcacagaatggacctgagcgagcgtgcgaaagatgaggttcgggaggctgccctcaaatcctttaataagcggaagccattaagtttggggatcactcgcaaagagcggccacccctagacgtagacgaaatgctggagagatttaaaaccgaagcccaggacaaggataaccgctgccgttacattttaaaaacaaaatttcgtgagatgtggaagtcatggcctggcgacagcaaagaagttcaggttatggcagagcggtacaaaatgctgatcccgttttcaaatccacgggttctgcctggaccgttctcctataccgtggtgttgtatggtccggccggtctgggcaaaaccaccctcgctcagaagctgatgctggattgggccgaggacaatttaatccacaaattcaagtacgctttctatctatcctgtcgcgagctgtcacggctcgggccatgctctttcgctgaactggtcttcagggattggccggagctgcaggacgatattccccacatactggcgcaggcaagaaaaatattgttcgttatcgacggatttgatgaactcggagctgcccccggagcactaatagaggacatctgcggtgactgggagaaaaaaaaaccagtccccgtcctgttaggttctttgctcaatagagtgatgctccctaaggctgcactccttgtcacaaccagacccagggccctccgggatcttcgcatccttgcggaggaacctatctacatcagagttgaaggttttctggaagaagatagacgagcctattttctgcggcactttggggatgaggaccaggcaatgagagcattcgaactgatgaggtcaaacgctgccttgttccagctggggagcgctccggccgtgtgctggattgtctgtaccactctcaagctgcaaatggaaaagggcgaggatcccgttccaacatgcctcacaagaacaggactgttccttcggtttctgtgttcccgattcccacaaggcgctcagctcagaggcgctctaaggacactgtcccttctggctgcccagggcttgtgggcccaaactagtgtgctgcaccgggaggatcttgaacgtctcggcgtccaagagtctgacttgaggctgtttcttgatggggatatccttagacaggacagggtgtccaagggatgctatagctttatacatcttagtttccagcagttcctcaccgcgctattctatactttagagaaggaagaggaagaggatcgcgacgggcatacttgggacataggggatgttcaaaaactcctgtctggtgtggaaagactgcgtaacccggacctcatccaggctggatattattcgtttggcctggccaatgagaagcgtgccaaagaactggaagccacctttggatgccggatgtcacccgacattaagcaggaactgctcagatgtgatatctcatgtaagggagggcattccacagtgacagacctccaagagctgctgggctgcctgtatgaatcccaagaagaggaactggtgaaagaagttatggcccaatttaaggaaatctccctccatttaaatgccgtggacgtggtgccaagcagcttctgcgtgaagcattgccgtaatctgcaaaaaatgagcctgcaggtcatcaaagaaaatctaccggaaaacgtaacagcatcagaatctgatgccgaggtggagcggagccaggatgatcaacatatgcttccattctggacagacctatgcagcattttcggctccaataaggatttaatgggcttggcaataaacgatagtttcctgagtgcctccctcgtcaggattctgtgcgagcagatcgcttccgatacgtgccacctacagcgggtggtgttcaagaacatctcacccgctgatgcccaccgcaacctgtgcctggctctgagaggccataaaaccgtaacttatttgacgttgcagggcaatgatcaggatgacatgttcccggccctgtgcgaagtactgcgacatccggaatgtaaccttagatatctcgggcttgtctcctgtagcgccacaacacaacaatgggcggatctgagcttagcactcgaggttaaccagtccttaacttgtgtcaatctgagcgataatgagctgctggacgaaggagccaaactcctgtacaccacattaagacatcctaagtgcttcctccagagactatccctcgaaaactgtcacctcacagaagcaaactgtaaggacctggccgccgtgctggtcgtctcgagagagctgacccatttgtgtctggccaagaatccgattggcaatacgggtgtcaagtttttatgcgaaggcctgaggtacccggaatgcaagctgcagactctggttctttggaattgtgacatcacatcagacggctgctgtgatctgacaaagctgcttcaggaaaaaagttctctgttgtgtttagacttggggctcaatcatattggcgtgaagggaatgaagtttctgtgtgaggctctgaggaagcctctctgtaatctccggtgcctgtggctgtggggatgtagtatcccccccttctcgtgtgaggacctgtgctcagccctgtcttgtaaccagagtctagtgaccttggatctaggacagaatcccctcggcagttctggcgtaaagatgctttttgagacccttacatgttctagcggcactctgaggacgctgcgattgaagatagatgatttcaacgacgagctgaacaagctgttagaggagattgaagaaaagaaccctcagcttatcattgataccgaaaagcatcacccttgggctgagcgccccagcagccacgattttatgatttag

SEQ ID NO: 69154 - DNA, 3123 bp, Artificial Sequence
  derived and/or modified sequence
atggtgtctagtgcgcaaatgggatttaatctccaggcattgttagaacaattatctcaagatgagctctccaaattcaaatacttgattacaacattttccctggcccacgagctccaaaaaattccccacaaggaggtagacaaagcggacggtaagcaactggtagaaatcttgaccacacattgcgacagttactgggtggaaatggcttccctgcaggttttcgagaaaatgcacagaatggatctgtccgaacgcgccaaagacgaagtacgggaggccgcattgaagtctttcaacaaaagaaagcctctgtccctggggatcaccagaaaggagcggccccctctggacgtggatgaaatgttagagagattcaaaaccgaggcccaggacaaggacaatcgctgccggtatattctcaagaccaagttccgagaaatgtggaagtcttggcccggtgattccaaggaagtgcaggtgatggctgaacgatacaaaatgctgataccattctccaatcccagggtgctccctgggcctttctcctacacggtcgttctgtatgggcctgccggccttggaaagacgacgcttgcgcaaaaactcatgctcgattgggccgaggacaacctcatccacaagtttaaatacgctttctatctgtcttgccgggaattgtctcggctcgggccatgctcctttgcagaactggtgttcagggactggcccgaactgcaggacgatataccccatattcttgcccaggctaggaaaatcctattcgtcattgatggcttcgatgagctgggcgctgcaccaggcgcactaatcgaagatatctgtggagactgggagaagaaaaaaccagtgcctgtacttctgggttctctgcttaatcgtgtcatgctgcctaaagccgccctgttggttacaacacgacctcgcgcacttagggatctgcggattctggcagaggagccaatttatatccgcgtggagggattcctagaggaagaccgccgcgcctacttcctccggcatttcggcgacgaggatcaggcaatgcgggcttttgaactcatgcgatccaacgccgccttgttccaactgggtagtgcacccgcagtctgctggatcgtctgtaccacccttaagctgcagatggagaaaggtgaagatccagttccaacttgtctaacgcggaccggacttttcctccggttcctctgcagtagattccctcagggcgcccagctgcgcggcgcactgagaaccctcagcctcctggccgctcaaggtctgtgggctcagacctctgttttgcacagggaagatcttgagaggttaggcgtgcaggagagcgatttacggctgtttctcgacggggacattctgcggcaggacagagtaagtaagggctgttacagcttcattcacctctcattccaacagttcctaaccgcactcttctataccctagagaaggaggaggaagaggaccgtgacggccacacatgggatatcggcgatgtacagaaactgttatcgggggtcgagaggctccggaatccagatcttattcaggcgggctattactcctttggcctcgcaaatgaaaagcgggcaaaggagctcgaagccacctttggttgtcggatgtctccagatataaagcaggaattgctgagatgtgatatttcttgtaagggcggccactccaccgtcaccgatcttcaggaacttcttggctgtctgtatgagagccaggaagaggagctggttaaagaagtgatggcccagtttaaggagatctctctgcatcttaatgccgttgatgttgttccctctagcttctgcgtcaaacattgtcggaacctccaaaagatgtcactccaggttattaaggagaatctccctgaaaacgttacagcttccgagtctgacgccgaggtggagagatctcaggatgaccagcatatgctccccttttggactgacctttgttccatctttggatcaaacaaggacttaatgggtctggccattaacgactcgtttctaagcgcgagtcttgttaggattttgtgtgaacaaatagcctctgacacatgtcatcttcaaagggtagtcttcaagaacatatctcctgcagacgcccatcgcaacttatgtctcgcactgaggggacacaaaaccgtcacctatctaacacttcagggcaatgaccaggacgacatgttcccagccctatgtgaagttctccgccacccagagtgcaacctgcggtacctgggcctggtgagttgctcagctacaacacaacagtgggccgacctttctctagctttagaagtcaatcaaagcctgacatgcgtcaacttgagcgacaatgagctgctagacgagggcgctaaactcctgtacactacgctgcgtcatcctaaatgcttcctccagcggctttccctggaaaactgtcacctgaccgaagccaactgcaaagatttggcagccgtgctggtggtgtcccgcgaacttactcatctgtgcctggctaagaaccccatcggtaacacaggcgtaaagtttctgtgcgagggattgagataccccgaatgtaagttacagaccctagtcctgtggaattgtgacattactagcgacggttgctgtgatctgaccaagttactgcaggagaaaagctcccttctgtgtctggacctcggactgaaccacataggtgttaaaggcatgaagttcctctgtgaggctttgcggaaacctctctgcaatctgcggtgtctgtggctgtggggctgcagcatcccaccgtttagttgtgaagacttgtgtagtgcactgagctgcaatcagtccctggttaccctggatttggggcaaaaccctctagggtcttcaggcgtaaaaatgttgttcgaaactcttacatgtagctcagggaccttacgcaccctgcggttaaagatcgatgacttcaatgacgagctgaacaagttgcttgaggagatcgaagagaaaaacccacagctgataatagacactgagaaacaccatccgtgggcggaacgccccagtagtcacgattttatgatctag

SEQ ID NO: 69155 - DNA, 3123 bp, Artificial Sequence
  derived and/or modified sequence
atggtcagcagtgctcagatgggatttaacctgcaggctctgctcgaacaattatcgcaagatgaactctccaaattcaagtacctaattacaacattctcccttgcccatgagcttcaaaagatcccgcataaggaggtcgataaggctgatggcaaacagttggtcgaaattctgactacacactgtgactcgtactgggtggagatggcaagtctacaggtgtttgaaaagatgcatcggatggacctttccgaacgcgccaaggatgaggtgcgagaagctgcgctcaagagctttaataaaagaaagcctctgtcactcgggattactaggaaagagcgacctccccttgacgttgatgagatgctcgaacgcttcaagacagaggcacaagacaaggacaatagatgcagatacatcctcaaaaccaagtttcgggaaatgtggaagtcctggcctggcgacagcaaagaagtgcaggtcatggccgagcgctacaaaatgctgatccctttcagcaatcccagggtgctcccagggccattttcttatacggtcgtgttgtatgggcccgctggattaggcaagaccactctcgcacagaaattgatgctggattgggctgaggacaacctgattcacaagtttaaatatgcattctatttaagctgccgggaactgtcacgacttgggccctgctcctttgccgaacttgtgtttagagactggcccgagctccaggacgacattccacacatccttgctcaagctcgcaaaattctttttgtcatcgatggctttgatgaattgggagcggccccaggagctttgatcgaggacatatgtggggattgggagaaaaagaaacctgtccctgttctgttgggttccttgttgaaccgtgtgatgctgcctaaggccgcccttctcgtgaccacgcggcctagagctctgcgcgacctcaggattctggcggaggaacccatttacatccgagtggaaggattcttagaggaggaccggcgcgcatacttcctccggcattttggcgatgaggaccaggccatgagggcttttgaactgatgcggagtaacgcagcactgttccaactggggtcagcccctgcggtgtgttggatagtgtgtactacgttaaagctacagatggaaaaaggggaagaccctgtcccaacctgcctgacccggaccggattattcctgagatttctatgctcacgattcccccaaggagcccagctgaggggggcattaagaacgctgagtctgctggcagcgcaggggctttgggctcaaacgtctgttctccatcgggaagaccttgagcggctcggcgtacaagagtctgacttgaggttatttcttgacggcgacattctgcggcaggaccgggtgtccaaaggatgctattcttttatccatttgagcttccaacagtttctcaccgcactgttctacacccttgagaaggaggaagaggaggatagagacggtcatacatgggatatcggcgatgtgcagaagttactgagcggtgtcgaaaggctgaggaatcccgacctgatccaggctggttattattcttttggcctcgcaaacgagaaaagggccaaggagctggaggccacttttggctgccgtatgtctcccgacattaaacaggaactgttgagatgcgatatcagctgtaagggcggtcattccacagttactgatctgcaggaactcttagggtgcctgtacgaatcacaggaagaagagctggtgaaggaggtgatggcccaatttaaagaaataagcttgcacctgaacgcggtggacgtcgtaccgtcttctttttgtgtgaagcactgccgcaatctacagaagatgagcctccaagtgattaaggagaacctgcccgagaacgtgacagcatcagagagcgatgcagaggtggaacgatctcaagacgatcaacacatgttgccgttttggacagacctgtgtagcatatttggtagtaataaggacttaatgggcctcgccatcaacgactccttcttgagtgcgtcactcgttagaatactctgcgagcaaattgctagcgacacctgccacctacagagggtggtcttcaaaaatatcagccccgccgatgcccaccgcaacctgtgcctggctctgcggggccacaaaacagtgacctacctgactctgcagggcaatgatcaagacgacatgtttcctgctttatgcgaggtgctcagacacccagagtgtaacctccgctacctgggcttagtcagttgttctgccaccacgcagcagtgggccgatttgtccctcgctctcgaggttaaccagagcctcacttgtgtgaacctgtcagataatgagctgctcgatgagggcgcaaaactgttatacacgactctgaggcaccctaaatgttttcttcagcggctgtccctagaaaactgtcatctgaccgaggccaactgcaaggatttggctgctgttctggtggtctctagagaattaacacacctgtgcctggctaagaatccgatcgggaacacaggggtgaagttcctctgtgaagggctgaggtacccagagtgtaaactgcagaccctggtgctgtggaactgcgatatcacctctgacgggtgttgtgacttgactaaactattgcaggaaaaatccagcctactgtgcctggacctgggcctgaaccatatcggcgtcaagggaatgaagtttctatgcgaagcactgcgaaagccactttgtaatctgaggtgcctttggctgtgggggtgtagcattccacccttcagctgcgaagatctgtgttctgctttgtcatgcaaccagtctctggtgacgctcgatttggggcagaatcctctcgggtcttccggcgtgaaaatgctgtttgagactcttacgtgcagctcagggaccctaaggactttgaggcttaaaatcgacgatttcaatgatgagcttaataaactgctagaggagatagaggagaaaaatcctcagctgatcattgataccgaaaaacaccacccctgggctgagaggccaagttctcatgattttatgatttag

SEQ ID NO: 69156 - DNA, 3123 bp, Artificial Sequence
  derived and/or modified sequence
atggtgtctagcgcccagatgggctttaatttgcaggctctgttggagcagctatctcaggatgaacttagtaaatttaagtacttgattactacgttctctctggcacacgaactccagaaaatcccccataaagaagtcgacaaagcggacgggaagcagttggtggagatactgaccacccactgtgactcctattgggtagaaatggcatcgttgcaggtgttcgaaaagatgcaccggatggacctgagtgagcgggcaaaggatgaggtgcgggaagcagcattgaagagctttaataagaggaagcccctttccctcggtatcactaggaaagaaagacctccactggacgtggacgaaatgttggagagattcaaaaccgaagctcaggataaggacaatcgatgtcgttacatccttaaaacaaaatttagagaaatgtggaagagctggcccggtgatagtaaagaggtccaggttatggcagagagatacaagatgctcatcccattcagcaacccaagggtgcttcctggaccattttcttacaccgtggttctttacggccccgcagggcttgggaagaccaccctcgcacagaagctgatgcttgactgggccgaagacaatctgatccataagttcaagtacgctttttacctgtcctgccgtgaattgtcccggctaggcccctgcagcttcgcggagctagtattcagggattggcccgaattacaggacgacatacctcatatcctcgcccaagccagaaaaatcctgttcgtgattgatgggttcgatgaactgggcgccgcccccggagctctgattgaggatatttgtggcgactgggaaaagaagaaaccagtccccgtcttgctcgggtccctactgaacagggtgatgcttcccaaagccgccctccttgtgaccactaggccccgcgccctccgggatctgaggatcttagcagaagagcccatctacatcagagtagaggggtttctggaagaagataggcgcgcttattttctgagacatttcggcgacgaggatcaagccatgcgcgcatttgagctgatgcgaagcaatgcggccctgttccagctcggatctgccccagccgtgtgctggatcgtttgtactaccctgaaattacagatggagaaaggggaagaccctgttcctacttgcctcactagaacaggcctgttcctgcgtttcctgtgcagccggtttccacagggggcgcagctgagaggagcactaagaacattgagcctgttagccgctcagggcctgtgggcccagacttcagtgttgcaccgtgaggatctagaaaggttgggggtccaagagtccgacctaagacttttcctcgatggggatatcctcaggcaggaccgcgtgtcaaaagggtgctacagtttcatccacttgtccttccagcagttcctcacagctctgttttacactctggaaaaggaggaagaagaggaccgcgatggacatacgtgggatataggcgatgtgcaaaagctcttgagcggcgtagagcgcttaagaaatcctgaccttattcaggccggatattatagctttggccttgctaacgaaaaacgggccaaggaactcgaggccactttcggctgccgcatgtctccagatatcaagcaagagcttttgcgttgtgacatctcctgtaagggcggacattctactgtgacagatctgcaagagctgctgggatgcctgtacgaatcccaggaagaggagctggtgaaagaagtgatggcccagttcaaggaaatcagcctgcatttaaatgcggtcgatgtggtgccctcaagcttttgtgttaaacattgtcggaatttgcaaaagatgtctctccaggtgatcaaagagaacctgcccgagaatgtcaccgccagtgaatcagatgctgaagtcgaaaggtctcaagatgatcagcatatgcttcccttctggacagacctctgcagtatcttcgggtccaataaggatcttatgggtctggccatcaatgattccttcttgagcgccagcctggtgcgaattttgtgcgaacagattgcatcagatacatgccatctgcagcgagttgtcttcaaaaatatcagtcctgcagatgcccatagaaacctgtgcctggccctccgagggcacaaaaccgttacatatctcaccctccaggggaacgaccaagatgatatgtttcctgcactttgcgaagtgctcaggcacccagagtgcaatctccgatacctgggactcgttagctgctcagccaccactcagcagtgggccgatttatctctagcactggaggtgaatcagtccttaacttgcgtcaacctaagcgataatgagctcttggatgagggcgcgaagttgctctatactacactgcgacaccccaaatgcttcctgcagagactctctctcgagaactgccacctcaccgaagctaactgtaaagatctagccgctgtgttagtggtgagcagagagcttacccacctctgcctggctaagaaccctatcggaaacactggggttaaattcctgtgtgaaggcttgcggtatcccgaatgcaagttgcagactttggtgctgtggaattgtgacattacttctgatgggtgctgcgacttaaccaagcttctgcaagagaagtcctcactcctgtgtctggacttgggacttaaccacatcggagtgaagggcatgaaattcttgtgcgaagcactccgaaaacctctttgtaacctgcggtgcctgtggctgtggggctgcagcattccacctttctcctgtgaggacctttgttccgccctgagttgcaatcaatccctggttaccttggatttaggccagaatcctctgggctctagtggagtcaaaatgctgttcgaaacactgacctgtagctcaggaacactccgcaccctgaggttgaagattgacgacttcaatgatgagctgaacaaactgctcgaggaaatcgaagaaaaaaatccccagctaattattgacaccgagaagcaccatccctgggccgagcgcccatctagtcatgacttcatgatttag

SEQ ID NO: 69157 - DNA, 3123 bp, Artificial Sequence
  derived and/or modified sequence
atggtcagttctgcccagatggggtttaatctgcaagccctgctggagcagttgagccaggacgaattgagtaagtttaagtacctgataactaccttctctttggctcatgagctgcagaaaataccgcacaaagaagttgacaaggccgatggcaagcagcttgtcgagattcttacaacgcactgcgattcttactgggtggagatggcctctctccaggtgtttgagaagatgcataggatggatcttagtgagcgggccaaagatgaagtccgcgaagcggccctcaagtcttttaataaaagaaagcccttgtcactcggcatcacacggaaggagcgccctccgctggatgtggacgaaatgctggaacggtttaaaacagaagcccaggataaggataacaggtgtaggtatatcctgaagaccaagttcagggaaatgtggaaaagttggcctggagactcaaaggaagtgcaggtaatggctgagcgttataagatgctcatacctttcagcaatccccgcgtgctgcctggaccattctcctacactgtcgtcctttacggtcctgctggcctgggcaagaccacgctcgctcagaagctgatgctggactgggcagaggataacctcattcacaaattcaagtacgccttctacctgagttgcagggagctcagtcgcctcggaccctgcagcttcgcagagcttgtttttcgcgattggcctgagttgcaggacgacataccacatatcttggctcaggctcggaagatcttgttcgtgatagacgggtttgatgagttgggagccgctccaggcgctctgatcgaggacatttgcggtgactgggaaaaaaagaagcctgtgcctgtgcttctgggcagcctgttgaaccgagtcatgttgccaaaagctgccttactcgtgacaaccagacctcgggcgctgagagacttgaggattttagctgaagaacctatttatattcgagtcgaaggtttccttgaggaagatcgtagggcctactttctaaggcatttcggcgacgaagaccaggccatgagagcctttgagctgatgagatctaatgctgctctttttcagctgggcagtgcccctgcagtgtgttggattgtctgtaccacgctaaagctgcagatggagaagggcgaagatccggtccctacctgtctcaccagaaccggcctgtttctccgcttcttgtgtagtaggttcccacagggtgcgcagctgagaggagccctcagaacactgtctctcctggccgcccagggcctgtgggcccagacttcagtgttgcatcgcgaagatctcgagcgcctgggggtgcaagagagcgatcttagacttttcttggatggtgatatcctgagacaagacagagtcagtaaaggatgctacagtttcattcacctgtcatttcaacagttcctgaccgctctgttttatacgttagagaaggaggaagaggaggatcgagacggccacacttgggacattggcgacgtccagaagctactgtcaggtgtggagcgcctaagaaatcctgacctgatccaggctggctactatagcttcggcttggccaacgagaaaagggctaaagagttggaggcgacctttggttgcagaatgtctccagacattaagcaggagttactgcgctgcgacatctcatgtaagggaggacattcaactgtgaccgaccttcaagagctgttaggatgcctgtatgagagccaggaggaggaattggtgaaagaagtgatggctcagttcaaagaaatctcgctgcatctgaatgccgtcgacgtggtgccatcctcattttgcgtcaaacattgtcggaacttgcagaagatgagcttgcaagtcattaaggagaatctgcccgaaaatgtcacagccagtgagtcagacgccgaggtggagcgttcacaggatgatcaacacatgttaccattttggacagatctttgctccatttttggctctaataaggacctgatggggctggccatcaatgattcattcctatccgcttccctggtgaggatcttgtgcgagcagattgcctccgacacgtgccacctccagcgagtagtttttaagaatatttctccggcggatgcccataggaatctctgtctcgcgctgcgggggcacaagacagtcacttatctgaccctccaaggcaatgatcaggatgacatgttccccgctctctgcgaagttctgcggcacccggaatgcaatctccgctacctaggcctcgttagttgctcggctaccacgcaacaatgggccgacctaagcctcgcgttggaggtgaaccagtcactgacttgcgtgaatctctcagataacgagctcctggacgagggtgcgaagctcctgtacacgactcttcggcaccccaaatgtttcctccagagactgtctctagaaaattgtcacctgaccgaagccaactgcaaagatttagccgctgttctggtggtctctagggagttgacacacctctgtctggctaaaaacccaattggcaatacaggcgtaaaatttctgtgtgaaggcctgcgctaccccgagtgcaaacttcagaccctggtgttatggaactgtgatataacatcagacggctgttgcgatctcacgaagctgctccaggagaagtcttcccttctttgtctggacctgggccttaatcatattggggtgaagggcatgaagttcttgtgcgaagctctgagaaaacccctctgtaatctacggtgtctctggctgtggggctgcagcatccctccatttagctgcgaagatctctgctcagccctctcgtgtaaccaaagcctggttacattagacctgggccagaaccctcttgggtcttccggggtaaagatgctgttcgaaacccttacgtgctctagcggcacactgcgcacactgagactcaaaattgacgacttcaatgacgaactaaataagcttctcgaagaaattgaggagaagaatcctcagttaattatcgatacagagaagcatcatccatgggcagaacgccctagcagccacgactttatgatatag

SEQ ID NO: 69158 - DNA, 3123 bp, Artificial Sequence
  derived and/or modified sequence
atggtgagcagcgcgcagatgggctttaatttgcaagctctgctcgagcagctcagccaggacgagctgtccaaattcaagtatttgattacgactttctctctggcccacgaactgcagaaaataccccacaaagaagtggacaaggcggacggtaagcagctggtagaaattcttacgacccactgtgactcgtactgggtggagatggcctccctgcaggttttcgaaaagatgcaccggatggacctatccgaaagagctaaggacgaggttagagaggctgcattgaagtccttcaacaaacggaagccgctgagcttaggcatcacgcggaaagagcggccaccattggatgtagatgagatgttagaacgttttaaaacagaggctcaagacaaggataacaggtgtagatatatcttaaagacaaagtttagagagatgtggaagtcttggcctggagactcaaaagaggtacaggtgatggctgagagatacaaaatgttaataccatttagtaaccctcgcgtcctccctggccccttttcttacacagtcgttctgtatggtcccgcaggtttgggaaaaactaccttggcccagaagctgatgctggactgggccgaggacaatctgatccacaaatttaagtatgctttttatttatcatgtcgggagttaagccgcttgggaccgtgctcctttgccgagctggtattcagggactggccggagctgcaagatgacatcccacacatcctggcccaggctaggaaaattcttttcgtgattgacgggttcgacgaacttggcgccgcacctggcgcactgattgaagatatctgtggcgactgggagaagaagaagcctgtgccggtgctgctgggctcccttttgaatcgggtcatgctgcccaaggccgcactgctggtcacaactcgaccaagggcccttcgcgatttaaggatcttggcggaggagcccatttatatccgggtcgaggggtttctagaggaggatagaagggcgtatttcctcagacattttggcgacgaggaccaagcaatgcgggcttttgagctcatgcggagtaacgctgccttgttccagctgggctcagcgccagctgtatgctggattgtgtgtactactttgaagctgcagatggagaagggggaagatccagttcccacttgcctcactcgcaccggactcttcttgcggttcctgtgctcccggttcccgcagggtgcgcagcttagaggggcgctcaggactctgtcgcttttagccgcccagggactgtgggcacagactagcgtccttcatcgagaggatcttgaaaggctgggcgttcaggagagcgacctccgcttgttcctagatggcgatatccttaggcaggaccgtgttagcaaggggtgttacagcttcatccatcttagcttccagcaatttctgacagccctgttttataccttggagaaagaggaggaagaagaccgcgacggtcacacttgggatattggcgacgttcagaagcttctcagtggagtggagagactgcggaatcccgacctgattcaagctggatactacagttttgggttggccaacgaaaagcgggccaaggagcttgaggctacctttggatgccgaatgagcccagacataaagcaggagctcttaaggtgcgatattagctgtaaaggcggacacagcaccgtcacagatttgcaagaactccttgggtgcctgtacgagtcacaggaggaggaactggttaaggaggtcatggctcagttcaaagaaatttcattgcacctaaacgctgttgacgtggtgcctagctccttttgtgtgaaacactgcaggaatctgcagaaaatgtcactgcaagtcatcaaggagaacctacccgaaaacgtgactgcgtccgaaagcgacgcagaggtggaacggtcgcaggatgaccagcacatgctccccttctggacagatctttgctccatatttggctccaacaaagatctgatgggtttagctattaatgattcctttctgtcagcatcgctggtgagaatcctctgtgagcagatagcctcagacacctgccacctgcagcgtgttgtcttcaaaaatatatcccctgccgacgcccatcgcaacctgtgtctagccctgcgggggcataagaccgtgacttaccttaccctccagggcaacgaccaagacgacatgttccccgcactgtgcgaggttctaagacaccccgaatgcaatctgcggtacctgggcctggttagttgctctgcaacaacgcagcagtgggcagatctttccctggctttggaagtcaatcagagcctcacctgcgtgaatttatccgataatgaattgttggacgagggagccaagctgctgtatacgactctgcggcatcccaagtgctttcttcagcggctgtccctcgagaactgtcatcttaccgaggccaactgtaaagatcttgccgcggtgctcgtggtaagtcgggaactcacacacctgtgcctagctaaaaaccctatcgggaacaccggggtgaagtttctgtgcgaagggctcagatacccagaatgtaaactgcagaccctggtgctgtggaattgcgacatcacttccgacggttgctgtgatctaaccaaattgctccaggaaaagtcctctctactttgcctggatttaggactgaaccacatcggcgtgaaaggaatgaagttcctttgtgaggcattgaggaaacctctttgtaacttgaggtgcctgtggctgtgggggtgcagtatcccaccattttcctgtgaagacctgtgttctgccctgtcctgtaaccaaagtctggttaccttggacctgggtcagaatcccttgggatctagtggtgtgaaaatgctgttcgagacgttgacctgttctagtgggacccttcggacactccggctcaagatcgacgatttcaatgacgagctgaataagttgctggaagagatcgaagaaaaaaaccctcagctcatcatcgacaccgagaaacaccacccttgggcggaaagaccatctagccacgatttcatgatatag

SEQ ID NO: 69159 - DNA, 3123 bp, Artificial Sequence
  derived and/or modified sequence
atggtgagctcagcccagatgggcttcaatctgcaagccctcctggagcagctgtcacaggacgagctttcgaaattcaagtatctcattactaccttctctctggctcacgagctccagaagatacctcacaaagaggttgacaaggccgatgggaagcagttagttgagattttgacaacgcattgcgacagttactgggttgagatggccagtcttcaggtcttcgaaaaaatgcatagaatggacttgtcagagcgggctaaggatgaggtccgggaagctgcgctcaagtcattcaacaaacgcaaacccctttcgctggggatcacacgtaaggagagacctcccctcgacgttgacgagatgctggaacgcttcaaaacggaagcacaggataaagacaatcggtgcaggtacattctgaaaacaaagtttcgcgagatgtggaaatcatggcccggcgacagcaaggaagtgcaggtgatggcagagcgatacaagatgctgattcccttcagcaatcccagagtcctgcccggaccatttagttatacggtggttttgtatggcccagcagggctcgggaaaactactctagcccagaaactgatgctcgactgggcagaagataacctcattcataagttcaaatacgcattctatctgagctgccgagaactaagccgactaggcccttgttcctttgcagagttggtctttagggattggccagagttacaggatgatattccacatattctggcccaagccagaaagatcctcttcgtcatagatggattcgacgagctgggggcggcacccggggcactcattgaggatatatgtggcgattgggaaaaaaagaagcctgtcccggtgcttttaggcagtttgctcaacagagttatgctgccaaaagcagccctgctggtcacaacccgtccccgcgctctgagggacctcaggatcttagcagaggaaccaatttatattagagtggagggattcctcgaagaagaccgccgggcttactttctgaggcactttggcgatgaagatcaggcaatgagagcgttcgagctgatgaggtctaatgccgccctcttccagttaggatccgctcccgcagtgtgctggattgtatgtactactctgaaactgcaaatggagaaaggggaagacccagtaccgacttgcctgacccgcacagggctcttcctgaggttcctatgttcacgatttccgcagggggcacagctccgcggcgcgctgcgcacactgtcactgctggcggcccaaggtctctgggcccagactagtgtgctgcaccgagaagacttggaaaggcttggtgtgcaggagagcgacctcaggctctttctggatggtgacatactccggcaagacagagtgtccaaaggctgttattccttcatacacctgagcttccaacagtttctaacggccctgttctacacgctggagaaagaagaagaggaagaccgagatggccatacttgggatatcggcgacgtgcagaaattattgtccggcgtcgagcggctccgcaacccggaccttatccaggcaggctattatagcttcggcctggctaatgagaaaagagccaaggaattggaagctacatttgggtgcaggatgagtcccgatatcaaacaggagttactccggtgtgatatttcgtgcaagggtggccactcaactgttactgacctgcaggagcttctgggttgtctttatgaatcacaggaagaggagctggtcaaggaagtcatggcacagtttaaagagatctccttacacctaaacgccgtggatgtggtcccctcttctttctgcgttaaacattgtaggaatttacagaaaatgtcactgcaggtgattaaggaaaacctgccagagaatgtaacagcatctgagtctgatgctgaagtagaaagatcccaggacgatcaacacatgctaccattttggaccgacctttgtagtattttcgggtccaacaaagacctcatgggcctagcaattaacgactccttcctgagcgccagtctggttcgcatcctctgcgagcagatcgcctctgatacgtgccacctccagagagttgtgttcaagaatatcagcccagcagatgcccaccgtaatctctgccttgccctcagaggtcacaaaacagtgacgtatctaacgctgcagggaaacgatcaagatgacatgttcccagccctgtgcgaagtcttacggcatcccgaatgcaacctccggtatctggggcttgtttcctgcagtgctactactcaacagtgggccgatcttagtttggctctggaagtcaatcagtctttaacttgtgtaaatctttccgacaacgaattgttagacgagggcgctaagctgctgtatacaacgttacggcatccaaagtgctttttacaacggctttcactagagaattgccacctgaccgaagcgaattgcaaagatctcgccgccgtcctggtcgttagccgggagctgacgcatttatgcctggccaaaaacccaataggcaacacaggtgtaaaattcctgtgtgaggggctgcgataccccgaatgcaagctgcaaacactggtgctgtggaattgtgacataacaagtgacgggtgttgcgacctcactaaactcctacaggagaagtcttcactcctctgcctcgatctcggtttaaaccacattggcgtaaagggcatgaagttcctgtgcgaagctcttaggaaacctctctgtaacctacggtgcctgtggttgtggggttgttctatcccgcccttctcttgtgaggacctgtgtagcgctcttagttgtaatcagagtttggttactctcgatttagggcagaaccctctcggcagtagcggagtgaaaatgcttttcgagaccttgacctgttcatcaggaactctgcggacgttaaggttgaagatcgacgacttcaacgacgagttgaataaactgctggaggaaatcgaagagaaaaatccccaacttatcattgacaccgagaagcaccatccttgggcagagcggccgtcttcacacgatttcatgatctag

SEQ ID NO: 69160 - DNA, 3123 bp, Artificial Sequence
  derived and/or modified sequence
atggtgagcagcgcccagatgggcttcaacctgcaggccctgctggagcagctaagtcaagacgagctctctaagtttaagtacctcattacaacattttcgctcgctcacgaattgcaaaaaattccgcacaaggaggtcgataaggctgatggtaagcagcttgttgagatacttacaactcactgcgattcttactgggtagagatggcatctttacaagtgtttgagaaaatgcaccggatggacttgagcgaaagggctaaagacgaggtccgggaggccgccctgaaaagcttcaataagcggaagccactctccctcggcatcacaaggaaggaacgtcctccactggacgttgatgagatgttagaacgttttaagaccgaagctcaggacaaagataatcggtgccgctatatcctgaagaccaagtttagagagatgtggaagtcgtggccgggagactcaaaagaggttcaagttatggctgaaagatataaaatgctgatccctttttcaaacccaagggtgctgcccggccctttcagttatacggtagtgttgtatgggccggcgggtctagggaaaaccactctggcccagaagctgatgcttgactgggcagaagataacctgattcacaaattcaaatacgcattctacctgtcatgccgggagctgagccgactggggccctgctcgttcgcagagttggtctttagggactggcctgagttgcaagacgacattccccacatccttgcccaggcccgcaaaattttgtttgtcatagatggatttgatgaactcggggcagctcctggcgctcttatcgaagatatctgcggggattgggagaagaaaaaacctgtgccagttctgctcggatccttgcttaatagagttatgctcccaaaagccgctctattggtcactacccgccctcgcgccctgcgagacctgaggatcctagccgaagaacctatatacatcagagttgagggattcttagaggaggaccgaagagcctacttcctgcggcactttggcgatgaagatcaggctatgagagcgttcgaactgatgcggagtaatgccgctctcttccagctcggctcagcccctgcggtctgttggatcgtgtgcacgacgttgaagctacaaatggagaagggggaggaccccgtgcctacatgtctcaccaggactggactgttcctacggttcctctgctccaggtttccacagggagctcagttacgaggtgcactgcggaccctgtcactactagcagctcagggactctgggctcagacctctgtcctccaccgcgaagacctagagcgtctcggtgtgcaagagtcggacctgcgcttattcctcgatggcgacatcctaagacaagatcgcgtctccaaaggctgctattccttcatccacctctctttccagcaatttctgaccgccctcttttacaccctggagaaagaagaggaagaggaccgcgatggccatacatgggatatcggcgatgttcagaagttgctatctggcgttgagagactcagaaatccggaccttatccaagcaggctattactctttcggcttggcaaatgaaaaaagggctaaagagctcgaagcaacctttggctgccggatgagccctgatattaagcaggagctgttacgatgtgatatttcctgcaagggtggccatagcaccgttacagacttgcaggagcttctcgggtgtctgtatgaatcccaggaagaggaactcgttaaggaggtgatggctcagttcaaggagattagcctgcatctgaacgcagtggacgtcgtgcccagtagtttttgtgtgaagcattgtcgcaatctccagaagatgtccctgcaagtgatcaaagagaatttgcccgaaaatgtgacggcctccgagagtgacgcagaagtggagaggagccaggatgaccagcatatgctcccattctggactgacttatgttccatcttcgggtccaataaggatctgatgggcctcgctatcaacgactcttttctgagcgcctccctggtccggattctgtgtgaacagatagcttccgatacctgccatcttcagcgcgtggtgttcaagaacatctcacctgctgatgcccatagaaacctatgccttgccctccgtgggcacaagaccgtgacgtacctgaccctccaaggcaatgaccaggatgatatgttccccgccctgtgtgaggtgctgaggcatcccgagtgcaacctcagatacctcggcctagtgtcatgtagcgcaacgacccagcagtgggcagatcttagccttgcccttgaggtgaaccaatcgctgacttgtgttaacctgagtgacaacgagctactggacgaaggagctaaacttttgtatactactctgcggcatccaaagtgcttcctgcagcggctttcactggaaaactgtcatctgacagaagctaactgtaaagacttggctgccgtgctcgttgtgtctcgcgagttgacccatctgtgcctggcaaaaaacccaatcggcaacacaggtgtgaaattcttatgtgagggactgcgttatccagaatgtaaactgcaaaccctggtcctctggaactgtgacattacaagtgacgggtgttgtgatctgaccaaacttctgcaggaaaagtcatcactactctgcctggacctggggctgaatcatatcggggtgaaaggcatgaagtttctgtgtgaggctctgaggaagccattatgcaatctgcgctgcttgtggctgtggggatgctccatcccaccgtttagctgtgaagacttgtgcagcgccctgtcttgcaatcagtccttagtgacactggatctcggccagaatccgctgggatcttccggtgtgaaaatgctgtttgagacactgacatgttcctccggcaccctgcgtacgttgcgcctgaagattgacgactttaatgatgagctaaataagctcctcgaagagattgaggagaagaacccccaactgattatcgatacagagaaacaccacccgtgggcagagcggccctctagtcacgacttcatgatatag

SEQ ID NO: 69161 - DNA, 3123 bp, Artificial Sequence
  derived and/or modified sequence
atggtgagcagcgcccagatgggcttcaacctgcaggccctgctggaacaactgagtcaggacgaactttcaaaatttaagtaccttatcacaaccttcagcctcgcccacgagctgcagaaaatcccacacaaggaggtcgataaggcagatgggaagcaattggtggaaatcctgacaacgcactgcgatagctattgggtcgaaatggcatctctacaggtgttcgaaaagatgcataggatggacctgtcagagagggccaaggacgaggtacgtgaagccgcgctcaagtccttcaacaagaggaaacctctctctcttggcattacacgaaaggaaagaccacccctagacgtggatgaaatgttagaaagattcaagacggaggcacaagacaaggataataggtgtagatacatcttaaaaactaaattcagagaaatgtggaagagttggcccggagacagtaaggaagtccaggtcatggcagaacggtacaaaatgctaatcccttttagcaatccaagggtgttgccaggacctttctcatataccgtcgttttatatggcccagctggcttgggcaaaactactctcgctcagaaacttatgcttgattgggcagaagacaacctcatccacaaatttaagtacgctttttatctgagctgccgcgagctctcacggttgggcccttgctcattcgcagaactggtttttagagactggcctgagctccaggatgacatcccccatatcttagctcaggctcgaaaaattttgtttgtcatcgatggatttgacgagctgggcgccgctcctggcgccctgatcgaagacatctgcggcgattgggagaaaaagaaacccgtacccgtgctgctgggtagtctactcaacagggttatgctgcccaaggcagctctcctggtaacaacgcgaccacgggcgctaagagatctgaggattttggctgaggagcccatttatattcgcgttgaaggctttttggaggaggacaggagagcctacttcctgagacactttggggacgaggaccaggctatgcgcgccttcgagctgatgcgcagcaatgccgccttatttcagcttggaagcgcccccgcagtttgctggatcgtgtgcactacactgaagctgcagatggaaaagggcgaggacccggtaccgacttgtttgacccggaccggcttgtttctgcggttcctttgttctcgctttccccagggagctcaattgcggggcgcgctcagaacgctatcgctcctggctgcccagggactctgggcccagacctctgtccttcaccgcgaagacctggaacgtcttggagtgcaggagagcgatctgcgcctatttttagatggtgacattctgcggcaggaccgcgtgagcaaggggtgttattctttcattcacctatccttccagcagttcctgacagcactgttctatacattggagaaagaggaagaggaagatcgagatggtcacacgtgggacatcggagacgtgcagaagctactgtccggggtggaaaggttgcgtaaccctgacctgattcaggccggatattactcctttggactggctaacgagaaaagggctaaagagttggaagctacgttcggatgccggatgtcgccagacattaaacaggaacttctgcgatgcgacatatcctgtaaaggggggcattccacggtgacagacctgcaggaactgctgggatgcctctatgagtcccaagaggaggagctagtgaaagaggtcatggcccaatttaaggaaatttccctgcacctcaacgccgtagatgtcgtgccgagctctttttgtgtgaaacactgtcgtaatcttcaaaagatgtccctgcaggttatcaaggagaaccttcccgaaaacgtgaccgcaagcgagagcgatgcggaagttgaaagaagccaggacgaccagcacatgctgcctttctggactgatctatgtagtatctttgggtccaacaaagatttgatgggcctcgccattaacgacagctttctctctgcctcactggtgcgcattttgtgcgagcagatcgcaagtgatacctgccacctccagcgggtcgtctttaagaatatatctccggccgatgctcataggaatttgtgtctcgcactcaggggccataagacagtgacatacctgacacttcagggtaacgatcaggacgatatgttccctgccctctgtgaagtgctgcgacacccagagtgtaatttacggtacctggggcttgtgtcctgcagtgccaccacacagcagtgggcagacctgtccttagccttagaagttaaccaatctctgacatgcgtgaatcttagcgacaacgaattgctggacgagggggccaagctgctttatacaaccctgagacaccccaagtgcttcctgcagcggctatctttggagaactgccatctcaccgaagccaattgcaaagatttggctgcggtgctcgttgtatcgcgggagctcacccacttgtgcctggccaaaaacccaatcggaaacacaggcgtgaagtttctgtgtgaggggctgagatatccagagtgtaagctccagacactcgtgctgtggaactgcgatatcacttctgatggttgttgcgatcttactaaactgctccaggaaaagagctccctcttgtgtctggatttgggactgaaccatatcggggtgaagggcatgaaattcctatgcgaagcactccggaagcccctgtgcaacttgcggtgtttgtggctctggggctgctccatcccacctttcagctgcgaggacctctgctcagctctatcctgtaaccagtcgttagtgacactggacttgggtcaaaaccccttgggaagttctggtgttaagatgcttttcgaaaccctcacttgcagcagcgggacattaaggaccttaagactgaaaatcgacgatttcaacgatgaacttaataagctattggaggagatcgaggagaaaaacccacagctcattatcgatactgagaagcaccacccctgggccgaacgcccctcaagtcatgatttcatgatctag

SEQ ID NO: 69162 - DNA, 3123 bp, Artificial Sequence
  derived and/or modified sequence
atggtgagcagcgcccagatgggcttcaacctgcaggccctgctggagcaactgtctcaggacgaactgtccaagtttaagtacctgatcaccacattctctctggcacatgagttgcagaagatcccccacaaggaggtagataaggcggacggcaagcagctggttgagatactgacgacacattgcgacagttattgggtggaaatggcctcactgcaggtctttgaaaagatgcaccgcatggatctcagcgagcgagctaaggacgaagtgcgcgaggccgctttgaagagcttcaataagcgcaagccgttaagcctgggcatcaccagaaaagaacgcccacctcttgatgtggatgaaatgctggagcgcttcaaaacagaggcacaggacaaggataacaggtgccgatatatcctcaagaccaaatttcgagagatgtggaagtcttggcccggagacagcaaggaggttcaggtgatggccgaacgatataaaatgctgattccgttctccaatccacgggtgttacctggcccttttagctacaccgttgtgctgtatgggcccgcgggactcggcaagaccacattggctcagaagctgatgctggactgggcagaagataatcttattcataaatttaagtacgcattttatctttcatgcagagagctgagccgcctgggtccctgcagctttgccgagctggtctttcgggactggcccgaactgcaggacgatatcccccacatcctggcgcaggctcgaaaaatcctcttcgtgattgacggcttcgacgagctgggggcagcgcctggtgcactgatcgaagatatctgtggcgattgggagaagaagaaaccagtccctgtcctgctgggctcgttgctcaacagagtcatgttacctaaagcggcactgctagtgacgacccgccccagggcactgagagatttaaggattctagcagaagaacctatttatatacgggttgagggttttctggaagaggatagaagagcctactttttacggcatttcggcgacgaggaccaagccatgagagcttttgagctgatgcgctcaaatgccgccctgttccagctggggtctgccccagcggtatgttggatcgtttgtacaacgctgaaactccagatggaaaaaggagaggacccagttccaacatgtctgacacggacaggcctgttcttgagattcctatgctctcgcttcccacagggagcgcagttgcgtggtgcgctgcggacattatctttgctcgctgcccaggggctgtgggcccagacatccgtgctccaccgagaggacctcgagcgtctgggagtacaggaaagcgatctcagactatttctcgatggtgacattctccggcaggacagggtttccaaggggtgctatagtttcatccacctgtcttttcagcagtttttgacagccctgttttacacactcgaaaaggaggaggaagaggatagagacgggcatacttgggatataggcgacgttcagaaattgctgtccggagtggagcgactccgaaatcctgacctcattcaggccgggtactatagctttgggcttgcaaatgagaaacgtgcaaaggagctggaggcaacgtttggttgtagaatgtcacccgacatcaagcaggagctcttaaggtgcgatatcagctgcaagggcgggcactcgacggtgacagacctgcaggagctgttggggtgtctgtacgagagccaagaagaggagctggtcaaggaggtgatggcccagtttaaggagataagcctgcatctgaacgccgtggacgtggtaccctcttccttctgcgtcaagcactgccgcaatctgcagaagatgtccctacaggtcatcaaggagaacctacccgaaaatgtgaccgcatcggaaagtgacgctgaggtggagcggagtcaagacgatcagcacatgctgcccttctggacagatctgtgcagcatcttcggcagcaacaaggatctgatgggtctggccatcaatgactctttcctgagcgcttcactggttcgtattttatgcgaacagatcgcctcagatacatgccatcttcagagggtggtgtttaaaaatatatctcctgctgatgcacatcgcaacttgtgcctggcgctcaggggccataagactgtgacttaccttaccctgcaggggaacgatcaggacgatatgtttcccgctctctgtgaggttctgagacatcctgagtgtaatctacgctaccttggcctggtttcgtgctcagctactacccaacagtgggctgatctgagcctggctctggaagttaatcagagcctgacatgcgttaacttaagcgataacgaattgctggatgagggagccaagttgctctacactaccctacgtcaccctaaatgtttcctgcagcgactctcacttgagaactgccacctcacagaggctaattgcaaggatctcgcagcggtattagtggtgtccagggaattgactcacctttgtttggctaagaaccccattgggaacacgggggttaaattcctatgcgagggcctgcgctaccctgaatgcaagctccaaacactcgttctgtggaattgcgatatcaccagtgatggctgttgcgacctgaccaagctgctgcaagagaagagttccctactgtgcctcgacctgggcctaaatcatatcggtgtcaaaggcatgaagttcctgtgcgaagccctaagaaagccactttgtaacttgcggtgcctttggctttgggggtgctccatcccgccgttttcctgtgaggacctctgcagtgcactttcttgcaatcagtccctcgtaactctggatctgggacagaaccccctcgggtcctccggagtgaaaatgttgtttgaaacgctcacctgctcctcggggactctcagaacccttcggctcaagattgacgatttcaatgacgaattgaacaagctcctggaagaaatcgaggagaagaacccacaattgatcattgacaccgagaaacatcacccgtgggctgagcgcccctcatcacacgactttatgatttag

SEQ ID NO: 69163 - DNA, 3123 bp, Artificial Sequence
  derived and/or modified sequence
atggtgagcagcgcccagatgggcttcaacctgcaggccctgctggaacagctttcgcaagacgaactgtctaaatttaaatacttgataacaacattcagcctggcacatgagctacaaaaaatcccccataaggaggtcgataaagccgatgggaaacagctggtggagatcttgacaactcactgtgatagttattgggtagagatggccagcctgcaagtgtttgagaagatgcaccgcatggacttgtctgagcgggccaaggatgaggtccgcgaagccgccttgaagagcttcaacaagaggaaacccctatctttaggcatcactagaaaagagcggcctccacttgacgtggatgaaatgctcgaacggtttaagaccgaagcacaggataaagataaccgctgtcgctacattctgaaaacgaagtttcgcgagatgtggaagtcctggcctggtgacagcaaagaagttcaggttatggcggagagatataaaatgctgattccgttctcgaatcctagggttctcccaggtcccttctcttacacagtagttttatacggccccgctggactaggtaaaacaactctggcgcagaagctgatgttggattgggcagaggacaacctcattcataagttcaagtatgctttttatctgagctgccgcgagctgtctagactgggtccttgtagtttcgctgagcttgtatttcgggactggcctgaattgcaggatgacatcccccatattctcgcccaagctagaaaaatcttattcgttattgatggttttgatgagcttggcgccgcaccaggagcgcttatcgaggacatttgcggcgattgggagaaaaaaaaacctgttcctgtcctgttagggtctctgctcaaccgggtgatgctcccgaaagcagcactgttagtgacgacccgccccagagctctgcgtgatcttaggatcctggcggaggaaccaatctatatccgggtggaaggctttctggaggaggatagacgggcatatttcctgaggcactttggagatgaagaccaggccatgcgcgctttcgagctgatgcggagcaacgctgcgttatttcagctagggtcagctcctgcggtgtgttggatcgtgtgcacgactctgaaactgcaaatggagaaaggggaagatccagtgccaacctgtttaacgcgaacaggcctgttcctccgtttcctttgtagccggttcccccagggcgcccagctcaggggagccctgaggacactgtccttattggcggctcagggcctgtgggcgcaaacgagcgtgctacacagagaggatctggaaaggctgggcgtgcaagagtctgacctgcggctgtttttagatggcgacattcttagacaggatagagtgtcaaaaggttgttactctttcattcacctgtctttccagcagttcttaaccgcgctgttctatactctggaaaaagaagaggaagaggaccgtgatggacatacctgggacatcggggatgtgcagaaactcctgtcgggcgttgaacggctcaggaatcctgacctgattcaggcaggctattactccttcggcctagctaatgaaaagagggcaaaggaactcgaggctaccttcggttgccggatgagtcctgacattaagcaagagctcctccgctgtgacatttcctgtaagggtggacacagcactgtaaccgacctacaggaattgttgggttgcctttacgagtctcaagaggaggagttagtcaaggaggtcatggctcagtttaaggagatatcattgcacctcaacgccgtggatgttgtgccatccagtttttgcgtaaaacactgccgcaatctccagaagatgagcctccaagtaatcaaggaaaacctgccggagaatgtgacagcctccgaatccgacgccgaagtggagcgctcccaggatgaccagcacatgctgcccttttggaccgatttgtgttcaatatttggctcaaataaggatctaatgggcctggccattaatgactcattcctgagcgcgtctctggtgaggatcctgtgtgaacaaattgcctcggacacatgtcatctccagcgagtcgtgttcaaaaatatatcccccgccgacgcacaccgcaacctctgcctggccctgcggggccacaagacggtgacttacctgacccttcagggcaacgatcaagacgacatgttccctgcgctgtgcgaagtcctgagacaccccgaatgcaacctgcggtacctgggcctagtaagttgtagcgccacgacccagcagtgggcggacctctctctcgcactggaggtgaatcagagtctgacctgcgtaaacctaagcgacaatgagctgctggacgagggggctaaactcctgtacaccactctgaggcatccgaaatgcttccttcaacgactcagcctggagaattgccacctgaccgaagcgaattgcaaagaccttgcagccgtgttggtagtatctcgggagctgacacacctgtgcctcgctaaaaatcccatcggcaataccggggtgaaatttctgtgcgaagggctgcgatatccagagtgcaagctgcagacactggtcttgtggaactgcgatattacctccgatggatgttgtgatctgaccaaactcctgcaggaaaaaagctctctgctgtgcttagatttaggcctcaaccacattggcgttaaagggatgaagtttttatgcgaagctctcaggaaacctctttgcaacctccggtgcctttggctctggggatgcagcatcccacctttcagttgtgaggatctgtgcagtgctctgagttgtaatcagagcctggttaccctagacctcggacagaatccattaggctccagcggagtgaaaatgctattcgagaccctgacctgcagcagcggcacactcaggaccctaaggttgaagattgacgattttaacgatgaattgaacaagttgcttgaagagatcgaggagaaaaacccccagctcattatcgacaccgaaaagcaccacccatgggcagagaggccatccagccatgattttatgatctag

SEQ ID NO: 69164 - DNA, 3123 bp, Artificial Sequence
  derived and/or modified sequence
atggtgagcagcgcccagatgggcttcaacctgcaggccctgctggagcagctgtctcaagatgagctttcaaaattcaagtacttgatcactaccttttcactggctcatgagctacaaaagatacctcataaggaggtagacaaggctgatggcaagcagctggtggagatcctcacaactcattgcgattcctattgggtggagatggcatccttacaggtcttcgaaaaaatgcacaggatggacctcagcgagcgagcaaaagatgaggtgcgcgaagctgcgctcaaatccttcaacaaaagaaagcctctttccttagggataaccagaaaggagcgacctccgctcgacgtcgacgagatgctggaacgattcaaaactgaagcccaggataaggataatcgatgcaggtatatattgaagactaaattcagagagatgtggaaaagttggccaggtgatagtaaggaggttcaggtcatggctgagcgctacaaaatgctgatccctttctccaatcctcgtgtcctcccagggccattttcctacacggtagtcctctacggccccgccgggcttggcaagactactctcgcccagaaactcatgctagattgggccgaagataaccttatccataaattcaaatacgcattctatttgtcctgccgcgagctgagccggctgggcccctgcagttttgctgagctggtgtttagagactggcccgaactccaggatgacatcccacatattctcgcacaggcacgcaaaattctgttcgtgattgatggtttcgacgaattaggagctgctccgggcgcattgattgaagatatatgcggggactgggagaaaaaaaagccagttcctgttctcctcggctccctcctaaatagggttatgctgcccaaagcagcactcctcgtgaccacgagacccagagccctaagagacttgcgcatccttgccgaggaacctatctatatccgtgtggagggattcctcgaagaggatcggcgcgcctacttcctgaggcactttggggatgaggaccaggccatgagggctttcgaactgatgagatcaaatgcagccctgttccagctgggctcggcaccagccgtgtgctggattgtctgtacgaccttgaaactgcagatggaaaaaggcgaggatccagtccccacgtgtctgactaggactggcctgttcctgaggtttctctgctccaggttcccacagggggcccagcttaggggcgcgttgcggaccctgtccttgctggcagcacagggcctctgggctcagaccagtgtccttcatcgggaggatctcgagagattaggagttcaggagagcgatctgagactgttcctggatggggatattctccggcaagatcgcgtcagcaaaggctgctattcattcatacatttgagctttcagcaatttctcaccgccctgttttacacattggagaaggaggaggaggaggacagggacggacacacttgggacatcggagatgttcagaaacttctcagcggggtggagagactacgaaaccctgacctaatccaggcagggtactacagctttggcctggccaacgagaaaagagctaaggagcttgaggctaccttcggatgtcgcatgagccccgacataaagcaagaacttttgagatgtgacatttcatgcaaggggggacacagcactgtgaccgacctgcaagagctcctgggctgcctgtatgagtcacaggaagaggaactggttaaggaggtcatggctcagttcaaggaaatcagtctgcatctgaacgcagtagatgtggtcccttcttcattttgtgtgaagcattgcagaaacttacaaaaaatgagcttgcaggtcatcaaagagaacctcccagagaacgtgacagcctcagaatctgacgccgaggtggaaagaagccaggacgatcagcacatgctgcctttttggactgacctttgttctatctttgggagcaataaagacctgatgggattggcaattaatgactccttcctctctgcctctttagtccgaatcctttgtgagcagattgctagcgatacctgccatttacaacgcgtcgtgttcaagaatatcagcccggccgacgcacaccgtaacctctgcttagccctgcgtggccacaaaacagtcacctacctcactctccagggaaatgaccaggacgatatgttcccggcgctgtgtgaggtgcttagacacccagagtgcaatttgcgctatctgggcctggtgagctgttctgccaccacgcaacaatgggctgacctttccctggcactggaggtaaatcaatctctgacttgcgtcaacctgagtgacaacgagctgttggacgaaggagcaaagctcctgtacactaccctgcgccatccaaagtgctttctgcagcgcctgagtctggaaaactgccacttgacagaggcaaactgtaaggacctcgcggctgtgctggtggtgtcccgagaactgacgcacctgtgcctcgcaaagaaccctatcgggaacacaggtgtgaaattcctgtgtgagggattgaggtatccagaatgcaaacttcagacccttgtcttgtggaactgtgacattaccagcgatggatgctgtgacttaacaaaactgctgcaggagaagagtagtctgttgtgcttggatttgggacttaatcatattggagtcaagggaatgaagtttttgtgtgaagccctgcgcaagcctctatgtaatttacgttgcctctggctatggggatgtagcatcccaccattttcatgtgaggacttatgttctgccctgtcatgtaaccagtccctggtgaccctagatctgggccagaatcccctgggcagctccggtgtgaagatgctgtttgaaactctgacttgcagctcaggcaccctgcgcacactgcggctcaagattgatgacttcaatgacgagcttaacaagctgctcgaggaaatcgaggagaagaatcctcagctgattattgatacagaaaaacatcacccctgggcagagagaccctcttcacatgattttatgatctag

SEQ ID NO: 69165 - DNA, 3123 bp, Artificial Sequence
  derived and/or modified sequence
atggtgagcagcgcccagatgggcttcaacctgcaggccctgctggagcagctgtcccaagatgaattaagcaagttcaagtaccttatcactactttttctctcgcccacgaactccagaagatcccacacaaggaagtggataaggcagacgggaagcagttggtggagatcctgacgacacattgtgatagctattgggtggagatggcatctctgcaagttttcgagaaaatgcaccggatggacctgtctgagcgcgccaaggacgaggttcgcgaagcggccctcaagtctttcaacaagcggaagcccctgtccctgggcatcacaaggaaggagcgccctcctctcgacgttgatgagatgttggaaaggtttaaaaccgaagctcaggataaggacaacaggtgtcgttacattctgaagaccaagttccgggaaatgtggaaatcctggcccggggattctaaagaggtccaggtcatggcagagaggtacaaaatgttaatcccattttctaatcccagagtactgccggggcccttctcctatacagtagtgctatacggtccggctgggctaggcaaaacaacattggcccagaagctgatgctggattgggccgaggataacctgatccacaagtttaaatatgcgttttatctctcttgtagggagcttagccgcctaggcccttgctcgttcgccgagctcgtgttccgtgactggcctgaacttcaagacgacatccctcacatcttggcgcaggcacgtaaaattcttttcgtcatagatggattcgatgagttgggtgctgcccctggcgcattgatcgaggatatttgcggggactgggaaaaaaaaaaaccagtcccggtactcctgggttccctgctcaaccgcgtgatgcttccgaaggccgcgttactggtgactactaggccgagggcactccgagacctcagaatcttggcagaggagccaatctatatccgggtcgaaggcttccttgaagaagacaggagggcctatttcctcagacacttcggggacgaggatcaggcaatgcgggctttcgagctgatgcggagtaatgctgcgctgttccaactcggaagcgctcccgcggtgtgttggatcgtctgtaccactttgaagttgcagatggaaaaaggggaagacccagtcccaacatgcctgaccagaacaggcctttttctgcgcttcctgtgtagtaggttcccacagggggcgcagttgaggggggctttacgtacactaagcctgctagcggcacaaggtttgtgggctcagacatcggtcctgcaccgggaggatctggagcgcctgggagtgcaggaatccgacctgcgcttatttctagatggtgacatactgcggcaggatagagtgagcaaggggtgttacagcttcatacacctgtcctttcagcaattcctgactgccctgttctataccttggagaaggaagaggaagaggatcgggacggacatacatgggacattggcgatgtgcagaaactgctgtccggcgtggaacgccttaggaatcctgatttaatccaagcgggctattattccttcggactggccaacgagaaaagagccaaagaattggaagcaacattcggttgtcggatgtccccggacatcaagcaggagctgctgcgatgtgacatttcctgcaaaggcggacacagcacagtgacggatctgcaggagcttctgggctgtctgtacgagagtcaggaagaagagctggtcaaggaagttatggcccagtttaaggagattagtcttcatctgaatgccgtggacgtggttccctccagcttctgcgttaagcattgccgtaacctgcagaaaatgtccttgcaggtgattaaagagaatctaccagagaatgtgactgcaagtgagtccgatgctgaggtcgaaagatctcaggatgatcagcacatgctaccgttctggactgacctgtgttctatctttgggagcaacaaagatctaatgggacttgcgatcaacgacagcttcctgtcagcctctctcgtaagaattttgtgtgagcaaattgcctccgacacttgccatcttcagcgggttgtgtttaaaaacatcagccccgctgacgcacaccgcaacctttgcttggcgctccggggtcataaaaccgtgacttatctgaccctacaggggaacgaccaagatgacatgttcccagcactgtgtgaagtcttaagacatccggagtgcaatctgcgctacctgggcctcgtgtcatgctctgccacaacccagcaatgggcggacctgagccttgcactggaggtcaaccagtctctgacctgtgtgaacctgagcgataatgagctgcttgatgaaggtgccaagttgttatatactacgctgcgccaccctaaatgcttcctgcagagactgagcttggagaactgtcaccttacagaggcgaactgcaaggaccttgccgctgtgctcgtcgtcagccgtgagttgacccacctgtgcttggcgaagaaccccatcgggaataccggcgtgaagttcctctgcgagggcctgcgctaccccgaatgcaaattgcagactctggtgctctggaactgcgacatcacgagcgacggatgctgcgacctgaccaaattgttgcaggagaagtcgagcctgctgtgtctggatcttgggctgaatcacatcggtgtgaaagggatgaaatttctgtgtgaagcattgcgcaagccgctctgtaatttacggtgtttgtggctgtggggctgttctatcccgcccttttcatgtgaggatctatgttctgcactgtcttgtaatcagtccctggttacactcgacttaggccaaaaccctctgggtagctccggagttaaaatgttgttcgaaacattaacatgctccagtgggactctaagaacattgaggctgaagattgatgatttcaatgatgaattgaacaagctgctggaagagatcgaggaaaagaacccacagttgattatcgacactgaaaagcatcatccgtgggcagaacgcccctcctctcacgacttcatgatatag

SEQ ID NO: 69166 - DNA, 3123 bp, Artificial Sequence
  derived and/or modified sequence
atggtgagcagcgcccagatgggcttcaacctgcaggccctgctggagcagctcagtcaggatgaattgtcgaagttcaagtacctgataaccacgtttagcctggctcacgaactacagaagatcccacacaaggaggtggacaaggccgatggcaagcaacttgtcgagatcctcaccactcattgtgattcctactgggtggagatggcctctctgcaggtatttgaaaaaatgcatcgaatggatctgtccgaaagagctaaagacgaggtcagagaggccgctctgaaaagcttcaacaaaaggaaacctttgtccctaggaattacgcgtaaggagcgcccacccctggacgtagatgagatgcttgaacgctttaagactgaagcgcaggacaaggataaccgatgccggtacattcttaagaccaagttcagagaaatgtggaaatcgtggccgggtgatagtaaggaggtgcaagtcatggccgaacgttataaaatgctgatccctttttcaaacccccgcgtgctgcctgggcctttttcctacaccgttgtgctctacggcccagccggtctgggaaagacgaccttggcccagaagcttatgctcgactgggcagaggacaacttaatacataagttcaagtatgctttttatctgtcttgcagagagctgagcagactgggcccttgctcttttgctgaattggtttttcgggactggcccgagctccaagatgatatcccccacattcttgcccaggctcggaaaatcctcttcgtgatcgacggattcgacgagctgggggccgcccctggagccctcatcgaagacatttgtggcgattgggaaaaaaaaaagcctgtgccggttctactgggctctctgctcaatcgagtcatgctccctaaagctgctttgctggtgaccacaagaccccgggctctgagggatcttcggatactcgctgaggagcccatctacatacgagtggagggatttctggaggaagaccggcgggcctacttccttaggcattttggcgacgaagaccaggctatgcgggcttttgaattgatgcggtcaaacgccgcgctgttccagcttggcagcgccccagccgtgtgctggatagtttgcactacgctgaagctgcagatggagaagggggaagatcccgtccccacatgcctgacccggactggactgtttctgcgcttcctttgctctcggttcccacagggtgctcagctgcggggggcattgcggaccctgagcctactggcagcacaaggcttgtgggcccagacctccgtgctccatcgcgaggatctcgaaagactgggcgtgcaggaatccgatctgcgactgtttctcgacggagatattctgcggcaggacagagtctccaaggggtgttatagttttattcacctgagcttccaacagttcctgacagctctgttttatactctggaaaaagaggaggaggaagatcgagatggccacacctgggatattggtgatgttcagaagttgttatcaggcgtggaacggctgcgaaaccccgacctgattcaggctggctattatagcttcggacttgcgaacgaaaagcgtgcaaaggagctagaggcaaccttcggatgtaggatgtccccagacattaagcaggagcttctgagatgtgacatttcatgcaagggtgggcactccaccgtaaccgatctgcaggaactgctgggatgtctctatgagtctcaggaagaggagctggtgaaggaggttatggctcagttcaaggagatctctcttcatctcaacgctgtcgacgtggttcctagctcattctgcgtcaagcattgtcgcaacttgcagaagatgagtctccaggttatcaaagaaaatcttcctgagaatgttactgcatccgagtccgatgcagaagtcgaaaggtcccaggatgaccagcatatgcttcccttttggacagacctgtgcagtatttttggcagtaacaaagacttgatgggcctggctatcaatgactcctttctttcagcgagcctcgtccgcattctttgtgagcagatcgcctccgatacctgccacctgcagcgagtcgtgtttaagaatattagtcccgccgacgcccatagaaacctctgcttagccctcaggggccataagactgttacatacctgaccttacagggcaacgatcaagacgatatgtttcccgccctatgtgaagtcctgcgccacccagaatgtaacctgcggtatctgggactggtcagctgttctgctacaacgcaacagtgggccgatctctccctggcccttgaggtgaaccaatcacttacatgtgtgaacctatctgataatgaactgcttgacgagggggcgaagctgctatatactacactgcgtcaccccaagtgttttctgcagcggctatcattggaaaactgtcacctgactgaggcaaattgcaaggacctcgccgctgtgttagtggtgtctagagagttaacccatctctgccttgccaagaacccgattgggaataccggcgttaagttcttatgcgaaggtctgcgctatcctgaatgcaagttgcagacacttgttctgtggaattgtgacattacatctgacggatgttgcgatctcacgaagcttttgcaggaaaagtccagcttgctctgccttgatcttggactgaatcacatcggtgtgaaggggatgaagtttctatgtgaggcccttcgaaaacctctgtgtaacctccgctgtctctggctgtggggctgttctattccacccttttcctgtgaggacctgtgttcagcactttcttgcaaccagtcattggtgactctggaccttgggcagaacccgctaggttccagcggagttaagatgctatttgagactctgacctgcagtagcggcacactgcgcacactgcgtctgaaaatcgacgatttcaacgatgagctcaataaattactcgaagaaatagaggagaaaaacccccagcttattatcgataccgagaaacaccatccttgggccgagagaccctcatcccacgactttatgatttag

SEQ ID NO: 69167 - DNA, 3123 bp, Artificial Sequence
  derived and/or modified sequence
atggtcagttccgcgcagatgggctttaatctgcaggcccttctagagcagctttcacaggacgagctatctaagtttaaatacctgattacaacgttttcactggcacatgaattgcaaaagataccgcacaaagaagtggataaggccgatggcaaacaattggtcgaaatcctgactacacattgtgattcctactgggtggaaatggcctcccttcaggtgtttgagaaaatgcaccggatggatctgtcagagagagccaaagatgaggtgagggaggccgcattgaagtctttcaataagcgtaagccactgtctctggggatcacgaggaaggagcgtccacctctcgacgttgatgagatgttagagcggttcaagaccgaagcccaggataaggacaatagatgcagatatatccttaaaactaagttccgggaaatgtggaaatcatggcccggagatagcaaggaggtgcaagtgatggccgaaagatataaaatgttaattcccttcagcaacccgagggtcctaccagggccattcagctataccgtcgtcctctatggccctgccggtcttggtaagaccacgctagctcaaaaactgatgcttgattgggctgaggataacctcatccacaaatttaaatacgcattctacctcagctgccgggagctgtcccggcttggtccatgttctttcgcagaactggtgttcagggattggccagagttgcaagatgatatccctcatatcctcgctcaggcccgtaagattctgttcgtcatcgacggatttgatgagctgggagccgctccaggtgctctcattgaagacatttgcggcgactgggaaaaaaagaagcctgtgcccgtactgctgggctctctgctcaacagagtgatgttgccaaaggctgccttactggtcaccactaggcctagagcactgcgcgacctgcgcatcctggccgaggaaccaatatatattagggtcgaggggttcctcgaggaagatagacgtgcttactttctgagacactttggcgatgaggaccaagccatgcgggcttttgagcttatgcggtccaacgcggcactcttccagctgggcagcgctcctgccgtttgttggatcgtttgcacaacgctgaaattgcagatggagaagggtgaagatcctgttcccacatgcctgacgcggaccggcctgtttctgcgctttctatgctctcgcttcccacagggcgctcagctgagaggagctttgagaactctgtcgcttctcgccgcacagggcctctgggcgcagacctctgtcctacatagggaggatcttgagaggcttggagtccaggagagtgacctacggctcttcctcgacggcgacattctccggcaggatcgggtgtcgaaaggatgctacagttttatacatttgagttttcagcagttccttactgccctgttctacacccttgaaaaagaagaggaagaagatcgggacggacacacctgggacataggcgatgtgcagaaactgctttcaggtgtcgagagactcagaaacccagatctcatacaggctggatattactcctttggtcttgcgaatgagaaacgcgctaaggaattagaagccacgtttgggtgtcgcatgagcccagatatcaagcaagagcttttaaggtgtgatatttcctgcaaaggaggacactctaccgtaaccgatcttcaggagcttctcgggtgcctgtacgagtcgcaagaggaggaattggtaaaggaggtgatggcccagttcaaggagatctctctgcacctcaatgcagtagatgtggtgccaagtagtttctgcgtaaagcactgtcggaacttgcagaaaatgtcactgcaagtaatcaaagaaaacctgcctgaaaatgtgacagcgagcgagtccgatgcagaggtcgagcggtcccaggacgaccagcacatgctcccattttggactgacctctgttccatttttggcagcaacaaagacctcatgggcctggctattaacgattcatttctgagtgccagccttgttcgaatcttgtgcgagcagatagccagtgacacttgtcaccttcaacgggtcgtgttcaagaacatctcccctgccgatgcccaccgtaacctttgtctggctctaagaggccacaaaactgtcacatatctgacgctgcagggcaacgatcaagatgacatgtttcctgcactgtgtgaggtactgcgccatcctgagtgcaatctccgttatctgggattagtttcatgtagcgccaccacgcagcagtgggctgacctttcattggcccttgaagtgaaccaatcactgacatgcgttaatctatccgacaacgagctgttggacgaaggcgctaagctgctctataccaccctgaggcaccctaaatgtttcctgcagaggttaagcttggagaactgccatctgacagaggccaactgcaaagatctggctgccgtcctggtggtctcacgggaactcacgcatctgtgtttggccaagaatcccatcggaaatactggggtgaagttcttgtgtgagggcttgcgatacccagagtgcaagcttcagacactcgttctgtggaactgcgacattactagcgatggatgctgcgacctgaccaaactcctacaagagaagtctagccttctgtgtctggatctgggattgaaccatattggtgttaaggggatgaagtttctgtgcgaggccctacggaaaccgctgtgcaaccttcgatgcctgtggttgtggggatgttctatccctccctttagctgtgaggacctgtgtagcgccctttcgtgcaaccaaagcttagtgacacttgacctgggccagaatcctctgggtagctctggggtaaaaatgctctttgagaccctcacctgctcctccggtaccctccggacactgaggctgaaaattgacgattttaacgacgagctgaataaactgttagaagaaatcgaagagaagaatccacagctcatcatcgacactgagaagcatcacccatgggccgaacgaccttcgagccatgattttatgatttag

SEQ ID NO: 69168 - DNA, 3123 bp, Artificial Sequence
  derived and/or modified sequence
atggtgagtagtgcccagatgggcttcaatttacaggccctcctggaacagctgtcccaggacgaactctccaagttcaagtacctgattacaacattctcccttgcccacgaacttcagaagatcccccacaaagaagtagataaggccgacgggaagcagttagttgagatactgaccacacattgtgactcatactgggtggagatggcaagcctgcaggtattcgaaaagatgcatcggatggatctgtctgagcgtgccaaggacgaggtgcgcgaagcagcgttgaaatcgtttaacaagcgcaagcctctgagcctgggaataacccgaaaggagagacccccactggacgtggatgaaatgctggaaaggtttaaaacagaagctcaagacaaggacaaccggtgccgctatatactgaagaccaagtttcgggagatgtggaagagttggcccggtgatagtaaagaagtccaggtgatggctgagcggtacaaaatgctgatcccctttagtaatccacgtgtgctgccaggcccttttagttacacagtagtgctgtatgggcctgcagggttaggtaagaccactctagcccagaaactgatgctcgattgggcagaggataatctgattcacaagttcaagtacgcattttacctgtcttgtcgtgagctatccaggctgggcccttgctcttttgcagaactggtgttccgggattggcccgaactgcaggatgatattccgcacatcctagcccaggctaggaagatcctgttcgtcattgacggtttcgacgaactgggagcagcaccaggtgccctgatcgaagatatttgtggggattgggaaaagaagaagcctgtccctgtcctgctcgggtccctgttaaatagagttatgctcccgaaagctgcgctgctcgtgacaaccaggccaagagcactgagggatctgcgcatcctcgccgaggagcccatctacattcgggttgagggatttctggaagaggaccgcagagcctatttcttacggcatttcggcgacgaagatcaagcgatgcgggcatttgaactcatgcggtcaaacgcagctctgtttcagctggggtccgcacccgcagtgtgttggatcgtgtgtaccaccctgaagctgcagatggaaaagggggaggatcccgttcccacttgtctgaccaggaccggtctgtttctgcggttcctgtgctctagatttcctcaaggggcacagcttcggggtgctctgcggactctgtcattgttggccgctcagggcctgtgggcacaaacttctgtcttacacagggaagacttagaaagactgggagtccaagagagtgatctgcgcctctttcttgacggcgacattctccggcaggaccgtgttagcaaggggtgctactcttttatccatctctcctttcaacagttcctcacggccctattctacacactcgagaaggaagaggaagaggatagggacgggcatacctgggatattggcgatgtccagaaactactttctggagtcgagaggctgcgaaaccctgatctaatccaggctggttattatagttttggattagctaacgagaaacgggcaaaagaactggaagctacattcggttgccgaatgagccctgacatcaagcaggaacttcttagatgtgatatcagctgcaaaggtggacactctacagtaactgatctgcaggagcttctcggctgtctgtacgagagccaggaggaggaacttgtgaaggaagtcatggcacagttcaaggaaatcagcctgcatctgaacgcggtggacgtggtaccaagctctttttgcgtgaaacattgccggaacctccagaagatgagcctgcaggtaataaaggagaaccttcccgaaaacgtaacagcatccgaaagcgatgccgaggtcgaaaggtcccaggacgatcagcacatgctgccattctggaccgacctttgttcaatctttggaagtaataaagacctgatgggcctagctataaatgacagctttctctcagcctcactcgtacgcatcttgtgcgaacaaatagcatccgacacatgtcaccttcagcgtgtggttttcaagaatatttcaccggctgatgcccatcgaaacctgtgcctggcactccgaggacacaaaacagttacttacctgacactgcaagggaacgatcaggacgacatgttcccagcgctctgcgaagtcctgaggcatccagagtgtaacctgcgatatctgggcctagtgagttgctctgccacaactcagcagtgggctgacctgtcgctcgcccttgaggtaaatcagtccttaacctgtgttaatctgagcgataacgagctccttgatgaaggtgccaagctgctgtatacaaccttgagacatcctaagtgcttcctacagaggcttagtcttgagaactgccatctcacggaagcaaattgtaaggatttagcagctgtgcttgtggtgagtcgtgagctgactcacctttgcctggcgaagaatcctatcgggaacacaggagtgaagttcctctgcgaaggtctccgttacccagaatgtaagctgcagactctggttctgtggaactgcgacataactagcgacggatgctgcgatttaaccaagttactccaggagaaaagttctctcctgtgcctcgacctcgggcttaatcatatcggagtaaagggaatgaagttcttatgcgaagccctccgaaagcctttgtgcaacttaaggtgtttatggctttggggctgcagcatacctcctttttcctgtgaggacctgtgcagtgcactttcctgtaaccagtcactggtgaccttagatctgggtcaaaacccacttgggagttctggagtgaaaatgctgttcgaaactctgacatgttcctctgggactctgcggactcttagactgaagattgatgatttcaatgatgagttgaataaactcttggaggagattgaagaaaaaaatcctcaacttatcattgacacggaaaaacaccatccttgggccgagcgcccttcgagtcacgattttatgatttag

SEQ ID NO: 69169 - DNA, 3123 bp, Artificial Sequence
  derived and/or modified sequence
atggtgtctagcgctcagatgggtttcaatctccaggcactgctcgagcaactatcccaggacgaactgtcaaagttcaaatacctgattaccacctttagtcttgcacacgaactgcaaaagatcccgcacaaagaagtcgataaagccgatggaaagcagctcgtagagatcctgactactcattgcgactcatactgggttgagatggcttcactacaggttttcgaaaaaatgcacagaatggatctgtccgagagagctaaagatgaagtcagggaagctgcgctgaaaagcttcaacaaacggaaaccacttagccttggcataaccaggaaagaaaggccgccattagacgttgacgaaatgcttgagagatttaaaacagaagctcaggacaaagataaccgctgccgctacattctgaaaacaaaattcagggagatgtggaagtcatggccaggagactccaaggaggtacaggtcatggccgagaggtacaagatgttgatacccttcagcaacccgcgagtgctgccaggcccattcagctatactgtggttctgtacgggccagcgggattgggtaaaaccactctggcccagaagctgatgctagactgggcagaagacaacctgatccacaaatttaaatatgcattttacttatcttgtcgggagttgagccgcctaggcccttgcagtttcgctgagctcgtcttccgggactggccagagcttcaagatgatattccacacattctggcccaggctcgtaagattctgttcgtaatcgatgggttcgacgagttgggggcagctccgggtgcactgatcgaggacatttgtggtgactgggagaagaaaaaacccgtgccagtgcttctcgggtccctgctgaatagagtgatgctgccaaaggccgcactgctcgtcaccacaagaccccgtgcactgagagatctgcggatcctggctgaggaaccaatatatatccgcgtcgaggggtttttggaagaagatcgcagggcctactttcttagacacttcggggatgaagaccaggcaatgagggcttttgaattgatgcgcagtaacgccgctttgttccaactggggtcagctcccgcagtgtgttggattgtttgtaccaccctgaaactgcagatggaaaagggggaagatcccgtacctacgtgcttgactagaacagggctcttcctccggttcttatgcagcaggtttccccagggtgcgcagctgcgtggggctttgcgcaccctgagcttactggcggctcaaggcctatgggctcagacatccgtattgcatcgggaggatctggagcggttgggggttcaggaatctgatcttcgattgttcctggatggtgacatattgcgccaggaccgcgtgagcaaaggatgctattccttcattcacctgtcctttcagcaatttctaaccgcactgttctacacccttgaaaaggaggaggaggaagaccgtgacggacacacgtgggatattggcgacgtgcaaaagttacttagcggtgtggagcggctacgcaaccctgacctgattcaggccggttactatagcttcggcctggctaacgaaaagcgtgctaaggagctggaagctacctttggttgtcgtatgtcaccagacattaaacaggagttgctccgatgcgatattagctgcaagggcggacactccaccgttactgatctccaggagctgctggggtgcttgtatgagtctcaagaggaggagctcgtcaaggaagtcatggcccagtttaaggaaatcagccttcatctcaacgccgtggatgtggtcccttcatccttttgcgtgaaacactgtcggaacctgcagaagatgagtcttcaggtgattaaggagaatttgcccgaaaatgtcactgcaagcgaatcagatgccgaggtggaaagatcacaggacgatcagcacatgcttcctttctggactgatctgtgtagcatcttcggatcaaacaaagacttgatgggtctcgctataaacgattcctttttgagtgccagcctggtcaggattctctgcgagcagatcgcgtccgatacatgccacttgcaaagagttgtgttcaagaacatcagtcccgctgacgctcaccgtaacctctgcttggccctgcgcggacacaagactgttacttacctaacactgcaggggaacgatcaagatgatatgtttcctgcactatgtgaggtgttacgccaccccgagtgcaacctccggtacttgggactggtgagttgttcagccacaacccagcaatgggccgatcttagcctggccctggaggtgaatcaatcattgacctgcgtgaatctgtcagacaatgagctcctggacgaaggagccaaactcctgtacactaccttacgtcaccccaagtgtttcctacagcggctgtcactcgaaaactgccaccttacagaggccaattgtaaagatctggcagccgttctggtcgtcagccgcgagttgacacatctctgtttggccaagaatcccattggtaatactggcgttaagtttctctgcgaagggttgagatatcccgaatgcaagctgcagaccctcgtgctgtggaattgcgatattacttctgatgggtgctgtgatttgacaaagctcctgcaggagaagtcatctctattatgtctcgacttggggcttaaccatatcggagtcaagggcatgaagttcttgtgcgaggccctcagaaaacctctatgcaatctgcgctgcctttggctgtggggatgcagcattcccccatttagctgtgaagatttgtgctctgcactgagttgcaaccagagtctggtcacgctggatctcgggcaaaatccactgggatcgtccggagttaagatgttgtttgagacacttacatgtagctccggcacactgcgtacactgcgtcttaagatcgatgacttcaatgacgagctcaacaagctgttagaggagattgaggaaaagaaccctcagttgattatagatacagaaaaacatcacccctgggctgagcgaccctcatctcatgacttcatgatttag

SEQ ID NO: 69170 - DNA, 3123 bp, Artificial Sequence
  derived and/or modified sequence
atggtttcctcagctcagatgggctttaacctccaggcgttgttggagcaactgtctcaggacgagctcagtaaattcaaatacctgatcacaacgtttagcctcgcacatgagttacagaagattcctcacaaagaggtggacaaggccgatggcaaacagctcgttgagatattaaccacccactgtgattcatattgggtagaaatggcctcactgcaggtattcgaaaagatgcatagaatggatctgtccgagagggctaaagacgaagtgcgtgaagccgcactgaagtcatttaacaaaagaaagccactaagcctgggaatcacccggaaagagaggcccccactcgacgtggacgaaatgctcgaacgatttaagactgaagcccaggataaggataacagatgccggtacattctcaaaactaagttccgggagatgtggaaatcctggccaggggatagcaaagaagtgcaggtcatggctgagaggtacaaaatgctgatccccttttcaaatccacgcgtcctgcccggacccttttcatatacagttgtgctctacggtccagccggactcggcaagacgacactggcccagaaactgatgctagactgggctgaggataatctcattcacaaatttaaatatgctttctatctctcctgccgagagctgtcaagactgggcccatgttctttcgccgagctggtctttcgggattggccagaactgcaagacgacatacctcacattttggctcaggcacggaagatcttgttcgtaatcgacggtttcgacgagctaggagctgcccctggagctctgatagaggatatctgtggtgactgggagaagaagaagccggtaccggtgctactcggatccctattgaaccgagtgatgctgccgaaggcagctctgctggtgaccaccagacctagggctctgcgcgacctacggatcctcgccgaagagcctatctatatccgcgttgaggggttcttggaagaggaccggagggcgtattttttaagacacttcggcgacgaggatcaggcaatgcgggctttcgaactcatgagatctaatgcggcactgttccagctgggctcagcccctgctgtgtgctggattgtttgcactaccctcaaactccaaatggaaaagggagaagaccccgtcccaacttgtctcactcgcaccggattgttcctgagattcttatgctccagatttccacagggggcacagctgaggggggctctgagaaccttatcactgctggccgctcagggcctctgggctcagaccagcgttctacacagagaggatctggaaagactaggcgtccaggagtctgatcttcggctgtttctcgacggcgacattctccgccaggatagggtgtccaagggatgctactcattcatccacttgtcttttcaacagttcttaactgcactgttctacactttggaaaaggaggaagaggaagatcgcgacggacacacatgggatatcggtgatgttcaaaagctgctttccggcgtggagcgcttacgcaatcccgacttaatccaggccggatattacagcttcggtctggctaacgagaagcgggcaaaggaactggaagccactttcggctgtcgaatgtcgccagacatcaaacaggaactgcttcgctgcgacatttcatgtaagggcggtcatagcactgtcactgacctacaggaactcttaggctgtctgtatgagtcccaggaagaagaactcgtgaaggaggttatggctcagtttaaagagatctccttacacctgaacgctgtcgatgtggtacctagctctttctgcgttaaacactgcagaaatctgcagaaaatgtcccttcaggttatcaaggagaacctgcctgagaatgtgaccgcatctgaatccgacgccgaggtagagcggagtcaggatgaccaacacatgctgcctttttggacagacctatgctccatctttgggtctaataaagacttgatggggttagctattaatgactcctttttgagtgcatctctcgtgaggatcctgtgcgagcaaatcgcatccgatacatgtcatctgcaacgggtggttttcaagaacatttccccagcagacgctcataggaacctatgccttgccctcaggggccacaagacagtcacttatctaaccttgcagggcaatgatcaggacgatatgttcccagccctctgcgaggttctcagacacccggagtgcaacctgcgctaccttggcctggtttcatgctctgctaccacccagcaatgggcagatttgagcctcgcccttgaggtcaatcagtccctcacctgtgttaacctgagcgacaacgaactccttgacgagggggctaaactgctctatacaaccttacggcaccctaagtgttttttacagcggctcagcctggaaaattgccatctgaccgaagccaattgtaaggacctagccgcagtgctggtggtcagccgcgaattgacccacctctgccttgccaagaacccaattgggaacaccggagttaaattcctgtgtgagggactgcgctatcccgaatgtaaactgcagactttggtcctttggaactgtgatattacctctgacgggtgctgcgacctgactaaactcttgcaagaaaagagcagcctgctgtgtctggacctagggctcaatcacattggcgtcaaaggaatgaagtttctgtgcgaagctctgaggaaaccgctgtgtaatttgaggtgtttgtggctttggggatgcagcattccaccattttcatgtgaggacttatgctctgctttgtcctgcaatcagagcctggtcacacttgacctgggacaaaaccctttgggatccagtggcgtgaaaatgctgtttgagacactgacatgctccagtggcactctgcgcactctgaggctgaagatcgacgacttcaacgatgagctgaacaagctcctggaagagatcgaagaaaagaatccacaattaattattgacacggagaaacaccatccatgggccgagagaccctctagccacgatttcatgatctag

SEQ ID NO: 69171 - DNA, 3123 bp, Artificial Sequence
  derived and/or modified sequence
atggtatcgtcggcacagatggggttcaatctccaggccctgcttgagcagctgagtcaggacgaactgtcaaagttcaagtacctgattacgactttttctctggctcacgagctccagaagattccgcacaaagaagtcgataaggctgatgggaagcagctggtggaaatcctgactacacactgcgacagctactgggtcgagatggcttccctccaagtgttcgagaagatgcataggatggacttaagcgaaagggccaaagacgaagttagagaggcagctctcaagtcctttaataaaagaaaacctctgagcctgggcatcactcggaaagaacgaccgcctctggatgtggacgaaatgctagaaaggtttaagacagaggctcaggataaagataatcggtgtcgctacatcctgaaaaccaagtttagggagatgtggaaaagttggcccggtgacagtaaggaagtgcaagtgatggcggaaagatataaaatgctcattccattttcaaaccccagagtgcttccagggcctttcagctacacagtagtattatatggacccgcaggtctgggcaaaacaaccctcgcccagaaactgatgctggattgggcagaggataatctgatacacaagtttaagtatgctttctacctaagttgcagagagttgtctcgccttggaccctgctcattcgctgaactagtgttcagggattggcctgagctccaggacgatatcccccacattctagcccaggctagaaagattctgttcgtcatcgatggattcgatgagctcggcgctgcccctggcgcactcatcgaggacatctgcggggactgggagaagaagaagcccgtcccagttctattagggtctttgctgaatcgtgtgatgctcccaaaggcggcactgctcgtcacaacacggcctagagcgctccgcgacctgcggatcctcgctgaggagcccatttatataagggtggagggatttctggaggaggatcggagagcttatttcctgaggcattttggggatgaggatcaagcgatgagagctttcgagctgatgcgctctaatgcagccctttttcagctgggttccgccccagctgtgtgctggatagtgtgcacaacactcaagctgcagatggagaagggagaggacccggtgcccacatgtttgacgcgaactggcctgtttttgcgcttcctgtgtagtagatttcctcagggggcacagctgcgtggagccctgcgcactctcagccttctagccgctcagggcctgtgggctcagacgtccgtcttgcatcgggaggacttggagcgcctgggcgtgcaggaaagcgacttgcggctgtttctggatggggacattctgaggcaagaccgcgtctcaaaaggctgttacagtttcatccatctgagctttcagcagttcctgacagcactgttttacacgttagaaaaagaagaagaggaggacagggacgggcacacctgggacatcggggatgtgcagaagcttctgtcaggcgttgagcgcctgcgaaaccctgacctgatccaggcaggatactatagttttggtcttgccaatgagaaacgggcaaaagaactcgaggctacattcggatgtcgcatgtcccctgacattaaacaggagctgctaaggtgcgatattagctgtaagggcggacattcaacagtgaccgacttacaggagcttctggggtgcctgtacgagagtcaggaggaagaactggtaaaagaggtcatggcacagtttaaagagatctctctccacctcaacgccgttgatgtcgtcccatcttcattttgcgttaagcactgcaggaacctgcagaagatgtcattacaggtcattaaagagaatctccctgagaacgtgaccgcctcagagagcgacgccgaagtcgagcggtctcaagacgaccagcacatgctccctttttggaccgacctttgtagcatttttgggtctaacaaagacctgatggggctagccatcaacgatagcttcctctcggccagtctggtgaggatcctttgcgagcaaattgcttcagatacctgccatctgcaaagggtggtgttcaagaacataagcccggctgatgcccatcgcaatctttgcctcgctttgagagggcacaaaaccgtaacctacctgacactgcagggcaacgaccaagacgacatgtttccagccttatgcgaggtcctgaggcacccggaatgtaacctcagatacctcgggttggtgagctgcagcgcgactacacaacagtgggctgatctgtctcttgctctggaagtgaaccagtcactgacatgcgtgaatctatccgataatgagttgctggatgaaggggctaaactcctctatactaccttgagacatccaaagtgcttcttgcagagactgtctctcgagaactgccacctgacagaagccaactgcaaagacctggccgcagttctggtggtctcccgggaactcacacatctctgccttgctaaaaatccaatcggcaacacaggcgtcaagttcctgtgcgaaggattgagataccccgagtgcaaactgcaaacgctcgtgctgtggaactgcgatattaccagtgacggctgttgtgatctaaccaagttgttacaggaaaagtccagcctcctgtgtctggatctgggacttaaccacatcggtgtaaagggcatgaagtttctatgcgaggccctccggaaacccctgtgcaacctgcggtgtctgtggctgtggggatgctccattcctcccttcagctgcgaagatttatgttcagctctgtcctgcaaccagagcctcgtgactctggatctcggacagaaccctctgggatcaagcggcgtgaagatgttgtttgagactctcacctgttcctctggcaccttgcgcactttaaggttgaagattgacgactttaacgacgagttaaacaagctgctggaagaaattgaggagaagaacccccagctgattatcgacactgaaaagcaccacccctgggccgagagaccatcctcacacgattttatgatctag

SEQ ID NO: 69172 - DNA, 3123 bp, Artificial Sequence
  derived and/or modified sequence
atggtcagttccgctcagatgggttttaacctgcaggctctcctggaacagctttctcaagatgaattgagcaaattcaagtacctcattacaaccttttctctggcccacgaactgcagaagatcccccacaaagaggtcgataaagcagatggcaaacagctcgtggaaatcctgactacccactgtgactcctattgggtagaaatggcaagcctccaagtgtttgagaaaatgcacagaatggacctgtccgagagagcaaaggatgaagtgagagaagcggcactcaagtcatttaacaaacgcaaaccgctgtctctcggaatcactaggaaagaacgccctccgttggacgttgatgaaatgctggagaggtttaaaacagaggcacaggacaaagacaacaggtgccgctatattctcaagaccaaattcagggaaatgtggaaatcctggcctggcgactccaaggaagtgcaagtgatggccgagagatataagatgcttatcccttttagcaaccctagagtgttgcccggacctttttcttacacagtcgtcctgtatggacctgccggactcggtaaaacgaccttggcacagaaactaatgctcgactgggccgaggacaacctcatccataaattcaaatacgccttctatctgtcctgtcgtgagttaagtaggttaggcccttgttcctttgctgaactggtgtttcgggactggccagaactgcaggatgatattcctcatatcctggcccaggccaggaagattctctttgtgatcgacggcttcgacgagctgggagccgctcctggcgctctaattgaggacatttgtggcgactgggagaaaaaaaagcccgtgccagtattgcttggttcccttctcaaccgtgttatgctgcccaaggctgcgttgcttgtcaccacccggccacgggctctgagagacctgaggattctcgcagaggagcctatttatatccgggtcgagggtttcctggaggaggaccggagggcgtattttctgcggcactttggagacgaggatcaggcaatgcgcgcatttgagctgatgcgatctaatgcagccctgttccagctcggcagcgctcctgcggtctgctggatagtgtgcacaaccttgaaactccagatggaaaaaggcgaagaccccgtgcctacctgccttacgcggacaggactgttcctccgcttcctgtgcagcaggtttccccagggggctcagctgcggggagccctgcggacattgtccctccttgccgcacagggcctgtgggcccaaacgtcggtgctccatcgcgaggacctggaacgccttggagtgcaagaatccgatctccggctgtttttggacggcgacattttacgacaggaccgcgtatccaaaggatgctattctttcatacacctcagttttcagcagttcctcaccgctcttttttatacacttgaaaaggaggaggaagaggatcgcgacggccacacctgggatattggcgatgtgcagaagctgctgtccggagtggaacgactgcggaatccagacctgatccaggccggatactactcttttggcctcgcaaacgagaaacgagcaaaggagttggaggccacgtttggctgtagaatgtctccagatattaaacaagaactgctgcgatgtgacatcagctgcaaaggaggtcattccaccgtcactgatctccaagagctcctgggctgcctgtatgagtcccaggaagaggagctggtgaaagaagtcatggcacaatttaaagagatcagcttgcacctgaatgccgtggacgtggtgccgtcttctttttgcgtcaaacactgccggaacctgcagaagatgtccttacaagttattaaggaaaatctccccgagaatgtgaccgcatcagaatctgatgccgaagtcgagcgcagccaggatgatcagcacatgcttcctttttggactgacctgtgttccattttcggtagtaacaaagatctgatggggttggccatcaatgactcctttctgtctgcctctttggtacgcatcttatgtgagcagatcgcgagcgacacatgtcaccttcagcgtgtcgtttttaaaaacatctcaccagccgacgcccatagaaacctttgcttagccctgaggggacataagacagtgacctatctaacactgcagggaaacgaccaggatgacatgtttcccgcattgtgcgaggttctgcgtcaccctgagtgcaacttgaggtatctgggattagtttcttgttcggccactacacagcagtgggctgacctatcacttgctctagaggtcaatcagtccctgacttgcgtgaatctgagcgacaacgaattattggacgagggtgctaaattgctgtacacaaccctgaggcacccaaagtgcttcctgcagcggcttagcctggagaactgtcacctgactgaggcaaattgcaaggacctagctgcagtcctcgttgtcagtagggagttgacacacctctgtcttgcaaagaatcccatcggaaatactggggtcaaatttctgtgtgagggcttaaggtatcctgaatgcaaactgcaaacactggtgctctggaactgcgatatcaccagtgatgggtgttgtgacctcactaagctgctgcaggaaaagtcatccctgctgtgtctcgacctgggcctaaaccatataggcgtgaaaggtatgaaattcctgtgcgaagccctacgtaagcctctctgtaatctccgatgtctgtggttgtgggggtgttccatacctcctttcagctgtgaagatctttgctctgctctgtcatgcaatcagagcttagtcacactggacctgggtcagaatcccttgggcagcagcggggtgaagatgcttttcgagaccctgacctgttcaagcggtacattacggaccttacggttgaagattgacgacttcaacgatgaattgaataagttgttggaagaaattgaagagaaaaacccacaactgattattgacactgaaaagcaccatccttgggcagagcggccaagttctcatgactttatgatctag

SEQ ID NO: 69173 - DNA, 3123 bp, Artificial Sequence
  derived and/or modified sequence
atggtctcctcggcccagatggggtttaatctccaggccctcctggaacagctgtcacaggatgagctatccaagttcaagtatctgattacaacctttagtctggcccatgaactgcagaagatcccccacaaagaggtggataaggcagatggtaagcaattagtagagattctcactacccattgcgattcctattgggtggaaatggcaagcttgcaggtgtttgaaaaaatgcacagaatggacctttccgagagggcgaaagacgaggtgcgcgaagctgcactgaaatcttttaataaaaggaagccactgtctctgggcattactcgcaaagaacggccaccccttgacgttgatgagatgctggaacggttcaagaccgaagcccaggacaaggacaacagatgtcggtatatactcaaaactaaatttcgggagatgtggaagtcctggccgggagattctaaagaggtgcaggtcatggccgaaagatacaagatgctcatccccttctctaacccgagagtgcttcccggaccattctcctataccgttgtcctgtatggcccagccggactgggaaagacaaccctcgctcagaagctcatgttggattgggccgaagacaatttgatacacaaatttaagtacgcattttacctgtcctgcagggagctgtcacgactggggccttgttcattcgctgagcttgtgttcagagactggcccgagctgcaggatgatataccgcacatcttagcccaagcaaggaagatcctgtttgttatcgacggctttgacgagctcggggcagcccctggagcacttatcgaagatatatgcggtgattgggagaagaaaaagcctgtgcccgtactgctgggcagtctgctcaacagggtaatgcttcctaaggcggcactgctggttaccacccgccctcgcgcattgcgagatctacggattttagctgaagagccaatttatattagggtggagggttttttagaggaagaccggagggcctactttttacggcacttcggcgacgaggatcaggccatgcgagccttcgaactaatgaggtccaacgcagctcttttccagctgggaagcgctcccgctgtttgttggatcgtatgcacaaccctcaaactgcaaatggagaagggagaggacccagtgcctacctgcttgaccaggaccggtctgttcctgcgatttctgtgtagcagatttccgcaaggcgctcagctgcgcggtgccctaagaactctgagcctgctggcagcacaagggctgtgggcccagacatcggtcctgcatcgtgaagacttggagcggctgggtgtccaagagtccgatttacgtctctttttggacggggacatacttcgccaagatcgcgtgtccaagggttgctacagttttatccacctgagctttcaacaatttctaacagcccttttttacaccctggagaaggaggaggaggaggatcgagacggacatacatgggatatcggggacgtgcagaagctcctctcgggagttgaaaggctcaggaatccagacctgatacaggccggatactattcattcgggcttgccaatgaaaagagagccaaggagttagaggcaaccttcggttgtcgcatgagccccgacattaaacaggagttgctgaggtgcgatatctcttgcaaaggagggcattcgaccgttactgacctgcaggagctattggggtgtctatacgaatcacaggaggaggagctggtaaaggaagtcatggcccagttcaaagaaattagcctccatcttaacgccgtggacgtcgtgcccagctcattctgcgtgaaacactgccgcaacctccaaaagatgtcactgcaggtgatcaaggagaatctccctgagaatgtaactgccagcgaaagcgacgccgaggtggagcgaagccaagatgatcagcatatgcttcctttttggacggatctttgttccattttcggatctaacaaagacctaatggggctggccattaatgattcctttctcagtgcctccctggttaggattctctgtgagcagatagctagcgacacatgccatctccagcgggtagtgttcaagaatatctctccggctgacgctcacagaaatctttgtctcgctctgcgcggtcacaagacggtcacatatctgacgttgcaaggaaatgaccaggatgacatgttccctgccctgtgtgaggtgctgcggcacccagagtgcaacctcaggtaccttgggctggtgtcttgttccgcaacgacacaacaatgggcggatttgtcgctcgcattagaagttaaccaatccctcacgtgcgtcaatctctccgacaacgaattattggatgagggagcaaaacttctatatacaaccttacgacaccccaagtgctttttacagcggctgtctctggagaattgtcatctcacagaagctaattgtaaggacctggccgctgtgctggtggtgtctagagagttgacccacctttgtttagcaaagaaccccattgggaacacaggcgtgaaattcctgtgtgaaggccttagatatcctgagtgcaaactgcagaccctggtgttgtggaattgcgacattacttcagatggatgctgtgatctcacaaaactcctgcaggaaaaaagttctctgctgtgcctggatctcgggctgaaccacattggggttaaagggatgaaatttctgtgcgaagcgctcagaaagccgctgtgcaatctgcgctgtctttggctctggggatgttcaatcccgccattcagctgcgaggatctgtgttcggccctctcctgtaaccagagcctcgttaccctggacttgggacagaacccattggggtcgtccggggtgaagatgctctttgaaacgcttacttgttcctctggtaccctgcggacactccgcctgaaaattgacgatttcaacgacgagctgaacaaactgctggaagagatcgaagagaaaaatccccaactgatcatcgacacagagaaacatcacccttgggccgaaaggccttctagccacgattttatgatttag

SEQ ID NO: 69174 - protein, 1039 aa, Artificial Sequence
  derived and/or modified sequence
MVSSAQMGFNLQALLEQLSQDELSKFKYLITTFSLAHELQKIPHKEMASLQVFEKMHRMDLSERAKDEVREAALKSFNKRKPLSLGITRKERPPLDVDEMLERFKTEAQAFTETKGNVICLGKEVFKGKKPDKDNRCRYILKTKFREMWKSWPGDSKEVQVMAERYKMLIPFSNPRVLPGPFSYTVVLYGPAGLGKTTLAQKLMLDWAEDNLIHKFKYAFYLSCRELSRLGPCSFAELVFRDWPELQDDIPHILAQARKILFVIDGFDELGAAPGALIEDICGDWEKKKPVPVLLGSLLNRVMLPKAALLVTTRPRALRDLRILAEEPIYIRVEGFLEEDRRAYFLRHFGDEDQAMRAFELMRSNAALFQLGSAPAVCWIVCTTLKLQMEKGEDPVPTCLTRTGLFLRFLCSRFPQGAQLRGALRTLSLLAAQGLWAQTSVLHREDLERLGVQESDLRLFLDGDILRQDRVSKGCYSFIHLSFQQFLTALFYTLEKEEEEDRDGHTWDIGDVQKLLSGVERLRNPDLIQAGYYSFGLANEKRAKELEATFGCRMSPDIKQELLRCDISCKGGHSTVTDLQELLGCLYESQEEELVKEVMAQFKEISLHLNAVDVVPSSFCVKHCRNLQKMSLQVIKENLPENVTASESDAEVERSQDDQHMLPFWTDLCSIFGSNKDLMGLAINDSFLSASLVRILCEQIASDTCHLQRVVFKNISPADAHRNLCLALRGHKTVTYLTLQGNDQDDMFPALCEVLRHPECNLRYLGLVSCSATTQQWADLSLALEVNQSLTCVNLSDNELLDEGAKLLYTTLRHPKCFLQRLSLENCHLTEANCKDLAAVLVVSRELTHLCLAKNPIGNTGVKFLCEGLRYPECKLQTLVLWNCDITSDGCCDLTKLLQEKSSLLCLDLGLNHIGVKGMKFLCEALRKPLCNLRCLWLWGCSIPPFSCEDLCSALSCNQSLVTLDLGQNPLGSSGVKMLFETLTCSSGTLRTLRLKIDDFNDELNKLLEEIEEKNPQLIIDTEKHHPWAERPSSHDFMI

SEQ ID NO: 69175 - DNA, 3120 bp, Artificial Sequence
  derived and/or modified sequence
atggtgagcagcgcccagatgggcttcaacctgcaggccctgctggagcagctgagccaggacgagctgagcaagttcaagtacctgatcaccaccttcagcctggcccacgagctgcagaagatcccccacaaggagatggccagcctgcaggtgttcgagaagatgcacagaatggacctgagcgagagagccaaggacgaggtgagagaggccgccctgaagagcttcaacaagagaaagcccctgagcctgggcatcaccagaaaggagagaccccccctggacgtggacgagatgctggagagattcaagaccgaggcccaggccttcaccgagaccaagggcaacgtgatctgcctgggcaaggaggtgttcaagggcaagaagcccgacaaggacaacagatgcagatacatcctgaagaccaagttcagagagatgtggaagagctggcccggcgacagcaaggaggtgcaggtgatggccgagagatacaagatgctgatccccttcagcaaccccagagtgctgcccggccccttcagctacaccgtggtgctgtacggccccgccggcctgggcaagaccaccctggcccagaagctgatgctggactgggccgaggacaacctgatccacaagttcaagtacgccttctacctgagctgcagagagctgagcagactgggcccctgcagcttcgccgagctggtgttcagagactggcccgagctgcaggacgacatcccccacatcctggcccaggccagaaagatcctgttcgtgatcgacggcttcgacgagctgggcgccgcccccggcgccctgatcgaggacatctgcggcgactgggagaagaagaagcccgtgcccgtgctgctgggcagcctgctgaacagagtgatgctgcccaaggccgccctgctggtgaccaccagacccagagccctgagagacctgagaatcctggccgaggagcccatctacatcagagtggagggcttcctggaggaggacagaagagcctacttcctgagacacttcggcgacgaggaccaggccatgagagccttcgagctgatgagaagcaacgccgccctgttccagctgggcagcgcccccgccgtgtgctggatcgtgtgcaccaccctgaagctgcagatggagaagggcgaggaccccgtgcccacctgcctgaccagaaccggcctgttcctgagattcctgtgcagcagattcccccagggcgcccagctgagaggcgccctgagaaccctgagcctgctggccgcccagggcctgtgggcccagaccagcgtgctgcacagagaggacctggagagactgggcgtgcaggagagcgacctgagactgttcctggacggcgacatcctgagacaggacagagtgagcaagggctgctacagcttcatccacctgagcttccagcagttcctgaccgccctgttctacaccctggagaaggaggaggaggaggacagagacggccacacctgggacatcggcgacgtgcagaagctgctgagcggcgtggagagactgagaaaccccgacctgatccaggccggctactacagcttcggcctggccaacgagaagagagccaaggagctggaggccaccttcggctgcagaatgagccccgacatcaagcaggagctgctgagatgcgacatcagctgcaagggcggccacagcaccgtgaccgacctgcaggagctgctgggctgcctgtacgagagccaggaggaggagctggtgaaggaggtgatggcccagttcaaggagatcagcctgcacctgaacgccgtggacgtggtgcccagcagcttctgcgtgaagcactgcagaaacctgcagaagatgagcctgcaggtgatcaaggagaacctgcccgagaacgtgaccgccagcgagagcgacgccgaggtggagagaagccaggacgaccagcacatgctgcccttctggaccgacctgtgcagcatcttcggcagcaacaaggacctgatgggcctggccatcaacgacagcttcctgagcgccagcctggtgagaatcctgtgcgagcagatcgccagcgacacctgccacctgcagagagtggtgttcaagaacatcagccccgccgacgcccacagaaacctgtgcctggccctgagaggccacaagaccgtgacctacctgaccctgcagggcaacgaccaggacgacatgttccccgccctgtgcgaggtgctgagacaccccgagtgcaacctgagatacctgggcctggtgagctgcagcgccaccacccagcagtgggccgacctgagcctggccctggaggtgaaccagagcctgacctgcgtgaacctgagcgacaacgagctgctggacgagggcgccaagctgctgtacaccaccctgagacaccccaagtgcttcctgcagagactgagcctggagaactgccacctgaccgaggccaactgcaaggacctggccgccgtgctggtggtgagcagagagctgacccacctgtgcctggccaagaaccccatcggcaacaccggcgtgaagttcctgtgcgagggcctgagataccccgagtgcaagctgcagaccctggtgctgtggaactgcgacatcaccagcgacggctgctgcgacctgaccaagctgctgcaggagaagagcagcctgctgtgcctggacctgggcctgaaccacatcggcgtgaagggcatgaagttcctgtgcgaggccctgagaaagcccctgtgcaacctgagatgcctgtggctgtggggctgcagcatcccccccttcagctgcgaggacctgtgcagcgccctgagctgcaaccagagcctggtgaccctggacctgggccagaaccccctgggcagcagcggcgtgaagatgctgttcgagaccctgacctgcagcagcggcaccctgagaaccctgagactgaagatcgacgacttcaacgacgagctgaacaagctgctggaggagatcgaggagaagaacccccagctgatcatcgacaccgagaagcaccacccctgggccgagagacccagcagccacgacttcatgatctag

SEQ ID NO: 69176 - DNA, 3120 bp, Artificial Sequence
  derived and/or modified sequence
atggttagttccgcccagatggggtttaacctccaggccctgctcgaacagctgtcacaggatgagcttagcaaattcaaatacctgatcacaacattcagcctcgcccatgaattgcagaagattccccacaaggaaatggcatctctgcaggttttcgagaaaatgcatcgcatggacctcagcgagagggcaaaggacgaggtccgagaggccgccttaaaatccttcaataagcgaaaaccactgtcattgggcataacaaggaaagagagacctcccctggacgtggatgaaatgctggagaggtttaagaccgaagcccaagcttttaccgaaacaaagggtaacgtgatatgcctaggcaaggaagtctttaaaggaaagaagcccgataaagacaatagatgtcggtacatattaaaaaccaaatttcgtgagatgtggaagagttggccgggtgacagtaaggaagtgcaggtgatggccgagcgttacaaaatgctcataccattcagcaatccacgggtcctgccaggccctttttcttacacagtcgtactatacggtcccgcagggctggggaagactactttagcacagaagttgatgctcgactgggctgaggacaacctgatccataaatttaagtatgccttttatttatcatgtcgtgaattgtcacggctgggcccatgtagcttcgcagaattggtgtttcgcgattggcccgaactgcaggacgatatcccacatatcctggcacaggctagaaagatcctttttgttatcgatgggtttgatgagcttggtgcagcgcctggagccctcattgaggacatctgcggagactgggaaaaaaaaaaaccagtgcctgtgctgctggggagcctgctaaacagagtgatgctgccgaaggccgccctgctggtgactacaagaccaagagcgcttcgagatctccggatactggccgaagagcctatctacattagggttgaggggtttcttgaggaggatcgaagagcctacttcctcagacacttcggcgatgaggaccaagctatgagagcattcgaactgatgaggtctaacgcagcactcttccaactggggagcgccccagcagtttgctggatcgtctgcactacgctgaagctccagatggaaaaaggcgaggatcccgtccctacttgtcttacacgcactggccttttcttacggttcttgtgctctcgctttcctcaaggggcccagctcaggggcgctctgcgcacactcagcttactggcggctcagggcctctgggcgcaaacctcagttctccatcgagaagacctggagagactgggtgtacaagagtctgatctgcggctctttctggatggcgacatcctcaggcaggaccgggtgagtaagggctgttactccttcatacaccttagttttcagcagttcctgacagctctgttctacactctcgagaaagaagaagaagaggaccgtgacgggcatacctgggacatcggcgacgtccaaaaattgctcagtggggtcgagcgcctgcggaaccccgatctgatccaggctgggtactactctttcggactcgcaaacgagaagcgtgccaaggaactcgaggcaacatttggctgccgaatgagcccagatatcaagcaggagctgctcaggtgtgatattagttgcaagggcggacactccacagtcactgacctgcaggagctgctcggctgtctttatgagagccaggaggaagagctggttaaggaggtgatggcccagtttaaggagataagcctgcacctaaacgcggtagacgtggtgccctccagcttctgtgttaagcattgccggaacctacagaagatgagcctgcaggtcatcaaggagaacttacccgagaacgtcacagcgagcgagtccgacgccgaggttgaaagatcccaggacgatcaacacatgctgccattttggaccgacctctgtagtatctttggttccaataaagacttaatggggctcgcgatcaatgattctttcctgtccgctagcctggtgagaatattgtgcgagcagatcgctagcgacacctgtcaccttcagagggtggtcttcaaaaatattagcccagccgatgcgcaccgtaatctgtgcttggctttgcgagggcacaagaccgtaacgtatctcactctccagggcaatgatcaggacgacatgtttccggctctctgcgaggtgctccgacaccctgagtgcaatttacgctacctgggtctggttagctgttccgctacaacacagcagtgggccgacctttcattggcgctggaagtgaaccaaagcttgacctgtgtgaacttatccgataatgaactgctcgatgagggggctaagctcctgtataccacactgagacacccaaagtgttttctgcagaggctgtctctggagaactgccacctgacagaagcaaactgcaaggacctggcagctgtgctcgtcgtgtcaagggaacttactcatttgtgtttagccaagaaccccatcggtaacaccggcgttaagtttctttgtgagggtcttcgctatcccgagtgtaagctgcagacactggttctctggaattgtgacattacttccgatggctgttgtgacctgactaagctgctccaggagaagtcctcccttctttgcctcgatcttggtcttaaccatatcggtgtgaaaggaatgaagtttctctgtgaagccttgaggaagccgttgtgcaatttacgatgcctgtggctgtggggttgcagtatccctcctttctcatgcgaagacctgtgttctgcccttagctgcaaccaaagccttgtgacactagacttgggacagaatcccctcggctccagtggtgtcaagatgctgttcgaaacactgacgtgctcctccggtaccctgcgcacgctgaggttgaaaatcgacgattttaacgacgaattaaacaaactgctagaggagatcgaggagaagaacccccagctgatcattgacacagaaaagcaccatccatgggccgaacggccttcctcacatgactttatgatttag

SEQ ID NO: 69177 - DNA, 3120 bp, Artificial Sequence
  derived and/or modified sequence
atggtgagcagcgcccagatgggcttcaacctgcaggccctgctggagcagctgagccaggatgagctgagcaagttcaagtacctgatcaccaccttcagcctggcccacgagctgcagaagatcccccacaaggagatggccagcctgcaggtgtttgagaagatgcacaggatggacctgtctgagcgggccaaggatgaggtgcgggaggccgccctgaagagcttcaacaagaggaagcccctgagcctgggcatcaccaggaaggagaggcctcccctggatgtggatgagatgctggagcgcttcaagacagaggcccaggccttcacagagaccaagggaaatgtcatctgcctgggcaaggaggtgttcaagggcaagaagccagacaaggacaaccgctgccgctacatcctgaagaccaagttccgggagatgtggaagtcctggccaggggacagcaaggaggtgcaggtgatggccgagcgctacaagatgctgatccccttcagcaacccccgggtgctgcccggccccttctcctacacagtggtgctgtatggccctgctggcctgggcaagaccaccctggcccagaagctgatgctggactgggccgaggacaacctgatccacaagttcaagtatgccttctacctgagctgccgggagctgagccggctgggcccctgcagctttgctgagctggtgttccgggactggccagagctgcaggatgacatcccccacatcctggcccaggccaggaagatcctgtttgtgattgatggctttgatgagctgggcgccgcccctggggccctgattgaggacatctgtggggactgggagaagaagaagcctgtgcctgtgctgctgggcagcctgctgaacagagtgatgctgcccaaggccgccctgctggtgaccacccggccccgggccctgcgggacctgcgcatcctggccgaggagcccatctacatccgggtggagggcttcctggaggaggacagaagagcctacttcctgcggcactttggagatgaggaccaggccatgagggcctttgagctgatgaggagcaatgctgccctcttccagctgggcagcgccccagctgtgtgctggatcgtgtgcaccaccctgaagctgcagatggagaagggagaagatcctgtgcccacctgcctgaccaggacaggcctcttcctgcgcttcctgtgcagccgcttcccccagggcgcccagctgcggggggccctgcggaccctgagcctgctggccgcccagggcctgtgggcccagacctctgtgctgcaccgggaggacctggagcggctgggcgtgcaggagagtgacctgcggctcttcctggatggagacatcctgcggcaggacagagtgtccaagggctgctacagcttcatccacctgtccttccagcagttcctgacagccctcttctacaccctggagaaggaggaggaggaggacagagatggccacacctgggacattggagatgtgcagaagctgctgtctggagtggagcggctgagaaatccagacctgatccaggccggctactacagctttggcctggccaatgagaagagggccaaggagctggaggccaccttcggctgcaggatgagcccagacatcaagcaggagctgctgcgctgtgacatcagctgcaagggcggccacagcacagtgacagacctgcaggagctgctgggctgcctgtatgagagccaggaggaggagctggtgaaggaggtgatggcccagttcaaggagatcagcctgcacctgaatgctgtggatgtggtgcccagcagcttctgtgtgaagcactgcaggaacctgcagaagatgagcctgcaggtgatcaaggagaacctgcctgaaaatgtgacagccagcgagagtgatgctgaggtggagaggagccaggatgaccagcacatgctgcccttctggacagacctgtgcagcatcttcggcagcaacaaggacctgatgggcctggccatcaatgacagcttcctgagcgccagcctggtgcgcatcctgtgtgagcagatcgccagtgacacctgccacctgcagagggtggtgttcaagaacatcagccctgcagatgcccacaggaacctgtgcctggccctgcggggccacaagacagtgacctacctgaccctgcagggcaatgaccaggatgacatgtttcctgccctgtgtgaggtgctgcggcaccctgagtgcaacctgcgctacctgggcctggtgtcctgcagcgccaccacccagcagtgggccgacctgagcctggccctggaggtgaaccagagcctgacctgtgtgaacctgagtgacaatgagctgctggatgagggcgccaagctgctgtacaccaccctgcggcaccccaagtgcttcctgcagaggctgagcctggagaactgccacctgacagaggccaactgcaaggacctggccgctgtgctggtggtgtcccgggagctgacccacctgtgcctggccaagaaccccatcggcaacacaggagtgaagttcctgtgtgagggcctgcgctacccagagtgcaagctgcagaccctggtgctgtggaactgtgacatcaccagtgatggctgctgtgacctgaccaagctgctgcaggagaagagcagcctgctgtgcctggacctgggcctgaaccacatcggcgtgaagggcatgaagttcctgtgtgaggccctgaggaagcccctgtgcaacctgcgctgcctgtggctgtggggctgcagcatcccccccttcagctgtgaggacctgtgcagcgccctgagctgcaaccagagcctggtgaccctggacctgggccagaaccccctgggcagcagcggcgtgaagatgctgtttgagaccctgacctgcagcagcggcaccctgcggaccctgcggctgaagattgatgacttcaatgatgagctgaacaagctgctggaggagattgaggagaagaacccccagctgatcatcgacacagagaagcaccacccctgggccgagcggcccagcagccatgacttcatgatctag

SEQ ID NO: 69178 - DNA, 3120 bp, Artificial Sequence
  derived and/or modified sequence
atggtgagcagcgcccagatgggcttcaacctgcaggccctgctggaacagctgtcccaggacgagcttagcaaatttaaatatctaatcactactttctcactagcccatgaactacagaagattcctcacaaagagatggcctctctgcaagtttttgaaaagatgcatcgcatggacctttctgagcgtgcaaaagatgaggtccgggaagccgccctgaagagttttaacaagcgaaagcctctgtctcttggcataactcggaaggaaaggcctccactggacgtggatgagatgttagaaaggttcaaaacggaagcacaggcgttcacagaaactaaaggtaatgtcatctgtttaggaaaggaagtatttaaaggtaaaaagccagataaagacaacagatgtcggtacatcctaaaaactaaattccgggaaatgtggaagtcttggccaggagattccaaggaggtccaggtaatggccgaacggtacaaaatgctaatcccattttccaacccaagggtgctgcccgggccattttcctatactgtggtgctgtatggccctgccggactcggtaagaccaccctggcccagaagctgatgttggattgggccgaagataaccttatccataagttcaaatacgccttctatctgtcctgccgtgaactctcccgccttggaccatgcagttttgcagagcttgtgttccgagactggccggaacttcaggatgatatccctcacatcctggctcaggctcgtaagatactattcgtcatcgacgggttcgatgagttgggcgccgcgcccggggctctgattgaggatatttgtggcgattgggagaaaaaaaaacccgttcctgttctattgggctcgctgctgaatcgcgtgatgctaccaaaggctgcacttctggttacaaccaggccacgggccctgcgcgacctgcggatactagcggaagagccgatctacattcgagtggagggtttcctggaggaagatagaagagcatactttctgcgacacttcggagatgaagaccaagcaatgagggcattcgagcttatgagatccaacgcagccctgtttcaattggggtccgcgccggcagtgtgttggatcgtttgcacaaccctcaagctgcagatggaaaagggggaggaccccgttcccacctgcctcacccgcaccggcctgttcctgagattcctatgttctagattccctcagggagcccagcttcgcggtgctttgcggaccctatctttattggccgcgcaggggctctgggcccagactagtgtcttacatagggaagaccttgagcggctgggagtgcaggaaagcgatcttagactgtttctggacggcgatatcctgaggcaagatcgagtaagtaaggggtgttatagctttatccatctttccttccagcagtttctcacagccctgttttatactcttgaaaaagaggaagaggaggacagggatgggcacacatgggatatcggtgacgtgcagaagctcctatcgggagttgaacgcctgaggaacccagatctgattcaggccggatactacagcttcggactggcgaacgaaaagcgcgcaaaggagctagaagccacctttggatgcagaatgtctcctgatatcaaacaagagctgctccggtgtgacatcagctgcaagggtggccattcaaccgtgacagacttgcaggagctgcttggatgcctgtatgagtctcaggaggaggagctcgtgaaggaggtcatggcacaatttaaagaaatcagcctgcacctgaatgcagtagacgtagtcccctcatctttttgcgttaaacattgtcggaatttgcaaaaaatgtccctgcaagtgatcaaggagaacttaccagagaacgtgacggccagtgagagcgacgctgaggtcgaaagaagccaggacgatcagcacatgcttcccttttggaccgatttgtgctctatctttggctcaaataaagacttgatgggattggcaataaatgacagctttctgagcgcctccctcgtgcgtatcctgtgtgagcaaatcgcttccgatacgtgccatctgcagcgggttgttttcaaaaatatctctcctgccgacgcacacaggaatctctgtctcgcactccgcggtcataagacagtgacttatctgaccctgcaggggaacgatcaggatgatatgtttccggctctgtgcgaggtgctgcggcatccagaatgcaatctgcggtatctgggactggtgtcatgctcggcgacgactcaacagtgggctgacctcagtttggccctggaagtcaaccagtctctcacgtgtgttaacctgagtgataatgaacttctggatgagggagccaagctgctatacacaaccctgcggcaccctaagtgctttttgcagagactcagcctggaaaactgccatcttaccgaggccaattgcaaggatctggccgcggttctcgtcgtgtctagggagttgacacacctgtgtctggccaagaacccaatcggaaatacaggagtcaaattcctgtgcgagggacttcgatatcctgagtgcaagctccagacacttgtcctgtggaattgtgacatcactagtgacggctgttgcgatcttactaagctattgcaggagaaaagctcacttctttgcctagacctggggctaaatcacatcggcgttaaaggaatgaagtttctctgtgaagctctccggaagccattgtgcaatctccggtgtttgtggctgtgggggtgcagcattccacctttctcctgcgaggatctgtgcagcgctctgagctgtaatcagtccctagtgacgctggacctcggacagaaccccctggggagctccggagttaagatgcttttcgaaaccctcacatgtagttcagggacattgcggaccctgagactcaaaattgacgattttaacgatgaactcaataagttgctggaggaaatagaggaaaaaaacccacagttaatcattgacaccgagaaacatcatccctgggctgaacgaccgtcttctcacgactttatgatctag

SEQ ID NO: 69179 - DNA, 3120 bp, Artificial Sequence
  derived and/or modified sequence
atggtttcatcggctcaaatgggttttaaccttcaggccctcctcgagcagctgtcccaggatgagctgagcaagtttaagtatctgattactaccttttccctggcccacgagctccagaagattccacacaaggaaatggcaagcttgcaggtattcgagaaaatgcacagaatggacctgtccgaaagagcaaaagacgaagtgcgtgaggcagctttgaaaagtttcaataagaggaagcctctcagcctgggtatcacacggaaagaacgccctcccttagatgtggatgagatgctggagcgctttaaaacggaggcccaggcgttcaccgagaccaaaggaaatgtgatatgtctcgggaaggaggtatttaaggggaaaaaacccgacaaagacaatcgctgcagatacatcctaaagacaaagtttagggaaatgtggaagtcatggcccggagactccaaagaggtccaggtgatggcagaacggtacaaaatgttaatccccttttcgaatccgagggttctccccggacctttttcatatacggtcgtgctgtacggcccagccggtcttgggaagaccaccttggcccagaaacttatgctagattgggctgaggataatctgatccataagttcaaatacgcattctacttgtcttgcagggaactgtctcgactgggtccttgttcttttgcggaactggtgttcagagactggcccgagctgcaagacgatatcccacacatcctggctcaggctcggaagatattgtttgtgatagacggctttgatgagctgggtgctgcccctggagcattaattgaagatatttgcggtgactgggagaaaaaaaagcctgtgcctgtgctgttggggagcctgctaaaccgcgttatgctccccaaagcagccttactggtgaccacacgaccaagagcccttagggatcttagaatactggcggaggaacccatttacattcgtgttgaaggcttcctggaggaggacaggcgcgcatatttcctgcgtcattttggggatgaggatcaagctatgagagctttcgagctcatgagaagcaatgcagccctgttccagctgggcagcgccccagcggtttgctggatcgtctgtacaactttgaaacttcagatggagaagggggaggaccctgttcctacttgtctgaccaggaccggccttttcctccggttcctttgtagtcgattcccccagggcgctcagctccgaggggcattgaggactttatccctgctggccgcacaagggctttgggcacagacatcagtactccaccgagaggacctcgaacgccttggcgttcaggagagcgacctaaggctgttcctggatggggacatcctgcgacaggaccgggtgtccaaagggtgttactcattcatccatctcagttttcaacaattcctcacagcactattttacaccctggagaaagaagaggaagaggacagggacggccacacctgggatattggtgatgtgcaaaagctccttagcggagtggagagattgagaaacccggatctcatacaagcaggctattacagctttgggctcgcaaatgagaagagagcaaaggaacttgaggcaacatttggatgccgcatgagtcccgacatcaaacaagaactgctacggtgcgacatttcatgcaaaggcggacacagtaccgtcacagacctgcaggagctgttagggtgcctttacgaaagtcaggaagaagagttagtaaaggaagtcatggctcagtttaaagaaatcagcttgcacttaaacgccgtcgacgttgtgccttcctctttttgcgtcaagcactgccggaatctgcagaaaatgtccttgcaagtgattaaggagaacctgccagagaatgtgacggccagtgagtccgatgcagaggtagaaaggtcacaagatgatcaacacatgctccccttctggacagacttatgctccatttttggcagcaacaaagatctgatgggactcgctataaacgattcctttttatccgcctcactagtccggattctgtgcgaacagatcgcaagtgacacatgccacctgcagcgggttgtgttcaagaatatatctcccgcagatgctcaccgcaatctgtgcctggccctgagaggacacaagaccgttacctatctcacactccaggggaatgatcaggatgatatgttccccgcattgtgcgaggttcttcgccacccagaatgcaacctccgatatttgggcctagtgtcctgtagtgctaccactcagcaatgggctgacttgtcactggctctggaagttaaccagagtttgacatgtgtgaacttaagtgataacgagctactcgacgagggggctaaactcctctacaccacactcagacaccctaaatgcttcctgcaacgcttgagccttgagaactgtcatttaacggaagcaaactgcaaggacctcgccgctgttttagtagtgtctcgcgagctgacgcacttatgcttggctaaaaatcctattggcaatactggtgtgaaattcctttgtgagggattacggtatcctgaatgcaaactgcagacgctggtactctggaattgcgatatcacttccgatggatgctgtgacttgaccaagttgctccaggagaaatcaagccttttatgtctcgatctgggacttaaccatatcggcgttaaaggaatgaagttcctgtgcgaagccctgcgaaagcccctttgtaacctaaggtgcctctggttatggggatgttccattccaccattttcttgcgaagacttgtgctctgctttgagttgtaaccagagtctagttacccttgatttggggcagaatccgcttgggtctagcggcgtcaaaatgctgtttgagacgttgacctgcagttcaggaaccttaaggaccttacgtctcaagatcgatgatttcaacgacgagttgaacaaacttctagaggagatcgaggagaagaacccacaactgattatagacaccgagaagcatcacccatgggccgagaggccgtcgtcgcacgactttatgatttag

SEQ ID NO: 69180 - DNA, 3411 bp, Artificial Sequence
  derived and/or modified sequence
aatcacagggctgcggccgagagagaagccttattagagctttctcaacctgcagccctcatctccgccggcgagtagggccaggtgttgggagctcccacgtgggacaagatggtgtcttcggcgcagatgggcttcaacctgcaggctctcctggagcagctcagccaggatgagttgagcaagttcaagtatctgatcacgaccttctccctggcacacgagctccagaagatcccccacaaggagatggcgagcctccaggtctttgaaaagatgcaccgaatggatctgtctgagagagcaaaggatgaagtcagagaagcagctttgaaatcctttaataaaaggaagcctctatcattagggataacacggaaagaacgaccacctctagacgtggacgaaatgctggagcgcttcaaaacagaagcacaagcgtttacagaaacgaaaggaaatgtcatctgcctgggtaaagaagtctttaaaggaaaaaagccagacaaagacaataggtgcaggtatatattgaagacgaagttccgggagatgtggaagagctggcctggagatagcaaagaggtccaggttatggctgagagatacaagatgctgatcccattcagcaaccccagggtgcttcccgggcccttctcatacacggtggtgctgtatggtcctgcaggccttgggaaaaccacgctggcccagaaactaatgctagactgggcagaggacaacctcatccacaaattcaaatatgcgttctacctcagctgcagggagctcagccgcctgggcccgtgcagttttgcagagctggtcttcagggactggcctgaattgcaggatgacattccacacatcctagcccaagcacggaaaatcttgttcgtgattgacggctttgatgagctgggagccgcacctggggcgctgatcgaggacatctgcggggactgggagaagaagaagccggtgcccgtcctcctggggagtttgctgaacagggtgatgttacccaaggccgccctgctggtcaccacgcggcccagggccctgagggacctccggatcctggcggaggagccgatctacataagggtggagggcttcctggaggaggacaggagggcctatttcctgagacactttggagacgaggaccaagccatgcgtgcctttgagctaatgaggagcaacgcggccctgttccagctgggctcggcccccgcggtgtgctggatcgtgtgcacgactctgaagctgcagatggagaagggggaggacccggtccccacctgcctcacccgcacggggctgttcctgcgtttcctctgcagccggttcccgcagggcgcacagctgcggggcgcgctgcggacgctgagcctcctggccgcgcagggcctgtgggcgcagacgtccgtgcttcaccgagaggatctggaaaggctcggggtgcaggagtccgacctccgtctgttcctggacggagacatcctccgccaggacagagtctccaaaggctgctactccttcatccacctcagcttccagcagtttctcactgccctgttctacaccctggagaaggaggaggaagaggatagggacggccacacctgggacattggggacgtacagaagctgctttccggagtagaaagactcaggaaccccgacctgatccaagcaggctactactcctttggcctcgctaacgagaagagagccaaggagttggaggccacttttggctgccggatgtcaccggacatcaaacaggaattgctgcgatgcgacataagttgtaagggtggacattcaacggtgacagacctgcaggagctcctcggctgtctgtacgagtctcaggaggaggagctggtgaaggaggtgatggctcagttcaaagaaatatccctgcacttaaatgcagtagacgttgtgccatcttcattctgcgtcaagcactgtcgaaacctgcagaaaatgtcactgcaggtaataaaggagaatctcccggagaatgtcactgcgtctgaatcagacgccgaggttgagagatcccaggatgatcagcacatgcttcctttctggacggacctttgttccatatttggatcaaataaggatctgatgggtctagcaatcaatgatagctttctcagtgcctccctagtaaggatcctgtgtgaacaaatagcctctgacacctgtcatctccagagagtggtgttcaaaaacatttccccagctgatgctcatcggaacctctgcctagctcttcgaggtcacaagactgtaacgtatctgacccttcaaggcaatgaccaggatgatatgtttcccgcattgtgtgaggtcttgagacatccagaatgtaacctgcgatatctcgggttggtgtcttgttccgctaccactcagcagtgggctgatctctccttggcccttgaagtcaaccagtccctgacgtgcgtaaacctctccgacaatgagcttctggatgagggtgctaagttgctgtacacaactttgagacaccccaagtgctttctgcagaggttgtcgttggaaaactgtcaccttacagaagccaattgcaaggaccttgctgctgtgttggttgtcagccgggagctgacacacctgtgcttggccaagaaccccattgggaatacaggggtgaagtttctgtgtgagggcttgaggtaccccgagtgtaaactgcagaccttggtgctttggaactgcgacataactagcgatggctgctgcgatctcacaaagcttctccaagaaaaatcaagcctgttgtgtttggatctggggctgaatcacataggagttaagggaatgaagttcctgtgtgaggctttgaggaaaccactgtgcaacttgagatgtctgtggttgtggggatgttccatccctccgttcagttgtgaagacctctgctctgccctcagctgcaaccagagcctcgtcactctggacctgggtcagaatcccttggggtctagtggagtgaagatgctgtttgaaaccttgacatgttccagtggcaccctccggacactcaggttgaaaatcgatgactttaatgatgaactcaataagctgctggaagaaatagaagaaaaaaacccacaactgattattgatactgagaaacatcatccctgggcagaaaggccttcttctcatgacttcatgatctgaatccccccgagtcattcattctccatgaagtcatcgattttccaggtgttggtgaactgcctgtgactcctctcctccccggcccctacccctcagggataatgagttcattgctgggctagatgttttagccatgattctgcctctgttttatacctgcacacatccttatctttgtta

SEQ ID NO: 69181 - protein, 575 aa, Artificial Sequence
  derived and/or modified sequence
MDPRGILKAFPKRQKIHADASSKVLAKIPRREEGEEAEEWLSSLRAHVVRTGIGRARAELFEKQIVQHGGQLCPAQGPGVTHIVVDEGMDYERALRLLRLPQLPPGAQLVKSAWLSLCLQERRLVDVAGFSIFIPSRYLDHPQPSKAEQDASIPPGTHEALLQTALSPPPPPTRPVSPPQKAKEAPNTQAQPISDDEASDGEETQVSAADLEALISGHYPTSLEGDCEPSPAPAVLDKWVCAQPSSQKATNHNLHITEKLEVLAKAYSVQGDKWRALGYAKAINALKSFHKPVTSYQEACSIPGIGKRMAEKIIEILESGHLRKLDHISESVPVLELFSNIWGAGTKTAQMWYQQGFRSLEDIRSQASLTTQQAIGLKHYSDFLERMPREEATEIEQTVQKAAQAFNSGLLCVACGSYRRGKATCGDVDVLITHPDGRSHRGIFSRLLDSLRQEGFLTDDLVSQEENGQQQKYLGVCRLPGPGRRHRRLDIIVVPYSEFACALLYFTGSAHFNRSMRALAKTKGMSLSEHALSTAVVRNTHGCKVGPGRVLPTPTEKDVFRLLGLPYREPAERDW

SEQ ID NO: 69182 - protein, 515 aa, Artificial Sequence
  derived and/or modified sequence
MDPRGILKAFPKRQKIHADASSKVLAKIPRREEGEEAEEWLSSLRAHVVRTGIGRARAELFEKQIVQHGGQLCPAQGPGVTHIVVDEGMDYERALRLLRLPQLPPGAQLVKSAWLSLCLQERRLVDVAGFSIFIPSRYLDHPQPSKAEQDASIPPGTHEALLQTALSPPPPPTRPVSPPQKAKEAPNTQAQPISDDEASDGEETQVSAADLEALISGHYPTSLEGDCEPSPAPAVLDKWVCAQPSSQKATNHNLHITEKLEVLAKAYSVQGDKWRALGYAKAINALKSFHKPVTSYQEACSIPGIGKRMAEKIIEILESGHLRKLDHISESVPVLELFSNIWGAGTKTAQMWYQQGFRSLEDIRSQASLTTQQAIGLKHYSDFLERMPREEATEIEQTVQKAAQAFNSGLLCVACGSYRRGKATCGDVDVLITHPDGRSHRGIFSRLLDSLRQEGFLTDDLVSQEENGQQQKYLGVCRLPGPGRRHRRLDIIVVPYSEFACALQGGAWPSAAHSH

SEQ ID NO: 69183 - protein, 248 aa, Artificial Sequence
  derived and/or modified sequence
MEALCVCSLMPLHWSWILTASHLAAFFQGFRSLEDIRSQASLTTQQAIGLKHYSDFLERMPREEATEIEQTVQKAAQAFNSGLLCVACGSYRRGKATCGDVDVLITHPDGRSHRGIFSRLLDSLRQEGFLTDDLVSQEENGQQQKYLGVCRLPGPGRRHRRLDIIVVPYSEFACALLYFTGSAHFNRSMRALAKTKGMSLSEHALSTAVVRNTHGCKVGPGRVLPTPTEKDVFRLLGLPYREPAERDW

SEQ ID NO: 69184 - protein, 487 aa, Artificial Sequence
  derived and/or modified sequence
MDYERALRLLRLPQLPPGAQLVKSAWLSLCLQERRLVDVAGFSIFIPSRYLDHPQPSKAEQDASIPPGTHEALLQTALSPPPPPTRPVSPPQKAKEAPNTQAQPISDDEASDGEETQVSAADLEALISGHYPTSLEGDCEPSPAPAVLDKWVCAQPSSQKATNHNLHITEKLEVLAKAYSVQGDKWRALGYAKAINALKSFHKPVTSYQEACSIPGIGKRMAEKIIEILESGHLRKLDHISESVPVLELFSNIWGAGTKTAQMWYQQGFRSLEDIRSQASLTTQQAIGLKHYSDFLERMPREEATEIEQTVQKAAQAFNSGLLCVACGSYRRGKATCGDVDVLITHPDGRSHRGIFSRLLDSLRQEGFLTDDLVSQEENGQQQKYLGVCRLPGPGRRHRRLDIIVVPYSEFACALLYFTGSAHFNRSMRALAKTKGMSLSEHALSTAVVRNTHGCKVGPGRVLPTPTEKDVFRLLGLPYREPAERDW

SEQ ID NO: 69185 - protein, 269 aa, Artificial Sequence
  derived and/or modified sequence
MDPRGILKAFPKRQKIHADASSKVLAKIPRREEGEEAEEWLSSLRAHVVRTGIGRARAELFEKQIVQHGGQLCPAQGPGVTHIVVDEGMDYERALRLLRLPQLPPGAQLVKSAWLSLCLQERRLVDVAGFSIFIPSRYLDHPQPSKAEQDASIPPGTHEALLQTALSPPPPPTRPVSPPQKAKEAPNTQAQPISDDEASDGEETQVSAADLEALISGHYPTSLEGDCEPSPAPAVLDKWVCAQPSSQKATNHNLHITEKLEVLAKAYSV

SEQ ID NO: 69186 - protein, 334 aa, Artificial Sequence
  derived and/or modified sequence
MDPRGILKAFPKRQKIHADASSKPSCASALRCLCPESDIGADSACPGPAEWLSSLRAHVVRTGIGRARAELFEKQIVQHGGQLCPAQGPGVTHIVVDEGMDYERALRLLRLPQLPPGAQLVKSAWLSLCLQERRLVDVAGFSIFIPSRYLDHPQPSKAEQDASIPPGTHEALLQTALSPPPPPTRPVSPPQKAKEAPNTQAQPISDDEASDGEETQVSAADLEALISGHYPTSLEGDCEPSPAPAVLDKWVCAQPSSQKATNHNLHITEKLEVLAKAYSVQGDKWRALGYAKAINALKSFHKPVTSYQEACSIPGIGKRMAEKIIEILESGHLR

SEQ ID NO: 69187 - protein, 188 aa, Artificial Sequence
  derived and/or modified sequence
MDPRGILKAFPKRQKIHADASSKVLAKIPRREEGEEAEEWLSSLRAHVVRTGIGRARAELFEKQIVQHGGQLCPAQGPGVTHIVVDEGMDYERALRLLRLPQLPPGAQLVKSAWLSLCLQERRLVDVAGFSIFIPSRYLDHPQPSKAEQDASIPPGTHEALLQTALSPPPPPTRPVSPPQKAKEAPNT

SEQ ID NO: 69188 - DNA, 1728 bp, Artificial Sequence
  derived and/or modified sequence
atggaccccagaggcatcctgaaggccttccccaagagacagaagatccacgccgacgccagcagcaaggtgctggccaagatccccagaagagaggagggcgaggaggccgaggagtggctgagcagcctgagagcccacgtggtgagaaccggcatcggcagagccagagccgagctgttcgagaagcagatcgtgcagcacggcggccagctgtgccccgcccagggccccggcgtgacccacatcgtggtggacgagggcatggactacgagagagccctgagactgctgagactgccccagctgccccccggcgcccagctggtgaagagcgcctggctgagcctgtgcctgcaggagagaagactggtggacgtggccggcttcagcatcttcatccccagcagatacctggaccacccccagcccagcaaggccgagcaggacgccagcatcccccccggcacccacgaggccctgctgcagaccgccctgagccccccccccccccccaccagacccgtgagccccccccagaaggccaaggaggcccccaacacccaggcccagcccatcagcgacgacgaggccagcgacggcgaggagacccaggtgagcgccgccgacctggaggccctgatcagcggccactaccccaccagcctggagggcgactgcgagcccagccccgcccccgccgtgctggacaagtgggtgtgcgcccagcccagcagccagaaggccaccaaccacaacctgcacatcaccgagaagctggaggtgctggccaaggcctacagcgtgcagggcgacaagtggagagccctgggctacgccaaggccatcaacgccctgaagagcttccacaagcccgtgaccagctaccaggaggcctgcagcatccccggcatcggcaagagaatggccgagaagatcatcgagatcctggagagcggccacctgagaaagctggaccacatcagcgagagcgtgcccgtgctggagctgttcagcaacatctggggcgccggcaccaagaccgcccagatgtggtaccagcagggcttcagaagcctggaggacatcagaagccaggccagcctgaccacccagcaggccatcggcctgaagcactacagcgacttcctggagagaatgcccagagaggaggccaccgagatcgagcagaccgtgcagaaggccgcccaggccttcaacagcggcctgctgtgcgtggcctgcggcagctacagaagaggcaaggccacctgcggcgacgtggacgtgctgatcacccaccccgacggcagaagccacagaggcatcttcagcagactgctggacagcctgagacaggagggcttcctgaccgacgacctggtgagccaggaggagaacggccagcagcagaagtacctgggcgtgtgcagactgcccggccccggcagaagacacagaagactggacatcatcgtggtgccctacagcgagttcgcctgcgccctgctgtacttcaccggcagcgcccacttcaacagaagcatgagagccctggccaagaccaagggcatgagcctgagcgagcacgccctgagcaccgccgtggtgagaaacacccacggctgcaaggtgggccccggcagagtgctgcccacccccaccgagaaggacgtgttcagactgctgggcctgccctacagagagcccgccgagagagactggtag

SEQ ID NO: 69189 - DNA, 1548 bp, Artificial Sequence
  derived and/or modified sequence
atggaccccagaggcatcctgaaggccttccccaagagacagaagatccacgccgacgccagcagcaaggtgctggccaagatccccagaagagaggagggcgaggaggccgaggagtggctgagcagcctgagagcccacgtggtgagaaccggcatcggcagagccagagccgagctgttcgagaagcagatcgtgcagcacggcggccagctgtgccccgcccagggccccggcgtgacccacatcgtggtggacgagggcatggactacgagagagccctgagactgctgagactgccccagctgccccccggcgcccagctggtgaagagcgcctggctgagcctgtgcctgcaggagagaagactggtggacgtggccggcttcagcatcttcatccccagcagatacctggaccacccccagcccagcaaggccgagcaggacgccagcatcccccccggcacccacgaggccctgctgcagaccgccctgagccccccccccccccccaccagacccgtgagccccccccagaaggccaaggaggcccccaacacccaggcccagcccatcagcgacgacgaggccagcgacggcgaggagacccaggtgagcgccgccgacctggaggccctgatcagcggccactaccccaccagcctggagggcgactgcgagcccagccccgcccccgccgtgctggacaagtgggtgtgcgcccagcccagcagccagaaggccaccaaccacaacctgcacatcaccgagaagctggaggtgctggccaaggcctacagcgtgcagggcgacaagtggagagccctgggctacgccaaggccatcaacgccctgaagagcttccacaagcccgtgaccagctaccaggaggcctgcagcatccccggcatcggcaagagaatggccgagaagatcatcgagatcctggagagcggccacctgagaaagctggaccacatcagcgagagcgtgcccgtgctggagctgttcagcaacatctggggcgccggcaccaagaccgcccagatgtggtaccagcagggcttcagaagcctggaggacatcagaagccaggccagcctgaccacccagcaggccatcggcctgaagcactacagcgacttcctggagagaatgcccagagaggaggccaccgagatcgagcagaccgtgcagaaggccgcccaggccttcaacagcggcctgctgtgcgtggcctgcggcagctacagaagaggcaaggccacctgcggcgacgtggacgtgctgatcacccaccccgacggcagaagccacagaggcatcttcagcagactgctggacagcctgagacaggagggcttcctgaccgacgacctggtgagccaggaggagaacggccagcagcagaagtacctgggcgtgtgcagactgcccggccccggcagaagacacagaagactggacatcatcgtggtgccctacagcgagttcgcctgcgccctgcagggcggcgcctggcccagcgccgcccacagccactag

SEQ ID NO: 69190 - DNA, 1464 bp, Artificial Sequence
  derived and/or modified sequence
atggactacgagagagccctgagactgctgagactgccccagctgccccccggcgcccagctggtgaagagcgcctggctgagcctgtgcctgcaggagagaagactggtggacgtggccggcttcagcatcttcatccccagcagatacctggaccacccccagcccagcaaggccgagcaggacgccagcatcccccccggcacccacgaggccctgctgcagaccgccctgagccccccccccccccccaccagacccgtgagccccccccagaaggccaaggaggcccccaacacccaggcccagcccatcagcgacgacgaggccagcgacggcgaggagacccaggtgagcgccgccgacctggaggccctgatcagcggccactaccccaccagcctggagggcgactgcgagcccagccccgcccccgccgtgctggacaagtgggtgtgcgcccagcccagcagccagaaggccaccaaccacaacctgcacatcaccgagaagctggaggtgctggccaaggcctacagcgtgcagggcgacaagtggagagccctgggctacgccaaggccatcaacgccctgaagagcttccacaagcccgtgaccagctaccaggaggcctgcagcatccccggcatcggcaagagaatggccgagaagatcatcgagatcctggagagcggccacctgagaaagctggaccacatcagcgagagcgtgcccgtgctggagctgttcagcaacatctggggcgccggcaccaagaccgcccagatgtggtaccagcagggcttcagaagcctggaggacatcagaagccaggccagcctgaccacccagcaggccatcggcctgaagcactacagcgacttcctggagagaatgcccagagaggaggccaccgagatcgagcagaccgtgcagaaggccgcccaggccttcaacagcggcctgctgtgcgtggcctgcggcagctacagaagaggcaaggccacctgcggcgacgtggacgtgctgatcacccaccccgacggcagaagccacagaggcatcttcagcagactgctggacagcctgagacaggagggcttcctgaccgacgacctggtgagccaggaggagaacggccagcagcagaagtacctgggcgtgtgcagactgcccggccccggcagaagacacagaagactggacatcatcgtggtgccctacagcgagttcgcctgcgccctgctgtacttcaccggcagcgcccacttcaacagaagcatgagagccctggccaagaccaagggcatgagcctgagcgagcacgccctgagcaccgccgtggtgagaaacacccacggctgcaaggtgggccccggcagagtgctgcccacccccaccgagaaggacgtgttcagactgctgggcctgccctacagagagcccgccgagagagactggtag

SEQ ID NO: 69191 - DNA, 810 bp, Artificial Sequence
  derived and/or modified sequence
atggaccccagaggcatcctgaaggccttccccaagagacagaagatccacgccgacgccagcagcaaggtgctggccaagatccccagaagagaggagggcgaggaggccgaggagtggctgagcagcctgagagcccacgtggtgagaaccggcatcggcagagccagagccgagctgttcgagaagcagatcgtgcagcacggcggccagctgtgccccgcccagggccccggcgtgacccacatcgtggtggacgagggcatggactacgagagagccctgagactgctgagactgccccagctgccccccggcgcccagctggtgaagagcgcctggctgagcctgtgcctgcaggagagaagactggtggacgtggccggcttcagcatcttcatccccagcagatacctggaccacccccagcccagcaaggccgagcaggacgccagcatcccccccggcacccacgaggccctgctgcagaccgccctgagccccccccccccccccaccagacccgtgagccccccccagaaggccaaggaggcccccaacacccaggcccagcccatcagcgacgacgaggccagcgacggcgaggagacccaggtgagcgccgccgacctggaggccctgatcagcggccactaccccaccagcctggagggcgactgcgagcccagccccgcccccgccgtgctggacaagtgggtgtgcgcccagcccagcagccagaaggccaccaaccacaacctgcacatcaccgagaagctggaggtgctggccaaggcctacagcgtgtag

SEQ ID NO: 69192 - DNA, 1005 bp, Artificial Sequence
  derived and/or modified sequence
atggaccccagaggcatcctgaaggccttccccaagagacagaagatccacgccgacgccagcagcaagcccagctgcgccagcgccctgagatgcctgtgccccgagagcgacatcggcgccgacagcgcctgccccggccccgccgagtggctgagcagcctgagagcccacgtggtgagaaccggcatcggcagagccagagccgagctgttcgagaagcagatcgtgcagcacggcggccagctgtgccccgcccagggccccggcgtgacccacatcgtggtggacgagggcatggactacgagagagccctgagactgctgagactgccccagctgccccccggcgcccagctggtgaagagcgcctggctgagcctgtgcctgcaggagagaagactggtggacgtggccggcttcagcatcttcatccccagcagatacctggaccacccccagcccagcaaggccgagcaggacgccagcatcccccccggcacccacgaggccctgctgcagaccgccctgagccccccccccccccccaccagacccgtgagccccccccagaaggccaaggaggcccccaacacccaggcccagcccatcagcgacgacgaggccagcgacggcgaggagacccaggtgagcgccgccgacctggaggccctgatcagcggccactaccccaccagcctggagggcgactgcgagcccagccccgcccccgccgtgctggacaagtgggtgtgcgcccagcccagcagccagaaggccaccaaccacaacctgcacatcaccgagaagctggaggtgctggccaaggcctacagcgtgcagggcgacaagtggagagccctgggctacgccaaggccatcaacgccctgaagagcttccacaagcccgtgaccagctaccaggaggcctgcagcatccccggcatcggcaagagaatggccgagaagatcatcgagatcctggagagcggccacctgagatag

SEQ ID NO: 69193 - DNA, 1728 bp, Artificial Sequence
  derived and/or modified sequence
atggatccccgcggaattctaaaagcttttcctaaaagacagaaaattcacgccgacgcctccagcaaggtcctggctaaaatccctagaagggaggagggtgaagaggccgaggaatggctctcctcactgcgagcccacgttgttcggactggtattggccgtgcgagagcagaactgttcgagaagcaaatcgttcaacacggcggccaactgtgccccgcccaaggcccaggcgtgacccacatagtggtcgacgaaggaatggattacgagagagccttgcgcttgctgcggctgccccaactgcctcccggcgcccagctggtgaaaagtgcatggctgagtctgtgtttacaggagcgtagattagttgacgtagccggcttttccatttttatcccttcgcggtacctggaccatccacaaccttcaaaagccgagcaggatgcctccattcctcccggcactcatgaagcacttttgcagacagcactttcaccacctccacctccgacccgtcctgttagccctccccaaaaagcgaaggaggcgcccaacacacaggcgcagcctatcagtgacgatgaggcctctgacggcgaagagacacaagtgagtgctgctgatctcgaggccttgatcagtggacattaccctaccagcctcgagggagattgcgaaccgagtcccgctcccgctgtactggacaagtgggtgtgtgcccaaccgtcatcccaaaaagccaccaatcataacttacatatcacagagaagctggaggttctggctaaggcttacagcgttcaaggtgacaagtggagggctttgggttatgctaaagccataaatgcccttaagagtttccataagccagtgacttcataccaggaagcttgttctatacctggaattggaaaaaggatggctgagaagatcatcgaaatcctggaaagcggccatctccggaagttggaccacatctccgagtccgtcccggtgttggaactgttttctaatatctggggtgctggcacgaaaaccgcgcagatgtggtaccaacagggctttaggagcttggaagacatacggtcccaggccagtcttactactcaacaggcaattggtttgaaacattactctgacttcctggagcgcatgccccgcgaggaggccaccgagattgaacagacggtgcagaaagccgcacaggcctttaattccgggctgctttgcgtggcttgcgggagttatagacgaggcaaggcaacgtgcggcgacgtggatgtcctgattactcatcctgacggcaggtcgcatagaggaatcttttctcggctcctcgattctttacgccaggaaggctttctgaccgatgatctggtgtcacaagaagaaaatggccagcagcagaaatatttgggtgtctgccggctgcccgggcccggtaggagacaccggcggctggacataattgtggtgccttactctgagttcgcttgcgctctgctgtatttcaccggcagtgcccacttcaatagaagcatgagggccctggctaagaccaagggaatgtcattatcagaacatgccctgtccacagctgtcgtgcggaatacgcacggatgcaaagttgggccagggagagtgctccccacacctacggagaaagatgtattccgcctgcttggcctgccatatcgcgagccggctgaaagggattggtag

SEQ ID NO: 69194 - DNA, 1548 bp, Artificial Sequence
  derived and/or modified sequence
atggatcctcgaggcatactgaaggccttccccaaacgccagaagattcatgcagacgcttcctcaaaggtgctggccaagattcctcggagggaggagggcgaggaggctgaggaatggttgagtagcctgcgcgcccatgtggttcggaccggaataggacgagccagagccgaactctttgaaaagcagatcgtgcagcatggaggccagctgtgccctgcccagggacccggagtcacccacattgtcgttgatgaggggatggactatgagcgagccttacgcctgttacgtttgccgcagctccctcccggcgcacagctggtgaagtccgcttggctctccctatgtcttcaagaacgccgccttgtcgatgtggctggtttttctattttcatccctagtcgttatttagatcacccacagcctagtaaagccgagcaagacgcctccatcccgcctggcacccacgaagccctacttcagacagccttgagtccgccaccccccccaaccagacccgtgtcccctcctcagaaagccaaagaggcaccaaatacacaggcccaacctatttccgatgatgaggctagtgatggagaagaaacacaagtgtctgccgccgacctagaagcactgatatcgggacactacccgactagtctggaaggtgactgtgaaccatcccccgcgccggcagtacttgacaagtgggtgtgtgcacagcccagctcgcagaaagcgacaaaccacaaccttcatattaccgagaagctggaagtcctggccaaagcgtatagtgttcagggagataaatggcgagcactcggatacgctaaagcaataaatgccctcaaaagctttcataagcccgtgacatcgtaccaggaggcttgctcgatcccaggcatcgggaaacgtatggcagaaaagataattgagatccttgaatctgggcacctcaggaaactagatcacatcagtgagtccgtcccagtgcttgaactatttagtaatatttggggggcaggcacgaagactgcccagatgtggtaccagcagggatttcgttcgctggaggatatccggtcccaggctagccttacaacccagcaggcaattggcttgaagcattattccgacttcctagagcgcatgccgagagaggaggccacggaaatcgagcagacggtccagaaggcggcccaggcatttaactcaggactgttatgcgtcgcctgtggatcctataggcgaggaaaggcgacatgcggggacgtggacgtcttgataacccacccagacggcagatcacaccgtggcattttctcaagactccttgacagtttgaggcaggaagggttcctgaccgacgacctggtgtctcaagaggagaatgggcaacaacagaaatatctcggcgtatgtcggctcccaggaccaggccggaggcatcgcaggctcgatattatcgtggtcccatactctgagtttgcttgcgccttgcaaggaggagcctggcccagcgctgcacattctcattag

SEQ ID NO: 69195 - DNA, 1728 bp, Artificial Sequence
  derived and/or modified sequence
atggatcccaggggcatcttaaaggcattccctaagagacagaagatccacgccgacgcgtcttctaaagtattggccaagataccaagacgagaagaaggggaggaagccgaggagtggttgtcaagcttgcgcgctcacgtagtacgcacggggatcggaagagcccgggcagagcttttcgagaaacagattgtgcagcatggcggtcagctctgtccggcccagggcccaggcgtgacgcacatcgttgtggacgagggcatggattacgaacgcgccttacgtctcctgcggctccctcagctgccacccggcgctcagctggtgaagagtgcttggctgtccctctgcctgcaggaaaggcgcctagttgacgtggctggctttagtatctttatccccagtcgttatctggatcaccctcagccctctaaggccgaacaggatgcgtcaatcccacctgggacacacgaagcgctcctccagacggcactgtctcctccgccccctcctactaggcctgtgtcccctccgcagaaggcaaaggaggcaccaaatacccaggctcagcccatcagcgacgatgaagcaagcgacggggaggaaacacaggtgagtgccgcagatctcgaagcccttatcagcgggcactacccaacatcactggaaggtgattgtgaaccttcccccgctccagcagtgctggacaagtgggtttgtgcacagccttcaagccagaaggcaactaatcacaacttacatataactgaaaaactggaggtgttagctaaggcttacagcgtgcagggcgataagtggcgggcccttgggtacgctaaggccataaacgctctcaagtcttttcataagcctgttacttcttaccaggaggcatgttctattcccgggattggcaaaaggatggccgaaaagattatcgaaattctggagagtggacacctgcgcaagctggaccatattagcgaatcggttccagtgctcgagctcttctctaacatctggggagcaggcacaaaaacagcccaaatgtggtatcagcagggctttagaagcctcgaagacatccgaagtcaggcctccttaactactcaacaagcaatcggtctgaagcactacagtgattttctcgaacggatgcctagagaagaagccactgagattgaacagacagtccagaaagctgcacaggcattcaatagtggattactttgtgtcgcctgcggaagttacaggagggggaaggcaacgtgcggagatgtggacgtcctgataacgcacccagatggccggtcccacaggggaatcttcagcagactcctggattcccttcgtcaagagggctttctgactgacgaccttgtgagtcaggaggaaaacgggcagcaacaaaaatatcttggggtgtgtcgcttgccgggccccggtcggcggcacaggagactggatattatcgttgtcccttactccgagtttgcctgtgctctgctgtacttcactgggtcagcacatttcaaccggtccatgcgagcattagccaagacgaaagggatgtccctcagcgagcacgccctgtcaaccgcagtggtgagaaacactcatggctgtaaggttggtcccgggagagtcctgcctaccccaaccgagaaggacgtgtttcggctgcttggattgccctatagagaacccgcggagcgtgactggtag

SEQ ID NO: 69196 - DNA, 1728 bp, Artificial Sequence
  derived and/or modified sequence
atggaccctagggggatcctcaaagcgtttccaaagagacagaagatacacgctgatgcttcaagtaaagtccttgcgaaaatcccacgtcgagaagagggagaggaagctgaggagtggctatccagcctgcgagcccatgttgtgaggaccggcattggcagggccagagctgagttattcgaaaagcagatcgttcagcacggtggccaactctgtcctgctcagggacccggagtgactcacatagtcgttgacgaaggcatggactacgaaagggccctgagactcctccggctgcctcagctcccacctggtgctcaattagtgaagtctgcatggctaagcttgtgtttacaagaacgaagattggtggacgtggcgggatttagcattttcataccttccagatacctcgatcacccccagccctcaaaggcggaacaggatgccagtataccacccgggacacacgaagctcttctgcagactgccctgagcccacctcctcctcctacccggccggtgtcccctccccagaaggctaaagaggcaccgaatacccaggcacagcctatcagcgatgatgaggcctcagacggcgaggaaacgcaggtgtccgccgccgacctggaggctctgattagcggacattaccctacaagcctcgaaggagattgtgagcccagcccagctccggctgttcttgataagtgggtctgcgcccagccatcctctcagaaggctaccaaccataacttacacatcacagaaaagttagaggtcctggctaaggcctattccgtacagggggataagtggcgagcactgggctacgctaaggccattaatgctctgaagtcgtttcacaagcccgtcaccagttaccaagaggcctgttctatcccgggtatcggcaaacgaatggcggagaaaattattgaaattttagaaagcggacatctgcgcaaacttgatcatatttcggagtctgtacccgtcctcgagctgttttcaaatatctggggtgccggcacaaaaaccgcccaaatgtggtatcagcagggctttcggagtctggaggacattaggtcacaagcgagcctcacgactcaacaagcaattggtttgaagcactattcagatttcttagaacggatgcccagagaggaggccacagagatcgagcagacagtgcagaaggcggcccaggcttttaattcaggcctcctgtgcgttgcatgcggctcttatcgcaggggcaaagctacctgcggagacgtggatgtgcttatcacccacccagacggccgcagtcataggggcattttctcccgcttgctggatagcctgcggcaagaggggtttctgacggatgacctcgtcagtcaggaagagaacggacagcagcagaagtaccttggtgtgtgccgactccccggacccggccggaggcacaggagactcgacattatcgtggtgccctactcagagttcgcgtgtgccctgctgtactttaccggttctgcgcattttaacaggagtatgcgggcccttgccaagaccaagggtatgagcctctctgaacacgccttatcaacggccgtagtaagaaatacacacgggtgcaaagtgggccccggacgcgtgttgcccacgcccacagagaaggatgtcttccgcctgctggggctcccttatagggagcctgccgaaagggattggtag

SEQ ID NO: 69197 - DNA, 1464 bp, Artificial Sequence
  derived and/or modified sequence
atggattacgagcgagccctcagactgttgcggctcccgcagttgcccccaggtgctcagctggtgaaatctgcttggctgtccctctgtctgcaggagaggcgcctggtagacgttgcgggcttttccatttttatcccttctcggtacctggatcaccctcaaccctctaaggccgaacaggacgcttcaataccacccgggactcatgaggcattgctgcagaccgctctctcccccccgcccccacccacccgtcccgtgagtccgccccagaaggcaaaagaagcgcctaacacccaagctcagcccatatcagatgacgaggccagtgacggcgaggagacacaggtaagtgctgccgacctggaagccctaatttctggtcactatcccaccagccttgaaggcgactgtgaaccatctcctgctcctgcggtgctcgacaaatgggtctgtgcacagccatcctctcagaaggccaccaatcacaacctccacatcactgaaaagctcgaggtactcgccaaggcttactccgttcagggtgacaaatggcgagccctgggatacgccaaagcgattaacgctttaaagtcatttcataaaccagtgacctcctatcaggaggcctgtagtatccctggcattggcaagaggatggctgaaaaaattatagagattctggagagtggacatctgcggaagctggatcatattagtgagtctgtgcccgtgctcgagttgttttcaaacatctggggcgcaggcactaaaactgcacaaatgtggtatcaacagggatttagatccctggaagacattcggagtcaggcaagtctgaccacccagcaggctattgggctgaagcactattccgattttctggaaagaatgcctcgcgaggaagccactgagattgagcagacagtgcagaaggctgcgcaggccttcaatagcggactactgtgtgttgcttgcgggagttaccgaagaggcaaggcaacctgtggcgatgttgatgttctcatcactcatccggatggtcggtctcaccgcggcatcttttcacggttattggactctctgcgccaagaagggtttctgacagatgaccttgtgtcccaagaggagaatggacagcagcaaaaatatctgggcgtctgccgcctaccgggacccggacgccgacatagaaggctcgatattattgtggtcccctactccgagtttgcctgcgctctcttatatttcacaggttccgcacattttaaccgttccatgagggctctcgctaagacaaaagggatgtccttgagcgaacatgccttgagcaccgcagtggtaaggaacactcacggctgtaaggtggggcccgggcgggttctacccacccctacagagaaagacgtgttccgcttgctcgggttaccctatcgtgaacccgccgagagggactggtag

SEQ ID NO: 69198 - DNA, 1548 bp, Artificial Sequence
  derived and/or modified sequence
atggatcccagaggtattctgaaggcctttccgaagcgccagaagatccatgccgacgccagttcgaaagttctcgccaagatccctagaagggaggaaggcgaagaagctgaagagtggttaagctcccttcgtgcacacgtcgtcaggaccggaatcggcagggcccgcgctgagctctttgaaaaacagatcgtccaacacgggggacagctctgccctgcacaggggcctggcgtcactcacatcgtggtagatgaggggatggactacgaaagggctttaaggctcttgagactaccccagctgcctccgggagctcagctggtcaagagcgcatggttgtccctgtgtctgcaggagaggagacttgtggacgtcgcgggtttctccattttcattccctctagatatctggaccaccctcagccatcaaaggccgagcaagacgcttctataccccctggtacgcacgaagccctactgcaaaccgccctgagccccccccctccgcccacaagacccgtgtcccctccccagaaggccaaggaggcccccaacacccaggcccagccaatctccgacgatgaagcatccgatggagaggaaacccaggtctccgccgccgacttggaggcccttataagcggccattaccccactagtttggagggtgactgcgagccgtcccctgcgcccgcagtgctggataaatgggtttgcgctcagccctctagccaaaaggccacaaatcacaatctccacatcactgaaaaactggaagttctggccaaagcctacagtgttcagggcgacaagtggcgcgccttgggttatgccaaggctattaacgccctcaagtctttccacaaacctgtcaccagttaccaagaggcatgttcgattcccgggattggaaagaggatggccgaaaaaatcatcgagatcctagaatcagggcatctgagaaaactggaccacatcagcgagtcagtgccagtgctggagttgttctccaacatatggggcgctggcaccaagactgcacaaatgtggtatcaacagggctttagaagcctggaggatatccgatcgcaggctagtcttacaacccagcaggcaatcggcttgaaacattattctgactttctggagcgcatgcccagagaggaggctacagaaatcgaacaaaccgtgcagaaggctgcgcaggcctttaattccggattactgtgtgtggcctgtggaagctaccgcagggggaaagccacgtgcggcgacgtggacgtgctaatcacccatcctgatggccggagtcatcgagggatcttctcaagactcctggactcattgcggcaagaaggctttttaactgatgatctggtgtcacaagaggagaatggtcaacagcagaagtacctgggcgtgtgtcgcctgcccggtccgggtcggcgacacaggcgcttggatattattgtcgtcccctactctgagttcgcatgtgctttgcagggaggggcctggccttcagcagctcacagccactag

SEQ ID NO: 69199 - DNA, 810 bp, Artificial Sequence
  derived and/or modified sequence
atggatccgcgtggcatcctgaaagcttttccgaagaggcagaagatccacgctgatgcatcaagcaaggtgttagccaaaatcccgcggagggaggagggcgaagaggctgaggaatggttgtcctccctccgggctcacgtggttaggaccgggatcgggcgggcccgcgccgagttgtttgagaaacaaatagtgcaacacggtggtcaactctgtcctgctcaaggcccaggggttacccacatcgtcgtggacgagggcatggattacgaaagagcattgagattgcttcgtctgccgcaattgccaccaggggcccagttggtgaaatccgcatggctgagcctctgcctacaggagcgccgacttgtcgatgttgctgggttcagcatctttatcccctcaaggtacctagaccatccccagccctccaaggccgagcaggacgctagcatcccaccaggaacgcacgaggccctgttgcaaacggctctctcccctcctcctccaccgacccgccctgtcagcccaccacaaaaggctaaggaggctccgaacacccaggctcagcctatttccgatgacgaggcgtctgatggggaagagacacaggtttccgccgctgacttggaagctctgataagtggccactaccccaccagcctggagggcgactgcgaaccatcccccgcccccgcagtcctggataaatgggtgtgtgctcagccgtcctctcagaaggccacaaaccataatttgcacataaccgaaaagctggaagtcttggccaaggcatattccgtttag

SEQ ID NO: 69200 - DNA, 1005 bp, Artificial Sequence
  derived and/or modified sequence
atggatccaagaggcatactgaaggcgttccctaaaaggcaaaagatccatgcggacgcttctagcaagccctcttgcgcaagtgccctgcgctgtctatgcccagagtcagatatcggagccgacagcgcctgtccaggacctgccgaatggctgagcagtttgagagcacacgtcgttaggacaggcatcgggcgggccagggccgagctcttcgaaaaacaaattgtacaacatggaggccaactctgccctgcgcagggaccaggagtgactcacattgttgtggacgaagggatggattacgagagggctcttcggttactgcgcctgccccagcttccgcctggagcccaactagtgaaaagcgcctggttgtccctttgccttcaagaacgccggctcgtcgatgtcgctggcttttccatctttatcccatcaagatatctggaccatcctcagccctccaaagcagaacaggatgcatccatcccccccggtacgcatgaggcgctcctgcaaacagccctcagtccgcctccacctcccactcgaccagtttctcccccccagaaggcgaaggaggccccaaatactcaagcacaaccaatttctgatgatgaggcgtctgatggggaggaaacgcaggtctccgctgcagatctggaagccctcattagtggccattaccctaccagcttggagggcgactgcgagccttcacctgcgccagcagtactggacaaatgggtctgcgcgcagcccagttcccagaaggccacaaatcacaacctccacatcaccgagaagctggaggtgcttgcgaaggcgtatagtgtgcagggagataaatggagagccctgggatatgctaaagcaatcaacgcactcaagagctttcacaaacccgttactagctatcaagaggcgtgcagcattcccggcatcggcaagcgaatggccgagaagattatcgagatactggaatcaggtcatctccgctag

SEQ ID NO: 69201 - DNA, 1728 bp, Artificial Sequence
  derived and/or modified sequence
atggacccccggggcatcctgaaggccttccccaagaggcagaagatccacgcagatgccagcagcaaggtgctggccaagatcccccggcgggaggagggggaggaggccgaggagtggctgagcagcctgcgggcccacgtggtgaggactggaattggccgggcccgggcagagctgtttgagaagcagatcgtgcagcacggcggccagctgtgcccagcccagggccctggggtgacccacatcgtggtggatgagggcatggactatgagcgggccctgcggctgctgcggctgccccagctgcccccaggggcccagctggtgaagagcgcctggctgagcctgtgcctgcaggagcggcggctggtggatgtggccggcttcagcatcttcatccccagccgctacctggaccacccccagcccagcaaggccgagcaggatgccagcatccccccaggcacccatgaggccctgctgcagacagccctgagccccccacctccacccaccaggcctgtgagccccccccagaaggccaaggaggcccccaacacccaggcccagcccatcagtgatgatgaggccagtgatggagaggagacccaggtgtctgctgctgacctggaggccctgatcagcggccactaccccaccagcctggagggggactgtgagcccagccctgccccagctgtgctggacaagtgggtgtgtgcccagcccagcagccagaaggccaccaaccacaacctgcacatcacagagaagctggaggtgctggccaaggcctacagcgtgcagggcgacaagtggagggccctgggctacgccaaggccatcaatgccctgaagagcttccacaagcctgtgaccagctaccaggaggcctgcagcatccctggcatcggcaagaggatggccgagaagatcatcgagatcctggagagcggccacctgaggaagctggaccacatcagcgagagcgtgcctgtgctggagctgttcagcaacatctggggcgccggcaccaagacagcccagatgtggtaccagcagggcttccgcagcctggaggacatccgcagccaggccagcctgaccacccagcaggccatcggcctgaagcactacagcgacttcctggagaggatgccccgggaggaggccacagaaattgagcagacagtgcagaaggccgcccaggccttcaacagcggcctgctgtgtgtggcctgtggcagctacagaagaggcaaggccacctgtggagatgtggatgtgctgatcacccacccagatggccgcagccaccggggcatcttcagccggctgctggacagcctgcggcaggagggcttcctgacagatgacctggtgtcccaggaggagaatggccagcagcagaagtacctgggcgtgtgccgcctgcccggccctggccgccgccaccggcggctggacatcatcgtggtgccctacagcgagtttgcctgtgccctgctgtacttcaccggcagcgcccacttcaacagatccatgagggccctggccaagaccaagggcatgagcctgtctgagcacgccctgagcacagctgtggtgaggaacacccacggctgcaaggtgggccctggccgggtgctgcccacccccacagagaaggatgtgttccggctgctgggcctgccctaccgggagcctgctgagcgggactggtag

SEQ ID NO: 69202 - DNA, 1548 bp, Artificial Sequence
  derived and/or modified sequence
atggacccccggggcatcctgaaggccttccccaagaggcagaagatccacgcagatgccagcagcaaggtgctggccaagatcccccggcgggaggagggggaggaggccgaggagtggctgagcagcctgcgggcccacgtggtgaggactggaattggccgggcccgggcagagctgtttgagaagcagatcgtgcagcacggcggccagctgtgcccagcccagggccctggggtgacccacatcgtggtggatgagggcatggactatgagcgggccctgcggctgctgcggctgccccagctgcccccaggggcccagctggtgaagagcgcctggctgagcctgtgcctgcaggagcggcggctggtggatgtggccggcttcagcatcttcatccccagccgctacctggaccacccccagcccagcaaggccgagcaggatgccagcatccccccaggcacccatgaggccctgctgcagacagccctgagccccccacctccacccaccaggcctgtgagccccccccagaaggccaaggaggcccccaacacccaggcccagcccatcagtgatgatgaggccagtgatggagaggagacccaggtgtctgctgctgacctggaggccctgatcagcggccactaccccaccagcctggagggggactgtgagcccagccctgccccagctgtgctggacaagtgggtgtgtgcccagcccagcagccagaaggccaccaaccacaacctgcacatcacagagaagctggaggtgctggccaaggcctacagcgtgcagggcgacaagtggagggccctgggctacgccaaggccatcaatgccctgaagagcttccacaagcctgtgaccagctaccaggaggcctgcagcatccctggcatcggcaagaggatggccgagaagatcatcgagatcctggagagcggccacctgaggaagctggaccacatcagcgagagcgtgcctgtgctggagctgttcagcaacatctggggcgccggcaccaagacagcccagatgtggtaccagcagggcttccgcagcctggaggacatccgcagccaggccagcctgaccacccagcaggccatcggcctgaagcactacagcgacttcctggagaggatgccccgggaggaggccacagaaattgagcagacagtgcagaaggccgcccaggccttcaacagcggcctgctgtgtgtggcctgtggcagctacagaagaggcaaggccacctgtggagatgtggatgtgctgatcacccacccagatggccgcagccaccggggcatcttcagccggctgctggacagcctgcggcaggagggcttcctgacagatgacctggtgtcccaggaggagaatggccagcagcagaagtacctgggcgtgtgccgcctgcccggccctggccgccgccaccggcggctggacatcatcgtggtgccctacagcgagtttgcctgtgccctgcagggcggggcctggcccagcgctgcccacagccactag

SEQ ID NO: 69203 - DNA, 1464 bp, Artificial Sequence
  derived and/or modified sequence
atggactatgagcgggccctgcggctgctgcggctgccccagctgcccccaggggcccagctggtgaagagcgcctggctgagcctgtgcctgcaggagcggcggctggtggatgtggccggcttcagcatcttcatccccagccgctacctggaccacccccagcccagcaaggccgagcaggatgccagcatccccccaggcacccatgaggccctgctgcagacagccctgagccccccacctccacccaccaggcctgtgagccccccccagaaggccaaggaggcccccaacacccaggcccagcccatcagtgatgatgaggccagtgatggagaggagacccaggtgtctgctgctgacctggaggccctgatcagcggccactaccccaccagcctggagggggactgtgagcccagccctgccccagctgtgctggacaagtgggtgtgtgcccagcccagcagccagaaggccaccaaccacaacctgcacatcacagagaagctggaggtgctggccaaggcctacagcgtgcagggcgacaagtggagggccctgggctacgccaaggccatcaatgccctgaagagcttccacaagcctgtgaccagctaccaggaggcctgcagcatccctggcatcggcaagaggatggccgagaagatcatcgagatcctggagagcggccacctgaggaagctggaccacatcagcgagagcgtgcctgtgctggagctgttcagcaacatctggggcgccggcaccaagacagcccagatgtggtaccagcagggcttccgcagcctggaggacatccgcagccaggccagcctgaccacccagcaggccatcggcctgaagcactacagcgacttcctggagaggatgccccgggaggaggccacagaaattgagcagacagtgcagaaggccgcccaggccttcaacagcggcctgctgtgtgtggcctgtggcagctacagaagaggcaaggccacctgtggagatgtggatgtgctgatcacccacccagatggccgcagccaccggggcatcttcagccggctgctggacagcctgcggcaggagggcttcctgacagatgacctggtgtcccaggaggagaatggccagcagcagaagtacctgggcgtgtgccgcctgcccggccctggccgccgccaccggcggctggacatcatcgtggtgccctacagcgagtttgcctgtgccctgctgtacttcaccggcagcgcccacttcaacagatccatgagggccctggccaagaccaagggcatgagcctgtctgagcacgccctgagcacagctgtggtgaggaacacccacggctgcaaggtgggccctggccgggtgctgcccacccccacagagaaggatgtgttccggctgctgggcctgccctaccgggagcctgctgagcgggactggtag

SEQ ID NO: 69204 - DNA, 810 bp, Artificial Sequence
  derived and/or modified sequence
atggacccccggggcatcctgaaggccttccccaagaggcagaagatccacgcagatgccagcagcaaggtgctggccaagatcccccggcgggaggagggggaggaggccgaggagtggctgagcagcctgcgggcccacgtggtgaggactggaattggccgggcccgggcagagctgtttgagaagcagatcgtgcagcacggcggccagctgtgcccagcccagggccctggggtgacccacatcgtggtggatgagggcatggactatgagcgggccctgcggctgctgcggctgccccagctgcccccaggggcccagctggtgaagagcgcctggctgagcctgtgcctgcaggagcggcggctggtggatgtggccggcttcagcatcttcatccccagccgctacctggaccacccccagcccagcaaggccgagcaggatgccagcatccccccaggcacccatgaggccctgctgcagacagccctgagccccccacctccacccaccaggcctgtgagccccccccagaaggccaaggaggcccccaacacccaggcccagcccatcagtgatgatgaggccagtgatggagaggagacccaggtgtctgctgctgacctggaggccctgatcagcggccactaccccaccagcctggagggggactgtgagcccagccctgccccagctgtgctggacaagtgggtgtgtgcccagcccagcagccagaaggccaccaaccacaacctgcacatcacagagaagctggaggtgctggccaaggcctacagcgtgtag

SEQ ID NO: 69205 - DNA, 1005 bp, Artificial Sequence
  derived and/or modified sequence
atggacccccggggcatcctgaaggccttccccaagaggcagaagatccacgcagatgccagcagcaagcccagctgtgccagcgccctgcgctgcctgtgcccagagagtgacattggagctgacagcgcctgccccggccctgctgagtggctgagcagcctgcgggcccacgtggtgaggacaggcatcggccgggcccgggcagagctgtttgagaagcagatcgtgcagcacggcggccagctgtgcccagcccagggccctggggtgacccacatcgtggtggatgagggcatggactatgaaagagccctgcggctgctgcggctgccccagctgcccccaggggcccagctggtgaagagcgcctggctgagcctgtgcctgcaggagcggcggctggtggatgtggccggcttcagcatcttcatccccagccgctacctggaccacccccagcccagcaaggccgagcaggatgccagcatccccccaggcacccatgaggccctgctgcagacagccctgagccccccacctccacccaccaggcctgtgtccccaccccagaaggccaaggaggcccccaacacccaggcccagcccatcagtgatgatgaggccagtgatggagaggagacccaggtgtctgctgctgacctggaggccctgatcagcggccactaccccaccagcctggagggggactgtgagcccagccctgccccagctgtgctggacaagtgggtgtgtgcccagcccagcagccagaaggccaccaaccacaacctgcacatcacagagaagctggaggtgctggccaaggcctacagcgtgcagggcgacaagtggagggccctgggctacgccaaggccatcaatgccctgaagagcttccacaagcctgtgaccagctaccaggaggcctgcagcatccctggcatcggcaagaggatggccgagaagatcatcgagatcctggagagcggccacctgaggtag

SEQ ID NO: 69206 - DNA, 1728 bp, Artificial Sequence
  derived and/or modified sequence
atggacccccggggcatcctgaaggccttccccaagcggcagaagattcacgccgacgcgtcttcaaaggtgcttgcaaagatcccacgaagggaagaaggagaggaggccgaggagtggttgtcatcactcagggcccatgtggtacgaaccggaatcggcagagctagggccgagcttttcgaaaagcaaatagtgcagcacggtgggcaactgtgtcctgcccagggaccgggcgttacacatatcgtagtggacgagggcatggactacgaaagggccctgcgtctcttacgtcttccccaacttcccccaggtgctcagctcgttaaaagtgcttggttgtctttgtgtctccaggaacggagactggtggatgtggctggtttttccatctttatccctagcagatatttagatcacccccaaccgagcaaggccgaacaagatgcctccattccgccaggcacacacgaagccctgctgcagactgcactctctcccccccccccgcctactaggccggtgtctccacctcaaaaggctaaagaagctcctaacacccaagctcagccaatctcagacgatgaagcctccgacggagaggagacacaagtcagcgcagctgatctggaagcactgatttcagggcactatcccaccagcctagagggcgactgtgaaccatctcctgctcccgcagtgttagataaatgggtgtgcgcccagccatcgtcccaaaaggccaccaaccataacctgcatatcacagagaaactggaggtcttagcgaaagcatatagtgtgcagggagataagtggcgtgccctgggctatgccaaagctattaacgcgttgaaaagctttcataagcctgtgacctcttaccaggaagcatgttccatccccgggatcggaaaacgaatggctgaaaagataatcgagatattagagtctggtcacctgcgaaagctggatcacatatctgaatcggtgccggttcttgagctgttttctaacatttggggcgcaggaaccaaaaccgcacagatgtggtatcagcaggggtttaggagtttggaagatatacgcagtcaagcgtcgctcacgacgcagcaggctattggtcttaagcactattccgatttcctcgagagaatgcccagagaagaggctacagagatagagcaaaccgttcagaaagctgctcaggcatttaactctggcttactgtgcgtggcgtgcggctcatatcggcgcggcaaggccacttgcggagatgttgatgtgctgatcacacacccggatggacggagccaccgggggatcttcagtcgtcttttggactcgttaaggcaagaagggtttttaaccgatgaccttgtgtcccaggaggagaatggccagcagcagaagtatctgggggtgtgcaggttgccaggccccgggcgacggcatagacgcttagatattatcgtggttccctattctgaattcgcttgcgctctcctttactttacagggagtgcacatttcaatagatccatgcgcgcactggccaagacgaaggggatgtctctgtctgaacatgctctctccacggccgtggtgcgcaatacgcatggctgcaaggttggacctgggagagtgctgccaacaccgacagaaaaagacgtgttccgcctgctgggactgccctacagggaacccgccgaacgcgactggtag

SEQ ID NO: 69207 - DNA, 1548 bp, Artificial Sequence
  derived and/or modified sequence
atggacccccggggcatcctgaaggccttccccaagcggcagaagatccacgccgacgcctcatctaaagttctagccaaaatccccagacgggaggagggcgaagaggcagaggagtggctgtcttcactacgcgcacacgtggtgagaactggtataggaagagctcgagccgagctctttgagaagcagatcgtgcagcacggagggcagttgtgccctgcacaaggccctggcgtgactcatatcgttgtggatgaaggaatggactatgaaagagcgctgcgtctcctgcgtctcccccagttgccccctggcgcgcagctggttaaatctgcgtggttgagtttgtgtttgcaagaacggagactggtcgatgtcgccggattttccatattcatcccgagtcgctacttggaccacccacagccatccaaagccgaacaagacgcaagcatccccccaggcacccacgaagccctgctccaaacagctctctccccacccccacctccaactagacccgtgtcccctccccaaaaggccaaagaagcacctaatacgcaggctcagccaatctctgacgacgaagccagcgacggcgaagagactcaggtgtcagcagctgacctggaagcgctgatctctgggcattaccccacctcattggagggagattgcgagccaagccccgctcctgctgtgctcgataaatgggtttgtgctcagccttcttcccagaaggccacgaaccacaatctccatataacagaaaaattggaagtgctggccaaagcctattcagtgcaaggggacaagtggagagccctgggctatgcgaaagctatcaacgcgttaaaatcattccataagccagttaccagctaccaagaagcttgctccattccgggaatcgggaaacgtatggcagaaaaaatcatagaaatactcgaatccggccatttaaggaagctggaccacattagtgaatcagttccggtactcgagcttttcagtaatatttggggggccgggacaaaaaccgcccaaatgtggtaccagcaggggttcagatccctggaagatatacgatcccaggcttcactcaccactcagcaggccataggactgaaacattactctgactttcttgagcgcatgcccagggaagaagccaccgaaatcgagcagaccgtccagaaggctgcccaggctttcaactctggcctgctctgtgtcgcctgcgggtcttataggaggggcaaggccacgtgcggagatgttgacgtgctcattacacaccccgacgggcgatctcaccggggcatcttttctaggctgctggacagcttacggcaggaaggctttcttacagacgacctggtgtctcaggaagaaaatgggcagcagcaaaaataccttggagtctgccggttgcccgggccaggtagaagacaccgaagactcgacattatagtcgtcccttactccgaattcgcttgcgctttacagggtggtgcatggccctctgctgcacacagtcattag

SEQ ID NO: 69208 - DNA, 1728 bp, Artificial Sequence
  derived and/or modified sequence
atggacccccggggcatcctgaaggccttccccaagcggcagaagattcatgccgatgctagcagcaaagtactcgctaagattccccgcagggaggagggcgaggaagcagaagaatggctgtcttccctgagggcccacgttgtaaggacagggattggcagagcccgtgccgagctgtttgagaagcaaatagtacagcacggtggccagctgtgcccggcgcaaggtccaggcgtgactcatattgtggttgacgaggggatggactacgaacgggccctgaggctcctgagactcccacagcttcctcccggggctcagctcgtgaaaagcgcatggctctcattgtgcctccaggaacgacggctggtcgacgtcgccgggttcagcatcttcattccttctaggtaccttgaccatccacagccgtccaaggccgaacaggacgcttcaatccctccagggacccacgaggccttgcttcagaccgcgctgtctccaccaccccctccaacacggcctgtctcccccccccagaaggctaaggaggcaccgaacacgcaggctcaacctatcagcgacgatgaagccagtgatggcgaggagacgcaggtgagtgccgccgatttggaggccctgatcagcgggcactacccgactagcctcgagggcgactgtgagccaagtcccgcccctgctgtgctagataaatgggtctgtgcacagccctcgagccagaaagcaacgaatcacaacctacacatcacagaaaagttggaagtgctggccaaagcttactctgtgcagggcgataagtggcgggcactggggtatgctaaagcgattaacgctctgaaatctttccataagcccgtcacaagctatcaggaggcgtgttccatccccgggatcggaaaaagaatggccgagaagattatcgagatcttggaatctgggcacctgcgaaagctggatcatatctccgagagcgtccctgtactcgagctgttcagcaatatatggggtgctggaactaaaaccgctcaaatgtggtaccagcaaggcttccgctccttggaggatataagatcccaggccagcctgaccactcagcaagctattggactcaagcattactcagacttcctcgagcgtatgcctcgggaagaggctacggagatcgaacaaacagtgcagaaggctgctcaagcatttaattctggcctgttatgcgtagcctgcggctcatacaggcgcggtaaagcaacatgcggggatgttgatgtgctgattactcacccggacggccggtctcatagggggattttttctcggctcctggattcactacgccaggaagggttcctcaccgacgatctggtaagtcaagaagaaaatggtcagcaacagaaatatctgggagtttgtcggttgcctggacctgggaggagacataggcggctcgatatcatcgtcgttccctattcagaatttgcctgtgcacttctgtacttcaccggctccgctcactttaacaggagcatgagggccctggccaaaacgaaggggatgtccctgtctgaacatgccctcagcactgctgtggtccgaaacacccatggatgcaaagtaggtcctggcagagtgctacccactccaacggaaaaggatgtgttcagactgcttggtttgccgtacagagagccagcagagagggattggtag

SEQ ID NO: 69209 - DNA, 1728 bp, Artificial Sequence
  derived and/or modified sequence
atggacccccggggcatcctgaaggccttccccaagcggcagaagatccatgcagacgccagcagtaaagttctggctaagatccctcggagggaagagggagaagaggctgaggagtggctgtcttcactgcgcgcccacgtcgtcagaactgggattggtcgtgcccgagctgagctctttgagaagcagattgtgcagcatgggggccagctttgtcctgcacaaggacccggcgtgacacacatcgttgtggatgagggcatggattacgagcgcgctctgagacttctgcggctccctcagctgcctcccggcgcgcagttggtgaagtctgcctggctcagcttatgtcttcaggagcgcagactcgtggatgtggctgggttcagtattttcattccatctcgctacctggaccacccccagccatccaaggccgaacaggatgctagtatacccccgggtacccatgaagcgctcctccaaaccgcgctgtctcccccgcctcctcccactcgacctgtgtcaccccctcagaaggctaaagaggcgccaaacacacaagcccaacccattagcgacgacgaggcgtctgacggtgaggaaactcaggtgagcgcagccgacttagaggcactcatttctgggcactaccccacaagcctagagggtgattgtgagccctcccccgcgccagcagttctggataagtgggtctgcgctcagccctcttctcagaaggcaacgaaccataatctgcacatcacagagaagttggaggtgcttgccaaggcatactcagtccagggcgataaatggcgagctttgggctacgctaaagccattaacgcgctgaaatcattccataagccggttactagctatcaggaagcttgtagcatccccggcatagggaagcgtatggcggaaaagatcatcgaaattctggaatcaggccacttaaggaagctggaccacatctcagaatccgtgcccgtgctggagttgttctctaacatctggggggcgggcacaaagactgcacaaatgtggtatcagcagggctttcgcagtctggaggacatccggtcccaagcaagtctgaccactcaacaggccatcgggctaaagcactatagtgacttcctagagcgtatgccccgcgaggaagccaccgagattgaacagacggttcagaaggcagcccaggcatttaatagtggattgctctgcgtcgcctgtggatcctacaggcgaggcaaagcaacttgtggggacgttgatgtgctgatcactcatcctgacggtagatcacatagaggaatcttcagcagattgctcgactcactgcggcaggaggggtttttgactgacgatctcgtcagccaggaggagaatggccagcaacagaaataccttggtgtgtgtagactgcctggtccaggccgacggcacaggagattggatatcatcgtcgtcccttactccgaattcgcttgtgcactcctgtacttcacaggctcggcccatttcaatcgctccatgcgcgctctcgcaaaaaccaaggggatgtccctctctgagcacgcgctttccaccgctgtggtgcggaatactcacgggtgtaaagtaggcccaggccgcgtgctgcccactcctacagaaaaggacgtatttagattactcggactgccctatagagagccagccgaacgagattggtag

SEQ ID NO: 69210 - DNA, 1464 bp, Artificial Sequence
  derived and/or modified sequence
atggactacgagcgggccctgcggctgctgcggctgccccagctgcctccaggggcccagttggtgaaatcagcctggctatctctctgcctccaggagcggaggctggtcgatgtagctggattctcgatcttcattccaagtaggtacctggaccacccccagccgagcaaggccgaacaggacgcgagcatcccacccggtacccacgaagccttgttgcaaacagctctgtctcctccacctccacctacccggcccgtcagccctcctcagaaagccaaagaagcacctaatacccaggcacagccaatctcagacgacgaggcttctgacggagaggagactcaggtgtctgcagccgatttagaggctttgatctctggtcactacccaacaagtcttgaaggcgattgtgagcctagcccagcacccgcagtactggacaaatgggtgtgtgcccagccttcttcacagaaagccaccaatcacaacctccacattactgagaaactggaagtccttgccaaggcatactctgttcagggagacaagtggagggccttgggctatgccaaggctatcaacgcccttaagtcttttcacaagccggtcacgtcttatcaggaagcctgttcaatccccggtattggcaaacgtatggctgaaaagattatcgagatccttgaatcgggccatctgcgtaaactggaccacattagcgaaagtgtcccagtattggaactcttttcgaacatttggggggcaggcaccaagacagcgcagatgtggtatcagcagggttttaggtctctggaggacattaggtcacaggcgtcccttaccactcagcaagcaatcggactgaaacattacagcgattttctagagcggatgcccagggaggaggcgacggagatagagcagaccgttcagaaggcagcccaggcattcaacagcggcctcctgtgcgtggcctgcgggtcttatcgacgtggaaaggccacgtgcggagacgtcgatgtgctaataacgcaccccgatggacggtcacaccgggggatcttctctcggctgctggacagcttgcgacaggagggttttcttactgatgacttagtgtcacaggaagaaaacggacagcagcagaaatatctcggggtgtgcagacttccaggaccaggaaggaggcataggaggttggatattattgtggtgccttatagcgagtttgcttgcgctctgctatacttcaccgggagcgcccactttaataggagcatgagggccctagccaagactaaagggatgagtctctcggagcacgcactgtctaccgctgtcgtccggaacactcacggctgtaaagttggtcccgggcgggtgctgccaactccgacggagaaggacgtctttcggctcctgggcctgccttatcgggagccggctgagcgcgactggtag

SEQ ID NO: 69211 - DNA, 1548 bp, Artificial Sequence
  derived and/or modified sequence
atggacccccggggcatcctgaaggccttccccaagcggcagaagatccacgcagacgcatccagcaaggtactagcaaagatcccacgacgtgaggagggggaggaagcagaggagtggcttagctcgctgcgcgcacatgtggtgcggaccggaatcggtcgtgcgagagcagagctgtttgagaagcagattgtccaacacggaggccaattgtgcccagcccagggtccgggggtaacccatattgtcgtggatgagggtatggactatgagagggcactgaggcttttgaggctgccacagctgccacccggagctcagttggtgaagagtgcatggttgtccttatgcctgcaggagagaaggcttgtagacgtcgcgggttttagtatcttcattccctcacggtatttagatcatccccagccctcaaaagccgagcaggacgcaagcatcccacccggaacacatgaggcattactgcagactgccctgtctcccccaccccctcctacgcggcccgtgagccccccccagaaggctaaggaagcccctaacactcaggctcagcctatttctgacgatgaggctagtgacggcgaggaaacgcaggtgagtgccgccgacctcgaggcccttatttccggacattatccaacttctctggagggcgattgcgaaccttcccctgcacctgccgtgcttgataaatgggtgtgtgcacaaccaagctcccagaaagccacaaaccacaaccttcacatcaccgaaaagctggaagttcttgccaaggcttattctgtgcagggggataagtggcgggcattgggttacgctaaggctatcaatgccctgaaatccttccacaagcctgtcacgagttatcaggaggcttgttctatcccagggatcggcaagcgaatggcagaaaagattatagagattttagagagcgggcacttgcgtaagcttgatcacatcagcgaatcagtgcccgtgctggaactgtttagtaacatttggggggcgggaactaagaccgcacagatgtggtatcagcagggctttcgaagcctagaagatatacggtctcaagcctccctgactacgcaacaggctattggtttgaaacactactccgattttctggaaaggatgcctagggaagaggctaccgaaatagagcagacagtacagaaagctgcacaggctttcaattcagggctgctgtgtgtggcttgtggctcgtatcgccgcggaaaggccacttgtggagacgtggatgtgctgatcacacaccctgacggacgttcccacaggggaatcttcagtcggcttctggatagtctgagacaggaaggattcctcactgacgatttagtgtcccaggaagaaaacggccagcaacaaaagtacttgggcgtctgccgcttgccaggaccagggcgaagacacaggcggcttgatattatcgtcgttccctacagtgaatttgcatgtgcgctgcagggcggggcctggccatccgccgcccactcacactag

SEQ ID NO: 69212 - DNA, 810 bp, Artificial Sequence
  derived and/or modified sequence
atggacccccggggcatcctgaaggccttccccaagcggcagaagattcacgctgacgcatccagcaaggtgttggctaagattcccagacgagaagaaggggaagaggcagaggagtggctgagtagcctccgagcacacgtcgtgcgcacggggatcggacgtgcgagagccgaactgttcgagaagcagatcgtgcaacacggaggccaactgtgccccgcacagggacccggagtgacacacatcgttgtggacgaaggcatggactatgaacgcgctctgcgcttgctgcgactgccacaactgcctcctggggcccagctagtgaagtcagcctggctctcgctttgtttacaggaacggaggcttgtcgacgttgctggcttcagcatcttcatcccctctcgctacttggatcacccacaaccatccaaggccgaacaagatgcgagcatccctcccggaacacacgaggctctgttacaaaccgctctgtccccccccccacctccaacccgtcccgtttccccgccgcaaaaggctaaagaagccccaaacacacaggcccagccaatatcagacgatgaggcatccgacggcgaagagactcaagtgtctgcagcggacttagaggcactgatcagcggacactatcccacatcgctggaaggtgattgtgaacccagtcccgctccagccgtcctggacaaatgggtttgcgcccaacctagttcccaaaaggccacgaatcacaacctgcatattaccgaaaagctagaagtcctcgcgaaagcctattctgtgtag

SEQ ID NO: 69213 - DNA, 1005 bp, Artificial Sequence
  derived and/or modified sequence
atggacccccggggcatcctgaaggccttccccaagcggcagaagatccacgccgatgcatcctcaaaacccagctgcgccagtgctcttcggtgtctatgcccagagtcagacatcggcgccgattctgcatgtcctggtccagcagaatggctgtcctccctcagagcgcacgtggtgagaaccgggatcggccgcgctcgagccgagttattcgagaagcaaattgtccaacacggaggacagctgtgccccgcccagggcccaggcgtcacccacattgtggtggacgaaggcatggactatgagagggcacttagactcctgcgactgccccagctgccacccggcgcacaactggtgaaatccgcctggctctcgctgtgcctgcaagagagacgtctcgtggatgtggcaggtttctccatttttatcccgtcccgctatcttgaccaccctcaaccgagcaaggcagagcaggacgcctcaattccgcctggaacccacgaggccttgctacagaccgccctgtcacctcctcctcctcccacccgccccgtgtcaccaccccagaaggctaaggaggcccctaacacacaggcgcagcccatctccgacgacgaagcgtcggacggtgaagaaactcaggtcagcgcagccgacctcgaggcattaatcagtggccactatcctacctccctggagggtgactgcgaacctagtccggcaccagctgtgctggacaagtgggtctgtgctcaaccctcaagccagaaagcaacgaaccacaacctccacattaccgagaaactggaggtgctggcaaaagcctacagcgtccagggggataaatggagggcattggggtacgccaaagcaattaacgctctcaaaagcttccacaagcccgtgacatcctaccaggaagcctgttctatccccggcattggaaaacgcatggccgaaaagatcatcgaaatcctcgagtccggccatctaagatag

SEQ ID NO: 69214 - DNA, 1728 bp, Artificial Sequence
  derived and/or modified sequence
atggacccacgaggcatcctaaaagcctttcctaagcgacagaaaattcacgcggatgcatcctctaaagtgcttgccaagattcctagacgggaagaaggcgaggaagccgaggagtggttgagttctctgcgcgctcacgtcgtcagaaccggtattgggagagcaagggcagagctgttcgaaaagcagatcgtccagcacgggggacagttatgccctgcccaaggacccggagtgactcacatcgttgtcgacgagggaatggattatgagcgcgcactacgcctgttgcgcctccctcaactcccccctggcgctcaattagtcaagtccgcctggctttcattgtgcctccaggaaagaaggttagttgatgtggctgggtttagcatctttatacccagtagatatctggaccatccgcagccttcaaaggccgaacaggacgcttctatcccaccagggacacacgaggccctgctgcagactgctctcagcccccctcccccacctaccaggcccgtgtcccctcctcagaaggccaaggaggctcctaacacacaggcccagccaatctctgacgatgaggccagtgacggagaagaaacacaggtcagtgccgctgacctcgaagcgctgatcagcggccactatcctaccagcctcgagggagactgtgagccttccccagcccctgccgtgctggacaaatgggtctgcgcccagccatcttctcagaaagcaaccaaccacaatctacacatcaccgagaaactcgaggtgctggctaaggcatacagcgtacagggcgacaagtggagagcactgggctacgccaaggctatcaacgcgctcaagtcttttcacaaacccgtgaccagctaccaggaagcctgtagtatccctggcataggtaagaggatggctgagaagataatcgagatactcgagtccggccatttgagaaaactcgaccatatttccgagtctgtgccagtgttggagctgttctccaacatctggggcgctggcacaaagaccgcccaaatgtggtaccaacagggcttccgaagcctggaagacatcagaagccaagcctccctcactacccagcaggcaatcgggctaaagcactattctgattttctcgaaagaatgcctcgcgaggaagccaccgagattgagcaaaccgtacagaaggccgctcaggcttttaattcggggctgctctgcgtggcctgcgggtcttaccgacgagggaaagctacttgcggagacgtcgacgtcctgatcacacatcctgacggcagatctcacagggggatcttttcccgactactggatagtctcaggcaggagggctttttgaccgatgatcttgtctcgcaggaggagaacggccaacagcagaagtatttgggagtttgccgcctgccaggtcccggaaggcgccatagaagattagacattatcgtcgtaccatactctgagttcgcctgcgcacttctttactttacaggaagcgcccactttaatcgtagtatgcgggctctggccaagaccaagggcatgtctctgagtgaacacgctctgtctaccgccgtcgtgcgaaacacacacggttgcaaggtaggcccagggagagttctgccgacccccacagagaaagatgtctttcgcctcctgggactaccttatcgagagcctgccgagcgcgattggtag

SEQ ID NO: 69215 - DNA, 1548 bp, Artificial Sequence
  derived and/or modified sequence
atggatccccgaggcattctgaaggcttttcccaaacggcagaagattcacgccgatgccagctctaaagtcttagctaaaatacctaggagagaggagggtgaagaagcagaagagtggcttagctctctgcgcgcacacgtcgtgcgtacaggtataggcagggctcgcgcagagctgttcgaaaaacagattgtgcagcacgggggacaattgtgtcctgcccagggtcccggagtgacccatatcgtggtcgacgaaggcatggattacgagagagcactaaggcttctgaggttgccacagctccctccaggagcgcagttagtaaaaagtgcatggctgagtctgtgcctgcaggaacgtcgcctagtggacgtggctggattctccattttcattccttcaagatacttagaccatccacagccatcaaaggccgagcaggacgcaagcattccacccggtacacacgaggcgctgcttcaaacggccttaagccctcctccacctccaacacgccctgtctccccgccacagaaggccaaggaggccccaaatacccaggctcagccaataagcgacgacgaggcgtcagacggcgaagagacgcaggtgtctgccgcagacctggaggccttaataagcggacattatcctacatcactggaaggcgattgcgaaccgtctcctgcgcctgccgtgctggataaatgggtctgcgcacaacccagcagtcagaaggccaccaatcataatctacatattactgaaaagctcgaggttctggctaaggcctacagcgtgcagggggacaaatggcgcgcactgggatacgctaaggcgatcaacgctctgaagtcttttcacaaacccgttacaagctaccaggaagcctgctccatcccgggaattggcaagcgtatggccgagaaaatcatcgaaatcctcgaatccggacatctacggaaattagaccacatctcagagtccgttcctgttctggagctgttttccaatatctggggcgctgggacgaaaactgctcagatgtggtaccagcagggattccggagcttagaggacatccggtctcaggccagcctgaccacgcagcaggccattggtctaaaacactacagtgatttcctggaacggatgcctagggaagaagccaccgagatcgaacagaccgtgcagaaagccgcacaagcatttaattctggtctgctgtgtgtggcctgcgggtcctacagacggggaaaggctacgtgtggtgacgtcgacgtgcttatcacacatcccgatggtaggagccataggggtattttctccagactgctggactccttgcgtcaggagggcttcctgactgacgatttggtgagccaggaggagaacggccagcaacaaaagtacttgggagtgtgccgtctgccagggcctgggcgtagacaccgtcggttagacatcattgtggttccctacagtgagttcgcctgtgcgctccaggggggagcttggccatccgcagcccatagccactag

SEQ ID NO: 69216 - DNA, 1728 bp, Artificial Sequence
  derived and/or modified sequence
atggacccaagaggtatactgaaagctttccctaaaaggcagaagatccacgcggacgcttcatccaaagtgctggctaaaatccctcgaagggaggagggcgaggaggcggaagagtggctgagcagcctgagggctcatgtggtccgtactggaatcggcagagccagagctgaactctttgagaaacagatcgtacagcacggaggccagctgtgtccagcccagggacctggggtgactcatatagtcgtcgacgagggtatggattatgagagagcactcaggctcctgagactgccgcaactgccacccggagcacaacttgtcaaatccgcttggctctctctgtgtctccaggagcggagactggtggacgtggctggcttctccatctttattccttctagatatttagatcatccccagccctccaaagcagaacaggacgcttccataccgccaggaactcatgaagcgctcctccagactgccctctcaccaccgcctccgcctaccagaccagtgagccctccacagaaagctaaggaggcaccaaacacccaggctcagcccatcagcgatgatgaagcaagcgacggcgaagagactcaggtttcagccgctgacttagaggcccttatttcgggacactatcccacctcacttgagggggactgcgagcccagtcctgcgcctgccgtcttggataaatgggtgtgtgctcagccctcaagtcagaaagcgacgaaccacaacctacacattaccgagaaactggaagtactggccaaagcctactccgtgcagggggataagtggagggccctgggttatgccaaggccataaacgctttgaagtctttccacaagccagttacctcataccaagaggcttgttctatcccaggcattgggaaacgtatggcagagaaaattatagaaatcctggagtctggccacctcagaaagcttgatcatatatctgaaagtgtccctgtcctcgagttattctccaatatttggggcgcaggtaccaaaaccgcccagatgtggtatcagcagggtttcagaagtctggaggacatcagatctcaagcctcattgacaacacagcaggcaatcggactcaaacactatagtgatttcctggaacggatgcctagggaggaggctaccgagatcgagcaaacggtccagaaagcagcccaggcattcaattcaggcctgctatgcgtagcttgcggatcctatcgccgagggaaagctacctgtggcgacgttgatgtcctgatcacccacccagatgggaggtcccatagagggatcttctccaggcttctggatagtctgaggcaggaaggctttctaacagatgacctcgtgtcccaggaggaaaacgggcagcagcagaaatacttgggcgtgtgtcgcctgcctggaccgggtcgccgacataggagacttgacattattgtagtgccctactccgagtttgcctgtgcgttgctctacttcactggctccgcacatttcaacagatctatgcgggcactagctaagaccaagggcatgtccctgtcagagcacgccctgagcaccgcagttgttcgcaatactcacggatgtaaagtgggcccaggtcgtgtgctgcctaccccaaccgagaaagacgtgtttcgcctgctggggctcccctacagagagcctgccgagcgcgattggtag

SEQ ID NO: 69217 - DNA, 1728 bp, Artificial Sequence
  derived and/or modified sequence
atggatcccagagggattctgaaggccttcccaaagcgacagaaaatccacgccgatgcatcctcaaaagtgcttgccaagatccctagaagagaagagggtgaagaggctgaggaatggctcagtagcttaagggcacacgtggttaggacaggaatcggcagagcaagggcagagttgtttgagaaacaaatcgtgcaacacgggggacagctctgcccggctcagggccctggtgtgacgcacatcgtggttgacgagggaatggattatgagcgcgctttgagactgctgcgccttccccagttacccccaggagctcagttagtgaagtctgcatggctgagtttatgccttcaggagcgtcgcttagtggatgtggcgggattttcaatatttattcccagcagatacctggatcacccacaaccctctaaggccgagcaagatgcctccatcccacccggaacccatgaggctcttctgcagaccgccctgtcccctcctccccctcccacgaggcctgtgagcccaccacagaaagccaaagaagcacccaacacccaggctcagcctatttctgatgacgaagccagcgatggggaggagacacaggtcagcgccgcagatctggaagcactgatatctggtcactatcccacctccctggagggggattgcgaacctagtccagcccctgccgtgctggataaatgggtgtgcgctcaacccagcagccagaaggccaccaatcacaacctgcacatcaccgagaagttagaggtgctcgctaaggcatactccgtccagggcgacaagtggcgcgctctgggatacgccaaagcaataaacgcgttgaagagtttccacaaacctgttaccagttatcaggaggcttgcagcatacctggcataggcaaaagaatggctgagaagatcatcgagattctggagagcgggcaccttaggaagctcgaccacattagcgaaagtgtgccagtactagagctgttcagcaatatctggggagccggaacaaaaacagcccaaatgtggtatcaacagggcttcagatccctcgaggacatccgcagccaggctagcctgacaactcagcaggcgattgggctgaagcactacagcgacttcctggagaggatgccgagagaggaggcgacagaaattgaacagacggtccaaaaggcggctcaggcctttaattcgggactgctctgtgtcgcctgtggcagttacaggcgagggaaagccacttgcggggatgtagatgtgctgatcacccacccagacggccgatcacatagaggtattttttcgagattgctggactctctgcggcaggaaggtttcttgacagacgatttggtcagccaggaagagaacgggcagcagcagaaatatcttggcgtgtgccgcttgcctggcccaggtcggcgtcaccgcagattggatatcatcgttgtcccgtattctgagtttgcctgcgccctgctgtacttcaccggcagcgcgcatttcaacaggagcatgagggcgctcgctaagacaaagggtatgtctctgtcagagcacgccctgagcacggccgttgttcgcaacacgcacgggtgtaaggtgggcccaggacgggtactgcctacaccaaccgagaaagatgtattcagactccttggcctgccctatcgagagccagcagaacgcgactggtag

SEQ ID NO: 69218 - DNA, 1464 bp, Artificial Sequence
  derived and/or modified sequence
atggactacgaaagagcactgcggctcctgaggctacctcagctgcctcctggcgcacagctggtgaaaagtgcttggctctctctgtgtctccaagagcggaggctcgtcgatgtggccggtttttccattttcataccctctcggtatctggaccatcctcagccaagcaaagctgagcaagacgcatcaattccacccggaacccacgaagctctcttgcagacagctcttagtcctcccccaccccctactagacccgtctctccaccacagaaagccaaggaagctcctaatacccaggcgcagcctattagcgacgatgaggcctccgatggcgaggaaactcaggtgtcagctgcagatctcgaagctcttattagcgggcattaccctacttccctggagggggactgcgagccctctcccgctcccgcagtgctggacaaatgggtctgcgcgcagccttcatctcagaaggctacgaatcacaacctccacattacggagaaacttgaggtcctggcaaaagcatactctgtgcagggcgacaaatggagggctttgggttatgcaaaagccatcaatgccctgaaatcatttcacaagcccgtgaccagttaccaggaagcctgctccattcctggcatcggaaaacgcatggctgaaaagataatcgagatcctggaatctgggcacctgcgtaaactcgatcacatcagtgagtccgtacccgtgctcgagctcttttctaatatctggggagccggaaccaagactgctcagatgtggtaccagcagggattcagatctctggaagatatccgctcacaggcttctctgactacccagcaagcaatcggcctaaaacattattcagacttcttggagcgcatgcctcgggaagaggcaaccgaaattgagcagaccgtacagaaggccgctcaggcattcaattcaggccttctctgtgtagcctgcggctcttatcgacgaggcaaagccacttgtggagacgtcgacgtgctgataacacaccctgatgggaggtctcacagaggcatcttctcacggctcctcgactccctccgccaggagggattcttaacagacgacttggtgtcccaggaagagaacgggcagcaacaaaagtaccttggtgtgtgcagactgccagggccagggaggcgtcatcgcaggctggacatcattgtcgtgccttactctgaattcgcttgtgccctgttatacttcacgggctcagcccattttaaccgttctatgcgggctctcgcgaagactaaaggaatgtctctgtcagagcatgctttatctacggctgttgtccgaaatacgcatggctgcaaggtcggtcctggccgagtcctgccaactccaaccgaaaaagacgttttccggctgttagggctgccttaccgagagcccgcagagagagattggtag

SEQ ID NO: 69219 - DNA, 1548 bp, Artificial Sequence
  derived and/or modified sequence
atggaccccagagggatcctgaaagccttccccaaacgacagaagattcatgcagatgcatcctcaaaggtgctcgctaaaatcccccgacgggaagaaggtgaagaagccgaggaatggctgtcttccctccgcgctcatgtggtccgaaccggcatcgggagagccagagcagaactatttgagaaacagatcgtgcaacacggcggacagctgtgccccgctcagggtcccggtgtgactcacatcgtcgtcgatgagggtatggactacgaaagggctttgagactgctgagactgccacagctgccgcctggcgcacagctcgtgaagtccgcctggcttagcctgtgcctgcaggagcgcaggctcgttgacgtagccggattcagtattttcattccgtccaggtacctggatcatccacagccatccaaggccgaacaagacgcatctatcccacccggtactcacgaggctctactgcagactgctctgagccctccccctcccccaacccgacctgtcagtccaccgcagaaagctaaagaggcacccaacacgcaggctcagccgatttcagatgacgaggcctccgatggggaagagacccaagtctctgccgcagatctggaggctctgattagtggacactaccccacgtcactggaaggggactgtgaaccctctcccgcacccgcagtgttggacaagtgggtgtgtgctcaaccgtcctcccagaaggccacaaatcacaatctgcacataactgagaagctcgaggtccttgcaaaggcttattctgtgcaaggggacaagtggcgcgctctggggtatgctaaggctatcaatgcgctgaaatcatttcacaaacctgtgacttcataccaggaagcctgcagcatccctggaattggcaagcgcatggcagagaagattatagaaattctcgaatccgggcacctgaggaaattagaccatatctcagaatcagtccccgtcttagagttattctcgaatatttggggggctgggaccaaaaccgcccagatgtggtaccagcaggggtttaggagcttggaggacatccgatcccaggcctccctaaccacacagcaggcaattggcctcaaacactattccgacttccttgaaagaatgccccgtgaagaagcgaccgagattgagcagacggtccagaaggcggcacaggcctttaactcagggctgctctgtgtggcgtgtgggtcttacagacggggaaaagcaacttgtggggacgttgatgtcctgatcacgcacccggatgggaggagtcatcgcggaattttttctaggttactggacagtctccggcaggagggcttcttaactgacgatctggtgagtcaagaggagaacgggcagcaacagaagtatctgggggtctgccgactcccgggtcctggtcgtaggcaccgccgattagacatcattgtagtaccttacagtgagttcgcttgtgcgttgcagggaggagcttggcccagtgcggcacattcccactag

SEQ ID NO: 69220 - DNA, 810 bp, Artificial Sequence
  derived and/or modified sequence
atggacccccgagggatcttgaaagctttcccgaagcggcagaaaatccatgccgacgcgagtagtaaagtgctggccaaaattcctcgcagggaagagggggaagaggcggaggaatggctcagctcgctcagagcacacgttgtgcgcacaggaataggcagagccagagctgagctgtttgaaaagcagatcgtccaacatgggggtcaactgtgcccagcgcagggcccaggagtgactcatatcgtcgtggacgagggcatggactacgaaagggccttacggctgctgagattgccgcagctccctccaggcgcacaactcgtaaagagcgcgtggctgtcactgtgcttgcaggaacgacggcttgtcgacgtggcgggtttctctatctttatcccctcaaggtacctcgatcatccacagcctagcaaagcagagcaggatgcttctatccccccagggacgcacgaggccctgctccagactgcactatcccctcccccaccgccaacgagaccagtgtccccaccacaaaaagcaaaagaggccccaaatacacaagcccagcccatctcagatgacgaagccagcgatggcgaggagacacaggtatccgcagctgacttggaggccctgatcagcgggcactatcctactagccttgagggcgattgcgaaccctcccccgcacctgcggtccttgacaagtgggtgtgcgcccagccctcaagtcagaaggctaccaaccataatctgcatataacggaaaaattggaagttctagcaaaggcttatagtgtctag

SEQ ID NO: 69221 - DNA, 1005 bp, Artificial Sequence
  derived and/or modified sequence
atggatcctcggggaattcttaaagccttccctaaacggcagaaaatccacgccgatgcgagttccaagccctcctgcgcttcagctcttcggtgcctctgccctgaaagcgatattggggcagacagcgcgtgccccggaccggctgagtggctctcctccctgcgcgcacatgtggtccgcactggcattgggagggcacgggctgagctgttcgaaaagcagatcgtgcaacacggagggcagctctgtccggctcagggcccaggagtcacacacatcgtcgtggacgagggcatggactacgagcgcgctctgcggctcctgagacttccccaactccctcccggagctcagctggtgaagagtgcatggctcagcctttgcctccaggagagaaggttagttgatgtggctggatttagcatttttatcccttcacgttacctcgatcatccccaaccatccaaagcagagcaggacgcctccatcccccctggcacccacgaggcccttctccagacagcgctgagtccaccacccccaccaacacggcctgtctccccccctcagaaggctaaggaagctcctaacactcaggcacaacccatcagtgacgatgaggcttctgatggtgaggaaacgcaggtgtctgccgctgatctggaagcactcattagcggacactaccccacctcattggaaggagattgcgaacctagccccgctcccgctgtccttgataagtgggtctgcgcccagccaagcagccaaaaggcaacgaaccacaacctgcatattaccgagaagttggaggtgctggcgaaggcatatagcgttcagggcgacaagtggcgggctctgggatacgccaaagccatcaatgctctgaaatcttttcataaacccgtgacatcataccaggaggcatgttccattccaggtatcggaaaaagaatggctgaaaaaatcattgaaattctcgaatcaggccacctcaggtag

SEQ ID NO: 69222 - DNA, 2670 bp, Artificial Sequence
  derived and/or modified sequence
ctgctggtaagtggtctattcctgcccacccccgggtgactagcttggccagtagtcgaccccacccggggaccgactctgggggttggagagactcttggggccggggtcgggcactccagctttcttctagccccgagctgggattccctggcctgcgccagctgcgtacacggcgagtacaccgcacctgcccgggacttcacccgcagctgcgagactcctccattcccggagggctccccacacctgctgcggccgtgccccatctccccgcagctgcggcgctgagcacccccatgtcgagaggctgagaccaggacagcagccctgaccaacgctccaataggccgggatccagccatacttcaatggatcccaggggtatcttgaaggcatttcccaagcggcagaaaattcatgctgatgcatcatcaaaagtacttgcaaagattcctaggagggaagagggagaagaagcagaagagtggctgagctcccttcgggcccatgttgtgcgcactggcattggacgagcccgggcagaactctttgagaagcagattgttcagcatggcggccagctatgccctgcccagggcccaggtgtcactcacattgtggtggatgaaggcatggactatgagcgagccctccgccttctcagactaccccagctgcccccgggtgctcagctggtgaagtcagcctggctgagcttgtgccttcaggagaggaggctggtggatgtagctggattcagcatcttcatccccagtaggtacttggaccatccacagcccagcaaggcagagcaggatgcttctattcctcctggcacccatgaggccctgcttcagacagccctttctcctcctcctcctcccaccaggcctgtgtctcctccccaaaaggcaaaagaggcaccaaacacccaagcccagcccatctctgatgatgaagccagtgatggggaagaaacccaggttagtgcagctgatctggaagccctcatcagtggccactaccccacctcccttgagggagattgtgagcctagcccagcccctgctgtcctggataagtgggtctgtgcacagccctcaagccagaaggcgaccaatcacaacctccatatcacagagaagctggaagttctggccaaagcctacagtgttcagggagacaagtggagggccctgggctatgccaaggccatcaatgccctcaagagcttccataagcctgtcacctcgtaccaggaggcctgcagtatccctgggattgggaagcggatggctgagaaaatcatagagatcctggagagcgggcatttgcggaagctggaccatatcagtgagagcgtgcctgtcttggagctcttctccaacatctggggagctgggaccaagactgcccagatgtggtaccaacagggcttccgaagtctggaagacatccgcagccaggcctccctgacaacccagcaggccatcggcctgaagcattacagtgacttcctggaacgtatgcccagggaggaggctacagagattgagcagacagtccagaaagcagcccaggcctttaactctgggctgctgtgtgtggcatgtggttcataccgacggggaaaggcgacctgtggtgatgtcgacgtgctcatcactcacccagatggccggtcccaccggggtatcttcagccgcctccttgacagtcttcggcaggaagggttcctcacagatgacttggtgagccaagaggagaatggtcagcaacagaagtacttgggggtgtgccggctcccagggccagggcggcggcaccggcgcctggacatcatcgtggtgccctatagcgagtttgcctgtgccctgctctacttcaccggctctgcacacttcaaccgctccatgcgagccctggccaaaaccaagggcatgagtctgtcagaacatgccctcagcactgctgtggtccggaacacccatggctgcaaggtggggcctggccgagtgctgcccactcccactgagaaggatgtcttcaggctcttaggcctcccctaccgagaacctgctgagcgggactggtgacccatggctgggggtgctgaggagagccgagttggactggctacccctcctggccacccagtactccctccagcctcagctggctgaacctcgccgctccaaccaccagcttcctcagcgagcagggcccagggctctgggcctgaagcaagagccagcccggctcccagtgtctgcccggctcccagtgtctgcccagccctctcccagacaggagcaggctgccaccccttctacctcaccactgcccctcgaagaattttgcaaatggccccttgccccattttaagcaggagcaggtggctggtttgaagccccaggtatcccccttccctgctatgggaaaggccaagctgctgggtggggacagaagctgcaggggagagggaagcagccgtgctgtcaacatcatccggcaccctctggggtaggagaacagccattccacatgtgttccctctatccgtcctgcttcctgggcagctggtggtgctgggaatggggtgccccagccttggtgaggacagtgttgggaggcccaggggcccagtaaagtgcatttgacattgaa

SEQ ID NO: 69223 - DNA, 2278 bp, Artificial Sequence
  derived and/or modified sequence
attctggccatttgccctccttccccccttcgtccgctctcattggctctgctgcagccctgaccaacgctccaataggccgggatccagccatacttcaatggatcccaggggtatcttgaaggcatttcccaagcggcagaaaattcatgctgatgcatcatcaaaagtacttgcaaagattcctaggagggaagagggagaagaagcagaagagtggctgagctcccttcgggcccatgttgtgcgcactggcattggacgagcccgggcagaactctttgagaagcagattgttcagcatggcggccagctatgccctgcccagggcccaggtgtcactcacattgtggtggatgaaggcatggactatgagcgagccctccgccttctcagactaccccagctgcccccgggtgctcagctggtgaagtcagcctggctgagcttgtgccttcaggagaggaggctggtggatgtagctggattcagcatcttcatccccagtaggtacttggaccatccacagcccagcaaggcagagcaggatgcttctattcctcctggcacccatgaggccctgcttcagacagccctttctcctcctcctcctcccaccaggcctgtgtctcctccccaaaaggcaaaagaggcaccaaacacccaagcccagcccatctctgatgatgaagccagtgatggggaagaaacccaggttagtgcagctgatctggaagccctcatcagtggccactaccccacctcccttgagggagattgtgagcctagcccagcccctgctgtcctggataagtgggtctgtgcacagccctcaagccagaaggcgaccaatcacaacctccatatcacagagaagctggaagttctggccaaagcctacagtgttcagggagacaagtggagggccctgggctatgccaaggccatcaatgccctcaagagcttccataagcctgtcacctcgtaccaggaggcctgcagtatccctgggattgggaagcggatggctgagaaaatcatagagatcctggagagcgggcatttgcggaagctggaccatatcagtgagagcgtgcctgtcttggagctcttctccaacatctggggagctgggaccaagactgcccagatgtggtaccaacagggcttccgaagtctggaagacatccgcagccaggcctccctgacaacccagcaggccatcggcctgaagcattacagtgacttcctggaacgtatgcccagggaggaggctacagagattgagcagacagtccagaaagcagcccaggcctttaactctgggctgctgtgtgtggcatgtggttcataccgacggggaaaggcgacctgtggtgatgtcgacgtgctcatcactcacccagatggccggtcccaccggggtatcttcagccgcctccttgacagtcttcggcaggaagggttcctcacagatgacttggtgagccaagaggagaatggtcagcaacagaagtacttgggggtgtgccggctcccagggccagggcggcggcaccggcgcctggacatcatcgtggtgccctatagcgagtttgcctgtgccctgcaaggtggggcctggccgagtgctgcccactcccactgagaaggatgtcttcaggctcttaggcctcccctaccgagaacctgctgagcgggactggtgacccatggctgggggtgctgaggagagccgagttggactggctacccctcctggccacccagtactccctccagcctcagctggctgaacctcgccgctccaaccaccagcttcctcagcgagcagggcccagggctctgggcctgaagcaagagccagcccggctcccagtgtctgcccggctcccagtgtctgcccagccctctcccagacaggagcaggctgccaccccttctacctcaccactgcccctcgaagaattttgcaaatggccccttgccccattttaagcaggagcaggtggctggtttgaagccccaggtatcccccttccctgctatgggaaaggccaagctgctgggtggggacagaagctgcaggggagagggaagcagccgtgctgtcaacatcatccggcaccctctggggtaggagaacagccattccacatgtgttccctctatccgtcctgcttcctgggcagctggtggtgctgggaatggggtgccccagccttggtgaggacagtgttgggaggcccaggggcccagtaaagtgcatttgacattg

SEQ ID NO: 69224 - DNA, 2792 bp, Artificial Sequence
  derived and/or modified sequence
tgactcggaagctattctggccatttgccctccttccccccttcgtccgctctcattggctctgctggtaagtggtctattcctgcccacccccgggtgactagcttggccagtagtcgaccccacccggggaccgactctgggggttggagagactcttggggccggggtcgggcactccagctttcttctagccccgagctgggattccctggcctgcgccagctgcgtacacggcgagtacaccgcacctgcccgggacttcacccgcagctgcgagactcctccattcccggagggctccccacacctgctgcggccgtgccccatctccccgcagctgcggcgctgagcacccccatgtcgagaggctgagaccaggacaggtgcagggcgttcccactcacccccgaaagtcctcctccttcctctgcgagtctgtgttggagcagccctgaccaacgctccaataggccgggatccagccatacttcaatggatcccaggggtatcttgaaggcatttcccaagcggcagaaaattcatgctgatgcatcatcaaaagtacttgcaaagattcctaggagggaagagggagaagaagcagaagagtggctgagctcccttcgggcccatgttgtgcgcactggcattggacgagcccgggcagaactctttgagaagcagattgttcagcatggcggccagctatgccctgcccagggcccaggtgtcactcacattgtggtggatgaaggcatggactatgagcgagccctccgccttctcagactaccccagctgcccccgggtgctcagctggtgaagtcagcctggctgagcttgtgccttcaggagaggaggctggtggatgtagctggattcagcatcttcatccccagtaggtacttggaccatccacagcccagcaaggcagagcaggatgcttctattcctcctggcacccatgaggccctgcttcagacagccctttctcctcctcctcctcccaccaggcctgtgtctcctccccaaaaggcaaaagaggcaccaaacacccaagcccagcccatctctgatgatgaagccagtgatggggaagaaacccaggttagtgcagctgatctggaagccctcatcagtggccactaccccacctcccttgagggagattgtgagcctagcccagcccctgctgtcctggataagtgggtctgtgcacagccctcaagccagaaggcgaccaatcacaacctccatatcacagagaagctggaagttctggccaaagcctacagtgttcagggagacaagtggagggccctgggctatgccaaggccatcaatgccctcaagagcttccataagcctgtcacctcgtaccaggaggcctgcagtatccctgggattgggaagcggatggctgagaaaatcatagagatcctggagagcgggcatttgcggaagctggaccatatcagtgagagcgtgcctgtcttggagctcttctccaacatctggggagctgggaccaagactgcccagatgtggtaccaacagggcttccgaagtctggaagacatccgcagccaggcctccctgacaacccagcaggccatcggcctgaagcattacagtgacttcctggaacgtatgcccagggaggaggctacagagattgagcagacagtccagaaagcagcccaggcctttaactctgggctgctgtgtgtggcatgtggttcataccgacggggaaaggcgacctgtggtgatgtcgacgtgctcatcactcacccagatggccggtcccaccggggtatcttcagccgcctccttgacagtcttcggcaggaagggttcctcacagatgacttggtgagccaagaggagaatggtcagcaacagaagtacttgggggtgtgccggctcccagggccagggcggcggcaccggcgcctggacatcatcgtggtgccctatagcgagtttgcctgtgccctgctctacttcaccggctctgcacacttcaaccgctccatgcgagccctggccaaaaccaagggcatgagtctgtcagaacatgccctcagcactgctgtggtccggaacacccatggctgcaaggtggggcctggccgagtgctgcccactcccactgagaaggatgtcttcaggctcttaggcctcccctaccgagaacctgctgagcgggactggtgacccatggctgggggtgctgaggagagccgagttggactggctacccctcctggccacccagtactccctccagcctcagctggctgaacctcgccgctccaaccaccagcttcctcagcgagcagggcccagggctctgggcctgaagcaagagccagcccggctcccagtgtctgcccggctcccagtgtctgcccagccctctcccagacaggagcaggctgccaccccttctacctcaccactgcccctcgaagaattttgcaaatggccccttgccccattttaagcaggagcaggtggctggtttgaagccccaggtatcccccttccctgctatgggaaaggccaagctgctgggtggggacagaagctgcaggggagagggaagcagccgtgctgtcaacatcatccggcaccctctggggtaggagaacagccattccacatgtgttccctctatccgtcctgcttcctgggcagctggtggtgctgggaatggggtgccccagccttggtgaggacagtgttgggaggcccaggggcccagtaaagtgcatttgacattg

SEQ ID NO: 69225 - DNA, 2360 bp, Artificial Sequence
  derived and/or modified sequence
gatttccacgtgcagcagccctgaccaacgctccaataggccgggatccagccatacttcaatggatcccaggggtatcttgaaggcatttcccaagcggcagaaaattcatgctgatgcatcatcaaaagtacttgcaaagattcctaggagggaagagggagaagaagcagaagagtggctgagctcccttcgggcccatgttgtgcgcactggcattggacgagcccgggcagaactctttgagaagcagattgttcagcatggcggccagctatgccctgcccagggcccaggtgtcactcacattgtggtggatgaaggcatggactatgagcgagccctccgccttctcagactaccccagctgcccccgggtgctcagctggtgaagtcagcctggctgagcttgtgccttcaggagaggaggctggtggatgtagctggattcagcatcttcatccccagtaggtacttggaccatccacagcccagcaaggcagagcaggatgcttctattcctcctggcacccatgaggccctgcttcagacagccctttctcctcctcctcctcccaccaggcctgtgtctcctccccaaaaggcaaaagaggcaccaaacacccaagcccagcccatctctgatgatgaagccagtgatggggaagaaacccaggttagtgcagctgatctggaagccctcatcagtggccactaccccacctcccttgagggagattgtgagcctagcccagcccctgctgtcctggataagtgggtctgtgcacagccctcaagccagaaggcgaccaatcacaacctccatatcacagagaagctggaagttctggccaaagcctacagtgttcagggagacaagtggagggccctgggctatgccaaggccatcaatgccctcaagagcttccataagcctgtcacctcgtaccaggaggcctgcagtatccctgggattgggaagcggatggctgagaaaatcatagagatcctggagagcgggcatttgcggaagctggaccatatcagtgagagcgtgcctgtcttggagctcttctccaacatctggggagctgggaccaagactgcccagatgtggtaccaacagggcttccgaagtctggaagacatccgcagccaggcctccctgacaacccagcaggccatcggcctgaagcattacagtgacttcctggaacgtatgcccagggaggaggctacagagattgagcagacagtccagaaagcagcccaggcctttaactctgggctgctgtgtgtggcatgtggttcataccgacggggaaaggcgacctgtggtgatgtcgacgtgctcatcactcacccagatggccggtcccaccggggtatcttcagccgcctccttgacagtcttcggcaggaagggttcctcacagatgacttggtgagccaagaggagaatggtcagcaacagaagtacttgggggtgtgccggctcccagggccagggcggcggcaccggcgcctggacatcatcgtggtgccctatagcgagtttgcctgtgccctgctctacttcaccggctctgcacacttcaaccgctccatgcgagccctggccaaaaccaagggcatgagtctgtcagaacatgccctcagcactgctgtggtccggaacacccatggctgcaaggtggggcctggccgagtgctgcccactcccactgagaaggatgtcttcaggctcttaggcctcccctaccgagaacctgctgagcgggactggtgacccatggctgggggtgctgaggagagccgagttggactggctacccctcctggccacccagtactccctccagcctcagctggctgaacctcgccgctccaaccaccagcttcctcagcgagcagggcccagggctctgggcctgaagcaagagccagcccggctcccagtgtctgcccggctcccagtgtctgcccagccctctcccagacaggagcaggctgccaccccttctacctcaccactgcccctcgaagaattttgcaaatggccccttgccccattttaagcaggagcaggtggctggtttgaagccccaggtatcccccttccctgctatgggaaaggccaagctgctgggtggggacagaagctgcaggggagagggaagcagccgtgctgtcaacatcatccggcaccctctggggtaggagaacagccattccacatgtgttccctctatccgtcctgcttcctgggcagctggtggtgctgggaatggggtgccccagccttggtgaggacagtgttgggaggcccaggggcccagtaaagtgcatttgacattgaa

SEQ ID NO: 69226 - DNA, 2308 bp, Artificial Sequence
  derived and/or modified sequence
atttgccctccttccccccttcgtccgctctcattggctctgctgccttcatgtgcttcagccctacgttgtttatgtccagaatcagatattggagctgactctgcctgtccagggcctgcagagtggctgagctcccttcgggcccatgttgtgcgcactggcattggacgagcccgggcagaactctttgagaagcagattgttcagcatggcggccagctatgccctgcccagggcccaggtgtcactcacattgtggtggatgaaggcatggactatgagcgagccctccgccttctcagactaccccagctgcccccgggtgctcagctggtgaagtcagcctggctgagcttgtgccttcaggagaggaggctggtggatgtagctggattcagcatcttcatccccagtaggtacttggaccatccacagcccagcaaggcagagcaggatgcttctattcctcctggcacccatgaggccctgcttcagacagccctttctcctcctcctcctcccaccaggcctgtgtctcctccccaaaaggcaaaagaggcaccaaacacccaagcccagcccatctctgatgatgaagccagtgatggggaagaaacccaggttagtgcagctgatctggaagccctcatcagtggccactaccccacctcccttgagggagattgtgagcctagcccagcccctgctgtcctggataagtgggtctgtgcacagccctcaagccagaaggcgaccaatcacaacctccatatcacagagaagctggaagttctggccaaagcctacagtgttcagggagacaagtggagggccctgggctatgccaaggccatcaatgccctcaagagcttccataagcctgtcacctcgtaccaggaggcctgcagtatccctgggattgggaagcggatggctgagaaaatcatagagatcctggagagcgggcatttgcggaagctggaccatatcagtgagagcgtgcctgtcttggagctcttctccaacatctggggagctgggaccaagactgcccagatgtggtaccaacagggcttccgaagtctggaagacatccgcagccaggcctccctgacaacccagcaggccatcggcctgaagcattacagtgacttcctggaacgtatgcccagggaggaggctacagagattgagcagacagtccagaaagcagcccaggcctttaactctgggctgctgtgtgtggcatgtggttcataccgacggggaaaggcgacctgtggtgatgtcgacgtgctcatcactcacccagatggccggtcccaccggggtatcttcagccgcctccttgacagtcttcggcaggaagggttcctcacagatgacttggtgagccaagaggagaatggtcagcaacagaagtacttgggggtgtgccggctcccagggccagggcggcggcaccggcgcctggacatcatcgtggtgccctatagcgagtttgcctgtgccctgctctacttcaccggctctgcacacttcaaccgctccatgcgagccctggccaaaaccaagggcatgagtctgtcagaacatgccctcagcactgctgtggtccggaacacccatggctgcaaggtggggcctggccgagtgctgcccactcccactgagaaggatgtcttcaggctcttaggcctcccctaccgagaacctgctgagcgggactggtgacccatggctgggggtgctgaggagagccgagttggactggctacccctcctggccacccagtactccctccagcctcagctggctgaacctcgccgctccaaccaccagcttcctcagcgagcagggcccagggctctgggcctgaagcaagagccagcccggctcccagtgtctgcccggctcccagtgtctgcccagccctctcccagacaggagcaggctgccaccccttctacctcaccactgcccctcgaagaattttgcaaatggccccttgccccattttaagcaggagcaggtggctggtttgaagccccaggtatcccccttccctgctatgggaaaggccaagctgctgggtggggacagaagctgcaggggagagggaagcagccgtgctgtcaacatcatccggcaccctctggggtaggagaacagccattccacatgtgttccctctatccgtcctgcttcctgggcagctggtggtgctgggaatggggtgccccagccttggtgaggacagtgttgggaggcccaggggcccagtaaagtgcatttgacattgaa

SEQ ID NO: 69227 - DNA, 2280 bp, Artificial Sequence
  derived and/or modified sequence
attctggccatttgccctccttccccccttcgtccgctctcattggctctgctgcagccctgaccaacgctccaataggccgggatccagccatacttcaatggatcccaggggtatcttgaaggcatttcccaagcggcagaaaattcatgctgatgcatcatcaaaagtacttgcaaagattcctaggagggaagagggagaagaagcagaagagtggctgagctcccttcgggcccatgttgtgcgcactggcattggacgagcccgggcagaactctttgagaagcagattgttcagcatggcggccagctatgccctgcccagggcccaggtgtcactcacattgtggtggatgaaggcatggactatgagcgagccctccgccttctcagactaccccagctgcccccgggtgctcagctggtgaagtcagcctggctgagcttgtgccttcaggagaggaggctggtggatgtagctggattcagcatcttcatccccagtaggtacttggaccatccacagcccagcaaggcagagcaggatgcttctattcctcctggcacccatgaggccctgcttcagacagccctttctcctcctcctcctcccaccaggcctgtgtctcctccccaaaaggcaaaagaggcaccaaacacccaagcccagcccatctctgatgatgaagccagtgatggggaagaaacccaggttagtgcagctgatctggaagccctcatcagtggccactaccccacctcccttgagggagattgtgagcctagcccagcccctgctgtcctggataagtgggtctgtgcacagccctcaagccagaaggcgaccaatcacaacctccatatcacagagaagctggaagttctggccaaagcctacagtgttcagggagacaagtggagggccctgggctatgccaaggccatcaatgccctcaagagcttccataagcctgtcacctcgtaccaggaggcctgcagtatccctgggattgggaagcggatggctgagaaaatcatagagatcctggagagcgggcatttgcggaagctggaccatatcagtgagagcgtgcctgtcttggagctcttctccaacatctggggagctgggaccaagactgcccagatgtggtaccaacagggcttccgaagtctggaagacatccgcagccaggcctccctgacaacccagcaggccatcggcctgaagcattacagtgacttcctggaacgtatgcccagggaggaggctacagagattgagcagacagtccagaaagcagcccaggcctttaactctgggctgctgtgtgtggcatgtggttcataccgacggggaaaggcgacctgtggtgatgtcgacgtgctcatcactcacccagatggccggtcccaccggggtatcttcagccgcctccttgacagtcttcggcaggaagggttcctcacagatgacttggtgagccaagaggagaatggtcagcaacagaagtacttgggggtgtgccggctcccagggccagggcggcggcaccggcgcctggacatcatcgtggtgccctatagcgagtttgcctgtgccctgcaaggtggggcctggccgagtgctgcccactcccactgagaaggatgtcttcaggctcttaggcctcccctaccgagaacctgctgagcgggactggtgacccatggctgggggtgctgaggagagccgagttggactggctacccctcctggccacccagtactccctccagcctcagctggctgaacctcgccgctccaaccaccagcttcctcagcgagcagggcccagggctctgggcctgaagcaagagccagcccggctcccagtgtctgcccggctcccagtgtctgcccagccctctcccagacaggagcaggctgccaccccttctacctcaccactgcccctcgaagaattttgcaaatggccccttgccccattttaagcaggagcaggtggctggtttgaagccccaggtatcccccttccctgctatgggaaaggccaagctgctgggtggggacagaagctgcaggggagagggaagcagccgtgctgtcaacatcatccggcaccctctggggtaggagaacagccattccacatgtgttccctctatccgtcctgcttcctgggcagctggtggtgctgggaatggggtgccccagccttggtgaggacagtgttgggaggcccaggggcccagtaaagtgcatttgacattgaa

SEQ ID NO: 69228 - DNA, 855 bp, Artificial Sequence
  derived and/or modified sequence
cttcgtccgctctcattggctctgctggccgggatccagccatacttcaatggatcccaggggtatcttgaaggcatttcccaagcggcagaaaattcatgctgatgcatcatcaaaagtacttgcaaagattcctaggagggaagagggagaagaagcagaagagtggctgagctcccttcgggcccatgttgtgcgcactggcattggacgagcccgggcagaactctttgagaagcagattgttcagcatggcggccagctatgccctgcccagggcccaggtgtcactcacattgtggtggatgaaggcatggactatgagcgagccctccgccttctcagactaccccagctgcccccgggtgctcagctggtgaagtcagcctggctgagcttgtgccttcaggagaggaggctggtggatgtagctggattcagcatcttcatccccagtaggtacttggaccatccacagcccagcaaggcagagcaggatgcttctattcctcctggcacccatgaggccctgcttcagacagccctttctcctcctcctcctcccaccaggcctgtgtctcctccccaaaaggcaaaagaggcaccaaacacccaagcccagcccatctctgatgatgaagccagtgatggggaagaaacccaggttagtgcagctgatctggaagccctcatcagtggccactaccccacctcccttgagggagattgtgagcctagcccagcccctgctgtcctggataagtgggtctgtgcacagccctcaagccagaaggcgaccaatcacaacctccatatcacagagaagctggaagttctggccaaagcctacagtgt

SEQ ID NO: 69229 - DNA, 1049 bp, Artificial Sequence
  derived and/or modified sequence
agccctgaccaacgctccaataggccgggatccagccatacttcaatggatcccaggggtatcttgaaggcatttcccaagcggcagaaaattcatgctgatgcatcatcaaaaccttcatgtgcttcagccctacgttgtttatgtccagaatcagatattggagctgactctgcctgtccagggcctgcagagtggctgagctcccttcgggcccatgttgtgcgcactggcattggacgagcccgggcagaactctttgagaagcagattgttcagcatggcggccagctatgccctgcccagggcccaggtgtcactcacattgtggtggatgaaggcatggactatgagcgagccctccgccttctcagactaccccagctgcccccgggtgctcagctggtgaagtcagcctggctgagcttgtgccttcaggagaggaggctggtggatgtagctggattcagcatcttcatccccagtaggtacttggaccatccacagcccagcaaggcagagcaggatgcttctattcctcctggcacccatgaggccctgcttcagacagccctttctcctcctcctcctcccaccaggcctgtgtctcctccccaaaaggcaaaagaggcaccaaacacccaagcccagcccatctctgatgatgaagccagtgatggggaagaaacccaggttagtgcagctgatctggaagccctcatcagtggccactaccccacctcccttgagggagattgtgagcctagcccagcccctgctgtcctggataagtgggtctgtgcacagccctcaagccagaaggcgaccaatcacaacctccatatcacagagaagctggaagttctggccaaagcctacagtgttcagggagacaagtggagggccctgggctatgccaaggccatcaatgccctcaagagcttccataagcctgtcacctcgtaccaggaggcctgcagtatccctgggattgggaagcggatggctgagaaaatcatagagatcctggagagcgggcatttgcggaa

SEQ ID NO: 69230 - protein, 1350 aa, Artificial Sequence
  derived and/or modified sequence
MSGLGENLDPLASDSRKRKLPCDTPGQGLTCSGEKRRREQESKYIEELAELISANLSDIDNFNVKPDKCAILKETVRQIRQIKEQGKTISNDDDVQKADVSSTGQGVIDKDSLGPLLLQALDGFLFVVNRDGNIVFVSENVTQYLQYKQEDLVNTSVYNILHEEDRKDFLKNLPKSTVNGVSWTNETQRQKSHTFNCRMLMKTPHDILEDINASPEMRQRYETMQCFALSQPRAMMEEGEDLQSCMICVARRITTGERTFPSNPESFITRHDLSGKVVNIDTNSLRSSMRPGFEDIIRRCIQRFFSLNDGQSWSQKRHYQEVTSDGIFSPTAYLNGHAETPVYRFSLADGTIVTAQTKSKLFRNPVTNDRHGFVSTHFLQREQNGYRPNPNPVGQGIRPPMAGCNSSVGGMSMSPNQGLQMPSSRAYGLADPSTTGQMSGARYGGSSNIASLTPGPGMQSPSSYQNNNYGLNMSSPPHGSPGLAPNQQNIMISPRNRGSPKIASHQFSPVAGVHSPMASSGNTGNHSFSSSSLSALQAISEGVGTSLLSTLSSPGPKLDNSPNMNITQPSKVSNQDSKSPLGFYCDQNPVESSMCQSNSRDHLSDKESKESSVEGAENQRGPLESKGHKKLLQLLTCSSDDRGHSSLTNSPLDSSCKESSVSVTSPSGVSSSTSGGVSSTSNMHGSLLQEKHRILHKLLQNGNSPAEVAKITAEATGKDTSSITSCGDGNVVKQEQLSPKKKENNALLRYLLDRDDPSDALSKELQPQVEGVDNKMSQCTSSTIPSSSQEKDPKIKTETSEEGSGDLDNLDAILGDLTSSDFYNNSISSNGSHLGTKQQVFQGTNSLGDWGLPNSKAGRMEPMNSNSMGRPGGDYNTSLPRPALGGSIPTLPLRSNSIPGARPVLQQQQQMLQMRPGEIPMGMGANPYGQAAASNQLGSWPDGMLSMEQVSHGTQNRPLLRNSLDDLVGPPSNLEGQSDERALLDQLHTLLSNTDATGLEEIDRALGIPELVNQGQALEPKQDAFQGQEAAVMMDQKAGLYGQTYPAQGPPMQGGFHLQGQSPSFNSMMNQMNQQGNFPLQGMHPRANIMRPRTNTPKQLRMQLQQRLQGQQFLNQSRQALELKMENPTAGGAAVMRPMMQPQQGFLNAQMVAQRSRELLSHHFRQQRVAMMMQQQQQQQQQQQQQQQQQQQQQQQQQQQQQTQAFSPPPNVTASPSMDGLLAGPTMPQAPPQQFPYQPNYGMGQQPDPAFGRVSSPPNAMMSSRMGPSQNPMMQHPQAASIYQSSEMKGWPSGNLARNSSFSQQQFAHQGNPAVYSMVHMNGSSGHMGQMNMNPMPMSGMPMGPDQKYC

SEQ ID NO: 69231 - protein, 1415 aa, Artificial Sequence
  derived and/or modified sequence
MSGLGENLDPLASDSRKRKLPCDTPGQGLTCSGEKRRREQESKYIEELAELISANLSDIDNFNVKPDKCAILKETVRQIRQIKEQGKTISNDDDVQKADVSSTGQGVIDKDSLGPLLLQALDGFLFVVNRDGNIVFVSENVTQYLQYKQEDLVNTSVYNILHEEDRKDFLKNLPKSTVNGVSWTNETQRQKSHTFNCRMLMKTPHDILEDINASPEMRQRYETMQCFALSQPRAMMEEGEDLQSCMICVARRITTGERTFPSNPESFITRHDLSGKVVNIDTNSLRSSMRPGFEDIIRRCIQRFFSLNDGQSWSQKRHYQEVTSDGIFSPTAYLNGHAETPVYRFSLADGTIVTAQTKSKLFRNPVTNDRHGFVSTHFLQREQNGYRPNPNPVGQGIRPPMAGCNSSVGGMSMSPNQGLQMPSSRAYGLADPSTTGQMSGARYGGSSNIASLTPGPGMQSPSSYQNNNYGLNMSSPPHGSPGLAPNQQNIMISPRNRGSPKIASHQFSPVAGVHSPMASSGNTGNHSFSSSSLSALQAISEGVGTSLLSTLSSPGPKLDNSPNMNITQPSKVSNQDSKSPLGFYCDQNPVESSMCQSNSRDHLSDKESKESSVEGAENQRGPLESKGHKKLLQLLTCSSDDRGHSSLTNSPLDSSCKESSVSVTSPSGVSSSTSGGVSSTSNMHGSLLQEKHRILHKLLQNGNSPAEVAKITAEATGKDTSSITSCGDGNVVKQEQLSPKKKENNALLRYLLDRDDPSDALSKELQPQVEGVDNKMSQCTSSTIPSSSQEKDPKIKTETSEEGSGDLDNLDAILGDLTSSDFYNNSISSNGSHLGTKQQVFQGTNSLGLKSSQSVQSIRPPYNRAVSLDSPVSVGSSPPVKNISAFPMLPKQPMLGGNPRMMDSQENYGSSMGDWGLPNSKAGRMEPMNSNSMGRPGGDYNTSLPRPALGGSIPTLPLRSNSIPGARPVLQQQQQMLQMRPGEIPMGMGANPYGQAAASNQLGSWPDGMLSMEQVSHGTQNRPLLRNSLDDLVGPPSNLEGQSDERALLDQLHTLLSNTDATGLEEIDRALGIPELVNQGQALEPKQDAFQGQEAAVMMDQKAGLYGQTYPAQGPPMQGGFHLQGQSPSFNSMMNQMNQQGNFPLQGMHPRANIMRPRTNTPKQLRMQLQQRLQGQQFLNQSRQALELKMENPTAGGAAVMRPMMQPQQGFLNAQMVAQRSRELLSHHFRQQRVAMMMQQQQQQQQQQQQQQQQQQQQQQQQQQQQQTQAFSPPPNVTASPSMDGLLAGPTMPQAPPQQFPYQPNYGMGQQPDPAFGRVSSPPNAMMSSRMGPSQNPMMQHPQAASIYQSSEMKGWPSGNLARNSSFSQQQFAHQGNPAVYSMVHMNGSSGHMGQMNMNPMPMSGMPMGPDQKYC

SEQ ID NO: 69232 - DNA, 390 bp, Artificial Sequence
  derived and/or modified sequence
atggccgctgctacttgggataaggagtctaaatgccgactgtcacgcggtcattgccaccatcggagacaccaaagcttgcccgtaggattgactttgcgttattccgcgccagcctcgcatcagccgaaatgcttcacttccaagcacgggacgcgtccctctcagcgaaaaccgagcctgagggtatctgggcactactccccccacagcctgttccccggtcatggcagaaggggagcttgtgttgctcggtcccgacggtttgccggacacatgcagttaacatggaaactcaagagaaagaagccagggaggactgcttccagcgaagagcacaagaagcagggccgtggatgcgcaggacgacgattgattaaaagtacgtag

SEQ ID NO: 69233 - DNA, 4053 bp, Artificial Sequence
  derived and/or modified sequence
atgagcggcctgggcgaaaatcttgacccactggcctccgactcccggaagcgcaagctcccatgtgacactcctggccaaggattgacatgcagtggagagaagcgaagaagggagcaggagtccaagtacattgaggaacttgctgagcttatctccgccaacctgtctgacatcgacaactttaatgtgaagccagacaagtgtgccattttgaaagagaccgtgcggcagatcagacagatcaaggaacaagggaagacgatttctaacgatgatgacgtccagaaggccgacgtctccagcactggtcagggcgttattgacaaggattccctcggcccactcctcctgcaggccctggatggcttcctcttcgttgtgaaccgagatgggaatattgtctttgtttctgaaaacgtgacgcagtaccttcaatataagcaagaagatttggtgaacacatcggtctataacatcttgcacgaagaggacaggaaagattttctcaagaacctgccgaaaagtacagtgaacggtgttagttggacaaatgaaacacagcgccagaagtcacatacctttaactgtcgtatgctgatgaagactccgcacgacatcttggaggacatcaacgcctccccagagatgaggcagcggtatgaaacaatgcagtgcttcgccctttctcaacccagagctatgatggaggaaggagaagatctgcagtcatgcatgatttgtgtggctaggcgcatcacaacaggtgagagaacattcccttccaacccagagagtttcatcactaggcatgaccttagcggtaaggtcgtgaacatcgataccaacagtctgcggtctagcatgcggcctggctttgaggatattattcgacgctgcatccagcggttcttctcgcttaacgacggtcaatcttggagtcaaaagaggcattaccaagaggtcacaagcgatggaatcttcagccccacagcatacctgaatggccacgcagaaacgcccgtgtaccgctttagcttggccgatgggactatcgtgacagcacagaccaagtccaaacttttccgcaatcctgtaacaaacgacagacatggctttgtgtcaacgcatttcttgcagcgggagcagaacggatatcggccaaatcctaaccctgtgggacaagggatacgtccacccatggccggctgtaactcctctgtggggggaatgtccatgtccccaaaccagggcctacagatgcccagttcgcgcgcatacggcctggccgacccgtccacaactgggcagatgtcaggggctcggtacggtggctcttctaacatcgcaagcctgacaccaggacccgggatgcagagtccctcctcataccagaataataattacggactgaacatgtcgagccctccccacggcagcccaggactggccccaaaccagcagaatataatgatttctccccgaaaccggggcagccccaaaatcgccagccatcagttcagccctgtcgccggcgtgcatagccccatggcgtcatctggaaacacaggaaatcacagtttttcttcttcttccctctctgctctccaagctatttccgagggggtgggcacctcactgctcagtaccctgtctagtccggggcccaaactggacaatagtccaaatatgaacatcacgcagccatcaaaggttagcaaccaagattcaaaaagtcctttgggcttttactgcgatcaaaatcctgtcgagtcatccatgtgccaaagcaattcccgggatcacttatccgacaaagaatcaaaggagtccagcgtggaaggggccgaaaaccaacgcggccctctggaaagcaaagggcataaaaagttgctccaactactgacctgtagctctgacgaccgcggccactcctctctcactaattccccgctggacagctcatgcaaggaaagcagtgtgtctgtcacctccccttccggcgtgagctcttcaaccagtgggggggtgtcaagcacctccaatatgcacggaagcctattacaagaaaagcaccgtatactgcacaaactgctacagaatggtaacagccccgctgaggtcgctaaaattacagcggaggctactggaaaggatacatcctctattacttcctgtggagatggcaatgtcgtcaagcaggaacaactatcgccgaagaagaaggaaaacaacgcgctccttaggtacttactggatcgcgacgaccccagcgatgcactttctaaagaactgcagccacaagttgagggggttgacaataagatgtctcaatgcacaagcagcaccataccaagctcctcacaagaaaaggaccccaagatcaagactgaaacatctgaggaagggtcaggggatctcgataacttggatgctatcttgggcgatttgacctctagcgatttttacaataatagtattagctcaaacggatcacacctcggcactaagcagcaggtttttcaaggtacaaactcactcggcgattgggggctgcctaactctaaggccggaaggatggagcctatgaacagtaactctatgggtaggcccggtggagattataatacttcattgccccgccccgccctcggcggtagtatcccgacactgcccctccggagtaattcaatccccggggcgaggcccgtactgcaacaacaacaacaaatgttgcagatgaggcccggcgaaattccgatgggaatgggagcaaatccatatggacaggcagccgcctctaaccaactcggctcttggccagacggaatgctgagcatggaacaggtctcccatggcacgcagaatcgaccgctgctccgtaactcattagatgatctggtgggaccacctagcaatttagaaggacagagtgacgaaagggctctgctcgaccagttgcacacccttctgagcaatacggacgcgactggcctcgaagagattgatcgggccttgggtatcccagagttggttaaccaagggcaggctctggaacccaaacaggacgccttccaaggccaggaggccgccgtgatgatggaccagaaagccgggctttacggccaaacatatcccgcacaggggccgccaatgcaggggggcttccacctgcagggacagtcccccagcttcaattctatgatgaaccagatgaaccaacagggcaacttcccactgcaaggcatgcatccaagggccaacatcatgcgacctagaacaaacacaccgaaacagctgagaatgcagctgcagcaaagactgcaggggcagcagtttctgaatcagtcacgacaagctctagaactgaagatggagaacccaaccgcaggcggggccgccgtcatgagaccaatgatgcaacctcaacaggggttccttaatgcccagatggtggcccaacggagccgggagctgctttcacatcattttaggcagcaacgggtcgcaatgatgatgcagcagcagcaacagcagcagcagcagcaacagcagcagcagcagcagcaacaacagcaacaacaacagcaacagcagcaacaacagacccaagctttttctccaccccctaatgtgacagccagccctagtatggatggattacttgctggcccaacgatgcctcaggcacccccgcaacaattcccttatcagcctaattatgggatgggccaacagcccgatcctgcctttggcagggtaagtagcccgcctaatgcaatgatgtcctcgagaatgggccccagccagaaccctatgatgcaacatccacaggccgcctccatttaccagtcatcagaaatgaaaggctggcctagtggcaacctggcacgcaactcctccttttcccagcagcaatttgctcatcagggtaatcccgccgtttacagcatggtgcatatgaatggttcttctggacatatgggtcaaatgaatatgaaccctatgcccatgtctgggatgccaatgggccccgatcagaagtattgctag

SEQ ID NO: 69234 - DNA, 4248 bp, Artificial Sequence
  derived and/or modified sequence
atgtcaggcttaggagaaaacttagaccccctggcatctgattccaggaaaagaaagctcccatgcgacacaccgggccagggtttgacctgcagcggcgagaagagacgtagggaacaggaaagcaagtatatcgaagagctggcggagctgatttctgcaaacttgtctgatatagacaatttcaatgtgaagccagacaagtgtgccatccttaaggagaccgtgaggcagatccgtcagattaaagagcagggtaagacaattagcaatgatgatgatgtacagaaagcagacgtaagcagcaccggccaaggcgtgatagataaggacagtctgggacctctccttttgcaggccctcgatggtttcttgttcgtggttaaccgtgacgggaacatagtattcgtgtccgaaaatgtgacacagtacctgcagtataaacaggaggatctagttaatacgtccgtgtacaacattttgcacgaggaagataggaaagattttcttaagaacctccctaaatctaccgtgaacggcgtctcctggacaaatgagacacaacggcagaaatcccatacattcaactgccgtatgcttatgaaaacacctcacgatattctggaagacattaacgcctctccggagatgcgtcagagatatgaaacaatgcagtgcttcgccctgagccagccacgcgccatgatggaagaaggggaggacctacagtcctgtatgatctgcgtggccagacggattactacaggcgagcggacctttcctagtaatccagaaagttttataacccgacatgatctgtccggaaaagttgtgaacatcgacactaactccctgaggagttccatgagacccggcttcgaggatattatcagaagatgcattcagcggttcttttctctgaacgacggccagagctggagccagaagcgccactatcaagaagtgacgtccgacggtatattttctcctactgcttatctgaacgggcacgccgagacaccagtgtacaggtttagcctggctgatggaacaattgtgactgcacagacaaagagtaaactgttccggaaccctgtcacgaatgacaggcacggattcgtttccacccactttctccaacgcgaacagaatggctatcggcccaacccaaaccccgtcggacagggcatccgaccgcccatggctggttgcaactcatcagtgggcggaatgtccatgtcacccaaccagggcctacagatgcctagctcacgagcgtacggactcgccgaccccagcacaactggacaaatgtccggagccaggtatggcggatcaagtaacatagcctcacttacaccagggccaggtatgcagtccccaagcagttaccagaacaacaattatgggctaaatatgagctctccaccccacgggtcccccgggctggctccaaaccagcagaacataatgataagtcctcgcaacagaggatcaccaaaaatagcgagccatcagttctccccggtcgctggggtgcacagcccaatggcaagcagcgggaatacgggaaaccattcctttagctcttcttccctgagtgctttacaggcaattagcgaaggggtagggacgtcattgctgagcaccctttcaagtccagggccaaaactagataactctcccaacatgaatatcacccagccttccaaagtgagtaatcaagacagcaagtcgccccttggtttttattgtgaccagaaccctgtggaatctagcatgtgccaatccaactctagagaccatctgtccgataaagagtcaaaagagtcatctgttgagggcgcagagaaccagaggggtcccctggagagcaagggccataagaaactacttcagctgctcacgtgttctagtgacgatcgcggtcattcctcccttaccaattcacccttagatagctcatgcaaagaaagtagcgtatccgtcacttccccaagtggagtctcatcctcaacatccgggggcgtgtcctccacctcaaatatgcatggatccctgctgcaggaaaaacaccgcatcctgcacaagctgcttcaaaacggaaacagccccgcggaagtggccaaaattaccgccgaagctacgggcaaggatacgtcgtcaatcacatcttgtggtgacggtaacgtggtgaagcaggagcagctctccccaaaaaagaaagaaaacaatgcattgctgagatacttgcttgacagagatgacccctctgacgcgttgagcaaagaattgcaacctcaggtcgagggagtcgacaataagatgtcccagtgtacaagcagcactatcccttcatcgtcccaggagaaagatcccaagataaagacagagacttcagaggagggttcaggtgacctggataatttagatgcaatactaggagatctaacctctagtgacttctataacaacagcatcagctctaatggctcacaccttggtaccaagcagcaggtgtttcagggcaccaatagcctcgggcttaagagcagtcaaagcgttcagtcaatacggccaccctataatcgcgccgtgagcctcgattcgccagtgagcgtgggctcttctccaccagtgaaaaatatctccgcctttcccatgcttccgaaacaacctatgttggggggtaacccacgcatgatggactcgcaggagaattatggctcgagcatgggcgactggggtctgccaaacagtaaagcaggacggatggagccgatgaattccaacagtatgggccgtcccggcggagactacaatacctcgctgccccggccagctcttgggggatctatccctactttgccgctcagatctaactcaattcctggggcacgacccgtgttgcagcagcagcaacagatgcttcagatgcgcccgggcgagatccccatggggatgggagctaacccctacggacaagctgccgctagtaatcaactagggtcttggcccgatgggatgctcagcatggagcaggtgtcccacggtacgcagaatagacctctcctccggaacagcctggacgacttggttggaccgccatccaatctggaaggccagagcgatgaaagggcactgctggaccagcttcacactctcctatcaaacacagatgccacgggtctggaggagatcgatagggccctggggatccctgaactggtgaatcaggggcaggctctggagccaaagcaagacgcctttcagggacaggaggccgctgttatgatggaccaaaaggccggtctctacgggcaaacctacccagctcaaggacctcccatgcagggcgggttccatctccagggtcaatccccaagcttcaattctatgatgaatcaaatgaatcaacaaggaaactttcccctccaaggaatgcacccacgagcaaacataatgagaccacgcaccaacactccaaaacagctcagaatgcagctgcagcaacgcttgcagggacagcagttcctgaaccaatctcgccaggcactcgagttgaagatggaaaacccaaccgctggtggcgctgccgtgatgaggcctatgatgcagccgcagcagggcttcctgaatgcccagatggtggctcagcggagtagggaattattatcccaccacttccggcagcaacgcgtagcaatgatgatgcaacaacagcaacagcaacaacagcagcagcagcagcagcaacaacagcagcagcagcaacagcagcagcagcagcagcaacagcagacacaggccttctcaccccctcccaacgtgaccgcaagcccgagcatggacgggttgttggccggcccgacgatgccacaggctccgccccaacaatttccataccagccaaactatggcatgggccagcagccagatcctgcctttggacgggtgagttcgccacccaacgcaatgatgtccagccggatgggcccctcccagaaccccatgatgcagcaccctcaggctgccagtatttaccagtcatcagagatgaagggctggccatcagggaacctggcacgcaatagcagtttctctcagcagcagtttgcacaccagggcaatcccgccgtctattccatggttcatatgaacggaagtagcgggcatatggggcagatgaacatgaaccctatgcctatgtctgggatgccaatgggaccagaccagaagtactgttag

SEQ ID NO: 69235 - DNA, 4053 bp, Artificial Sequence
  derived and/or modified sequence
atgagcggcctgggggagaacctggaccccctggccagtgacagcaggaagaggaagctgccctgtgacaccccaggccagggcctgacctgcagcggggagaagagaagaagagagcaggagagcaagtacatcgaggagctggccgagctgatcagcgccaacctgagtgacatcgacaacttcaacgtgaagccagacaagtgtgccatcctgaaggagaccgtgcggcagatccggcagatcaaggagcagggcaagaccatcagcaatgatgatgatgtgcagaaggcagatgtgagcagcacaggccagggcgtcatcgacaaggacagcctgggccccctgctgctgcaggccctggatggcttcctgtttgtggtgaacagagatggcaacatcgtgtttgtgtctgaaaatgtgacccagtacctgcagtacaagcaggaggacctggtgaacacctctgtgtacaacatcctgcacgaggaggacaggaaggacttcctgaagaacctgcccaagagcacagtgaatggagtgtcctggaccaatgagacccagaggcagaagagccacaccttcaactgcaggatgctgatgaagacccctcatgacatcctggaggacatcaatgccagccctgagatgaggcagagatatgagaccatgcagtgctttgccctgagccagccccgggccatgatggaggagggggaggacctgcagagctgcatgatctgtgtggcccggcgcatcaccactggagagaggaccttccccagcaaccctgagagcttcatcaccaggcatgacctgagcggcaaggtggtgaacatcgacaccaacagcctgcggagctccatgaggcctggctttgaggacatcatccgccgctgcatccagcgcttcttcagcctgaatgatggccagagctggagccagaagaggcactaccaggaggtgaccagtgatggcatcttcagccccacagcctacctgaatggacatgctgagacccctgtgtaccgcttcagcctggctgatggcaccatcgtgacagcccagaccaagagcaagctgttcagaaatcctgtgaccaatgacagacatggctttgtgtccacccacttcctgcagcgggagcagaatggctaccggcccaaccccaaccctgtgggccagggcatccggccccccatggccggctgcaacagctctgtgggcggcatgtccatgagccccaaccagggcctgcagatgcccagcagccgggcctacggcctggccgaccccagcaccaccggccagatgtctggggcccgctatggaggcagcagcaacatcgccagcctgaccccaggccctggcatgcagagccccagcagctaccagaacaacaactacggcctgaacatgagcagccccccccacggcagccctggcctggcccccaaccagcagaacatcatgatcagccccaggaacagaggcagccccaagatcgccagccaccagttcagccctgtggccggcgtgcacagccccatggccagcagcggcaacacaggcaaccacagcttcagcagcagcagcctgagcgccctgcaggccatcagcgagggcgtgggcaccagcctgctgagcaccctgagcagccctggccccaagctggacaacagccccaacatgaacatcacccagcccagcaaggtgagcaaccaggacagcaagagccccctgggcttctactgtgaccagaaccctgtggagagctccatgtgccagagcaacagccgggaccacctgagtgacaaggagagcaaggagagctctgtggagggcgctgagaaccagaggggccccctggagagcaagggccacaagaagctgctgcagctgctgacctgcagcagtgatgaccggggccacagcagcctgaccaacagccccctggacagcagctgcaaggagagctctgtgtctgtgaccagccccagcggcgtgagcagcagcaccagcggcggcgtgagcagcaccagcaacatgcacggcagcctgctgcaggagaagcaccgcatcctgcacaagctgctgcagaatggaaacagccctgctgaggtggccaagatcacagctgaggccaccgggaaggacaccagcagcatcaccagctgtggagatggaaatgtggtgaagcaggagcagctgagccccaagaagaaggaaaataatgccctgctgcgctacctgctggacagagatgaccccagtgatgccctgagcaaggagctgcagccccaggtggagggcgtggacaacaagatgagccagtgcaccagcagcaccatccccagcagcagccaggagaaggaccccaagatcaagacagagaccagcgaggagggcagcggggacctggacaacctggatgccatcctgggggacctgaccagcagtgacttctacaacaacagcatcagcagcaatggcagccacctgggcaccaagcagcaggtgttccagggcaccaacagcctgggggactggggcctgcccaacagcaaggccggccgcatggagcccatgaacagcaacagcatgggccggcctggaggagactacaacaccagcctgcccaggcctgccctgggcggcagcatccccaccctgcccctgcggagcaacagcatccctggggcccggcctgtgctgcagcagcagcagcagatgctgcagatgaggcctggagagatccccatgggcatgggcgccaacccctacggccaggccgccgccagcaaccagctgggctcctggccagatggcatgctgtccatggagcaggtgagccacggcacccagaaccggcccctgctgaggaacagcctggatgacctggtgggcccccccagcaacctggagggccagagtgatgagcgggccctgctggaccagctgcacaccctgctgagcaacacagatgccaccggcctggaggagattgaccgggccctgggcatccctgagctggtgaaccagggccaggccctggagcccaagcaggatgccttccagggccaggaggccgctgtgatgatggaccagaaggccggcctgtatggccagacctacccagcccagggcccccccatgcagggcggcttccacctgcagggccagagccccagcttcaacagcatgatgaaccagatgaaccagcagggcaacttccccctgcagggcatgcacccccgggccaacatcatgaggcccaggaccaacacccccaagcagctgaggatgcagctgcagcagaggctgcagggccagcagttcctgaaccagagccggcaggccctggagctgaagatggagaaccccacagctgggggcgctgctgtgatgaggcccatgatgcagccccagcagggcttcctgaatgcccagatggtggcccagaggagccgggagctgctgagccaccacttccggcagcagagggtggccatgatgatgcagcagcagcagcagcagcagcagcagcagcagcagcagcagcagcagcagcagcagcagcagcagcagcagcagcagcagcagcagacccaggccttcagccccccaccaaatgtgacagccagccccagcatggatggcctgctggccggccccaccatgccccaggccccaccccagcagttcccctaccagcccaactacggcatgggccagcagcctgaccctgccttcggccgggtgagcagccccccaaatgccatgatgagcagcaggatgggccccagccagaaccccatgatgcagcacccccaggccgccagcatctaccagagcagcgagatgaagggctggcccagcggcaacctggccaggaacagcagcttcagccagcagcagtttgcccaccagggcaacccagctgtgtacagcatggtgcacatgaatggcagcagcggccacatgggccagatgaacatgaaccccatgcccatgagcggcatgcccatgggccctgaccagaagtactgctag

SEQ ID NO: 69236 - DNA, 4248 bp, Artificial Sequence
  derived and/or modified sequence
atgagcggcctgggggagaacctggaccccctggccagtgacagcaggaagaggaagctgccctgtgacaccccaggccagggcctgacctgcagcggggagaagagaagaagagagcaggagagcaagtacatcgaggagctggccgagctgatcagcgccaacctgagtgacatcgacaacttcaacgtgaagccagacaagtgtgccatcctgaaggagaccgtgcggcagatccggcagatcaaggagcagggcaagaccatcagcaatgatgatgatgtgcagaaggcagatgtgagcagcacaggccagggcgtcatcgacaaggacagcctgggccccctgctgctgcaggccctggatggcttcctgtttgtggtgaacagagatggcaacatcgtgtttgtgtctgaaaatgtgacccagtacctgcagtacaagcaggaggacctggtgaacacctctgtgtacaacatcctgcacgaggaggacaggaaggacttcctgaagaacctgcccaagagcacagtgaatggagtgtcctggaccaatgagacccagaggcagaagagccacaccttcaactgcaggatgctgatgaagacccctcatgacatcctggaggacatcaatgccagccctgagatgaggcagagatatgagaccatgcagtgctttgccctgagccagccccgggccatgatggaggagggggaggacctgcagagctgcatgatctgtgtggcccggcgcatcaccactggagagaggaccttccccagcaaccctgagagcttcatcaccaggcatgacctgagcggcaaggtggtgaacatcgacaccaacagcctgcggagctccatgaggcctggctttgaggacatcatccgccgctgcatccagcgcttcttcagcctgaatgatggccagagctggagccagaagaggcactaccaggaggtgaccagtgatggcatcttcagccccacagcctacctgaatggacatgctgagacccctgtgtaccgcttcagcctggctgatggcaccatcgtgacagcccagaccaagagcaagctgttcagaaatcctgtgaccaatgacagacatggctttgtgtccacccacttcctgcagcgggagcagaatggctaccggcccaaccccaaccctgtgggccagggcatccggccccccatggccggctgcaacagctctgtgggcggcatgtccatgagccccaaccagggcctgcagatgcccagcagccgggcctacggcctggccgaccccagcaccaccggccagatgtctggggcccgctatggaggcagcagcaacatcgccagcctgaccccaggccctggcatgcagagccccagcagctaccagaacaacaactacggcctgaacatgagcagccccccccacggcagccctggcctggcccccaaccagcagaacatcatgatcagccccaggaacagaggcagccccaagatcgccagccaccagttcagccctgtggccggcgtgcacagccccatggccagcagcggcaacacaggcaaccacagcttcagcagcagcagcctgagcgccctgcaggccatcagcgagggcgtgggcaccagcctgctgagcaccctgagcagccctggccccaagctggacaacagccccaacatgaacatcacccagcccagcaaggtgagcaaccaggacagcaagagccccctgggcttctactgtgaccagaaccctgtggagagctccatgtgccagagcaacagccgggaccacctgagtgacaaggagagcaaggagagctctgtggagggcgctgagaaccagaggggccccctggagagcaagggccacaagaagctgctgcagctgctgacctgcagcagtgatgaccggggccacagcagcctgaccaacagccccctggacagcagctgcaaggagagctctgtgtctgtgaccagccccagcggcgtgagcagcagcaccagcggcggcgtgagcagcaccagcaacatgcacggcagcctgctgcaggagaagcaccgcatcctgcacaagctgctgcagaatggaaacagccctgctgaggtggccaagatcacagctgaggccaccgggaaggacaccagcagcatcaccagctgtggagatggaaatgtggtgaagcaggagcagctgagccccaagaagaaggaaaataatgccctgctgcgctacctgctggacagagatgaccccagtgatgccctgagcaaggagctgcagccccaggtggagggcgtggacaacaagatgagccagtgcaccagcagcaccatccccagcagcagccaggagaaggaccccaagatcaagacagagaccagcgaggagggcagcggggacctggacaacctggatgccatcctgggggacctgaccagcagtgacttctacaacaacagcatcagcagcaatggcagccacctgggcaccaagcagcaggtgttccagggcaccaacagcctgggcctgaagagcagccagagcgtgcagagcatccggcccccctacaacagagctgtgtccctggacagccctgtgtctgtgggcagcagcccccctgtgaagaacatcagcgccttccccatgctgcccaagcagcccatgctgggcggcaaccccaggatgatggacagccaggagaactacggcagctccatgggagactggggcctgcccaacagcaaggccggccgcatggagcccatgaacagcaacagcatgggccggcctggaggagactacaacaccagcctgcccaggcctgccctgggcggcagcatccccaccctgcccctgcggagcaacagcatccctggggcccggcctgtgctgcagcagcagcagcagatgctgcagatgaggcctggagagatccccatgggcatgggcgccaacccctacggccaggccgccgccagcaaccagctgggctcctggccagatggcatgctgtccatggagcaggtgagccacggcacccagaaccggcccctgctgaggaacagcctggatgacctggtgggcccccccagcaacctggagggccagagtgatgagcgggccctgctggaccagctgcacaccctgctgagcaacacagatgccaccggcctggaggagattgaccgggccctgggcatccctgagctggtgaaccagggccaggccctggagcccaagcaggatgccttccagggccaggaggccgctgtgatgatggaccagaaggccggcctgtatggccagacctacccagcccagggcccccccatgcagggcggcttccacctgcagggccagagccccagcttcaacagcatgatgaaccagatgaaccagcagggcaacttccccctgcagggcatgcacccccgggccaacatcatgaggcccaggaccaacacccccaagcagctgaggatgcagctgcagcagaggctgcagggccagcagttcctgaaccagagccggcaggccctggagctgaagatggagaaccccacagctggaggagctgctgtgatgaggcccatgatgcagccccagcagggcttcctgaatgcccagatggtggcccagaggagccgggagctgctgagccaccacttccggcagcagagggtggccatgatgatgcagcagcagcagcagcagcagcagcagcagcagcagcagcagcagcagcagcagcagcagcagcagcagcagcagcagcagcagcagacccaggccttcagccccccacccaacgtgacagccagccccagcatggatggcctgctggccggccccaccatgccccaggccccaccccagcagttcccctaccagcccaactacggcatgggccagcagcctgaccctgccttcggccgggtgagcagccccccaaatgccatgatgagcagcaggatgggccccagccagaaccccatgatgcagcacccccaggccgccagcatctaccagagcagcgagatgaagggctggcccagcggcaacctggccaggaacagcagcttcagccagcagcagtttgcccaccagggcaacccagctgtgtacagcatggtgcacatgaatggcagcagcggccacatgggccagatgaacatgaaccccatgcccatgagcggcatgcccatgggccctgaccagaagtactgctag

SEQ ID NO: 69237 - DNA, 4053 bp, Artificial Sequence
  derived and/or modified sequence
atgagcggcctgggcgagaacctggaccccctggccagcgacagcagaaaaaggaaacttccttgtgataccccaggccaagggctcacctgctccggagaaaaaaggcgccgggagcaggaaagcaaatatatcgaagaactcgccgagctcatctccgctaacctgagcgatatcgataattttaacgtgaagcctgacaaatgcgccatactcaaagaaaccgtccggcaaataaggcagattaaggaacaggggaagacaattagtaatgacgatgacgttcagaaagccgatgtgtcttcgacaggacagggagtgattgacaaagatagccttgggccactccttttacaggccctggacggtttcctgtttgtggtcaatagagacgggaatatcgtgttcgtctcagagaatgtgacacaatatctgcagtacaaacaggaagacctggtcaatacctccgtctacaacatccttcacgaggaagaccgaaaggacttcctgaaaaacctgcctaaatcaaccgtgaatggggtgtcatggactaatgagacccaacggcaaaagtctcacacttttaattgtcggatgctgatgaagacacctcatgatatcttagaggacattaacgcctccccggagatgagacagcgatatgagactatgcagtgtttcgcccttagtcagccgagggccatgatggaggaaggtgaggatctgcagagttgcatgatctgtgttgccagaagaataacgactggtgagaggacattcccctctaacccagagtcgttcatcacccgtcacgatctttctggtaaggtggtgaacattgacaccaactccctgagaagctccatgcgacctgggttcgaggatatcattagaaggtgcatccagagattcttctcgttaaatgatggccagagctggagtcagaagcggcactaccaggaggtcacatcagacggcattttttccccaactgcatatctgaatggtcacgccgagaccccagtgtatcgtttcagtttggccgacggaaccatcgtaacggcgcagacgaaatccaaactgttcaggaacccagtgactaacgaccggcacggcttcgtttcaacacacttcctgcagcgtgaacaaaacgggtatcggcccaatcccaatccagtaggccaaggcatccgcccacccatggcaggatgcaattcatcagtaggggggatgtccatgtcccccaaccagggtttgcagatgccatcttccagggcatatgggctggcagatccaagcaccactgggcaaatgagtggggcgcgttatggagggtcctccaacatcgcctctctcaccccgggccccggcatgcagtctccgtcttcctaccagaacaataattacggcttgaatatgagctcccctccccacgggagccccggactggcccctaaccagcagaatataatgatctctcctagaaatcggggctcacccaagatcgcatcacaccagtttagcccagtggccggggtacattcccctatggcctcaagcgggaataccgggaatcacagtttctctagttccagcctttccgccttgcaagctatatccgaaggagttgggactagtctgctctcgacactcagctcacctggtccaaagctggataactccccaaacatgaacattactcaacccagtaaagtgtctaaccaggacagcaaaagcccactgggcttctactgtgatcaaaatcccgtggaaagctcaatgtgccaatcaaactccagagatcacctgtctgacaaagaatcaaaggaatcatctgttgaaggcgccgagaaccagcgagggcctctggagagcaaaggccacaagaaattattacagctactgacttgtagttctgatgaccgaggccacagcagtcttacaaactcccccctggatagtagctgcaaagagagttccgttagcgttactagtcccagcggagtgagctcttccacatcaggcggtgtgtcctctactagtaacatgcacggctctcttttgcaagagaaacatagaatcctgcacaaactcctccagaatgggaacagcccagccgaggtagctaaaataacagcagaggcaaccggaaaagatacgagtagtatcacttcttgcggcgatgggaatgttgtcaagcaggagcaactctctccaaagaagaaggagaataacgctctcctgcggtacctactcgatcgggatgatcctagcgatgccctcagtaaggagctgcagcctcaggtggaaggtgtggacaacaaaatgtcacagtgcacgtcctccacaattccaagttcaagccaagaaaaagaccccaagataaaaaccgagacttccgaagaaggctctggggatctggacaatctcgacgctatcctcggagatctcaccagctcagacttctataataactctattagttccaacgggtcccacctagggactaaacagcaggttttccagggcactaattccttgggcgattgggggctccccaacagtaaagccggccgaatggaacccatgaattccaattcaatggggaggcctggcggggattacaacaccagcttgcccaggccagccctgggcgggagcatccccactctgccactccggagtaacagtatccctggagcacggcctgttcttcagcagcagcagcagatgctgcaaatgcggcctggcgagataccaatggggatgggagcgaatccttatggccaggctgccgcctccaaccaactcggctcttggccagacggcatgctcagcatggaacaagtaagccacggtactcaaaatagacccctgctgagaaattctctcgatgacctggtgggacctccctccaaccttgagggtcaaagcgatgaacgggcgctcctggatcagttgcatacacttctgagtaacacagacgcgaccggacttgaggaaatagacagggcactgggaataccagagctcgtcaatcaggggcaggcactggagccaaagcaggacgccttccaggggcaggaggctgcagtgatgatggatcagaaggctggactgtatggacagacttacccagctcagggcccacctatgcaaggcggattccacctccagggacagtccccttcctttaacagtatgatgaatcagatgaatcagcaaggtaacttcccactgcagggcatgcaccctagggccaatatcatgcgtcctcgaacgaatacccctaaacagctgaggatgcagctccaacagcgcctgcagggccagcagttccttaatcagtcccgacaggctctggaattgaaaatggagaatcccacagctggaggtgccgctgtgatgcggccgatgatgcagccacagcagggatttctgaacgctcagatggtggcccagcgaagccgagagcttttaagccaccacttcaggcagcagagggttgccatgatgatgcagcagcagcagcagcagcagcagcagcagcagcaacagcaacaacaacagcagcagcaacagcagcagcagcagcagcagcagcagactcaggccttctccccacctccgaatgtgaccgcctccccaagcatggatggcctactagccggccctaccatgcctcaggcgccccctcagcagtttccataccagccaaattacggtatgggtcagcaacctgatccggcattcgggagggtgagctcgccgcccaacgctatgatgtcctctcgaatgggccccagccagaacccaatgatgcaacatccacaggccgcgagcatctatcaaagttcggagatgaagggctggccttccggtaacctagccagaaacagctcttttagccagcaacaatttgcccaccaaggcaatccagccgtgtacagtatggtacatatgaacgggtcatccggacacatgggccagatgaacatgaaccccatgccaatgtccggaatgcctatgggcccggaccagaagtattgctag

SEQ ID NO: 69238 - DNA, 4248 bp, Artificial Sequence
  derived and/or modified sequence
atgagcggcctgggcgagaacctggaccccctggccagcgacagcagaaaacgtaagcttccatgcgacacgcctggtcaggggctgacgtgctcaggagagaaaaggcggagagaacaagagtccaagtacatcgaggagttagccgagctcatttccgcgaacctgtcagatatcgataattttaatgtcaagccagataaatgtgctatactgaaagaaactgtgagacagataaggcagattaaggaacagggcaaaaccatctccaatgacgacgacgtccagaaagccgatgtaagttcaactggtcagggcgttatagataaagatagcttggggcctctattgctgcaagctttggatggctttttattcgtggtcaaccgtgacggtaatatcgtgttcgtttccgagaacgtcacccagtatctgcagtataaacaggaggacctagtgaacacatctgtttataacatcctgcacgaagaggaccgcaaggactttctgaaaaacttgccaaagtctactgtgaatggtgtttcatggactaatgaaacacaacgccagaaaagccatacgttcaactgtcgtatgctgatgaaaactcctcacgacattctggaagatatcaacgcgtcccctgagatgcgccagagatatgaaacaatgcagtgctttgcactttctcaacccagggccatgatggaagagggtgaggatttacaaagctgtatgatttgtgtggcgagacggatcacaacaggggaacggacgtttcccagcaacccagaatctttcatcacgcgccacgacttgtcgggaaaagtggttaacatagataccaacagtctccgcagctcaatgaggccaggattcgaggacatcatcaggcgctgcatacagcgctttttcagtctgaatgacggccagagctggagtcagaagcgccattaccaggaggtcacaagcgacgggatctttagccccactgcctacttgaatggccatgccgaaacccctgtttaccggtttagcctggccgacggcacaattgtaacggcgcagactaaatccaagttatttcgaaaccccgtgactaacgataggcatgggtttgtgagcactcactttctgcagcgggaacagaatggatatagacctaatcccaatccggtcggccaggggatcagacctcccatggcaggctgtaactctagcgtgggcgggatgtcaatgagccctaaccaagggcttcagatgccctcttcccgggcatacgggcttgcggatccgagcaccaccgggcaaatgtctggagcccgctacggagggtcctccaacatagcatctttgacccctggccctgggatgcagtccccgtcaagctatcaaaacaataactacggtttgaatatgagctctccaccccacggttcacccggacttgctcccaatcagcagaatataatgatctcccccaggaaccggggatccccaaaaatcgcgtctcatcagttttcccccgtggctggagtgcattcccccatggctagttctggaaacacagggaatcactcattcagttcatcttcattgagtgcacttcaggctataagcgaaggagtagggacctctctactaagcaccttgtccagtccagggccaaagctggataactctcccaacatgaacattacccagccttcaaaggtttctaatcaggatagcaaaagccctcttgggttctactgcgaccaaaaccccgtggagtcaagtatgtgtcagagcaactcccgcgatcatttatccgacaaggaatccaaggagtcaagcgtcgagggggccgagaaccagagaggccctctggagtctaagggccataagaagttgctacagcttcttacttgctcctccgatgacagaggtcactcctcccttactaattcaccactcgattcatcatgcaaggagtcatccgtgtccgttaccagcccttctggtgtgagttccagcacatccggcggagtctcatccacaagcaacatgcatggatcgttgctgcaggaaaaacatagaatattacacaagctgctacagaacgggaatagccccgccgaggtggccaagatcacagcagaggcaactgggaaggatacaagcagcatcacatcctgtggggacggcaatgtcgttaagcaggagcaacttagtcctaaaaagaaggaaaataatgctctgcttaggtacttattagacagggacgacccatccgacgccctgtcaaaggagttgcagcctcaagtcgaaggggtcgacaataagatgtcgcagtgtacaagctccactattccaagttcaagtcaggagaaggacccgaagatcaagacagagacgagcgaagaagggtcaggagaccttgataatctcgacgctatactcggtgatttgaccagcagcgatttctacaataattccatcagctctaatggcagtcacttagggaccaagcaacaagttttccaaggaaccaacagcctcggcctgaagagctcccaaagcgtgcagtccataaggcctccgtataaccgggccgtttcgctggactcccccgtgagcgtggggagctcccccccagttaagaacatttctgcgttccccatgcttcccaagcagcctatgctgggtggcaaccctcggatgatggactcgcaggaaaactatggctcctccatgggggattggggcctgcctaacagtaaggccggacgcatggaacctatgaacagcaacagtatgggccggcccggaggcgattacaatacaagcctgcctcggcccgccctagggggctccattcctactctcccattgcgatcaaatagcattccaggagccagacccgtcctccagcaacagcagcagatgctgcagatgagaccgggtgagataccaatgggtatgggtgccaacccttacggccaggctgccgcgtctaatcagctcggttcttggccagacggtatgctctctatggagcaggtgagccatggcacccagaacaggccgctgctccggaactccttagatgacctcgtcggccctccctcaaacctggagggccagtctgacgagcgggccctgcttgatcaactacacaccctgctgagcaataccgacgccactggcctggaggagatcgaccgcgccctcggcatccccgagctggttaaccagggacaggctttggagccaaagcaagacgcatttcagggtcaggaggccgccgtgatgatggatcagaaagccggtctctacggacagacctatccagcacagggacctcctatgcagggaggattccacttgcagggccagagccctagcttcaactcaatgatgaatcaaatgaaccaacagggtaatttcccgcttcaaggcatgcatcctcgggccaatataatgcggccccgtaccaatacacccaagcaactacgaatgcagctgcagcagagattgcagggacagcagttcttgaaccaatctcgtcaggccctggaattgaaaatggagaaccctacagccgggggagcagccgtgatgcgacctatgatgcaacctcaacagggattcctgaatgcccagatggtggctcagaggagtagggagctgctctcccaccacttccggcagcaacgcgtcgctatgatgatgcaacagcaacagcagcagcaacaacagcagcagcagcagcagcagcagcaacagcagcagcaacagcaacagcagcaacagcagcaaacccaggccttctccccaccgcccaatgttactgcttccccctcaatggacgggctgcttgctggccccaccatgcctcaggcgccccctcagcagtttccttatcagcccaactatggcatgggtcaacagccggatccagcattcggccgggtctccagcccaccaaatgcaatgatgagttctagaatgggaccctctcaaaatcctatgatgcagcatccacaggccgcttctatttatcagtccagtgagatgaagggctggccatccggtaacctagcacggaacagcagtttctcacaacaacagtttgcccaccagggtaaccccgccgtgtattctatggtacacatgaatggatccagtggtcacatggggcagatgaacatgaatccaatgcccatgagcggcatgcctatgggcccggatcagaagtactgctag

SEQ ID NO: 69239 - DNA, 7774 bp, Artificial Sequence
  derived and/or modified sequence
atatcccagtggcccccgtgcggcgactttagctgctgctgtctcagccgctccacagcgacggcagcggctgcggcttagtcggtggcggccggcggcggctgcgggctgagcggcgagtttccgatttaaagctgagctgcgaggaaaatggcggcgggaggatcaaaatacttgctggatggtggactcagagaccaataaaaataaactgcttgaacatcctttgactggttagccagttgctgatgtatattcaagatgagtggattaggagaaaacttggatccactggccagtgattcacgaaaacgcaaattgccatgtgatactccaggacaaggtcttacctgcagtggtgaaaaacggagacgggagcaggaaagtaaatatattgaagaattggctgagctgatatctgccaatcttagtgatattgacaatttcaatgtcaaaccagataaatgtgcgattttaaaggaaacagtaagacagatacgtcaaataaaagagcaaggaaaaactatttccaatgatgatgatgttcaaaaagccgatgtatcttctacagggcagggagttattgataaagactccttaggaccgcttttacttcaggcattggatggtttcctatttgtggtgaatcgagacggaaacattgtatttgtatcagaaaatgtcacacaatacctgcaatataagcaagaggacctggttaacacaagtgtttacaatatcttacatgaagaagacagaaaggattttcttaagaatttaccaaaatctacagttaatggagtttcctggacaaatgagacccaaagacaaaaaagccatacatttaattgccgtatgttgatgaaaacaccacatgatattctggaagacataaacgccagtcctgaaatgcgccagagatatgaaacaatgcagtgctttgccctgtctcagccacgagctatgatggaggaaggggaagatttgcaatcttgtatgatctgtgtggcacgccgcattactacaggagaaagaacatttccatcaaaccctgagagctttattaccagacatgatctttcaggaaaggttgtcaatatagatacaaattcactgagatcctccatgaggcctggctttgaagatataatccgaaggtgtattcagagattttttagtctaaatgatgggcagtcatggtcccagaaacgtcactatcaagaagttaccagtgatgggatattttccccaacagcttatcttaatggccatgcagaaaccccagtatatcgattctcgttggctgatggaactatagtgactgcacagacaaaaagcaaactcttccgaaatcctgtaacaaatgatcgacatggctttgtctcaacccacttccttcagagagaacagaatggatatagaccaaacccaaatcctgttggacaagggattagaccacctatggctggatgcaacagttcggtaggcggcatgagtatgtcgccaaaccaaggcttacagatgccgagcagcagggcctatggcttggcagaccctagcaccacagggcagatgagtggagctaggtatgggggttccagtaacatagcttcattgacccctgggccaggcatgcaatcaccatcttcctaccagaacaacaactatgggctcaacatgagtagccccccacatgggagtcctggtcttgccccaaaccagcagaatatcatgatttctcctcgtaatcgtgggagtccaaagatagcctcacatcagttttctcctgttgcaggtgtgcactctcccatggcatcttctggcaatactgggaaccacagcttttccagcagctctctcagtgccctgcaagccatcagtgaaggtgtggggacttcccttttatctactctgtcatcaccaggccccaaattggataactctcccaatatgaatattacccaaccaagtaaagtaagcaatcaggattccaagagtcctctgggcttttattgcgaccaaaatccagtggagagttcaatgtgtcagtcaaatagcagagatcacctcagtgacaaagaaagtaaggagagcagtgttgagggggcagagaatcaaaggggtcctttggaaagcaaaggtcataaaaaattactgcagttacttacctgttcttctgatgaccggggtcattcctccttgaccaactcccccctagattcaagttgtaaagaatcttctgttagtgtcaccagcccctctggagtctcctcctctacatctggaggagtatcctctacatccaatatgcatgggtcactgttacaagagaagcaccggattttgcacaagttgctgcagaatgggaattcaccagctgaggtagccaagattactgcagaagccactgggaaagacaccagcagtataacttcttgtggggacggaaatgttgtcaagcaggagcagctaagtcctaagaagaaggagaataatgcacttcttagatacctgctggacagggatgatcctagtgatgcactctctaaagaactacagccccaagtggaaggagtggataataaaatgagtcagtgcaccagctccaccattcctagctcaagtcaagagaaagaccctaaaattaagacagagacaagtgaagagggatctggagacttggataatctagatgctattcttggtgatctgactagttctgacttttacaataattccatatcctcaaatggtagtcatctggggactaagcaacaggtgtttcaaggaactaattctctgggagactggggcttaccaaactcaaaggccggcagaatggaacctatgaattcaaactccatgggaagaccaggaggagattataatacttctttacccagacctgcactgggtggctctattcccacattgcctcttcggtctaatagcataccaggtgcgagaccagtattgcaacagcagcagcagatgcttcaaatgaggcctggtgaaatccccatgggaatgggggctaatccctatggccaagcagcagcatctaaccaactgggttcctggcccgatggcatgttgtccatggaacaagtttctcatggcactcaaaataggcctcttcttaggaattccctggatgatcttgttgggccaccttccaacctggaaggccagagtgacgaaagagcattattggaccagctgcacactcttctcagcaacacagatgccacaggcctggaagaaattgacagagctttgggcattcctgaacttgtcaatcagggacaggcattagagcccaaacaggatgctttccaaggccaagaagcagcagtaatgatggatcagaaggcaggattatatggacagacatacccagcacaggggcctccaatgcaaggaggctttcatcttcagggacaatcaccatcttttaactctatgatgaatcagatgaaccagcaaggcaattttcctctccaaggaatgcacccacgagccaacatcatgagaccccggacaaacacccccaagcaacttagaatgcagcttcagcagaggctgcagggccagcagtttttgaatcagagccgacaggcacttgaattgaaaatggaaaaccctactgctggtggtgctgcggtgatgaggcctatgatgcagccccagcagggttttcttaatgctcaaatggtcgcccaacgcagcagagagctgctaagtcatcacttccgacaacagagggtggctatgatgatgcagcagcagcagcagcagcaacagcagcagcagcagcagcagcagcagcaacagcaacagcaacagcaacagcagcaacagcagcaaacccaggccttcagcccacctcctaatgtgactgcttcccccagcatggatgggcttttggcaggacccacaatgccacaagctcctccgcaacagtttccatatcaaccaaattatggaatgggacaacaaccagatccagcctttggtcgagtgtctagtcctcccaatgcaatgatgtcgtcaagaatgggtccctcccagaatcccatgatgcaacacccgcaggctgcatccatctatcagtcctcagaaatgaagggctggccatcaggaaatttggccaggaacagctccttttcccagcagcagtttgcccaccaggggaatcctgcagtgtatagtatggtgcacatgaatggcagcagtggtcacatgggacagatgaacatgaaccccatgcccatgtctggcatgcctatgggtcctgatcagaaatactgctgacatctctgcaccaggacctcttaaggaaaccactgtacaaatgacactgcactaggattattgggaaggaatcattgttccaggcatccatcttggaagaaaggaccagctttgagctccatcaagggtattttaagtgatgtcatttgagcaggactggattttaagccgaagggcaatatctacgtgtttttcccccctccttctgctgtgtatcatggtgttcaaaacagaaatgttttttggcattccacctcctagggatataattctggagacatggagtgttactgatcataaaacttttgtgtcacttttttctgccttgctagccaaaatctcttaaatacacgtaggtgggccagagaacattggaagaatcaagagagattagaatatctggtttctctagttgcagtattggacaaagagcatagtcccagccttcaggtgtagtagttctgtgttgaccctttgtccagtggaattggtgattctgaattgtcctttactaatggtgttgagttgctctgtccctattatttgccctaggctttctcctaatgaaggttttcatttgccattcatgtcctgtaatacttcacctccaggaactgtcatggatgtccaaatggctttgcagaaaggaaatgagatgacagtatttaatcgcagcagtagcaaacttttcacatgctaatgtgcagctgagtgcactttatttaaaaagaatggataaatgcaatattcttgaggtcttgagggaatagtgaaacacattcctggtttttgcctacacttacgtgttagacaagaactatgatttttttttttaaagtactggtgtcaccctttgcctatatggtagagcaataatgctttttaaaaataaacttctgaaaacccaaggccaggtactgcattctgaatcagaatctcgcagtgtttctgtgaatagatttttttgtaaatatgacctttaagatattgtattatgtaaaatatgtatatacctttttttgtaggtcacaacaactcatttttacagagtttgtgaagctaaatatttaacattgttgatttcagtaagctgtgtggtgaggctaccagtggaagagacatcccttgacttttgtggcctgggggaggggtagtgctccacagcttttccttccccaccccccagccttagatgcctcgctcttttcaatctcttaatctaaatgctttttaaagagattatttgtttagatgtaggcattttaattttttaaaaattcctctaccagaactaagcactttgttaatttggggggaaagaatagatatggggaaataaacttaaaaaaaaatcaggaatttaaaaaaacgagcaatttgaagagaatcttttggattttaagcagtccgaaataatagcaattcatgggctgtgtgtgtgtgtgtatgtgtgtgtgtgtgtgtgtatgtttaattatgttaccttttcatcccctttaggagcgttttcagattttggttgctaagacctgaatcccatattgagatctcgagtagaatccttggtgtggtttctggtgtctgctcagctgtcccctcattctactaatgtgatgctttcattatgtccctgtggattagaatagtgtcagttatttcttaagtaactcagtacccagaacagccagttttactgtgattcagagccacagtctaactgagcaccttttaaacccctccctcttctgccccctaccacttttctgctgttgcctctctttgacacctgttttagtcagttgggaggaagggaaaaatcaagtttaattccctttatctgggttaattcatttggttcaaatagttgacggaattgggtttctgaatgtctgtgaatttcagaggtctctgctagccttggtatcattttctagcaataactgagagccagttaattttaagaatttcacacatttagccaatctttctagatgtctctgaaggtaagatcatttaatatctttgatatgcttacgagtaagtgaatcctgattatttccagacccaccaccagagtggatcttattttcaaagcagtatagacaattatgagtttgccctctttcccctaccaagttcaaaatatatctaagaaagattgtaaatccgaaaacttccattgtagtggcctgtgcttttcagatagtatactctcctgtttggagacagaggaagaaccaggtcagtctgtctctttttcagctcaattgtatctgacccttctttaagttatgtgtgtggggagaaatagaatggtgctcttatctttcttgactttaaaaaaattattaaaaacaaaaaaaaaataaatttttttgcaatcctttcctcagacctggctccaggctaactggaaggcagcactcccttttttatatagtagaaaaatgaagtttattataagtttttatattttctacttgttcatttggtgcaaactcaagatttcttttaataggtgcagtctttgagataatttgtttttacctgtattgccctttatcttttttaggtaattctttgtactcctgctgtctacctctcctcacaccccagcaccccccattttttcaaaccttggtatctgttgggtgaacagtataatcttttcatctgcttttagaatgtgggatatttccagtacctactttttttttttttttttgctgaatccaaagatatataaataaaatatatatattttataaagatcagaatgatataaaggagatacatgtttcttcctttaaaaaataaacggaagttacattgttaatgttcatattatgatgccacttttctaaactgcatctggattgaaaggtgtaaatatcaataacagtgctacttagttatcagtatttaatatctgaggtgagttgggggtatctatattaggggtagggtattacagaagataattggcttgatgtcctagaagttctttgatccagaggtgggtgcagctgaaagtaaacagaatggattgccagttacatgtatgcctgcccagttccctttttatttgcagaagctgtgagttttgttcacaattaggttcctaggagcaaaacctcaaggattgatttattgttttcaactccaaggcacactgttaataaacgagcagggtgttttctctcttcctttctaatatatggagtttcgaagaataaaatatgagagcaatatttaaattctcaggaattgacttatactcttgagaatgaattcagtttcaatcaagtttacattatgttgcttaaaaaaatagaaattattctttatcttgcaaagaattgaaaccacatgaaatgacttatgggggatggtgagctgtgactgctttgctgaccattttggatgtcattgtaaataaaggtttctatttaaaattgga

SEQ ID NO: 69240 - DNA, 6750 bp, Artificial Sequence
  derived and/or modified sequence
gtggcggccggcggcggctgcgggctgagcggcgagtttccgatttaaagctgagctgcgaggaaaatggcggcgggaggatcaaaatacttgctggatggtggactcagagaccaataaaaataaactgcttgaacatcctttgactggttagccagttgctgatgtatattcaagatgagtggattaggagaaaacttggatccactggccagtgattcacgaaaacgcaaattgccatgtgatactccaggacaaggtcttacctgcagtggtgaaaaacggagacgggagcaggaaagtaaatatattgaagaattggctgagctgatatctgccaatcttagtgatattgacaatttcaatgtcaaaccagataaatgtgcgattttaaaggaaacagtaagacagatacgtcaaataaaagagcaaggaaaaactatttccaatgatgatgatgttcaaaaagccgatgtatcttctacagggcagggagttattgataaagactccttaggaccgcttttacttcaggcattggatggtttcctatttgtggtgaatcgagacggaaacattgtatttgtatcagaaaatgtcacacaatacctgcaatataagcaagaggacctggttaacacaagtgtttacaatatcttacatgaagaagacagaaaggattttcttaagaatttaccaaaatctacagttaatggagtttcctggacaaatgagacccaaagacaaaaaagccatacatttaattgccgtatgttgatgaaaacaccacatgatattctggaagacataaacgccagtcctgaaatgcgccagagatatgaaacaatgcagtgctttgccctgtctcagccacgagctatgatggaggaaggggaagatttgcaatcttgtatgatctgtgtggcacgccgcattactacaggagaaagaacatttccatcaaaccctgagagctttattaccagacatgatctttcaggaaaggttgtcaatatagatacaaattcactgagatcctccatgaggcctggctttgaagatataatccgaaggtgtattcagagattttttagtctaaatgatgggcagtcatggtcccagaaacgtcactatcaagaagttaccagtgatgggatattttccccaacagcttatcttaatggccatgcagaaaccccagtatatcgattctcgttggctgatggaactatagtgactgcacagacaaaaagcaaactcttccgaaatcctgtaacaaatgatcgacatggctttgtctcaacccacttccttcagagagaacagaatggatatagaccaaacccaaatcctgttggacaagggattagaccacctatggctggatgcaacagttcggtaggcggcatgagtatgtcgccaaaccaaggcttacagatgccgagcagcagggcctatggcttggcagaccctagcaccacagggcagatgagtggagctaggtatgggggttccagtaacatagcttcattgacccctgggccaggcatgcaatcaccatcttcctaccagaacaacaactatgggctcaacatgagtagccccccacatgggagtcctggtcttgccccaaaccagcagaatatcatgatttctcctcgtaatcgtgggagtccaaagatagcctcacatcagttttctcctgttgcaggtgtgcactctcccatggcatcttctggcaatactgggaaccacagcttttccagcagctctctcagtgccctgcaagccatcagtgaaggtgtggggacttcccttttatctactctgtcatcaccaggccccaaattggataactctcccaatatgaatattacccaaccaagtaaagtaagcaatcaggattccaagagtcctctgggcttttattgcgaccaaaatccagtggagagttcaatgtgtcagtcaaatagcagagatcacctcagtgacaaagaaagtaaggagagcagtgttgagggggcagagaatcaaaggggtcctttggaaagcaaaggtcataaaaaattactgcagttacttacctgttcttctgatgaccggggtcattcctccttgaccaactcccccctagattcaagttgtaaagaatcttctgttagtgtcaccagcccctctggagtctcctcctctacatctggaggagtatcctctacatccaatatgcatgggtcactgttacaagagaagcaccggattttgcacaagttgctgcagaatgggaattcaccagctgaggtagccaagattactgcagaagccactgggaaagacaccagcagtataacttcttgtggggacggaaatgttgtcaagcaggagcagctaagtcctaagaagaaggagaataatgcacttcttagatacctgctggacagggatgatcctagtgatgcactctctaaagaactacagccccaagtggaaggagtggataataaaatgagtcagtgcaccagctccaccattcctagctcaagtcaagagaaagaccctaaaattaagacagagacaagtgaagagggatctggagacttggataatctagatgctattcttggtgatctgactagttctgacttttacaataattccatatcctcaaatggtagtcatctggggactaagcaacaggtgtttcaaggaactaattctctgggtttgaaaagttcacagtctgtgcagtctattcgtcctccatataaccgagcagtgtctctggatagccctgtttctgttggctcaagtcctccagtaaaaaatatcagtgctttccccatgttaccaaagcaacccatgttgggtgggaatccaagaatgatggatagtcaggaaaattatggctcaagtatgggagactggggcttaccaaactcaaaggccggcagaatggaacctatgaattcaaactccatgggaagaccaggaggagattataatacttctttacccagacctgcactgggtggctctattcccacattgcctcttcggtctaatagcataccaggtgcgagaccagtattgcaacagcagcagcagatgcttcaaatgaggcctggtgaaatccccatgggaatgggggctaatccctatggccaagcagcagcatctaaccaactgggttcctggcccgatggcatgttgtccatggaacaagtttctcatggcactcaaaataggcctcttcttaggaattccctggatgatcttgttgggccaccttccaacctggaaggccagagtgacgaaagagcattattggaccagctgcacactcttctcagcaacacagatgccacaggcctggaagaaattgacagagctttgggcattcctgaacttgtcaatcagggacaggcattagagcccaaacaggatgctttccaaggccaagaagcagcagtaatgatggatcagaaggcaggattatatggacagacatacccagcacaggggcctccaatgcaaggaggctttcatcttcagggacaatcaccatcttttaactctatgatgaatcagatgaaccagcaaggcaattttcctctccaaggaatgcacccacgagccaacatcatgagaccccggacaaacacccccaagcaacttagaatgcagcttcagcagaggctgcagggccagcagtttttgaatcagagccgacaggcacttgaattgaaaatggaaaaccctactgctggtggtgctgcggtgatgaggcctatgatgcagccccagcagggttttcttaatgctcaaatggtcgcccaacgcagcagagagctgctaagtcatcacttccgacaacagagggtggctatgatgatgcagcagcagcagcagcagcaacagcagcagcagcagcagcagcagcagcaacagcaacagcaacagcaacagcagcaacagcagcaaacccaggccttcagcccacctcctaatgtgactgcttcccccagcatggatgggcttttggcaggacccacaatgccacaagctcctccgcaacagtttccatatcaaccaaattatggaatgggacaacaaccagatccagcctttggtcgagtgtctagtcctcccaatgcaatgatgtcgtcaagaatgggtccctcccagaatcccatgatgcaacacccgcaggctgcatccatctatcagtcctcagaaatgaagggctggccatcaggaaatttggccaggaacagctccttttcccagcagcagtttgcccaccaggggaatcctgcagtgtatagtatggtgcacatgaatggcagcagtggtcacatgggacagatgaacatgaaccccatgcccatgtctggcatgcctatgggtcctgatcagaaatactgctgacatctctgcaccaggacctcttaaggaaaccactgtacaaatgacactgcactaggattattgggaaggaatcattgttccaggcatccatcttggaagaaaggaccagctttgagctccatcaagggtattttaagtgatgtcatttgagcaggactggattttaagccgaagggcaatatctacgtgtttttcccccctccttctgctgtgtatcatggtgttcaaaacagaaatgttttttggcattccacctcctagggatataattctggagacatggagtgttactgatcataaaacttttgtgtcacttttttctgccttgctagccaaaatctcttaaatacacgtaggtgggccagagaacattggaagaatcaagagagattagaatatctggtttctctagttgcagtattggacaaagagcatagtcccagccttcaggtgtagtagttctgtgttgaccctttgtccagtggaattggtgattctgaattgtcctttactaatggtgttgagttgctctgtccctattatttgccctaggctttctcctaatgaaggttttcatttgccattcatgtcctgtaatacttcacctccaggaactgtcatggatgtccaaatggctttgcagaaaggaaatgagatgacagtatttaatcgcagcagtagcaaacttttcacatgctaatgtgcagctgagtgcactttatttaaaaagaatggataaatgcaatattcttgaggtcttgagggaatagtgaaacacattcctggtttttgcctacacttacgtgttagacaagaactatgatttttttttttaaagtactggtgtcaccctttgcctatatggtagagcaataatgctttttaaaaataaacttctgaaaacccaaggccaggtactgcattctgaatcagaatctcgcagtgtttctgtgaatagatttttttgtaaatatgacctttaagatattgtattatgtaaaatatgtatatacctttttttgtaggtcacaacaactcatttttacagagtttgtgaagctaaatatttaacattgttgatttcagtaagctgtgtggtgaggctaccagtggaagagacatcccttgacttttgtggcctgggggaggggtagtgctccacagcttttccttccccaccccccagccttagatgcctcgctcttttcaatctcttaatctaaatgctttttaaagagattatttgtttagatgtaggcattttaattttttaaaaattcctctaccagaactaagcactttgttaatttggggggaaagaatagatatggggaaataaacttaaaaaaaaatcaggaatttaaaaaaacgagcaatttgaagagaatcttttggattttaagcagtccgaaataatagcaattcatgggctgtgtgtgtgtgtgtatgtgtgtgtgtgtgtgtgtatgtttaattatgttaccttttcatcccctttaggagcgttttcagattttggttgctaagacctgaatcccatattgagatctcgagtagaatccttggtgtggtttctggtgtctgctcagctgtcccctcattctactaatgtgatgctttcattatgtccctgtggattagaatagtgtcagttatttcttaagtaactcagtacccagaacagccagttttactgtgattcagagccacagtctaactgagcaccttttaaacccctccctcttctgccccctaccacttttctgctgttgcctctctttgacacctgttttagtcagttgggaggaagggaaaaatcaagtttaattccctttatctgggttaattcatttggttcaaatagttgacggaattgggtttctgaatgtctgtgaatttcagaggtctctgctagccttggtatcattttctagcaataactgagagccagttaattttaagaatttcacacatttagccaatctttctagatgtctctgaaggtaagatcatttaatatctttgatatgcttacgagtaagtgaatcctgattatttccagacccaccaccagagtggatcttattttcaaagcagtatagacaattatgagtttgccctctttcccctaccaagttcaaaatatatctaagaaagattgtaaatccgaaaacttccattgtagtggcctgtgcttttcagatagtatactctcctgtttggagacagaggaagaaccaggtcagtctgtctctttttcagctcaattgtatctgacccttctttaagttatgtgtgtggggagaaatagaatggtgctcttat

SEQ ID NO: 69241 - DNA, 4053 bp, Artificial Sequence
  derived and/or modified sequence
atgtccgggctgggagaaaatctagatcctctcgctagcgactcacggaagagaaaactcccttgcgacactccaggacagggcctcacttgttctggggaaaaaagacggagagagcaggagagcaaatatatcgaggagcttgcagaattgatctccgctaacctgagtgacatagacaacttcaacgttaaacctgataagtgcgcaattctcaaggaaactgtgcgacagatcaggcagattaaggaacaggggaagaccatctccaacgacgatgacgtccagaaggcagacgtgtctagcaccggccagggagtaattgacaaggattcgctgggccctctgctactgcaggccctggacggtttcttatttgtggtgaaccgggatggaaacattgtgtttgtcagcgaaaacgttactcaatatctccaatacaagcaagaggatttggtgaacacttccgtctataacatcctgcacgaggaggatagaaaggactttctaaaaaatctcccaaaatctactgttaatggggtcagctggactaatgaaacacagagacagaaaagtcacacattcaactgccgtatgctaatgaagactccacacgacattctcgaggacataaacgcatcccctgaaatgcggcagcgatacgaaacaatgcagtgttttgccctgagccagccgagggccatgatggaggagggggaagacctgcagtcatgcatgatttgcgtggcgcgtcgaattacgacaggggagcgaacattcccatccaatcccgagtcttttatcacgaggcacgacctctcgggcaaggtcgtgaacattgatacgaactctttgcggtccagtatgaggcccggattcgaagatatcatacgacgttgcattcagcgatttttttccctaaacgatggccaatcctggtcccagaagcggcattatcaggaggtcacaagtgacggtattttcagtccgactgcatatcttaacgggcatgccgagacccctgtctatcggttctctttggccgacggcacaattgttaccgcacagaccaagtcaaagctgttccggaatcccgtgacaaatgaccgacacggcttcgtgagtacccacttcctccagagggagcaaaacgggtatagacccaatcctaaccccgtggggcaaggcatccggccaccaatggccggttgtaactcctccgttgggggtatgtccatgagccctaatcaaggcttgcagatgcctagtagtagggcgtatggcctggctgacccctcaaccaccggacagatgtcaggtgctcgctacggtggcagttccaatattgcctctctgactcccggtccaggcatgcagagcccgagcagttatcaaaacaataactacggcctaaatatgtccagtcctcctcacggctcgcccggtttggcaccaaatcagcagaacatcatgattagccctaggaataggggctcacctaagatcgcgtcccatcagttctctcccgtggctggagtgcattcccccatggcctcctccgggaatacaggcaatcactctttttccagttcttctttatcagcactgcaggcaattagcgaaggggttggaacctctcttttgtccaccctaagcagccctggtcctaaactggataatagccccaatatgaacattacacagccgagcaaagtgtctaatcaggactcaaaatcccctctcggattctattgcgatcagaatcctgtagaaagtagtatgtgtcagagtaattctcgggatcatctgagtgataaggagagcaaagagtctagtgtcgaaggggctgaaaaccaacggggtcccctggaaagcaaaggccataagaaacttctccagttgttaacttgctctagtgacgaccgaggacattcttctctcaccaatagcccgcttgactccagctgcaaggaaagctctgtttcagtgacctctcccagcggagtgagctctagcacttccgggggtgtttcatctacctctaacatgcatggcagcctcttacaggagaagcatagaattctacataagcttctccaaaacgggaactcacctgctgaagtggctaaaattaccgctgaggccaccgggaaggacaccagttccattaccagttgcggagatggtaacgtggtgaagcaggagcagcttagccctaagaaaaaggagaataacgcactgcttagatacctgctcgaccgggacgatcctagcgacgccctgtctaaagagttacagccacaggttgaaggtgtagataacaagatgagtcagtgtacttcctctacaatccccagcagctcacaagagaaggaccccaagattaagacagaaacctccgaggaaggctcgggggaccttgataacctggatgccatcctgggagatcttactagttccgatttctacaataacagtatctcaagcaacggaagccatttgggaaccaagcagcaggtattccagggaactaacagcctgggagattggggcctgccaaacagtaaggctgggcgtatggagccaatgaacagcaattcaatgggaagacccggaggggactataacacaagtctgccacgaccagctctggggggatctatcccaacactgccactgcggtccaactccatccctggtgcgagaccagtactccagcagcagcaacagatgctccagatgaggcccggtgaaatccctatgggaatgggcgctaatccctatggtcaggctgctgcctcaaatcagctaggatcgtggcctgacggaatgctgtcaatggaacaagtttcgcacggaactcaaaaccggccactgctgcgaaatagcctcgacgatctcgttggacccccatctaacctcgagggacaaagtgacgagcgtgctctgctcgatcaattacacacattgctctccaacaccgatgctacaggcttagaggagattgatagggcgctgggtattcccgagttggtgaaccaggggcaggctcttgaaccaaaacaagatgcatttcagggacaggaagccgctgttatgatggatcagaaggccggtttgtacgggcagacataccctgcccagggaccacctatgcaagggggtttccatcttcagggacaatccccctcctttaacagtatgatgaatcaaatgaaccaacaagggaattttccgttacaagggatgcatccacgtgcaaacattatgcgaccgagaaccaacactcctaagcaactgcggatgcagctgcaacagcggctgcagggccagcagttcctcaatcaaagccgccaagctctggagctgaagatggaaaatcctacagccggtggagctgccgtgatgcggccaatgatgcaacctcaacagggcttcctcaacgcccagatggttgcccagagaagccgtgagctgctaagccaccactttagacagcaaagggtcgccatgatgatgcagcaacagcagcagcagcagcagcaacaacagcaacagcagcaacaacagcagcaacagcagcagcaacagcagcaacagcagcagactcaagcgttctcgccaccccctaacgtcaccgcgtctccatcaatggacggtctgctggccggaccaactatgcctcaagcaccaccacagcagttcccctaccaacccaactacggaatgggacagcagccagaccccgctttcggcagggtcagttcccctcctaatgccatgatgagcagccggatgggcccttcccagaaccccatgatgcagcacccacaggcggcttctatctaccagtcaagcgaaatgaagggatggccaagcggaaacctcgccaggaacagttctttttcgcagcaacagttcgcacaccagggcaatcccgcagtttattccatggtccacatgaatggctcctctggccacatgggccagatgaatatgaatccaatgccaatgtccgggatgcctatgggacctgatcagaaatactgttag

SEQ ID NO: 69242 - DNA, 4248 bp, Artificial Sequence
  derived and/or modified sequence
atgtcaggtctgggagaaaacctcgatccattggcgtccgactcccggaagaggaaactgccctgcgacactccagggcagggcctgacgtgtagcggagagaagcggcgtcgcgaacaggagtcaaagtacattgaggaactggcggagttgatctccgccaacctgtctgatatcgacaacttcaatgttaagcctgataagtgtgccattcttaaagagaccgtacgccagattagacagataaaggaacagggcaagactatcagcaacgatgatgacgttcagaaggccgatgtttcgtccactgggcaaggggtcatagacaaagacagcctgggacccctgctgctccaggccttagatggtttcctctttgtggtgaaccgggatggcaacattgtctttgttagcgaaaatgtgacgcagtatctgcaatataagcaggaggaccttgtgaacactagtgtgtacaacattctgcatgaggaagatcgtaaagacttcttgaagaatttgcccaaaagcacagtgaacggtgtgagctggaccaatgagactcagcggcaaaagtctcacacatttaactgccgcatgctgatgaagactccacatgatatcctcgaggatattaatgcttccccggagatgcgccaaagatacgaaactatgcagtgctttgcgctctcccagcctcgggctatgatggaggagggagaggacctgcagagctgtatgatctgcgtggctcggcgtatcactaccggagaaagaacatttccctcgaaccctgagagcttcatcactcggcatgacctgtccggcaaagtagtgaacatagacaccaactctctccggtcaagcatgcggccaggcttcgaagatattattcgccgttgtatccaacgatttttcagccttaacgacggccaatcctggtcacagaaaagacattaccaggaggtgaccagtgatggtattttttccccaactgcgtatctaaacggccacgctgagacccctgtctacagattctctctagcagacggaaccattgtgacagcgcaaacaaagagtaagctttttcggaatccagtaaccaatgaccggcacggcttcgtttcgacccactttctgcaacgggagcagaatggataccggcctaatcctaatccggttggtcagggcatcaggcctcccatggctggctgtaattccagcgtcggtgggatgagcatgtctcccaatcaaggcttgcagatgccctcatctcgagcctatggcctagctgacccatccactactggccagatgtctggggctcggtatggagggtcaagcaacattgcaagcttaaccccgggacctgggatgcagtcaccaagtagctaccaaaataacaactatggattgaatatgtcttctcctccccacgggtcccccggtctggcacctaatcagcaaaatatcatgatatcacccaggaaccggggaagtccgaaaatcgcttcccaccagttttcccctgttgccggagttcattctcccatggcctcttccgggaacacagggaaccatagctttagctccagttcactttctgccctacaggccattagcgaaggggtcggcacgtctttactatctaccttatccagccctgggccaaagctcgataacagccctaatatgaacatcacacagccctcaaaagtgtccaaccaggatagtaagagccctctgggcttctattgtgatcagaaccctgtggagtcctccatgtgccagagcaatagtcgtgaccaccttagtgataaagaaagcaaggagagctcagtcgaaggcgcagagaaccagcgcggacctctggagagtaaggggcataagaagctgcttcagctgctgacttgtagcagcgacgatagaggccactctagtctgaccaattcccctctggactctagctgtaaggaatcttcagtatccgtcacatctcccagcggcgtgtcgtcctcaaccagtggaggggttagttcaaccagcaacatgcacgggtccctgctacaagaaaagcatcggattttacacaaactgctccaaaacggcaacagccctgccgaggttgcgaagataacggctgaggccactggtaaggacaccagttctattacatcttgtggggatggaaacgtggtgaagcaggagcaactcagtcccaagaaaaaggaaaacaatgctctgcttagatatttgctggatagagacgatccaagtgatgctctgtcaaaagagctacaaccgcaggtcgaaggcgtggataacaagatgagccagtgtacctcttccactattccttcatcttcacaggagaaagatcccaagatcaagactgaaacttcagaggaaggctcaggggacctggacaacctggacgcaattcttggagatctgacaagcagtgatttttataataactcaatatcctccaacggatcccatttgggcactaagcagcaagtattccagggcaccaactctctcggcctgaagagtagtcagagcgttcagtccattcgtccaccttacaaccgcgctgtgagtctcgactctcccgtctccgttggcagcagcccacctgtgaagaacatcagtgctttcccaatgctccctaagcagccaatgctcggcggaaatcctcggatgatggatagccaggagaattacggctctagtatgggagactgggggctgcctaactctaaggctggccgaatggagcctatgaactccaattctatggggagacccggtggcgattacaatacttcccttcccagacctgctctgggaggatctatccctacccttccacttcggagtaacagcatccctggcgcacgccctgtgctccagcagcagcagcagatgttacagatgaggcccggagaaatcccaatggggatgggggcaaatccctatggccaggcagcagcatcaaaccaactgggcagctggcctgacgggatgctgtcaatggagcaagtgtctcatgggacacagaataggcctctgcttagaaactctctggatgaccttgttggaccgcctagcaacctcgagggacaatcagacgagcgagccttgcttgaccaactgcacactctattgtccaacacggatgcaactggccttgaagagatcgaccgcgcactgggcatacccgaactggttaaccaagggcaggctttagaaccaaaacaggacgccttccaaggacaagaggctgccgtgatgatggaccagaaggccggactctatggccaaacttaccccgctcagggcccaccaatgcagggagggttccatttgcaggggcagtcccctagcttcaactcaatgatgaatcagatgaatcaacagggaaattttcccctgcaaggcatgcatcctcgcgcaaacattatgaggccacgcaccaatacacccaaacagcttcgcatgcagctacagcagcgcctgcaagggcagcaatttctgaatcaatcccgtcaggccctcgagctgaaaatggaaaatccaaccgccggtggcgctgccgttatgcgccctatgatgcaacctcagcaaggcttcttgaatgcccagatggtggctcagcggtccagggaactcctgtcccaccacttcaggcagcaacgagtggccatgatgatgcaacagcaacaacaacagcagcagcagcaacagcaacagcaacagcagcagcagcaacagcagcaacagcagcagcagcaacagcaaacacaggctttttcaccaccccctaacgtgaccgcctcgccttccatggacggactcctagcaggcccaactatgccccaggcaccacctcagcagtttccttaccaacctaactacgggatgggacaacagcctgacccagcattcggcagagttagctctccacctaacgctatgatgagctccaggatgggcccatcccaaaatccaatgatgcaacatccacaggctgcaagcatctaccaatcctccgagatgaaaggctggccctccggcaacctggcccgaaatagctccttcagccaacaacagtttgctcaccaagggaatcctgctgtgtatagtatggtccatatgaacggcagcagcggtcatatgggccagatgaacatgaatcctatgcctatgtctgggatgcctatgggaccagaccaaaagtattgctag

SEQ ID NO: 69243 - DNA, 4053 bp, Artificial Sequence
  derived and/or modified sequence
atgagcggcctgggcgagaacctggaccccctggccagcgacagcagaaagagaaagctgccctgcgacacccccggccagggcctgacctgcagcggcgagaagagaagaagagagcaggagagcaagtacatcgaggagctggccgagctgatcagcgccaacctgagcgacatcgacaacttcaacgtgaagcccgacaagtgcgccatcctgaaggagaccgtgagacagatcagacagatcaaggagcagggcaagaccatcagcaacgacgacgacgtgcagaaggccgacgtgagcagcaccggccagggcgtgatcgacaaggacagcctgggccccctgctgctgcaggccctggacggcttcctgttcgtggtgaacagagacggcaacatcgtgttcgtgagcgagaacgtgacccagtacctgcagtacaagcaggaggacctggtgaacaccagcgtgtacaacatcctgcacgaggaggacagaaaggacttcctgaagaacctgcccaagagcaccgtgaacggcgtgagctggaccaacgagacccagagacagaagagccacaccttcaactgcagaatgctgatgaagaccccccacgacatcctggaggacatcaacgccagccccgagatgagacagagatacgagaccatgcagtgcttcgccctgagccagcccagagccatgatggaggagggcgaggacctgcagagctgcatgatctgcgtggccagaagaatcaccaccggcgagagaaccttccccagcaaccccgagagcttcatcaccagacacgacctgagcggcaaggtggtgaacatcgacaccaacagcctgagaagcagcatgagacccggcttcgaggacatcatcagaagatgcatccagagattcttcagcctgaacgacggccagagctggagccagaagagacactaccaggaggtgaccagcgacggcatcttcagccccaccgcctacctgaacggccacgccgagacccccgtgtacagattcagcctggccgacggcaccatcgtgaccgcccagaccaagagcaagctgttcagaaaccccgtgaccaacgacagacacggcttcgtgagcacccacttcctgcagagagagcagaacggctacagacccaaccccaaccccgtgggccagggcatcagaccccccatggccggctgcaacagcagcgtgggcggcatgagcatgagccccaaccagggcctgcagatgcccagcagcagagcctacggcctggccgaccccagcaccaccggccagatgagcggcgccagatacggcggcagcagcaacatcgccagcctgacccccggccccggcatgcagagccccagcagctaccagaacaacaactacggcctgaacatgagcagccccccccacggcagccccggcctggcccccaaccagcagaacatcatgatcagccccagaaacagaggcagccccaagatcgccagccaccagttcagccccgtggccggcgtgcacagccccatggccagcagcggcaacaccggcaaccacagcttcagcagcagcagcctgagcgccctgcaggccatcagcgagggcgtgggcaccagcctgctgagcaccctgagcagccccggccccaagctggacaacagccccaacatgaacatcacccagcccagcaaggtgagcaaccaggacagcaagagccccctgggcttctactgcgaccagaaccccgtggagagcagcatgtgccagagcaacagcagagaccacctgagcgacaaggagagcaaggagagcagcgtggagggcgccgagaaccagagaggccccctggagagcaagggccacaagaagctgctgcagctgctgacctgcagcagcgacgacagaggccacagcagcctgaccaacagccccctggacagcagctgcaaggagagcagcgtgagcgtgaccagccccagcggcgtgagcagcagcaccagcggcggcgtgagcagcaccagcaacatgcacggcagcctgctgcaggagaagcacagaatcctgcacaagctgctgcagaacggcaacagccccgccgaggtggccaagatcaccgccgaggccaccggcaaggacaccagcagcatcaccagctgcggcgacggcaacgtggtgaagcaggagcagctgagccccaagaagaaggagaacaacgccctgctgagatacctgctggacagagacgaccccagcgacgccctgagcaaggagctgcagccccaggtggagggcgtggacaacaagatgagccagtgcaccagcagcaccatccccagcagcagccaggagaaggaccccaagatcaagaccgagaccagcgaggagggcagcggcgacctggacaacctggacgccatcctgggcgacctgaccagcagcgacttctacaacaacagcatcagcagcaacggcagccacctgggcaccaagcagcaggtgttccagggcaccaacagcctgggcgactggggcctgcccaacagcaaggccggcagaatggagcccatgaacagcaacagcatgggcagacccggcggcgactacaacaccagcctgcccagacccgccctgggcggcagcatccccaccctgcccctgagaagcaacagcatccccggcgccagacccgtgctgcagcagcagcagcagatgctgcagatgagacccggcgagatccccatgggcatgggcgccaacccctacggccaggccgccgccagcaaccagctgggcagctggcccgacggcatgctgagcatggagcaggtgagccacggcacccagaacagacccctgctgagaaacagcctggacgacctggtgggcccccccagcaacctggagggccagagcgacgagagagccctgctggaccagctgcacaccctgctgagcaacaccgacgccaccggcctggaggagatcgacagagccctgggcatccccgagctggtgaaccagggccaggccctggagcccaagcaggacgccttccagggccaggaggccgccgtgatgatggaccagaaggccggcctgtacggccagacctaccccgcccagggcccccccatgcagggcggcttccacctgcagggccagagccccagcttcaacagcatgatgaaccagatgaaccagcagggcaacttccccctgcagggcatgcaccccagagccaacatcatgagacccagaaccaacacccccaagcagctgagaatgcagctgcagcagagactgcagggccagcagttcctgaaccagagcagacaggccctggagctgaagatggagaaccccaccgccggcggcgccgccgtgatgagacccatgatgcagccccagcagggcttcctgaacgcccagatggtggcccagagaagcagagagctgctgagccaccacttcagacagcagagagtggccatgatgatgcagcagcagcagcagcagcagcagcagcagcagcagcagcagcagcagcagcagcagcagcagcagcagcagcagcagcagcagcagacccaggccttcagccccccccccaacgtgaccgccagccccagcatggacggcctgctggccggccccaccatgccccaggcccccccccagcagttcccctaccagcccaactacggcatgggccagcagcccgaccccgccttcggcagagtgagcagcccccccaacgccatgatgagcagcagaatgggccccagccagaaccccatgatgcagcacccccaggccgccagcatctaccagagcagcgagatgaagggctggcccagcggcaacctggccagaaacagcagcttcagccagcagcagttcgcccaccagggcaaccccgccgtgtacagcatggtgcacatgaacggcagcagcggccacatgggccagatgaacatgaaccccatgcccatgagcggcatgcccatgggccccgaccagaagtactgctag

SEQ ID NO: 69244 - DNA, 4248 bp, Artificial Sequence
  derived and/or modified sequence
atgagcggcctgggcgagaacctggaccccctggccagcgacagcagaaagagaaagctgccctgcgacacccccggccagggcctgacctgcagcggcgagaagagaagaagagagcaggagagcaagtacatcgaggagctggccgagctgatcagcgccaacctgagcgacatcgacaacttcaacgtgaagcccgacaagtgcgccatcctgaaggagaccgtgagacagatcagacagatcaaggagcagggcaagaccatcagcaacgacgacgacgtgcagaaggccgacgtgagcagcaccggccagggcgtgatcgacaaggacagcctgggccccctgctgctgcaggccctggacggcttcctgttcgtggtgaacagagacggcaacatcgtgttcgtgagcgagaacgtgacccagtacctgcagtacaagcaggaggacctggtgaacaccagcgtgtacaacatcctgcacgaggaggacagaaaggacttcctgaagaacctgcccaagagcaccgtgaacggcgtgagctggaccaacgagacccagagacagaagagccacaccttcaactgcagaatgctgatgaagaccccccacgacatcctggaggacatcaacgccagccccgagatgagacagagatacgagaccatgcagtgcttcgccctgagccagcccagagccatgatggaggagggcgaggacctgcagagctgcatgatctgcgtggccagaagaatcaccaccggcgagagaaccttccccagcaaccccgagagcttcatcaccagacacgacctgagcggcaaggtggtgaacatcgacaccaacagcctgagaagcagcatgagacccggcttcgaggacatcatcagaagatgcatccagagattcttcagcctgaacgacggccagagctggagccagaagagacactaccaggaggtgaccagcgacggcatcttcagccccaccgcctacctgaacggccacgccgagacccccgtgtacagattcagcctggccgacggcaccatcgtgaccgcccagaccaagagcaagctgttcagaaaccccgtgaccaacgacagacacggcttcgtgagcacccacttcctgcagagagagcagaacggctacagacccaaccccaaccccgtgggccagggcatcagaccccccatggccggctgcaacagcagcgtgggcggcatgagcatgagccccaaccagggcctgcagatgcccagcagcagagcctacggcctggccgaccccagcaccaccggccagatgagcggcgccagatacggcggcagcagcaacatcgccagcctgacccccggccccggcatgcagagccccagcagctaccagaacaacaactacggcctgaacatgagcagccccccccacggcagccccggcctggcccccaaccagcagaacatcatgatcagccccagaaacagaggcagccccaagatcgccagccaccagttcagccccgtggccggcgtgcacagccccatggccagcagcggcaacaccggcaaccacagcttcagcagcagcagcctgagcgccctgcaggccatcagcgagggcgtgggcaccagcctgctgagcaccctgagcagccccggccccaagctggacaacagccccaacatgaacatcacccagcccagcaaggtgagcaaccaggacagcaagagccccctgggcttctactgcgaccagaaccccgtggagagcagcatgtgccagagcaacagcagagaccacctgagcgacaaggagagcaaggagagcagcgtggagggcgccgagaaccagagaggccccctggagagcaagggccacaagaagctgctgcagctgctgacctgcagcagcgacgacagaggccacagcagcctgaccaacagccccctggacagcagctgcaaggagagcagcgtgagcgtgaccagccccagcggcgtgagcagcagcaccagcggcggcgtgagcagcaccagcaacatgcacggcagcctgctgcaggagaagcacagaatcctgcacaagctgctgcagaacggcaacagccccgccgaggtggccaagatcaccgccgaggccaccggcaaggacaccagcagcatcaccagctgcggcgacggcaacgtggtgaagcaggagcagctgagccccaagaagaaggagaacaacgccctgctgagatacctgctggacagagacgaccccagcgacgccctgagcaaggagctgcagccccaggtggagggcgtggacaacaagatgagccagtgcaccagcagcaccatccccagcagcagccaggagaaggaccccaagatcaagaccgagaccagcgaggagggcagcggcgacctggacaacctggacgccatcctgggcgacctgaccagcagcgacttctacaacaacagcatcagcagcaacggcagccacctgggcaccaagcagcaggtgttccagggcaccaacagcctgggcctgaagagcagccagagcgtgcagagcatcagacccccctacaacagagccgtgagcctggacagccccgtgagcgtgggcagcagcccccccgtgaagaacatcagcgccttccccatgctgcccaagcagcccatgctgggcggcaaccccagaatgatggacagccaggagaactacggcagcagcatgggcgactggggcctgcccaacagcaaggccggcagaatggagcccatgaacagcaacagcatgggcagacccggcggcgactacaacaccagcctgcccagacccgccctgggcggcagcatccccaccctgcccctgagaagcaacagcatccccggcgccagacccgtgctgcagcagcagcagcagatgctgcagatgagacccggcgagatccccatgggcatgggcgccaacccctacggccaggccgccgccagcaaccagctgggcagctggcccgacggcatgctgagcatggagcaggtgagccacggcacccagaacagacccctgctgagaaacagcctggacgacctggtgggcccccccagcaacctggagggccagagcgacgagagagccctgctggaccagctgcacaccctgctgagcaacaccgacgccaccggcctggaggagatcgacagagccctgggcatccccgagctggtgaaccagggccaggccctggagcccaagcaggacgccttccagggccaggaggccgccgtgatgatggaccagaaggccggcctgtacggccagacctaccccgcccagggcccccccatgcagggcggcttccacctgcagggccagagccccagcttcaacagcatgatgaaccagatgaaccagcagggcaacttccccctgcagggcatgcaccccagagccaacatcatgagacccagaaccaacacccccaagcagctgagaatgcagctgcagcagagactgcagggccagcagttcctgaaccagagcagacaggccctggagctgaagatggagaaccccaccgccggcggcgccgccgtgatgagacccatgatgcagccccagcagggcttcctgaacgcccagatggtggcccagagaagcagagagctgctgagccaccacttcagacagcagagagtggccatgatgatgcagcagcagcagcagcagcagcagcagcagcagcagcagcagcagcagcagcagcagcagcagcagcagcagcagcagcagcagcagacccaggccttcagccccccccccaacgtgaccgccagccccagcatggacggcctgctggccggccccaccatgccccaggcccccccccagcagttcccctaccagcccaactacggcatgggccagcagcccgaccccgccttcggcagagtgagcagcccccccaacgccatgatgagcagcagaatgggccccagccagaaccccatgatgcagcacccccaggccgccagcatctaccagagcagcgagatgaagggctggcccagcggcaacctggccagaaacagcagcttcagccagcagcagttcgcccaccagggcaaccccgccgtgtacagcatggtgcacatgaacggcagcagcggccacatgggccagatgaacatgaaccccatgcccatgagcggcatgcccatgggccccgaccagaagtactgctag

SEQ ID NO: 69245 - protein, 316 aa, Artificial Sequence
  derived and/or modified sequence
MAAATRRVFHLQPCENSPTMSQNGYFEDSSYYKCDTDDTFEAREEILGDEAFDTANSSIVSGESIRFFVNVNLEMQATNTENEATSGGCVLLHTSRKYLKLKNFKEEIRAHRDLDGFLAQASIVLNETATSLDNVLRTMLRRFARDPDNNEPNCNLDLLMAMLFTDAGAPMRGKVHLLSDTIQGVTATVTGVRYQQSWLCIICTMKALQKRHVCISRLVRPQNWGENSCEVRFVILVLAPPKMKSTKTAMEVARTFATMFSDIAFRQKLLETRTEEEFKEALVHQRQLLTMVSHGPVAPRTKERSTVSLPAHRHPE

SEQ ID NO: 69246 - protein, 875 aa, Artificial Sequence
  derived and/or modified sequence
MAAATRRVFHLQPCENSPTMSQNGYFEDSSYYKCDTDDTFEAREEILGDEAFDTANSSIVSGESIRFFVNVNLEMQATNTENEATSGGCVLLHTSRKYLKLKNFKEEIRAHRDLDGFLAQASIVLNETATSLDNVLRTMLRRFARDPDNNEPNCNLDLLMAMLFTDAGAPMRGKVHLLSDTIQGVTATVTGVRYQQSWLCIICTMKALQKRHVCISRLVRPQNWGENSCEVRFVILVLAPPKMKSTKTAMEVARTFATMFSDIAFRQKLLETRTEEEFKEALVHQRQLLTMVSHGPVAPRTKERSTVSLPAHRHPEPPKCKDFVPFGKGIREDIARRFPLYPLDFTDGIIGKNKAVGKYITTTLFLYFACLLPTIAFGSLNDENTDGAIDVQKTIAGQSIGGLLYALFSGQPLVILLTTAPLALYIQVIRVICDDYDLDFNSFYAWTGLWNSFFLALYAFFNLSLVMSLFKRSTEEIIALFISITFVLDAVKGTVKIFWKYYYGHYLDDYHTKRTSSLVSLSGLGASLNASLHTALNASFLASPTELPSATHSGQATAVLSLLIMLGTLWLGYTLYQFKKSPYLHPCVREILSDCALPIAVLAFSLISSHGFREIEMSKFRYNPSESPFAMAQIQSLSLRAVSGAMGLGFLLSMLFFIEQNLVAALVNAPENRLVKGTAYHWDLLLLAIINTGLSLFGLPWIHAAYPHSPLHVRALALVEERVENGHIYDTIVNVKETRLTSLGASVLVGLSLLLLPVPLQWIPKPVLYGLFLYIALTSLDGNQLVQRVALLLKEQTAYPPTHYIRRVPQRKIHYFTGLQVLQLLLLCAFGMSSLPYMKMIFPLIMIAMIPIRYILLPRIIEAKYLDVMDAEHRP

SEQ ID NO: 69247 - DNA, 951 bp, Artificial Sequence
  derived and/or modified sequence
atggccgccgccaccagaagagtgttccacctgcagccctgcgagaacagccccaccatgagccagaacggctacttcgaggacagcagctactacaagtgcgacaccgacgacaccttcgaggccagagaggagatcctgggcgacgaggccttcgacaccgccaacagcagcatcgtgagcggcgagagcatcagattcttcgtgaacgtgaacctggagatgcaggccaccaacaccgagaacgaggccaccagcggcggctgcgtgctgctgcacaccagcagaaagtacctgaagctgaagaacttcaaggaggagatcagagcccacagagacctggacggcttcctggcccaggccagcatcgtgctgaacgagaccgccaccagcctggacaacgtgctgagaaccatgctgagaagattcgccagagaccccgacaacaacgagcccaactgcaacctggacctgctgatggccatgctgttcaccgacgccggcgcccccatgagaggcaaggtgcacctgctgagcgacaccatccagggcgtgaccgccaccgtgaccggcgtgagataccagcagagctggctgtgcatcatctgcaccatgaaggccctgcagaagagacacgtgtgcatcagcagactggtgagaccccagaactggggcgagaacagctgcgaggtgagattcgtgatcctggtgctggccccccccaagatgaagagcaccaagaccgccatggaggtggccagaaccttcgccaccatgttcagcgacatcgccttcagacagaagctgctggagaccagaaccgaggaggagttcaaggaggccctggtgcaccagagacagctgctgaccatggtgagccacggccccgtggcccccagaaccaaggagagaagcaccgtgagcctgcccgcccacagacaccccgagtag

SEQ ID NO: 69248 - DNA, 2628 bp, Artificial Sequence
  derived and/or modified sequence
atggccgccgccaccagaagagtgttccacctgcagccctgcgagaacagccccaccatgagccagaacggctacttcgaggacagcagctactacaagtgcgacaccgacgacaccttcgaggccagagaggagatcctgggcgacgaggccttcgacaccgccaacagcagcatcgtgagcggcgagagcatcagattcttcgtgaacgtgaacctggagatgcaggccaccaacaccgagaacgaggccaccagcggcggctgcgtgctgctgcacaccagcagaaagtacctgaagctgaagaacttcaaggaggagatcagagcccacagagacctggacggcttcctggcccaggccagcatcgtgctgaacgagaccgccaccagcctggacaacgtgctgagaaccatgctgagaagattcgccagagaccccgacaacaacgagcccaactgcaacctggacctgctgatggccatgctgttcaccgacgccggcgcccccatgagaggcaaggtgcacctgctgagcgacaccatccagggcgtgaccgccaccgtgaccggcgtgagataccagcagagctggctgtgcatcatctgcaccatgaaggccctgcagaagagacacgtgtgcatcagcagactggtgagaccccagaactggggcgagaacagctgcgaggtgagattcgtgatcctggtgctggccccccccaagatgaagagcaccaagaccgccatggaggtggccagaaccttcgccaccatgttcagcgacatcgccttcagacagaagctgctggagaccagaaccgaggaggagttcaaggaggccctggtgcaccagagacagctgctgaccatggtgagccacggccccgtggcccccagaaccaaggagagaagcaccgtgagcctgcccgcccacagacaccccgagccccccaagtgcaaggacttcgtgcccttcggcaagggcatcagagaggacatcgccagaagattccccctgtaccccctggacttcaccgacggcatcatcggcaagaacaaggccgtgggcaagtacatcaccaccaccctgttcctgtacttcgcctgcctgctgcccaccatcgccttcggcagcctgaacgacgagaacaccgacggcgccatcgacgtgcagaagaccatcgccggccagagcatcggcggcctgctgtacgccctgttcagcggccagcccctggtgatcctgctgaccaccgcccccctggccctgtacatccaggtgatcagagtgatctgcgacgactacgacctggacttcaacagcttctacgcctggaccggcctgtggaacagcttcttcctggccctgtacgccttcttcaacctgagcctggtgatgagcctgttcaagagaagcaccgaggagatcatcgccctgttcatcagcatcaccttcgtgctggacgccgtgaagggcaccgtgaagatcttctggaagtactactacggccactacctggacgactaccacaccaagagaaccagcagcctggtgagcctgagcggcctgggcgccagcctgaacgccagcctgcacaccgccctgaacgccagcttcctggccagccccaccgagctgcccagcgccacccacagcggccaggccaccgccgtgctgagcctgctgatcatgctgggcaccctgtggctgggctacaccctgtaccagttcaagaagagcccctacctgcacccctgcgtgagagagatcctgagcgactgcgccctgcccatcgccgtgctggccttcagcctgatcagcagccacggcttcagagagatcgagatgagcaagttcagatacaaccccagcgagagccccttcgccatggcccagatccagagcctgagcctgagagccgtgagcggcgccatgggcctgggcttcctgctgagcatgctgttcttcatcgagcagaacctggtggccgccctggtgaacgcccccgagaacagactggtgaagggcaccgcctaccactgggacctgctgctgctggccatcatcaacaccggcctgagcctgttcggcctgccctggatccacgccgcctacccccacagccccctgcacgtgagagccctggccctggtggaggagagagtggagaacggccacatctacgacaccatcgtgaacgtgaaggagaccagactgaccagcctgggcgccagcgtgctggtgggcctgagcctgctgctgctgcccgtgcccctgcagtggatccccaagcccgtgctgtacggcctgttcctgtacatcgccctgaccagcctggacggcaaccagctggtgcagagagtggccctgctgctgaaggagcagaccgcctacccccccacccactacatcagaagagtgccccagagaaagatccactacttcaccggcctgcaggtgctgcagctgctgctgctgtgcgccttcggcatgagcagcctgccctacatgaagatgatcttccccctgatcatgatcgccatgatccccatcagatacatcctgctgcccagaatcatcgaggccaagtacctggacgtgatggacgccgagcacagaccctag

SEQ ID NO: 69249 - DNA, 951 bp, Artificial Sequence
  derived and/or modified sequence
atggccgctgcgacacgacgggtgttccatctgcaaccttgcgaaaattcccctacaatgagtcagaacggctacttcgaggatagcagttactacaagtgcgatactgacgacactttcgaggccagagaagagatcctcggcgatgaagcatttgacaccgccaacagttctatcgtttctggcgagtccattagattctttgtaaatgtgaatctcgagatgcaagctacaaatacagagaacgaggcaacctctgggggctgcgtattattacatacttcccgcaagtatctcaagcttaagaatttcaaggaagaaataagagcacaccgggatctggacggcttcctggcacaagctagcattgtcctaaacgagactgcgacaagtctcgacaatgtcctgagaactatgctccggcgtttcgcgcgagatccagacaacaacgagccaaactgcaaccttgatttgcttatggcaatgctgtttaccgacgccggtgccccgatgagaggcaaggtgcatctgctctctgataccatccagggtgtgaccgcaacagtaacaggagtgagatatcaacagtcatggctctgcatcatatgcactatgaaggccttgcaaaaaaggcacgtgtgtatatcccgactcgtacgccctcagaactggggagaaaactcttgcgaggtgcgctttgtgatactggttctcgccccccccaagatgaaaagcacaaagactgctatggaagttgcccgtactttcgctaccatgttttcagacatagccttccgccagaaattgttggaaacacgtactgaagaagaattcaaagaggcactcgtgcatcagaggcagctgctcactatggtgtcccatgggcccgtggctccccggaccaaagaaagatctacagttagtttaccagctcatcggcacccagagtag

SEQ ID NO: 69250 - DNA, 2628 bp, Artificial Sequence
  derived and/or modified sequence
atggccgcagccactagacgcgtcttccatctgcagccgtgtgagaattctcctacaatgagccagaatggctattttgaggacagcagttattacaagtgtgataccgatgatacattcgaggcgcgagaggaaattctgggtgatgaggcattcgacactgccaacagtagcatcgtttcaggcgagtcgatcagatttttcgtgaatgttaaccttgagatgcaggccaccaatacagaaaacgaggccacctccggtggatgcgtgcttctacatacgtctcgcaagtacctgaagctgaaaaatttcaaggaggaaattcgggcgcatcgagatcttgacggctttttggctcaagcgagtattgtgcttaatgaaacggctacctccttagataatgtcctgaggaccatgttacgcaggtttgctagagatccagataacaacgaacctaattgcaacctggacttacttatggcaatgctgttcacagacgctggcgctcccatgagggggaaagtgcatttgctgagtgacaccatccaaggtgtgactgccaccgtgactggagtcaggtatcagcaaagttggctgtgcatcatctgcacaatgaaagctttacagaagagacacgtctgcatctcaaggctcgtgcgccctcagaactggggggagaatagttgcgaggtccgcttcgtgatactcgtacttgctccaccaaaaatgaaatctacgaaaacagccatggaggtcgcccgcacttttgctactatgttttccgatattgcctttcgacagaaactgttagagacacggaccgaggaagagttcaaagaggccctggtgcaccagagacaacttctgactatggtctcccacggccccgtagcaccccgaacgaaggagcggagcactgtgtccctccccgctcacaggcatccggaaccccctaaatgtaaggacttcgtcccctttggaaaaggtatcagggaggatattgcccggcgctttcccttgtacccgctcgacttcacagacggcataattggtaagaacaaagcagtcggcaaatacatcactacgactctgttcctttactttgcttgcctgctgccaaccatcgcctttggctcgttaaacgatgaaaataccgatggcgccattgacgtccagaagaccatagcaggccagagtatcgggggtttactgtatgcactgttttctggacaacctctggttattctgctaacaacagctcccttggccctgtacattcaggtcatccgtgttatttgtgatgattacgacctggactttaattcgttctacgcgtggactggtctgtggaattccttttttctggcgctatacgctttcttcaacctttcactggtgatgagtttgttcaagcgtagcaccgaagaaatcatcgccttgtttatcagcataacgtttgtgctcgacgctgtgaaaggcactgtgaagatcttttggaaatactattatgggcactacctcgatgattatcatacaaagaggacttcatccctggtttcactctctggccttggtgccagtctaaatgccagccttcatactgcactgaatgcttcttttctggcttcacctaccgagcttccaagtgcaacacactccggccaagcaacagcggtgttgagtcttctcattatgcttgggacgttgtggctgggctacacactttaccagttcaagaagtcaccttatttgcatccatgtgttcgggagattctttcagactgtgcgctacctatcgcagtgctcgccttctccttgatcagttctcatggttttagggaaatcgaaatgtccaaatttaggtacaacccgagcgaaagtcctttcgcaatggcacagatccagagtctgagcttacgagccgtgtcaggtgccatgggactcgggtttcttctgtccatgctattttttatcgagcaaaatctggtggccgcactggtcaacgcccctgagaatagactggtgaagggcaccgcctatcactgggatttgctgcttctcgcaatcattaatacggggctatctttattcgggttgccttggatccatgctgcgtacccgcacagtccactccacgtgagggcactggccctcgtagaggaacgcgtagagaatggccatatatacgacaccattgtgaatgttaaagagacacggctgacctctctcggcgcaagtgtccttgtaggactctcactcttacttctgcctgtcccacttcaatggataccaaagcccgtgctttacggactgtttctgtatattgccctcacttctctcgatgggaatcagctggtacagagggtggcactgctgctcaaggaacagacagcttacccacctacgcattacatccgaagagtgccacagcggaaaatacactacttcaccggtctccaggtacttcagctgctgttgctgtgcgcctttggcatgtccagcctgccatatatgaagatgatctttccgctgatcatgatcgccatgatcccgatcagatatattctgttgcccagaatcattgaagcaaagtacttggacgtcatggacgctgaacaccgcccctag

SEQ ID NO: 69251 - DNA, 951 bp, Artificial Sequence
  derived and/or modified sequence
atggctgctgccacccggcgggtcttccacctgcagccctgtgagaacagccccaccatgagccagaatggctactttgaggacagcagctactacaagtgtgacacagatgacacctttgaggcccgggaggagatcctgggagatgaggcctttgacacagccaacagcagcatcgtgtctggagagagcatccgcttctttgtgaatgtgaacctggagatgcaggccaccaacacagaaaatgaggccaccagcggcggctgtgtgctgctgcacaccagcaggaagtacctgaagctgaagaacttcaaggaggagatccgggcccaccgggacctggatggcttcctggcccaggccagcatcgtgctgaatgaaacagccaccagcctggacaacgtgctgcggaccatgctgcggagatttgcccgggaccctgacaacaatgagcccaactgcaacctggacctgctgatggccatgctgttcacagatgctggggcccccatgaggggcaaggtgcacctgctgagtgacaccatccagggcgtgacagccaccgtgactggagtgcgctaccagcagagctggctgtgcatcatctgcaccatgaaggccctgcagaagagacatgtgtgcatcagccggctggtgcggccccagaactggggcgagaacagctgtgaggtgcgctttgtgatcctggtgctggccccacccaagatgaagagcaccaagacagccatggaggtggcccggacctttgccaccatgttcagtgacatcgccttccggcagaagctgctggagaccaggacagaggaggagttcaaggaggccctggtgcaccagaggcagctgctgaccatggtgagccacggccctgtggcccccaggaccaaggagaggagcacagtgtccctgcctgcccaccgccaccctgagtag

SEQ ID NO: 69252 - DNA, 2628 bp, Artificial Sequence
  derived and/or modified sequence
atggctgctgccacccggcgggtcttccacctgcagccctgtgagaacagccccaccatgagccagaatggctactttgaggacagcagctactacaagtgtgacacagatgacacctttgaggcccgggaggagatcctgggagatgaggcctttgacacagccaacagcagcatcgtgtctggagagagcatccgcttctttgtgaatgtgaacctggagatgcaggccaccaacacagaaaatgaggccaccagcggcggctgtgtgctgctgcacaccagcaggaagtacctgaagctgaagaacttcaaggaggagatccgggcccaccgggacctggatggcttcctggcccaggccagcatcgtgctgaatgaaacagccaccagcctggacaacgtgctgcggaccatgctgcggagatttgcccgggaccctgacaacaatgagcccaactgcaacctggacctgctgatggccatgctgttcacagatgctggggcccccatgaggggcaaggtgcacctgctgagtgacaccatccagggcgtgacagccaccgtgactggagtgcgctaccagcagagctggctgtgcatcatctgcaccatgaaggccctgcagaagagacatgtgtgcatcagccggctggtgcggccccagaactggggcgagaacagctgtgaggtgcgctttgtgatcctggtgctggccccacccaagatgaagagcaccaagacagccatggaggtggcccggacctttgccaccatgttcagtgacatcgccttccggcagaagctgctggagaccaggacagaggaggagttcaaggaggccctggtgcaccagaggcagctgctgaccatggtgagccacggccctgtggcccccaggaccaaggagaggagcacagtgtccctgcctgcccaccgccaccctgagccccccaagtgcaaggactttgtgccctttgggaagggcatccgggaggacatcgcccggcgcttccccctgtaccccctggacttcacagatggcatcatcggcaagaacaaggctgtgggcaagtacatcaccaccaccctcttcctgtactttgcctgcctgctgcccaccatcgccttcggcagcctgaatgatgaaaatacagatggagccattgatgtgcagaagaccatcgccggccagagcatcggcggcctgctgtatgccctcttcagcggccagcccctggtgatcctgctgaccacagcccccctggccctgtacatccaggtgatccgggtcatctgtgatgattatgacctggacttcaacagcttctacgcctggacaggcctgtggaacagcttcttcctggccctgtatgccttcttcaacctgagcctggtgatgagcctcttcaagaggagcacagaggagatcatcgccctcttcatcagcatcacctttgtgctggatgctgtgaagggcaccgtgaagatcttctggaagtactactacggccactacctggatgactaccacaccaagaggaccagcagcctggtgtccctgagcggcctgggcgccagcctgaatgccagcctgcacacagccctgaatgccagcttcctggccagccccacagagctgcccagcgccacccacagcggccaggccacagctgtgctgagcctgctgatcatgctgggcaccctgtggctgggctacaccctgtaccagttcaagaagagcccctacctgcacccctgtgtgcgggagatcctgagtgactgtgccctgcccatcgctgtgctggccttcagcctcatcagcagccacggcttccgggagattgagatgagcaagttccgctacaaccccagcgagagcccctttgccatggcccagatccagagcctgagcctgcgggctgtgtctggggccatgggcctgggcttcctgctgtccatgctgttcttcatcgagcagaacctggtggccgccctggtgaatgccccagaaaatcggctggtgaagggcacagcctaccactgggacctgctgctgctggccatcatcaacacaggcctgagcctgtttggcctgccctggattcatgctgcctacccccacagccccctgcacgtgcgggccctggccctggtggaggagcgggtggagaatggccacatctatgacaccatcgtgaatgtgaaggagacccggctgaccagcctgggcgcctctgtgctggtgggcctgagcctgctgctgctgcctgtgcccctgcagtggatccccaagcctgtgctgtatggcctcttcctgtacatcgccctgaccagcctggatggcaaccagctggtgcagagggtggccctgctgctgaaggagcagacagcctacccacccacccactacatccggcgggtgccccagaggaagatccactacttcaccggcctgcaggtgctgcagctgctgctgctgtgtgccttcggcatgagcagcctgccctacatgaagatgatcttccccctcatcatgattgccatgatccccatccgctacatcctgctgccccgcatcatcgaggccaagtacctggatgtgatggatgctgagcaccggccctag

SEQ ID NO: 69253 - DNA, 951 bp, Artificial Sequence
  derived and/or modified sequence
atggccgccgccacccggcgggtgttccacctgcagccctgcgagaacagcccaaccatgtctcagaatggttattttgaggactcatcatattataaatgtgatacagatgacacattcgaagctcgtgaagagatccttggtgacgaggcctttgataccgctaactcaagcatcgtcagcggtgaatcgatccgcttcttcgttaacgtgaatctggagatgcaggcgactaacaccgaaaacgaggcaacttcaggcggttgcgtcctcttgcacacatcgagaaagtacctgaagctgaaaaactttaaggaggaaattcgcgcgcatcgggaccttgacggattcctggcacaggctagtatagtgctgaacgagactgccacttcccttgataacgtgctgcggaccatgctgcggagatttgctcgggatcctgataacaatgaacccaattgcaacttggatctgctcatggcaatgctgttcaccgacgccggcgcaccgatgagaggaaaggtgcacctgctcagcgatacaatccagggcgtaacagctacagtcactggcgtgagatatcagcagagctggctgtgcatcatctgcaccatgaaagcccttcagaagcgacatgtttgcatctcaaggctagtccggcctcagaactggggtgagaattcctgcgaagtccgctttgttattctggtgctggcacctccaaaaatgaaaagcacgaagactgccatggaagtggcacggacttttgcaaccatgttttcagacatcgcattccgccagaaattattagagacgcgcacagaagaagaattcaaagaggccctcgtgcaccaacgtcagctcctaacaatggtctcacacgggcctgtcgccccccgcacaaaggaacggtcaaccgtttcactccccgcccatagacacccagaatag

SEQ ID NO: 69254 - DNA, 2628 bp, Artificial Sequence
  derived and/or modified sequence
atggccgccgccacccggcgggtgttccacctgcagccctgcgagaattctcccaccatgagccagaatggctactttgaagattcctcctactataagtgcgatactgacgacacctttgaggcacgggaggaaattcttggggatgaagcatttgacactgcaaattcaagtatcgtatcaggcgagtcaatcagattcttcgtaaatgtgaacttagaaatgcaggcgaccaacaccgagaacgaagcaaccagcgggggctgtgtcctactgcacaccagcagaaagtacctgaagctgaagaattttaaagaggaaatccgggcgcaccgagatctagatggattcctggcgcaggcatcgatcgtcctgaatgagaccgctaccagtttggacaatgtgctgaggaccatgctacgtcgatttgccagagaccctgacaacaacgagcccaactgtaacctggatctgcttatggctatgctgtttacggacgccggagctccaatgcgcggcaaagtgcatcttctctccgatacaatccagggagtgaccgccacagtgactggcgttcgctaccagcagagctggctctgtatcatctgtactatgaaagccttacaaaaaaggcacgtctgcatttcccgcctggtcaggccccagaactggggcgagaactcatgtgaagtccggtttgtgattctcgtcctggctccccctaaaatgaagagcactaaaaccgccatggaagttgcccgcactttcgccacgatgttctccgatatcgcttttagacagaagctgctggaaaccagaaccgaagaagaatttaaggaggcgctcgtgcatcagcgccagctactcaccatggtctcccatggacccgtggcccccagaaccaaagagcgaagcactgtgtcgcttccagctcataggcacccggagccgccgaagtgtaaggacttcgtgccctttgggaagggaataagagaagacattgctaggcgcttcccgctctatcctctcgacttcaccgatgggatcataggaaagaacaaggcagtcggaaaatacatcacgactacgctgtttctatacttcgcctgtctgctgccaaccatcgccttcgggtcactaaacgatgagaatacggacggcgccattgatgtccagaaaacaatcgcgggacagtccataggagggctcctctatgcactcttcagtggacagcctttggttatactccttaccaccgcacccctggctctctacattcaggtgataagggttatttgcgacgactacgacctggatttcaactccttctacgcctggaccggtttgtggaattcctttttccttgctctctatgcatttttcaacctctcattggtgatgtcactctttaagaggagcaccgaggagataattgccctcttcatcagcattactttcgtcttggacgccgttaaggggacagtcaagatcttctggaagtattactatggccactacctggatgactaccacactaaaagaacttcgtccctggtgtctctatcgggattaggggcttcactcaatgcatccctccacacagctttaaacgcctcttttcttgcctcccctacggagctcccgagcgcaacacacagtgggcaggcgaccgcggtgctgtccctgctgataatgttgggtacactctggctagggtatactctgtatcaatttaagaaaagcccctatttacacccttgtgtgagggagatattatctgactgtgccctgcctatcgccgtcctggcttttagcttgatatccagtcacggctttagagaaatcgaaatgtcaaaattccggtacaacccaagtgagagccctttcgctatggctcagatacagtccctgtcactcagggctgtgagtggcgcaatggggctgggctttctcctctccatgctgttcttcattgagcagaatctggtggccgctctggtcaatgcccctgaaaatcgactagtaaaaggcaccgcctaccactgggacttgcttctgctggcaatcattaatacaggtttgtccctgtttggtttgccctggattcacgccgcctatccacacagccccttacatgtgcgtgctctcgcacttgtagaggagcgggtggagaacggccacatttacgacacaatcgtcaacgttaaggagacccggctgactagcttaggcgcctcagtgctggtgggactttctctgctcctgctgcccgtccctcttcagtggatccctaagcccgtgctgtacgggctgtttctgtatattgcactaaccagtctagacggcaatcagctggtgcagagagtggccttgctgttaaaggaacagacggcctatcccccgacccattatattcgccgcgtcccacagcgtaaaattcattactttacagggttgcaggttctgcagctgctcctactctgtgcttttggtatgagcagcctaccttatatgaaaatgatttttccattgatcatgatcgctatgattcccatccgatatattctgctgccaagaatcatcgaggccaagtatctggatgtcatggacgccgaacatcggccgtag

SEQ ID NO: 69255 - DNA, 951 bp, Artificial Sequence
  derived and/or modified sequence
atggcagccgctacccgcagggtgttccacttacagccttgtgaaaatagccctaccatgtcccaaaatggctattttgaagacagttcctactacaaatgcgataccgacgacacctttgaagcacgagaagaaatcctcggggacgaagctttcgacaccgccaatagcagcatcgtctcaggggagagtattcgtttttttgttaacgtcaatttagagatgcaggctactaacaccgagaatgaggcaacatctgggggatgcgttctgctgcacacgtcaaggaaataccttaagctgaagaatttcaaggaggagattcgggctcaccgcgatttggatggcttcctcgcccaggcctcaattgtactgaatgagaccgccacctccctggataatgtcctgcgtacaatgcttagaagattcgcgagagacccagacaacaatgaaccgaattgcaatctggatctgcttatggctatgcttttcactgacgctggcgctcctatgaggggaaaggtccatctgctttccgatactatccagggagtaaccgcaacggtcaccggggtgcggtaccaacagtcctggttgtgcattatctgcacaatgaaggcgctccagaagcggcacgtttgtatttctcggttggtgcggcctcagaattggggcgaaaactcttgcgaggtgcggttcgttatcttagttctggcacccccaaagatgaagagtacaaagacagcgatggaagtggcaagaacattcgcgacaatgttttccgacatagcattccgccaaaagttgctggaaactaggactgaagaagagttcaaagaggcactggttcaccagcggcagctgctgaccatggtcagccatggtcctgtcgcacccagaaccaaggaacgatcaaccgtgtccctccccgctcacagacatcccgagtag

SEQ ID NO: 69256 - DNA, 2628 bp, Artificial Sequence
  derived and/or modified sequence
atggcagctgcaaccaggcgggtcttccacttgcaaccgtgcgagaactcccctaccatgtcccagaatggatacttcgaggatagctcttactataaatgtgacacggacgatacttttgaggcacgggaggagatcctaggggacgaggcgttcgatactgccaactccagcatagtcagtggagagtcgattcgattcttcgtgaatgtcaatttagaaatgcaggcaactaacacggaaaatgaggctacaagtgggggatgcgttctcctccatactagtcgtaagtacctcaagttaaaaaatttcaaggaggaaatccgggcacaccgggacctcgatggattcttggcgcaagccagcatagtcctcaacgagacagcaactagtcttgacaacgtgctgagaactatgcttcgcagattcgctcgagatccagacaacaatgagccaaactgcaacctggacctactcatggctatgttatttaccgatgccggtgcacctatgaggggtaaggtgcatctattgtccgacaccatccagggagttacagctacggtgaccggagtgagatatcagcagagctggctgtgtataatttgtacgatgaaggccctacaaaaaagacatgtgtgcattagccgcttggtacgaccacagaactggggggaaaactcttgcgaagtacggttcgttatccttgttctggcgcctccaaagatgaagagcaccaagacggcgatggaggtggccagaaccttcgcaaccatgtttagcgatattgcctttaggcaaaagctcctggagacaagaacagaggaggagtttaaagaggcattagtacaccagcgacaactgctgactatggtgagccacggacccgtcgccccacgcaccaaagaaaggtctacagttagcctgcccgctcatcgtcatccagagcctcctaagtgcaaagattttgtgccattcggcaagggaatccgcgaggatatagcacggcgtttccctctctacccgctcgactttacagacggaatcattggcaagaataaagctgtcggaaaatacatcacaaccacgctattcctttatttcgcgtgccttctccccaccattgcttttggctcccttaacgacgagaacaccgatggagccatcgacgttcagaagaccatcgctgggcagtctattgggggtctgctgtatgccctattcagtggacagcctcttgtcattcttctaacgaccgcccctctggctttgtacattcaagtgataagggttatctgtgacgactacgaccttgatttcaactctttttatgcctggaccggtctctggaatagcttttttctagcgctgtatgccttcttcaacttatccctggtaatgtccctatttaagcggtccacagaggagataatcgccctcttcattagtattactttcgtcctcgatgccgtgaagggaacagtcaaaatattctggaaatattattacggccattacctggatgattatcacactaaaaggacaagctccctggtctcattaagtggactgggtgccagcctgaacgcaagcctgcatacggctctgaacgccagttttctggccagtccgacagaacttccctcggccacgcacagtgggcaagcaaccgcagtgttgtctcttctcattatgttgggtactctctggctcggatacacactgtatcagtttaaaaagtccccttatttgcacccatgcgttcgagaaatcttgagtgactgcgctctgccaattgcagtgttggcgttctcacttatctcttcccatggcttccgggagatcgaaatgtctaagtttaggtataatccaagcgaaagcccttttgcaatggctcagattcagagcctgagcctccgcgcagtatctggggctatggggctcggtttcctgctgtcaatgctcttctttattgagcagaatctggtggccgctcttgtaaatgcccctgaaaacagattggtgaaaggcactgcctatcattgggacttgctgctgctagccatcataaatactgggctttctctgtttggccttccatggattcacgccgcatacccacatagtcccctgcatgtacgagctctcgccctggtcgaagagagagtggagaacggacatatctacgacactatcgttaatgtgaaggagaccaggttaacgagtctcggagcatccgtcctcgtcggcctctccttacttctgttgccagtccctctgcagtggattccgaagccggttctatacggcctgtttctatacattgccctcacaagtcttgacggcaaccaattggttcagagagttgctctgctgctgaaagagcagacagcctatccacctactcactatatccggagggtgccgcagcggaagattcattatttcaccgggctgcaggtcttgcagctgcttctgctgtgcgctttcggcatgagcagcttgccatacatgaagatgatttttcccctgatcatgattgccatgatcccaattagatacatcctgctaccccgtattatcgaggcaaagtacctggatgtaatggatgcggagcacaggccctag

SEQ ID NO: 69257 - DNA, 1020 bp, Artificial Sequence
  derived and/or modified sequence
gtcgccgagtttggggtccagaagcgccggagcgccgcgtgaggagcccggccgtgagtgcgcgagtgtgccatggccgcggccaccaggcgcgtgttccatctgcagccgtgcgaaaactctcccaccatgtcgcagaatggatacttcgaggattcaagctactacaagtgtgacacagatgacaccttcgaagcccgagaggagatcctgggggatgaggccttcgacactgccaactcctccatcgtgtctggcgagagtatccgtttttttgtcaatgtcaaccttgagatgcaggccaccaacactgagaatgaagcgacttccggtggctgtgtgctcctgcacacctcccgaaagtacctgaagttaaagaacttcaaggaagagatccgtgcgcaccgcgacctagatggcttcctggcgcaggccagcatcgtcctgaacgagacggccacctccctggataacgtgctgcggaccatgcttcgccgcttcgccagggaccctgacaacaatgagcccaactgcaacctggacctgctcatggccatgctcttcaccgatgccggggcacccatgcggggtaaagtccacctgctgtcagataccatccaaggggtcaccgccacagtgacaggggtgcggtaccagcagtcgtggctctgcatcatctgtaccatgaaggccctacagaagcggcacgtgtgcatcagccgcctggttcgcccacagaactggggggagaattcctgtgaggttcggttcgtcatcctggtgctggccccacccaagatgaaaagcactaagactgcgatggaggtggcgcgcacgtttgccaccatgttctcggatatcgccttccgccagaagctcctggagacccgcacagaggaggaattcaaggaggccttggtgcatcagagacagctgctcaccatggtgagccacggtccagtggcgccgagaacgaaggaacgcagcacagtctccctccctgcccacagacacccagag

SEQ ID NO: 69258 - DNA, 3101 bp, Artificial Sequence
  derived and/or modified sequence
gtgtcgccggctcccgccgccggcccgcccgagtcgccgagtttggggtccagaagcgccggagcgccgcgtgaggagcccggccgtgagtgcgcgagtgtgccatggccgcggccaccaggcgcgtgttccatctgcagccgtgcgaaaactctcccaccatgtcgcagaatggatacttcgaggattcaagctactacaagtgtgacacagatgacaccttcgaagcccgagaggagatcctgggggatgaggccttcgacactgccaactcctccatcgtgtctggcgagagtatccgtttttttgtcaatgtcaaccttgagatgcaggccaccaacactgagaatgaagcgacttccggtggctgtgtgctcctgcacacctcccgaaagtacctgaagttaaagaacttcaaggaagagatccgtgcgcaccgcgacctagatggcttcctggcgcaggccagcatcgtcctgaacgagacggccacctccctggataacgtgctgcggaccatgcttcgccgcttcgccagggaccctgacaacaatgagcccaactgcaacctggacctgctcatggccatgctcttcaccgatgccggggcacccatgcggggtaaagtccacctgctgtcagataccatccaaggggtcaccgccacagtgacaggggtgcggtaccagcagtcgtggctctgcatcatctgtaccatgaaggccctacagaagcggcacgtgtgcatcagccgcctggttcgcccacagaactggggggagaattcctgtgaggttcggttcgtcatcctggtgctggccccacccaagatgaaaagcactaagactgcgatggaggtggcgcgcacgtttgccaccatgttctcggatatcgccttccgccagaagctcctggagacccgcacagaggaggaattcaaggaggccttggtgcatcagagacagctgctcaccatggtgagccacggtccagtggcgccgagaacgaaggaacgcagcacagtctccctccctgcccacagacacccagagcccccaaagtgcaaggactttgtcccttttgggaagggcatccgggaggacatcgcacgcaggttccccttgtaccccttggacttcactgatggcattattgggaaaaacaaggctgtgggcaaatacatcaccaccaccctgttcctctacttcgcctgcctcctgcccaccatcgctttcgggtctctcaatgacgagaacacagacggggccatcgacgtgcagaagaccatagccgggcagagcatcgggggcctgctctacgcgctcttctctgggcagccattggtgattctgctgaccaccgcgcccctggcgctctacatccaggtgattcgtgtcatctgtgatgactatgacctggacttcaactccttctacgcatggacgggcctgtggaatagtttcttccttgcgctttatgcctttttcaacctcagcctggtcatgagtctcttcaagaggtcgacggaggagatcatcgccctcttcatttccatcacgtttgtgctggatgccgtcaagggcacggttaaaatcttctggaagtactactatgggcattacttggacgactatcacacaaaaaggacttcatcccttgtcagcctgtcaggcctcggcgccagcctcaacgccagcctccacactgccctcaacgccagcttcctcgccagccccacggagctgccctcggccacacactcaggccaggcgaccgccgtgctcagcctcctcatcatgctgggcacgctctggctgggctacaccctctaccaattcaagaagagcccctacctgcacccctgcgtgcgagagatcctgtccgactgcgccctgcccatcgcggtgctcgccttctccctcatcagctcccatggcttccgggaaatcgagatgagcaagttccgctacaaccccagcgagagcccctttgcgatggcgcagatccagtcgctgtccctgagggccgtcagcggtgccatgggcctcggcttcctgctgtccatgctcttcttcatcgagcagaacttggtggccgccttggtgaatgcaccggagaacaggctggtgaagggcactgcctaccactgggacctcctgctcctcgccatcatcaacacagggctgtctctgtttgggctgccttggatccatgccgcctacccccactccccgctgcacgtgcgagccctggccttagtggaggagcgtgtggagaacggacacatctatgacacgattgtgaacgtgaaggagacgcggctgacctcgctgggcgccagcgtcctggtgggcctgtccctgttgctgctgccggtcccgcttcagtggatccccaagcccgtgctctatggcctcttcctctacatcgcgctcacctccctcgatggcaaccagctcgtccagcgcgtggccctgctgctcaaggagcagactgcgtaccccccgacacactacatccggagggtgccccagaggaagatccactacttcacgggcctgcaggtgcttcagctgctgctgctgtgtgccttcggcatgagctccctgccctacatgaagatgatctttcccctcatcatgatcgccatgatccccatccgctatatcctgctgccccgaatcattgaagccaagtacttggatgtcatggacgctgagcacaggccttgactggcagaccctgcccacgccccattcgccagccctccacgtcctcccaggctggctctggagctgtgaggggaggtgtaggtgtgtgggtgactgctctgtgctgcgccttctcatggctgactcaggcctggggcatctgggcattgtaggggtgcagtggtatgtgcccacccctctcccattatcctttagctttaggccaagagcgttgctcagggcagcttctgcccagggtgggtgggactgagcaggatggattttcttttgataaaagagtcgatgcctgaaagagaaaccatttccttgattgtgtaaggaacttgctggacgcacattagagaataaagctcctgtttctaggctcct

SEQ ID NO: 69259 - protein, 918 aa, Artificial Sequence
  derived and/or modified sequence
MGVYGPQDRSESEKRDVQRDPPPWHPRREGERPARARSLPLAAAGQGFLRKTWISEHENSPTMSQNGYFEDSSYYKCDTDDTFEAREEILGDEAFDTANSSIVSGESIRFFVNVNLEMQATNTENEATSGGCVLLHTSRKYLKLKNFKEEIRAHRDLDGFLAQASIVLNETATSLDNVLRTMLRRFARDPDNNEPNCNLDLLMAMLFTDAGAPMRGKVHLLSDTIQGVTATVTGVRYQQSWLCIICTMKALQKRHVCISRLVRPQNWGENSCEVRFVILVLAPPKMKSTKTAMEVARTFATMFSDIAFRQKLLETRTEEEFKEALVHQRQLLTMVSHGPVAPRTKERSTVSLPAHRHPEPPKCKDFVPFGKGIREDIARRFPLYPLDFTDGIIGKNKAVGKYITTTLFLYFACLLPTIAFGSLNDENTDGAIDVQKTIAGQSIGGLLYALFSGQPLVILLTTAPLALYIQVIRVICDDYDLDFNSFYAWTGLWNSFFLALYAFFNLSLVMSLFKRSTEEIIALFISITFVLDAVKGTVKIFWKYYYGHYLDDYHTKRTSSLVSLSGLGASLNASLHTALNASFLASPTELPSATHSGQATAVLSLLIMLGTLWLGYTLYQFKKSPYLHPCVREILSDCALPIAVLAFSLISSHGFREIEMSKFRYNPSESPFAMAQIQSLSLRAVSGAMGLGFLLSMLFFIEQNLVAALVNAPENRLVKGTAYHWDLLLLAIINTGLSLFGLPWIHAAYPHSPLHVRALALVEERVENGHIYDTIVNVKETRLTSLGASVLVGLSLLLLPVPLQWIPKPVLYGLFLYIALTSLDGNQLVQRVALLLKEQTAYPPTHYIRRVPQRKIHYFTGLQVLQLLLLCAFGMSSLPYMKMIFPLIMIAMIPIRYILLPRIIEAKYLDVMDAEHRP

SEQ ID NO: 69260 - DNA, 2757 bp, Artificial Sequence
  derived and/or modified sequence
atgggcgtgtacggcccccaggacagaagcgagagcgagaagagagacgtgcagagagacccccccccctggcaccccagaagagagggcgagagacccgccagagccagaagcctgcccctggccgccgccggccagggcttcctgagaaagacctggatcagcgagcacgagaacagccccaccatgagccagaacggctacttcgaggacagcagctactacaagtgcgacaccgacgacaccttcgaggccagagaggagatcctgggcgacgaggccttcgacaccgccaacagcagcatcgtgagcggcgagagcatcagattcttcgtgaacgtgaacctggagatgcaggccaccaacaccgagaacgaggccaccagcggcggctgcgtgctgctgcacaccagcagaaagtacctgaagctgaagaacttcaaggaggagatcagagcccacagagacctggacggcttcctggcccaggccagcatcgtgctgaacgagaccgccaccagcctggacaacgtgctgagaaccatgctgagaagattcgccagagaccccgacaacaacgagcccaactgcaacctggacctgctgatggccatgctgttcaccgacgccggcgcccccatgagaggcaaggtgcacctgctgagcgacaccatccagggcgtgaccgccaccgtgaccggcgtgagataccagcagagctggctgtgcatcatctgcaccatgaaggccctgcagaagagacacgtgtgcatcagcagactggtgagaccccagaactggggcgagaacagctgcgaggtgagattcgtgatcctggtgctggccccccccaagatgaagagcaccaagaccgccatggaggtggccagaaccttcgccaccatgttcagcgacatcgccttcagacagaagctgctggagaccagaaccgaggaggagttcaaggaggccctggtgcaccagagacagctgctgaccatggtgagccacggccccgtggcccccagaaccaaggagagaagcaccgtgagcctgcccgcccacagacaccccgagccccccaagtgcaaggacttcgtgcccttcggcaagggcatcagagaggacatcgccagaagattccccctgtaccccctggacttcaccgacggcatcatcggcaagaacaaggccgtgggcaagtacatcaccaccaccctgttcctgtacttcgcctgcctgctgcccaccatcgccttcggcagcctgaacgacgagaacaccgacggcgccatcgacgtgcagaagaccatcgccggccagagcatcggcggcctgctgtacgccctgttcagcggccagcccctggtgatcctgctgaccaccgcccccctggccctgtacatccaggtgatcagagtgatctgcgacgactacgacctggacttcaacagcttctacgcctggaccggcctgtggaacagcttcttcctggccctgtacgccttcttcaacctgagcctggtgatgagcctgttcaagagaagcaccgaggagatcatcgccctgttcatcagcatcaccttcgtgctggacgccgtgaagggcaccgtgaagatcttctggaagtactactacggccactacctggacgactaccacaccaagagaaccagcagcctggtgagcctgagcggcctgggcgccagcctgaacgccagcctgcacaccgccctgaacgccagcttcctggccagccccaccgagctgcccagcgccacccacagcggccaggccaccgccgtgctgagcctgctgatcatgctgggcaccctgtggctgggctacaccctgtaccagttcaagaagagcccctacctgcacccctgcgtgagagagatcctgagcgactgcgccctgcccatcgccgtgctggccttcagcctgatcagcagccacggcttcagagagatcgagatgagcaagttcagatacaaccccagcgagagccccttcgccatggcccagatccagagcctgagcctgagagccgtgagcggcgccatgggcctgggcttcctgctgagcatgctgttcttcatcgagcagaacctggtggccgccctggtgaacgcccccgagaacagactggtgaagggcaccgcctaccactgggacctgctgctgctggccatcatcaacaccggcctgagcctgttcggcctgccctggatccacgccgcctacccccacagccccctgcacgtgagagccctggccctggtggaggagagagtggagaacggccacatctacgacaccatcgtgaacgtgaaggagaccagactgaccagcctgggcgccagcgtgctggtgggcctgagcctgctgctgctgcccgtgcccctgcagtggatccccaagcccgtgctgtacggcctgttcctgtacatcgccctgaccagcctggacggcaaccagctggtgcagagagtggccctgctgctgaaggagcagaccgcctacccccccacccactacatcagaagagtgccccagagaaagatccactacttcaccggcctgcaggtgctgcagctgctgctgctgtgcgccttcggcatgagcagcctgccctacatgaagatgatcttccccctgatcatgatcgccatgatccccatcagatacatcctgctgcccagaatcatcgaggccaagtacctggacgtgatggacgccgagcacagaccctag

SEQ ID NO: 69261 - DNA, 2757 bp, Artificial Sequence
  derived and/or modified sequence
atgggcgtttacgggcctcaagatagatcagagtccgaaaagagagacgtgcagagggatccacctccgtggcatccccgccgggaaggggaacgcccagcaagggctaggtccctcccgctcgctgcagcagggcaggggtttttaaggaagacctggataagtgaacatgaaaactcccccactatgtctcaaaatgggtatttcgaagacagtagctactacaagtgtgacacggatgatacctttgaagcccgggaggagatccttggggacgaagcctttgatacagccaatagttctatcgtcagcggagaaagtatacggttcttcgtgaatgtgaacctggaaatgcaggccaccaacaccgaaaatgaggccacgtcgggtggctgcgttctgctgcacactagcagaaagtacctaaaacttaagaacttcaaggaggaaataagggcgcacagggaccttgacggtttcctcgctcaggcctctatcgtgctgaacgagactgcaactagcttggataatgtgctaaggaccatgctgcgccgttttgctcgtgacccggataataatgagcccaactgcaacttagatctgctgatggccatgctgttcactgacgcgggggcaccaatgcgaggcaaggttcatttgctctccgacacgatccagggggtcaccgccacagtgacaggagtacggtatcaacaaagctggctctgcattatttgcactatgaaggcgttacagaagagacacgtttgtatctctagactggtgcgaccccaaaattggggagaaaattcctgcgaggtgaggttcgttattctggtcctggctcctcccaaaatgaaatccacgaagacagccatggaggtggctagaaccttcgcaaccatgtttagcgacatcgccttcaggcaaaaactgttagagacgagaacagaggaggaattcaaagaggcccttgtccaccagcggcaactcctaactatggtgagccatggccctgtggctccccgaaccaaggaacggtctacagtgtccctcccagcccatagacatcctgagccgccgaaatgcaaggacttcgtgcccttcggcaagggcattcgagaggacatagccaggagatttcctctctacccattagatttcacagatggcatcataggcaaaaacaaggctgtgggtaagtacataaccaccaccttgttcctttactttgcgtgcctgctccccacaatcgcgttcggatccctgaacgatgaaaataccgacggggctatagatgttcagaagaccattgccggacagagcattgggggcctcctctacgcactcttttcaggacagccactggtgatactactgaccaccgcgccactggcgttatatatccaggtgatccgcgtaatctgtgacgactacgacctggactttaattccttctatgcctggacgggactctggaacagtttctttctggcactgtacgctttctttaatttgagtctggttatgtctctcttcaagaggagcacagaggaaatcattgctctatttatttctattacctttgtactggacgcggtgaaaggcacagttaagattttctggaaatactactatggccactacttagatgattaccacacaaaaaggacctcgtccctcgtgagtctttctggccttggagcctcattgaacgccagcctgcacacagccctgaacgcttctttcctggcctcacctacagagttaccttcagccacacacagcggacaggcaacagcagtgctgtcgctgctcattatgctgggcactttgtggctgggctatacactttatcagtttaaaaagagtccttacctccacccgtgtgtccgggagattctgagcgactgcgccctgccgattgctgtgctggctttttccttgatctcctctcatggatttcgcgaaatcgaaatgtcaaagtttaggtacaatccctccgaaagcccattcgcaatggcccagatccagagcctatcgcttcgcgccgtgtccggcgctatgggacttggctttttgctttccatgcttttttttatcgaacagaacctggtcgctgcactggtaaacgcccctgaaaatcgactcgtcaaaggcaccgcctatcactgggacttacttttactcgcgattataaataccggactgagcctcttcggcctgccttggattcacgccgcatatcctcattcccccttacatgtgcgtgccctcgccttagttgaggaacgggtggaaaacggacacatctacgataccatcgtaaatgtcaaggaaacacgcctgacatccttgggcgccagcgttctggtgggccttagtttgttgctgcttcccgtccctctgcagtggatccccaaacccgtcttgtacggcctatttctgtacatcgctctgacatccttggatggtaatcagttagtccaacgagtggccttacttctgaaggaacagaccgcctaccctccaactcattatatccggagggtccctcagcgcaagatccattatttcactgggcttcaggtgctacagctactgctattgtgcgcctttgggatgtccagtctaccctacatgaagatgattttccctttgataatgattgccatgatcccaatccgatatattctgctcccaagaatcatcgaagccaagtacctcgatgtaatggatgctgaacataggccatag

SEQ ID NO: 69262 - DNA, 2757 bp, Artificial Sequence
  derived and/or modified sequence
atgggcgtgtatggcccccaggacagaagtgagagcgagaagagagatgtgcagagggaccccccaccctggcacccccggcgggagggggagaggcctgcccgggcccggagcctgcccctggccgccgccggccagggcttcctgaggaagacctggatcagcgagcacgagaacagccccaccatgagccagaatggctactttgaggacagcagctactacaagtgtgacacagatgacacctttgaggcccgggaggagatcctgggagatgaggcctttgacacagccaacagcagcatcgtgtctggagagagcatccgcttctttgtgaatgtgaacctggagatgcaggccaccaacacagaaaatgaggccaccagcggcggctgtgtgctgctgcacaccagcaggaagtacctgaagctgaagaacttcaaggaggagatccgggcccaccgggacctggatggcttcctggcccaggccagcatcgtgctgaatgaaacagccaccagcctggacaacgtgctgcggaccatgctgcggagatttgcccgggaccctgacaacaatgagcccaactgcaacctggacctgctgatggccatgctgttcacagatgctggggcccccatgaggggcaaggtgcacctgctgagtgacaccatccagggcgtgacagccaccgtgactggagtgcgctaccagcagagctggctgtgcatcatctgcaccatgaaggccctgcagaagagacatgtgtgcatcagccggctggtgcggccccagaactggggcgagaacagctgtgaggtgcgcttcgtcatcctggtgctggccccacccaagatgaagagcaccaagacagccatggaggtggcccggacctttgccaccatgttcagtgacatcgccttccggcagaagctgctggagaccaggacagaggaggagttcaaggaggccctggtgcaccagaggcagctgctgaccatggtgagccacggccctgtggcccccaggaccaaggagaggagcacagtgtccctgcctgcccaccgccaccctgagccccccaagtgcaaggactttgtgccctttgggaagggcatcagagaagatattgcccggcgcttccccctgtaccccctggacttcacagatggcatcatcggcaagaacaaggctgtgggcaagtacatcaccaccaccctcttcctgtactttgcctgcctgctgcccaccatcgccttcggcagcctgaatgatgagaacacagatggagccattgatgtgcagaagaccatcgccggccagagcattggaggcctgctgtatgccctcttcagcggccagcccctggtgatcctgctgaccacagcccccctggccctgtacatccaggtgatccgggtcatctgtgatgattatgacctggacttcaacagcttctacgcctggacaggcctgtggaacagcttcttcctggccctgtatgccttcttcaacctgagcctggtgatgagcctcttcaagaggagcacagaggagatcatcgccctcttcatcagcatcacctttgtgctggatgctgtgaagggcaccgtgaagatcttctggaagtactactacggccactacctggatgactaccacaccaagaggaccagcagcctggtgtccctgagcggcctgggcgccagcctgaatgccagcctgcacacagccctgaatgccagcttcctggccagccccacagagctgcccagcgccacccacagcggccaggccacagctgtgctgagcctgctgatcatgctgggcaccctgtggctgggctacaccctgtaccagttcaagaagagcccctacctgcacccctgtgtgcgggagatcctgagtgactgtgccctgcccatcgctgtgctggccttcagcctcatcagcagccacggcttccgggagattgagatgagcaagttccgctacaaccccagcgagagcccctttgccatggcccagatccagagcctgagcctgcgggctgtgtctggggccatgggcctgggcttcctgctgtccatgctgttcttcatcgagcagaacctggtggccgccctggtgaatgcccctgagaaccggctggtgaagggcacagcctaccactgggacctgctgctgctggccatcatcaacacaggcctgagcctgtttggcctgccctggattcatgctgcctacccccacagccccctgcacgtgcgggccctggccctggtggaggagcgggtggagaatggccacatctatgacaccatcgtgaatgtgaaggagacccggctgaccagcctgggcgcctctgtgctggtgggcctgagcctgctgctgctgcctgtgcccctgcagtggatccccaagcctgtgctgtatggcctcttcctgtacatcgccctgaccagcctggatggcaaccagctggtgcagagggtggccctgctgctgaaggagcagacagcctacccacccacccactacatcagaagagtgccccagaggaagatccactacttcaccggcctgcaggtgctgcagctgctgctgctgtgtgccttcggcatgagcagcctgccctacatgaagatgatcttccccctcatcatgattgccatgatccccatccgctacatcctgctgccccgcatcatcgaggccaagtacctggatgtgatggatgctgagcaccggccctag

SEQ ID NO: 69263 - DNA, 2757 bp, Artificial Sequence
  derived and/or modified sequence
atgggcgtgtacggcccccaggaccggagcgagagcgagaagcgggacgtgcaacgtgatcctcccccctggcatcccagacgggaaggcgaacggcctgctagggctagatccctgcctctggccgctgctgggcaggggtttctgcgcaagacatggatttctgagcacgaaaactcacccaccatgtcccagaacggatatttcgaagattcatcctattacaagtgcgatacggatgacacgtttgaagcgagagaggaaattctgggggacgaagcctttgatactgcaaacagctctatcgtgagcggagagtcaatcaggtttttcgtaaacgtaaacctggagatgcaagctaccaatactgagaatgaggcaactagtggcggctgtgttctgctccatacgagcaggaaatatctcaagctcaagaatttcaaggaggagattagagcgcatcgcgatcttgacggcttcctcgcccaggcatccattgtcctgaacgagaccgccaccagtctcgacaatgtgttaagaactatgctgagacgattcgctcgtgaccccgataacaacgaacctaattgcaatctcgacttgctgatggccatgctgtttactgatgccggcgccccaatgcggggcaaggtccatctcttatctgacaccatccaaggggtaacggcgacagtgacaggagttaggtaccagcaaagttggttgtgtattatttgcaccatgaaggctctgcagaagaggcacgtttgtattagtagactcgtgcgacctcagaattggggcgaaaacagttgtgaggtacggttcgtcattttggtgctggcccccccaaagatgaagtccaccaaaactgccatggaggtggctcgaacctttgcaactatgttctccgatatcgccttccgccagaaactgctagaaactcgcacagaagaagaattcaaggaagccttagtgcaccagcgacagttactcacgatggtcagccatggcccggtagcgcctcgtaccaaagagagatctaccgtctccctcccagcgcaccggcatccggaaccaccgaagtgtaaagacttcgttccatttgggaagggaatccgggaggacattgctagacgattccctctctaccccctggactttacggacggtattatcggcaagaataaggctgttggcaaatacatcacaacgacgctattcctgtactttgcttgcctgctgcctactatcgcctttggcagcttgaatgatgagaacacggacggagccatcgatgtgcagaagacaatcgccggacaatcaatcggcggcttgctctatgccttgttctccggccagccattggtgatactgctcacaaccgccccactggccctgtatatacaggttatccgcgtgatctgtgatgactacgacctcgactttaacagtttttatgcctggactggcctgtggaacagcttcttcctggctctgtacgcttttttcaatctgtctttggtaatgtctctgtttaaacgcagtactgaagaaatcattgctctgtttatcagtatcacgtttgtgctggatgctgtcaagggaacggtgaaaattttctggaaatattactatggacactatctggacgactaccatacaaagagaacatccagcctggtatcactgtcaggcctgggcgcttctcttaatgctagtctgcataccgccctgaacgcctcttttctcgcgtcacctactgagctgccctccgccactcattcagggcaggccaccgcggttttgagtctgctcatcatgttggggaccctgtggctgggttacaccttgtatcagtttaaaaagtccccttacttgcatccttgcgtccgcgagatcttgtctgattgcgccctacccatcgctgtgctagccttcagccttattagctctcatggattccgggagattgagatgtcgaagttccgatataaccccagcgaaagccctttcgctatggcacagattcagtccctctcgttgcgggcggtctccggcgcaatgggcctgggctttcttctgagtatgctgttctttatcgaacagaacctggttgccgccctggttaatgctcccgaaaatcgtctggtgaaggggactgcatatcattgggatctactgttactcgctatcataaatacgggacttagcctcttcggactaccttggattcacgctgcataccctcatagcccgctgcatgtcagagccctggctctggttgaagagcgtgtggaaaacgggcatatttacgatacaattgtgaatgtaaaagaaacccgcttgacttctctcggggccagtgttctggtgggactctctctattgctgctgcctgtgccgttgcagtggattccaaagccagtcctgtatggcttgtttctatatattgcactgacctctctggacggtaaccaattggtgcagcgggtcgccttgctgcttaaagagcagacagcctacccccctactcactacatccgtcgggttccccagcgtaagattcattatttcacaggattgcaagtactgcagctcttgttgttgtgcgcctttggcatgtcgtctcttccatacatgaagatgatctttccacttattatgatcgccatgattcccatcaggtacatcctgctccccagaatcattgaggcaaagtacctggatgttatggatgcagaacatcgtccgtag

SEQ ID NO: 69264 - DNA, 2757 bp, Artificial Sequence
  derived and/or modified sequence
atgggtgtctacgggccacaggatagatccgagtcggaaaaaagagacgtgcagcgtgatcctccaccatggcaccctcgacgtgagggagagagacctgctcgtgctaggagcctccccctggctgctgcagggcaggggttcttgaggaagacttggattagcgaacatgagaacagccccactatgagtcagaatggatattttgaggactcttcttactacaaatgtgacactgacgatacctttgaggctagggaggaaattctgggtgacgaagccttcgataccgcaaattccagtattgtctccggcgagagcatccggttcttcgtcaatgtcaacctagagatgcaggcgacaaacaccgagaatgaggcgacgtccggcggttgcgtcctcttgcatacgagcagaaaatacctgaaactcaaaaactttaaggaagagatccgcgctcaccgcgaccttgacgggttcctcgcccaggcctctatcgtactcaacgaaacagcaacatctttggacaatgtcttacgcactatgctgaggcggttcgctcgcgatccggataataatgaaccgaactgtaatctggatctgctaatggccatgctcttcactgacgcgggtgccccaatgagaggcaaggtgcaccttctgagcgacacaatccagggagtcactgcaactgtcaccggagtgcggtatcagcaaagctggttgtgcatcatatgtaccatgaaggcactgcaaaaaagacatgtatgtatctctagattggtgcggcctcagaactggggggagaatagctgcgaggtgcgcttcgtcatcctcgttctcgcacccccaaagatgaagagcaccaagacagccatggaggtggcccgaaccttcgccaccatgttctcagacatagccttccggcagaaacttttggagacccgaactgaggaagagttcaaagaggcgctggtacatcagagacagctgcttaccatggtctcccatggtcctgtagctcctcgcacaaaagagaggtccaccgtcagcctgcccgcacatagacaccctgaaccacccaagtgcaaggacttcgtgcctttcggaaagggtatacgggaggatatcgcaagaagatttcccttgtatcccctggatttcacagatggcataatcggtaaaaacaaagcagttgggaagtatatcacaacgactctgtttctgtattttgcctgcttactgcccacgatagcgtttggatcactgaacgatgagaacaccgacggagccattgacgtgcagaagacaatagccggacaatctattgggggactgctctacgctctcttttcaggccagcctctggtcatacttctcacgaccgcacctctcgcgctttacatccaggtgattcgtgtgatatgtgacgactacgaccttgacttcaacagcttctatgcatggacaggactgtggaactctttctttttggctttgtacgctttctttaacttgagcctggtcatgtctttgtttaaaaggtctaccgaggagatcatcgccctctttatatccattacctttgtgctggacgccgtgaaggggacagtgaagatcttttggaagtattactacggacattatctggatgattatcacactaagcggacgtctagtctggtgagtctctctggcctaggagcctcgctgaacgcgagtctccacactgccctaaacgcctcctttctggcctcccccacagagctcccaagcgcgacccactctggacaggccactgcggtgctgtcgctcctgataatgttaggtaccctctggcttgggtacacactctaccagttcaagaaatcgccataccttcatccatgtgtacgcgaaatcttgtctgattgtgccctccccattgctgttctggctttctccctcatctcttcccacggttttcgggaaatcgagatgagcaagttcaggtataacccctctgaatcgccttttgctatggcccagatccagagtctgtccttgagggctgtctctggtgcgatgggcctgggatttctgctgtcaatgctcttttttattgagcagaacctggtggctgctctggtgaacgctccagagaacaggctggtgaaaggaacggcatatcactgggatctcctcctcttggccatcatcaacacaggcctctcactgttcggtcttccttggatccacgccgcttacccgcactcccccttgcacgtacgggctctagccctcgtcgaagagcgagtggagaatggacacatttatgataccattgtgaatgtcaaggagaccaggctgaccagccttggggctagtgtactggttggtctgtctctgctgctactgcctgtaccactgcagtggattccaaaacccgtgctgtacggcctgtttctgtacattgccctaacatcactggacggaaatcagttagtccaacgtgtggcacttctcctgaaagagcagaccgcttacccacccacccattacattcgcagagtcccacagaggaagatacactatttcaccggcctgcaagtgctccagctgctcctcctttgcgcatttggcatgtcttcactcccctacatgaagatgatattccctcttatcatgattgccatgatacccatcaggtatattttacttcctagaattattgaggccaagtatctggacgtgatggacgctgagcatcgcccatag

SEQ ID NO: 69265 - DNA, 3229 bp, Artificial Sequence
  derived and/or modified sequence
cttccaggcggccgggacgcggtcccaggactggagaccgttgcctgtcggcccccgtgtgacccggggcgcgtgacgggggtcgggggaactgcgcctgcaatgggcgtttatggcccccaggaccggtctgagagtgagaagagggatgtgcagagagatcccccgccttggcatccgaggagagagggggagaggcccgctcgggcccggtcccttcctctcgctgcagcggggcagggttttctcaggaaaacctggattagcgaacatgaaaactctcccaccatgtcgcagaatggatacttcgaggattcaagctactacaagtgtgacacagatgacaccttcgaagcccgagaggagatcctgggggatgaggccttcgacactgccaactcctccatcgtgtctggcgagagtatccgtttttttgtcaatgtcaaccttgagatgcaggccaccaacactgagaatgaagcgacttccggtggctgtgtgctcctgcacacctcccgaaagtacctgaagttaaagaacttcaaggaagagatccgtgcgcaccgcgacctagatggcttcctggcgcaggccagcatcgtcctgaacgagacggccacctccctggataacgtgctgcggaccatgcttcgccgcttcgccagggaccctgacaacaatgagcccaactgcaacctggacctgctcatggccatgctcttcaccgatgccggggcacccatgcggggtaaagtccacctgctgtcagataccatccaaggggtcaccgccacagtgacaggggtgcggtaccagcagtcgtggctctgcatcatctgtaccatgaaggccctacagaagcggcacgtgtgcatcagccgcctggttcgcccacagaactggggggagaattcctgtgaggttcggttcgtcatcctggtgctggccccacccaagatgaaaagcactaagactgcgatggaggtggcgcgcacgtttgccaccatgttctcggatatcgccttccgccagaagctcctggagacccgcacagaggaggaattcaaggaggccttggtgcatcagagacagctgctcaccatggtgagccacggtccagtggcgccgagaacgaaggaacgcagcacagtctccctccctgcccacagacacccagagcccccaaagtgcaaggactttgtcccttttgggaagggcatccgggaggacatcgcacgcaggttccccttgtaccccttggacttcactgatggcattattgggaaaaacaaggctgtgggcaaatacatcaccaccaccctgttcctctacttcgcctgcctcctgcccaccatcgctttcgggtctctcaatgacgagaacacagacggggccatcgacgtgcagaagaccatagccgggcagagcatcgggggcctgctctacgcgctcttctctgggcagccattggtgattctgctgaccaccgcgcccctggcgctctacatccaggtgattcgtgtcatctgtgatgactatgacctggacttcaactccttctacgcatggacgggcctgtggaatagtttcttccttgcgctttatgcctttttcaacctcagcctggtcatgagtctcttcaagaggtcgacggaggagatcatcgccctcttcatttccatcacgtttgtgctggatgccgtcaagggcacggttaaaatcttctggaagtactactatgggcattacttggacgactatcacacaaaaaggacttcatcccttgtcagcctgtcaggcctcggcgccagcctcaacgccagcctccacactgccctcaacgccagcttcctcgccagccccacggagctgccctcggccacacactcaggccaggcgaccgccgtgctcagcctcctcatcatgctgggcacgctctggctgggctacaccctctaccaattcaagaagagcccctacctgcacccctgcgtgcgagagatcctgtccgactgcgccctgcccatcgcggtgctcgccttctccctcatcagctcccatggcttccgggaaatcgagatgagcaagttccgctacaaccccagcgagagcccctttgcgatggcgcagatccagtcgctgtccctgagggccgtcagcggtgccatgggcctcggcttcctgctgtccatgctcttcttcatcgagcagaacttggtggccgccttggtgaatgcaccggagaacaggctggtgaagggcactgcctaccactgggacctcctgctcctcgccatcatcaacacagggctgtctctgtttgggctgccttggatccatgccgcctacccccactccccgctgcacgtgcgagccctggccttagtggaggagcgtgtggagaacggacacatctatgacacgattgtgaacgtgaaggagacgcggctgacctcgctgggcgccagcgtcctggtgggcctgtccctgttgctgctgccggtcccgcttcagtggatccccaagcccgtgctctatggcctcttcctctacatcgcgctcacctccctcgatggcaaccagctcgtccagcgcgtggccctgctgctcaaggagcagactgcgtaccccccgacacactacatccggagggtgccccagaggaagatccactacttcacgggcctgcaggtgcttcagctgctgctgctgtgtgccttcggcatgagctccctgccctacatgaagatgatctttcccctcatcatgatcgccatgatccccatccgctatatcctgctgccccgaatcattgaagccaagtacttggatgtcatggacgctgagcacaggccttgactggcagaccctgcccacgccccattcgccagccctccacgtcctcccaggctggctctggagctgtgaggggaggtgtaggtgtgtgggtgactgctctgtgctgcgccttctcatggctgactcaggcctggggcatctgggcattgtaggggtgcagtggtatgtgcccacccctctcccattatcctttagctttaggccaagagcgttgctcagggcagcttctgcccagggtgggtgggactgagcaggatggattttcttttgataaaagagtcgatgcctgaaagagaaaccatttccttgattgtgtaaggaacttgctggacgcacattagagaataaagctcctgtttctaggctccta

SEQ ID NO: 69266 - protein, 291 aa, Artificial Sequence
  derived and/or modified sequence
MNLRGLFQDFNPRAEGETCVEFKAMLIAVGIHLLLLMFEVLVCDRIERGSHFWLLVFMPLFFVSPVSVAACVWGFRHDRSLELEILCSVNILQFIFIALRLDKIIHWPWLVVCVPLWILMSFLCLVVLYYIVWSVLFLRSMDVIAEQRRTHITMALSWMTIVVPLLTFEILLVHKLDGHNAFSSIPIFVPLWLSLITLMATTFGQKGGNHWWFGIRKDFCQFLLEIFPFLREYGNISYDLHHEDNEETEETPVPEPPKIAPMFRKKARVVITQSPGKYVLPPPKLNIEMPD

SEQ ID NO: 69267 - DNA, 876 bp, Artificial Sequence
  derived and/or modified sequence
atgaacctgagaggcctgttccaggacttcaaccccagagccgagggcgagacctgcgtggagttcaaggccatgctgatcgccgtgggcatccacctgctgctgctgatgttcgaggtgctggtgtgcgacagaatcgagagaggcagccacttctggctgctggtgttcatgcccctgttcttcgtgagccccgtgagcgtggccgcctgcgtgtggggcttcagacacgacagaagcctggagctggagatcctgtgcagcgtgaacatcctgcagttcatcttcatcgccctgagactggacaagatcatccactggccctggctggtggtgtgcgtgcccctgtggatcctgatgagcttcctgtgcctggtggtgctgtactacatcgtgtggagcgtgctgttcctgagaagcatggacgtgatcgccgagcagagaagaacccacatcaccatggccctgagctggatgaccatcgtggtgcccctgctgaccttcgagatcctgctggtgcacaagctggacggccacaacgccttcagcagcatccccatcttcgtgcccctgtggctgagcctgatcaccctgatggccaccaccttcggccagaagggcggcaaccactggtggttcggcatcagaaaggacttctgccagttcctgctggagatcttccccttcctgagagagtacggcaacatcagctacgacctgcaccacgaggacaacgaggagaccgaggagacccccgtgcccgagccccccaagatcgcccccatgttcagaaagaaggccagagtggtgatcacccagagccccggcaagtacgtgctgcccccccccaagctgaacatcgagatgcccgactag

SEQ ID NO: 69268 - DNA, 519 bp, Artificial Sequence
  derived and/or modified sequence
atgagcttcctgtgcctggtggtgctgtactacatcgtgtggagcgtgctgttcctgagaagcatggacgtgatcgccgagcagagaagaacccacatcaccatggccctgagctggatgaccatcgtggtgcccctgctgaccttcgagatcctgctggtgcacaagctggacggccacaacgccttcagcagcatccccatcttcgtgcccctgtggctgagcctgatcaccctgatggccaccaccttcggccagaagggcggcaaccactggtggttcggcatcagaaaggacttctgccagttcctgctggagatcttccccttcctgagagagtacggcaacatcagctacgacctgcaccacgaggacaacgaggagaccgaggagacccccgtgcccgagccccccaagatcgcccccatgttcagaaagaaggccagagtggtgatcacccagagccccggcaagtacgtgctgcccccccccaagctgaacatcgagatgcccgactag

SEQ ID NO: 69269 - DNA, 876 bp, Artificial Sequence
  derived and/or modified sequence
atgaaccttaggggcctgttccaagactttaaccctcgagccgagggtgagacatgtgttgagtttaaagctatgctgatagccgtgggcatccacctcctgctcctaatgttcgaggtgctggtttgcgaccggatcgaaagaggctctcacttttggctgctagtctttatgccgttgttcttcgtgtccccagtttccgtggccgcctgcgtctggggtttccggcatgaccggtctttggaactggagattttatgctcagtaaacattttgcagttcatattcatcgcgcttaggctggataaaatcatacactggccttggctcgttgtgtgtgtgccactttggatcctgatgtcgtttctttgcttggtggtcttatactatatcgtttggagcgtgctctttcttcggtcaatggatgtgatcgccgagcagagacggacacacataacgatggccctcagctggatgactatagttgtgcctctcttaacctttgagattttactggtccacaaactggacggccacaacgccttctcttctattccgatcttcgtccctctctggttgtctttaatcactctgatggctactaccttcggccagaagggaggaaatcactggtggttcggcatacggaaggacttctgccagttcttactggaaattttcccattcctgagggaatatggtaacattagctacgacctccatcacgaagacaatgaggaaaccgaggagactcccgtgcctgagcctccaaaaatagccccaatgtttaggaaaaaggccagagtcgtgattacccagtcgccagggaaatatgtgctcccccccccgaagctgaacatcgagatgcctgactag

SEQ ID NO: 69270 - DNA, 519 bp, Artificial Sequence
  derived and/or modified sequence
atgtctttcctctgtctggtcgtgctgtattacattgtttggagtgtccttttcctgagaagcatggatgtgatcgcggaacagcggaggactcacatcacgatggcactctcgtggatgacaatcgtggttccacttttgacttttgagattctgcttgtccacaaactcgatggacataacgcctttagttccattcccatatttgtgcccctatggctgagcctcatcacactcatggcaaccacattcggacagaaaggaggcaatcattggtggttcggtataaggaaagacttttgccagttcctgcttgaaatcttcccatttctccgggaatacgggaacatctcttacgatttacaccacgaagataacgaggaaacagaggaaacacccgtcccggaaccgccaaaaatcgcccctatgtttcgaaaaaaagcacgcgttgtcataacccagtctcctggaaagtatgtgctccccccacctaaactgaacatcgagatgccagattag

SEQ ID NO: 69271 - DNA, 876 bp, Artificial Sequence
  derived and/or modified sequence
atgaacctgcggggcctcttccaggacttcaaccccagggctgagggggagacctgtgtggagttcaaggccatgctgattgctgtgggcatccacctgctgctgctgatgtttgaggtgctggtgtgtgaccgcatcgagcggggcagccacttctggctgctggtgttcatgcccctcttctttgtgtcccctgtgtctgtggccgcctgtgtgtggggcttcagacatgacaggagcctggagctggagatcctgtgcagcgtgaacatcctgcagttcatcttcatcgccctgcggctggacaagatcatccactggccctggctggtggtgtgtgtgcccctgtggatcctgatgtccttcctgtgcctggtggtgctgtactacatcgtgtggagcgtgctcttcctgcgctccatggatgtgattgctgagcagaggaggacccacatcaccatggccctgtcctggatgaccatcgtggtgcccctgctgacctttgagatcctgctggtgcacaagctggatggccacaatgccttcagcagcatccccatctttgtgcccctgtggctgagcctcatcaccctgatggccaccaccttcggccagaagggcggcaaccactggtggtttggcatcaggaaggacttctgccagttcctgctggagatcttccccttcctgcgggagtatggcaacatctcctatgacctgcaccatgaagataatgaggagacagaggagacccctgtgcctgagccccccaagatcgcccccatgttcaggaagaaggcccgggtggtgatcacccagagccctgggaagtatgtgctgcccccacccaagctgaacatcgagatgccagactag

SEQ ID NO: 69272 - DNA, 519 bp, Artificial Sequence
  derived and/or modified sequence
atgtccttcctgtgcctggtggtgctgtactacatcgtgtggagcgtgctcttcctgcgctccatggatgtgattgctgagcagaggaggacccacatcaccatggccctgtcctggatgaccatcgtggtgcccctgctgacctttgagatcctgctggtgcacaagctggatggccacaatgccttcagcagcatccccatctttgtgcccctgtggctgagcctcatcaccctgatggccaccaccttcggccagaagggcggcaaccactggtggtttggcatcaggaaggacttctgccagttcctgctggagatcttccccttcctgcgggagtatggcaacatctcctatgacctgcaccacgaggacaatgaggagacagaggagacccctgtgcctgagccccccaagatcgcccccatgttcaggaagaaggcccgggtggtgatcacccagagccctgggaagtatgtgctgcccccacccaagctgaacatcgagatgccagactag

SEQ ID NO: 69273 - DNA, 876 bp, Artificial Sequence
  derived and/or modified sequence
atgaacctgcggggcctgttccaggacttcaacccccgggccgagggcgaaacctgtgtcgagttcaaggcgatgttaatcgctgttggcatccacttgttgttactcatgttcgaggttctggtgtgcgacagaattgagagagggtctcacttttggctgctcgtgttcatgcccctgttcttcgtgtcacccgtgtctgtcgctgcatgcgtgtgggggttccgccatgaccggtcattagaactggaaatactatgctctgtgaacattctccaatttattttcatcgcactgcggctggacaagattatccactggccctggctcgtcgtgtgtgtgccactctggatactcatgagctttttgtgccttgtcgttttgtactacattgtgtggtccgtgttatttctaagatccatggatgtaatcgctgaacagagaaggacacacattaccatggccctttcttggatgaccatcgtggttcccctgcttactttcgagatacttctggttcataaacttgacggacacaatgccttcagctcaattcccatctttgttccactgtggcttagtctcattacactcatggccacaacgttcgggcagaagggaggtaaccattggtggtttgggatcagaaaagacttctgtcaattcctcctggagatctttcctttcctgcgcgagtatgggaacatctcctatgacctccaccacgaggacaatgaggagaccgaagagacacccgtccctgaacctcccaagatcgcccccatgttccgtaaaaaggctcgcgtggtaatcactcagtctccaggcaaatatgtgcttccaccgccaaaactcaacattgagatgcctgactag

SEQ ID NO: 69274 - DNA, 519 bp, Artificial Sequence
  derived and/or modified sequence
atgagcttcctgtgcctggtggtgctgtactacatcgtgtggagcgtcctatttctgcgctctatggacgtgattgcagagcagaggcggacccacatcacaatggctctcagctggatgacaattgtagtgccattgttgacatttgaaatactactggtccataagctcgacggtcacaacgcgttcagctccatccccattttcgtgcccctctggctgtccctgattactctcatggctacaaccttcggtcagaaaggaggtaaccattggtggtttggcatcaggaaggacttctgtcagttcctgctggagatattcccatttctgcgagagtatggaaatatctcctacgatttacaccacgaggacaatgaggaaacagaggaaacccctgtgcctgaacccccaaagatcgccccaatgttcagaaaaaaggccagagttgtgattacccagagtcctggtaagtacgtcctgcccccgcccaagttgaacatagagatgccagactag

SEQ ID NO: 69275 - DNA, 876 bp, Artificial Sequence
  derived and/or modified sequence
atgaaccttaggggattgttccaggacttcaatcctcgggctgagggcgaaacttgtgtggaatttaaggcaatgctcatcgccgtgggcattcacctgcttttgttaatgttcgaggtcctggtgtgcgatagaatcgagcgaggatcccatttctggctgctggtgtttatgcctctgttcttcgtaagcccagtaagcgttgcggcttgcgtgtggggcttccggcacgaccggtcgctggagcttgaaattctatgttctgtgaacattctgcagtttatctttatcgccctgagactggacaagatcattcactggccgtggttggtggtttgcgtgcccctgtggatcctcatgtctttcctttgtctcgtagtgctgtactatatcgtgtggagtgtgctattcctccggagtatggatgtcatagctgagcagcgacgcacccacattacgatggcgctcagttggatgacaatcgtggtgcctctgctcactttcgaaatacttctcgtccacaagctggacgggcataacgccttcagtagcattcccatctttgtgcctctctggctgtccctgatcactctgatggccactaccttcggccagaaggggggaaatcactggtggttcggcatccgcaaagatttctgccagttcctccttgagatattcccttttctccgtgaatatggtaatatatcctacgacctgcatcacgaggacaacgaggagacagaggaaacgcccgttccggagccacctaaaatcgctcccatgttcaggaagaaagcccgagtggtgataacccaatctccagggaaatatgtactcccacccccaaagttgaatattgaaatgccggactag

SEQ ID NO: 69276 - DNA, 519 bp, Artificial Sequence
  derived and/or modified sequence
atgtccttcctatgtctggtggtattgtattatatcgtgtggtccgtcttgtttctgcgcagtatggacgtcatcgcggagcagcggagaacacacatcacaatggccctgtcatggatgacaatcgtggtcccgctgctcacgttcgaaatcctgttggttcacaaactggacggacataatgccttctcctccatcccaatctttgtcccattatggctctctctcattacactgatggccaccacctttggccagaagggcggaaatcattggtggttcggcattcggaaagacttttgccagttccttctcgagatcttcccgttcctgcgagaatacgggaatatctcttatgatctacaccacgaggacaacgaagagacagaggagacgccagttcccgagccgccaaaaattgctcccatgtttcgcaaaaaagcaagggtagtcattacacagagtcccggtaaatacgtattacctccgccaaagttaaatatagaaatgccagattag

SEQ ID NO: 69277 - DNA, 2555 bp, Artificial Sequence
  derived and/or modified sequence
gtacggaagcccggaaggaggggcagggggcggtggctcaggtttctccgggcggcggcggcggcggcgacggcgacggcgacggcagcggggacggcagcagtagcgggagcagcagcgtggacgcggctggcgctggcgccatgaacccgctgtaaggcgcaggctgtgcagcacggggtgcgggggaggaggaggaggacgccgcggtgaagttctccgccatgaacctgaggggcctcttccaggacttcaacccgagagcagaaggagaaacgtgtgtggagtttaaagccatgttgattgcagtgggcatccacttgctcttgttgatgtttgaagttctggtctgtgacagaatcgagagaggaagccatttctggctcctggtcttcatgccgctgttctttgtttccccggtgtctgttgcagcttgcgtttggggctttcgacatgacaggtcactagagttagaaatcctgtgttctgtcaacattctccagtttatattcattgccttaagactggacaagatcatccactggccctggcttgttgtgtgtgtcccgctgtggattctcatgtcctttctgtgcctggtggtcctctactacattgtgtggtccgtcttgttcttgcgctctatggatgtgattgcagagcagcgcaggacacacataaccatggccctgagctggatgaccatcgtcgtgccccttcttacatttgagattctgctggttcacaaactggatggccacaacgccttctccagcatcccgatctttgtccccctttggctctcgttgatcacgctgatggcaaccacatttggacagaagggaggaaaccactggtggtttggtatccgcaaagatttctgtcagtttctgcttgaaatcttcccatttctacgagaatatggaaacatttcctatgatctccatcacgaagataatgaagaaaccgaagagaccccagttccggagccccctaaaatcgcacccatgtttcgaaagaaggccagggtggtcattacccagagccctgggaagtatgtgctcccacctcccaaattaaatatcgaaatgccagattagatgccacttccggggacagagcttaagtggactgggacgcactctctccgccttcctctgccccctcgttcaccccgcagaccagaaccagtactggagctgggtctccaggtacgtccatctcatgccttgtttgcatccagcgcctatcagccactcaccacgacgggacgcggaagtggcaggtgacgggggtgtgtgccagcagatgcggatgccaggaagagtgtgagaacaggggtgggattaccgtctgtctgggaggggctccaggtacccctcttccccgtcagacccactgggagatggctgcttgccaggcccccagaaggaacatctgtctatacggtgctgaaatcccaatcaaaagtattgtttagaaatgtatttctccacagggctgacctcctgcagctcgctgagcactcccaggtcctcagcactcccaggtcgtggctggggcagtcagtaggaactgtaactatgtctctgatgcaccacgtgtttagacacagcacagtccttttttctgttcctactgtggaagtagtttctctttgggcatgctgacagcagtttttcatagcctcacggatgagccctttctacgggagtgactccatgcttgtatacagagtatttatacaaatgttttagcatcttcatatgcggtgttaacccctagttctgtacagcatattctgttcaagtatttttttacaagcttgtgctgtaggcacatgccttctgctgcagaagtggacgcccgtggcacactccccccccccccgtggggtgccacgccttcatgggacattgccacttctgccctggaactcgtgcaggtacgtagtagctgctactgccagaacggcaacaccaagcaagagatggtccatgcttttctgacgttctcagaatagtggctagcttcaaacctgacaagcgctgcttgaagccggaacactagagaatgttgctgagagcagaaacggccacgcgggtcacgactatgcgtgggaaagtctcaagcttccctcctgccagcaacaagaaggctttggagtaggcatgatgttttcacgtgtgcgtgccgtttctccaagcactgcaggttccaccgtgtgtcagaggctgcaagtttaacatcctcctgcctgaaaacaaataggtcctttgctgaaaagagggtaaaaaaagagctttgatcttctcagccaggagaagagggtggtgttttcacgcgggcaactgctcgccggcctacatggggttaattcaagtctgctgcgagcacgactccgcccttggcactggcctccagcaagccctgttctctttggggtacaggggaacgggatggtttagactttcctgctcagtgtgtaaaaaatgtagctaaagccactatttttgctctccttaagctgttcaataaaccggttcctcatttta

SEQ ID NO: 69278 - DNA, 3665 bp, Artificial Sequence
  derived and/or modified sequence
aggccacagactgggagaaaatatttgcaaagcacacatcaaaacactgacttgcacccagaacatacagagaactcttaaaaactcaaaactgcaaaaagaaacacctaaaaattggcaaaagagttgacaatttgcgaaggggatatacacatggcgaaaaagcacaggaaaagatgctcaacgccattacaggttagggaagacaaactacaaccaggatgagggcccgaaacacatggcttcagaatggtgaaactcagcaacactgacgaggccacgtgcctgggaggatgcagaggaactgggacactccagtgttactggcgggaaggcaggtggtacgggcactgtagaaaatggtttggccatctctgatgcagttaaaagcgcacttcccgtgggacttggctgccccactcctgggtataagatttacccccagagaagtgaaagcgcgcagccttgtagaaacccacacaccagtgtttgtagcagtcttgtttgcattttggatagcggccttgtttggttttcacaaaccaccctcagcggacagtcagataaactgtaggcatccatacaatggaataccactcagaactgagagggaacgacctgtggatacagggagggaacaacttggatgaatctcattagagacattatgtggatggcgggaagccagtctcaacaggttacttgtctcgcgatgccatctacataaagttccagcagagacaaaagtacagtgacagagaacagatcagtgtttgccggggctaatggtggggacggtgtgatagtgaagggacagcacggagagttttgcagggtgacagacctcttctgcatcctgccaacggctgtgcgaatctacttgtgtgaagactcagggaactcacaccaaaggaagacggtcacttttcctactgtatgatagataattaataaaaagggagaacggaggagtgtcgtcccaggaggcagggcaggagggcgaagacgtgtcacaggggagcctggccaagtggcgcccccggaactcgtcctctgggcttgtgtgtggatgagacaaggtctacctggtacgacagggacatactgggaatgcgcccttgccgtggaggcggggacccggcagcgctacgtatccagcatcaacctgtatccagcatcaacccgccaagttcactaacttggtaggggtgaggttagggatccttaggagcccaggcagccagactttctggggagcccattcccatttgtgttgccaaagtacccccagcaggttgtgggaatgttgcctgtgaagagagtctgttggggtgagatcttgtgtgtgtgcacagggtgacagttgtgtcccatttcccgggaagctgtgatggcagcagaacctagaggagcctgagagagtgtgggagagtgggcctctggaagagtagaggctgcggagccaggtgcagggctgtctgtcacccaaaggaagagggactgatgactcactgagcgtgtgtgtcccctggtggcagcaggccccatagtgaacataccataccttttctgtcctgagcgatgctcccagcagtcctgggagatggaacggtccttattcggctcacgggaaggaccgccttaactggacagacacagcaaggtgctaaagatgccttccatcagaggccaggttggaagctctaaagagacttctcttgctgttctctcacccacccccaggttgtgtgtgtcccgctgtggattctcatgtcctttctgtgcctggtggtcctctactacattgtgtggtccgtcttgttcttgcgctctatggatgtgattgcagagcagcgcaggacacacataaccatggccctgagctggatgaccatcgtcgtgccccttcttacatttgagattctgctggttcacaaactggatggccacaacgccttctccagcatcccgatctttgtccccctttggctctcgttgatcacgctgatggcaaccacatttggacagaagggaggaaaccactggtggtttggtatccgcaaagatttctgtcagtttctgcttgaaatcttcccatttctacgagaatatggaaacatttcctatgatctccatcacgaagataatgaagaaaccgaagagaccccagttccggagccccctaaaatcgcacccatgtttcgaaagaaggccagggtggtcattacccagagccctgggaagtatgtgctcccacctcccaaattaaatatcgaaatgccagattagatgccacttccggggacagagcttaagtggactgggacgcactctctccgccttcctctgccccctcgttcaccccgcagaccagaaccagtactggagctgggtctccaggtacgtccatctcatgccttgtttgcatccagcgcctatcagccactcaccacgacgggacgcggaagtggcaggtgacgggggtgtgtgccagcagatgcggatgccaggaagagtgtgagaacaggggtgggattaccgtctgtctgggaggggctccaggtacccctcttccccgtcagacccactgggagatggctgcttgccaggcccccagaaggaacatctgtctatacggtgctgaaatcccaatcaaaagtattgtttagaaatgtatttctccacagggctgacctcctgcagctcgctgagcactcccaggtcctcagcactcccaggtcgtggctggggcagtcagtaggaactgtaactatgtctctgatgcaccacgtgtttagacacagcacagtccttttttctgttcctactgtggaagtagtttctctttgggcatgctgacagcagtttttcatagcctcacggatgagccctttctacgggagtgactccatgcttgtatacagagtatttatacaaatgttttagcatcttcatatgcggtgttaacccctagttctgtacagcatattctgttcaagtatttttttacaagcttgtgctgtaggcacatgccttctgccctggaactcgtgcaggtacgtagtagctgctactgccagaacggcaacaccaagcaagagatggtccatgcttttctgacgttctcagaatagtggctagcttcaaacctgacaagcgctgcttgaagccggaacactagagaatgttgctgagagcagaaacggccacgcgggtcacgactatgcgtgggaaagtctcaagcttccctcctgccagcaacaagaaggctttggagtaggcatgatgttttcacgtgtgcgtgccgtttctccaagcactgcaggttccaccgtgtgtcagaggctgcaagtttaacatcctcctgcctgaaaacaaataggtcctttgctgaaaagagggtaaaaaaagagctttgatcttctcagccaggagaagagggtggtgttttcacgcgggcaactgctcgccggcctacatggggttaattcaagtctgctgcgagcacgactccgcccttggcactggcctccagcaagccctgttctctttggggtacaggggaacgggatggtttagactttcctgctcagtgtgtaaaaaatgtagctaaagccactatttttgctctccttaagctgttcaataaaccggttcctcatttt

SEQ ID NO: 69279 - protein, 1104 aa, Artificial Sequence
  derived and/or modified sequence
MADGPRCKRRKQANPRRNNVTNYNTVVETNSDSDDEDKLHIVEEESVTDAADCEGVPEDDLPTDQTVLPGRSSEREGNAKNCWEDDIKDDECESDAENEQNHDPNVEEFLQQQDTAVIFPEAPEEDQRQGTPEASGHDENGTPDAFSQLLTCPYCDRGYKRFTSLKEHIKYRHEKNEDNFSCSLCSYTFAYRTQLERHMTSHKSGRDQRHVTQSGCNRKFKCTECGKAFKYKHHLKEHLRIHSGEKPYECPNCKKRFSHSGSYSSHISSKKCISLIPVNGRPRTGLKTSQCSSPSLSASPGSPTRPQIRQKIENKPLQEQLSVNQIKTEPVDYEFKPIVVASGINCSTPLQNGVFTGGGPLQATSSPQGMVQAVVLPTVGLVSPISINLSDIQNVLKVAVDGNVIRQVLENNQANLASKEQETINASPIQQGGHSVISAISLPLVDQDGTTKIIINYSLEQPSQLQVVPQNLKKENPVATNSCKSEKLPEDLTVKSEKDKSFEGGVNDSTCLLCDDCPGDINALPELKHYDLKQPTQPPPLPAAEAEKPESSVSSATGDGNLSPSQPPLKNLLSLLKAYYALNAQPSAEELSKIADSVNLPLDVVKKWFEKMQAGQISVQSSEPSSPEPGKVNIPAKNNDQPQSANANEPQDSTVNLQSPLKMTNSPVLPVGSTTNGSRSSTPSPSPLNLSSSRNTQGYLYTAEGAQEEPQVEPLDLSLPKQQGELLERSTITSVYQNSVYSVQEEPLNLSCAKKEPQKDSCVTDSEPVVNVIPPSANPINIAIPTVTAQLPTIVAIADQNSVPCLRALAANKQTILIPQVAYTYSTTVSPAVQEPPLKVIQPNGNQDERQDTSSEGVSNVEDQNDSDSTPPKKKMRKTENGMYACDLCDKIFQKSSSLLRHKYEHTGKRPHECGICKKAFKHKHHLIEHMRLHSGEKPYQCDKCGKRFSHSGSYSQHMNHRYSYCKREAEERDSTEQEEAGPEILSNEHVGARASPSQGDSDERESLTREEDEDSEKEEEEEDKEMEELQEEKECEKPQGDEEEEEEEEEVEEEEVEEAENEGEEAKTEGLMKDDRAESQASSLGQKVGESSEQVSEEKTNEA

SEQ ID NO: 69280 - DNA, 3315 bp, Artificial Sequence
  derived and/or modified sequence
atggccgacggccccagatgcaagagaagaaagcaggccaaccccagaagaaacaacgtgaccaactacaacaccgtggtggagaccaacagcgacagcgacgacgaggacaagctgcacatcgtggaggaggagagcgtgaccgacgccgccgactgcgagggcgtgcccgaggacgacctgcccaccgaccagaccgtgctgcccggcagaagcagcgagagagagggcaacgccaagaactgctgggaggacgacatcaaggacgacgagtgcgagagcgacgccgagaacgagcagaaccacgaccccaacgtggaggagttcctgcagcagcaggacaccgccgtgatcttccccgaggcccccgaggaggaccagagacagggcacccccgaggccagcggccacgacgagaacggcacccccgacgccttcagccagctgctgacctgcccctactgcgacagaggctacaagagattcaccagcctgaaggagcacatcaagtacagacacgagaagaacgaggacaacttcagctgcagcctgtgcagctacaccttcgcctacagaacccagctggagagacacatgaccagccacaagagcggcagagaccagagacacgtgacccagagcggctgcaacagaaagttcaagtgcaccgagtgcggcaaggccttcaagtacaagcaccacctgaaggagcacctgagaatccacagcggcgagaagccctacgagtgccccaactgcaagaagagattcagccacagcggcagctacagcagccacatcagcagcaagaagtgcatcagcctgatccccgtgaacggcagacccagaaccggcctgaagaccagccagtgcagcagccccagcctgagcgccagccccggcagccccaccagaccccagatcagacagaagatcgagaacaagcccctgcaggagcagctgagcgtgaaccagatcaagaccgagcccgtggactacgagttcaagcccatcgtggtggccagcggcatcaactgcagcacccccctgcagaacggcgtgttcaccggcggcggccccctgcaggccaccagcagcccccagggcatggtgcaggccgtggtgctgcccaccgtgggcctggtgagccccatcagcatcaacctgagcgacatccagaacgtgctgaaggtggccgtggacggcaacgtgatcagacaggtgctggagaacaaccaggccaacctggccagcaaggagcaggagaccatcaacgccagccccatccagcagggcggccacagcgtgatcagcgccatcagcctgcccctggtggaccaggacggcaccaccaagatcatcatcaactacagcctggagcagcccagccagctgcaggtggtgccccagaacctgaagaaggagaaccccgtggccaccaacagctgcaagagcgagaagctgcccgaggacctgaccgtgaagagcgagaaggacaagagcttcgagggcggcgtgaacgacagcacctgcctgctgtgcgacgactgccccggcgacatcaacgccctgcccgagctgaagcactacgacctgaagcagcccacccagcccccccccctgcccgccgccgaggccgagaagcccgagagcagcgtgagcagcgccaccggcgacggcaacctgagccccagccagccccccctgaagaacctgctgagcctgctgaaggcctactacgccctgaacgcccagcccagcgccgaggagctgagcaagatcgccgacagcgtgaacctgcccctggacgtggtgaagaagtggttcgagaagatgcaggccggccagatcagcgtgcagagcagcgagcccagcagccccgagcccggcaaggtgaacatccccgccaagaacaacgaccagccccagagcgccaacgccaacgagccccaggacagcaccgtgaacctgcagagccccctgaagatgaccaacagccccgtgctgcccgtgggcagcaccaccaacggcagcagaagcagcacccccagccccagccccctgaacctgagcagcagcagaaacacccagggctacctgtacaccgccgagggcgcccaggaggagccccaggtggagcccctggacctgagcctgcccaagcagcagggcgagctgctggagagaagcaccatcaccagcgtgtaccagaacagcgtgtacagcgtgcaggaggagcccctgaacctgagctgcgccaagaaggagccccagaaggacagctgcgtgaccgacagcgagcccgtggtgaacgtgatcccccccagcgccaaccccatcaacatcgccatccccaccgtgaccgcccagctgcccaccatcgtggccatcgccgaccagaacagcgtgccctgcctgagagccctggccgccaacaagcagaccatcctgatcccccaggtggcctacacctacagcaccaccgtgagccccgccgtgcaggagccccccctgaaggtgatccagcccaacggcaaccaggacgagagacaggacaccagcagcgagggcgtgagcaacgtggaggaccagaacgacagcgacagcaccccccccaagaagaagatgagaaagaccgagaacggcatgtacgcctgcgacctgtgcgacaagatcttccagaagagcagcagcctgctgagacacaagtacgagcacaccggcaagagaccccacgagtgcggcatctgcaagaaggccttcaagcacaagcaccacctgatcgagcacatgagactgcacagcggcgagaagccctaccagtgcgacaagtgcggcaagagattcagccacagcggcagctacagccagcacatgaaccacagatacagctactgcaagagagaggccgaggagagagacagcaccgagcaggaggaggccggccccgagatcctgagcaacgagcacgtgggcgccagagccagccccagccagggcgacagcgacgagagagagagcctgaccagagaggaggacgaggacagcgagaaggaggaggaggaggaggacaaggagatggaggagctgcaggaggagaaggagtgcgagaagccccagggcgacgaggaggaggaggaggaggaggaggaggtggaggaggaggaggtggaggaggccgagaacgagggcgaggaggccaagaccgagggcctgatgaaggacgacagagccgagagccaggccagcagcctgggccagaaggtgggcgagagcagcgagcaggtgagcgaggagaagaccaacgaggcctag

SEQ ID NO: 69281 - DNA, 3315 bp, Artificial Sequence
  derived and/or modified sequence
atggcggacggaccaaggtgcaaacgaaggaagcaggccaacccccgtcggaataacgtgaccaactacaacacagtggtcgagacaaactccgactcagatgatgaggacaaacttcacatagtagaagaagaatctgtgactgacgcagctgactgcgagggggtgcccgaggacgacttacccactgaccaaacagtgcttcctgggcggagctccgagcgcgaagggaacgccaaaaactgttgggaggacgacatcaaggacgatgaatgcgagagcgacgccgaaaacgaacagaaccatgaccccaacgtcgaggagtttctgcagcagcaggacaccgctgtgatcttcccagaagcgcccgaggaggatcagcggcaagggaccccagaagcaagcgggcacgacgaaaacgggacacccgacgcgttctctcagctactcacttgcccatactgcgacaggggctataaacgttttacatctctaaaggaacacatcaagtatagacatgaaaagaatgaagataatttttcctgcagcttatgctcatatacattcgcctacagaacacaattagagaggcacatgacatctcacaagtcaggaagggatcagagacacgtgactcagtcagggtgtaaccgcaaatttaaatgcaccgagtgcggtaaagcatttaagtacaaacatcatctgaaggaacaccttcggatacactctggggaaaagccttacgagtgtcctaattgcaaaaagcggttttcacacagcggctcctactcaagccacattagcagcaagaagtgtatctctctgatacctgtcaatggccggcctaggaccggtttaaagaccagccagtgttcctcccctagtcttagtgccagcccaggtagtcctacgcgaccccagatccgccagaagatcgagaataagccgctacaggagcagttgtccgttaatcaaataaagacggagccggttgattatgagtttaaacctatcgtggttgcttctgggatcaactgctccacaccacttcagaatggagtgtttaccggtggaggcccactccaagccacaagcagcccccagggaatggttcaggctgttgtgctgcctaccgttggactggtgagcccaatttccattaacctgagcgatattcagaatgtgttaaaggtggccgtggatgggaacgttatccgccaagtgctggagaacaatcaagcaaatctggccagtaaggagcaggaaaccattaatgcctcccccatccagcagggggggcattcagtaatcagtgctatttcactgccactcgtggatcaggacgggacgacaaaaatcatcataaactattctcttgaacaacctagccagcttcaagtcgtgcctcagaatctgaagaaagagaaccctgttgccactaactcctgcaagagcgaaaaacttccagaggatctgactgtcaaatccgagaaggacaagtcatttgaaggcggtgtcaacgactctacatgcttgctgtgcgatgactgtcccggtgacatcaacgccctgccagaactgaaacactacgatcttaagcaacctacacagcctcctccactcccagctgcggaggcagagaaacctgagagctctgtgagctccgccaccggagatgggaatctgtctccctctcagccgccactgaagaacctactctctttactgaaggcctactacgcactcaacgcacaaccaagcgccgaggagctctctaagattgccgattcggtgaacctgcctctcgacgttgtgaaaaaatggtttgaaaagatgcaagctggccaaatctcagtccaatcttccgagcctagctcccctgaacccggcaaagtgaacatcccagcaaaaaataacgatcagccccagtcagcaaacgctaacgagccccaggacagtacagtgaacttacagtcccccttgaagatgactaactcaccggtactaccggtggggtccactactaacggaagccggagcagcactccatctccaagccctctgaacctgtcatcaagccggaacacccagggctatttgtatactgccgagggggctcaggaagagccgcaggttgaaccccttgacctcagcttgcccaaacagcagggggagctactggagaggagcacaataacaagcgtgtaccagaattcagtatatagcgtgcaggaggaaccccttaacttgagctgcgccaagaaagagcctcagaaggattcctgcgtcaccgactccgagcctgtcgtgaatgttattcctccaagcgctaatcctatcaatatcgccattcccacagtaactgcgcagctgccaacaatcgtggctatcgctgatcagaatagcgtgccttgtttgcgcgctctggcggctaacaaacaaactatcctcatcccccaggtggcttacacttactccacaacggtgtctccggcagtacaagagccacctctcaaggtgatccagccaaatggcaatcaggacgagcgccaagatacaagctccgagggggtgtccaatgtcgaggatcagaatgactctgatagcacaccccctaagaaaaagatgagaaaaacagagaatgggatgtatgcctgcgatctatgtgacaagatctttcaaaaaagcagttcgctgttaagacacaagtacgagcacacaggtaagcgcccccatgagtgcggaatttgtaaaaaggccttcaagcacaagcaccatttaatcgaacacatgagactgcacagcggtgaaaaaccatatcaatgtgacaaatgtgggaagcgtttctcccactcgggatcttactcccagcacatgaaccaccgctattcctattgtaagcgcgaggctgaagagagggacagcaccgagcaagaagaggccggacccgagatcctctccaatgaacacgtgggagcccgggcgtcccctagtcagggcgacagcgatgaacgcgagagtctcacacgcgaggaagatgaggactccgaaaaggaggaagaggaagaagataaggagatggaagaactgcaggaggagaaagagtgcgagaagccccagggtgacgaggaagaagaggaagaggaagaagaggtcgaagaagaagaagtggaagaggccgagaatgaaggtgaggaagccaagacggagggcctcatgaaggatgatagggcggagtctcaagcatcctctttgggacagaaggtcggagagagctccgaacaggtgagcgaggagaaaaccaatgaggcttag

SEQ ID NO: 69282 - DNA, 3315 bp, Artificial Sequence
  derived and/or modified sequence
atggctgatggcccccgctgcaagaggaggaagcaggccaaccccaggagaaataatgtgaccaactacaacacagtggtggagaccaacagcgacagtgatgatgaggacaagctgcacatcgtggaggaggagagcgtgacagatgctgctgactgtgaaggagtgcctgaagatgacctgcccacagaccagacagtgctgcccggccgcagcagcgagcgggagggcaatgccaagaactgctgggaggatgacatcaaggatgatgaatgtgagagtgatgctgaaaatgagcagaaccacgaccccaacgtggaggagttcctgcagcagcaggacacagctgtgatcttccctgaggcccctgaggaggaccagaggcagggcaccccagaggccagcggccatgatgaaaatggcaccccagatgccttcagccagctgctgacctgcccctactgtgaccggggctacaagcgcttcaccagcctgaaggagcacatcaagtacagacatgagaagaatgaagacaacttcagctgcagcctgtgcagctacacctttgcctaccgcacccagctggagcggcacatgaccagccacaagagcggccgggaccagagacatgtgacccagagcggctgcaacaggaagttcaagtgcacagaatgtgggaaggccttcaagtacaagcaccacctgaaggagcacctgcgcatccacagcggggagaagccctatgaatgtcccaactgcaagaagcgcttcagccacagcggcagctacagcagccacatcagcagcaagaagtgcatcagcctcatccctgtgaatggccggcccaggacaggcctgaagaccagccagtgcagcagccccagcctgagcgccagccctggcagccccacccggccccagatccggcagaagattgagaacaagcccctgcaggagcagctgtctgtgaaccagatcaagacagagcctgtggactatgagttcaagcccatcgtggtggccagcggcatcaactgcagcacccccctgcagaatggagtcttcaccggcggcggccccctgcaggccaccagcagcccccagggcatggtgcaggccgtggtgctgcccaccgtgggcctggtgagccccatcagcatcaacctgagtgacatccagaatgtgctgaaggtggccgtggatggaaatgtcatccggcaggtgctggagaacaaccaggccaacctggccagcaaggagcaggagaccatcaatgccagccccatccagcagggcggccacagcgtcatcagcgccatcagcctgcccctggtggaccaggacggcaccaccaagatcatcatcaactacagcctggagcagcccagccagctgcaggtggtgccccagaacctgaagaaggaaaatcctgtggccaccaacagctgcaagtctgagaagctgcctgaggacctgactgtgaagtctgagaaggacaagagctttgagggcggcgtgaatgacagcacctgcctgctgtgtgatgactgccctggggacatcaatgccctgcctgagctgaagcactatgacctgaagcagcccacccagcccccacccctgcctgctgctgaggccgagaagccagagagctctgtgtcctctgccactggagatggcaacctgagccccagccagccccccctgaagaacctgctgagcctgctgaaggcctactatgccctgaatgcccagcccagcgctgaggagctgagcaagattgctgacagcgtgaacctgcccctggatgtggtgaagaagtggtttgagaagatgcaggccggccagatctctgtgcagagcagcgagcccagcagccctgagcccgggaaggtgaacatcccagccaagaacaatgaccagccccagagcgccaatgccaatgagccccaggacagcacagtgaacctgcagagccccctgaagatgaccaacagccctgtgctgcctgtgggcagcaccaccaacggcagccgcagcagcacccccagccccagccccctgaacctgagcagcagcaggaacacccagggctacctgtacacagctgagggcgcccaggaggagccccaggtggagcccctggacctgagcctgcccaagcagcagggcgagctgctggagaggagcaccatcacctctgtgtaccagaacagcgtgtacagcgtgcaggaggagcccctgaacctgagctgtgccaagaaggagccccagaaggacagctgtgtgacagacagcgagcctgtggtgaatgtcatcccccccagcgccaaccccatcaacatcgccatccccaccgtgacagcccagctgcccaccatcgtggccatcgctgaccagaacagcgtgccctgcctgcgggccctggccgccaacaagcagaccatcctgatcccccaggtggcctacacctacagcaccaccgtgtccccagctgtgcaggagccccccctgaaggtgatccagcccaacggcaaccaggatgagcggcaggacaccagcagcgagggcgtgtccaatgtggaggaccagaatgacagcgacagcaccccacccaagaagaagatgaggaagacagaaaatggcatgtatgcctgtgacctgtgtgacaagatcttccagaagagcagcagcctgctgcggcacaagtatgagcacacaggcaagaggcctcatgaatgtggcatctgcaagaaggccttcaagcacaagcaccacctgattgagcacatgaggctgcacagcggggagaagccctaccagtgtgacaagtgtgggaagcgcttcagccacagcggcagctacagccagcacatgaaccaccgctacagctactgcaagcgggaggccgaggagcgggacagcacagagcaggaggaggccggccctgagatcctgagcaatgagcacgtgggcgcccgggccagccccagccagggcgacagtgatgagcgggagagcctgacccgggaggaggatgaggacagcgagaaggaggaggaggaggaggacaaggagatggaggagctgcaggaggagaaggaatgtgagaagccccagggagatgaggaggaggaggaggaggaggaggaggtggaggaggaggaggtggaggaggctgaaaatgaaggagaggaggccaagacagagggcctgatgaaggatgacagagctgagagccaggccagcagcctgggccagaaggtgggggagagcagcgagcaggtgtctgaggagaagaccaatgaggcctag

SEQ ID NO: 69283 - DNA, 3315 bp, Artificial Sequence
  derived and/or modified sequence
atggccgacggcccccggtgcaagcggcggaagcaggccaacccccgccgaaacaacgttaccaactataacactgtggttgagactaattccgactcagacgatgaggacaagttacatatcgtggaggaagagtcagtgaccgatgccgctgactgcgagggtgtccccgaagatgacctgcctacggaccagaccgtgctgcctgggcggagttccgagcgtgaaggcaatgctaaaaattgctgggaggacgacattaaggacgacgagtgtgaaagcgatgctgagaacgagcagaaccatgaccccaacgttgaggaatttctgcaacagcaagataccgccgtgatctttcctgaagctccagaagaggatcaaaggcagggcacacccgaggcgtccggacacgacgagaacggtacgcccgacgccttctcccagttgcttacctgtccgtactgcgatagaggatacaaacgatttacttcactgaaagaacatattaagtaccgccacgagaagaacgaggacaactttagctgtagtctttgcagttacacttttgcgtacaggactcagctggagaggcacatgacgagccataagtcagggcgggatcagcggcacgtgacccaaagcggctgtaatcggaagttcaagtgcactgagtgcggcaaggcattcaaatacaagcatcacctgaaagaacacctgcggatccattccggagaaaaaccctacgaatgtccaaactgtaagaaaaggttttcacacagcggttcctactcctctcacatctcatccaagaaatgtatatcattgatacctgtaaacggccggccgaggactggcctcaaaactagccagtgctcgtcaccatccctgtccgcatctcccggcagccccacgcggccacagatcagacagaaaattgagaacaagcctctgcaggagcagctctcagtcaaccagattaaaacagagccagtggactacgagttcaaaccaatcgtggtagcatctggcatcaactgctctacaccactccagaacggggtgtttactggagggggacctctgcaggcaacttcctctcctcagggaatggtacaggccgttgtactgcctacggtgggcctggtctctcccatttccataaatctctctgacatacaaaatgtgttaaaggtggcagtggatggaaatgtgattcgccaggtgctggaaaataatcaagccaatctggccagtaaggagcaggagacaatcaatgcctcccctatacagcaagggggtcatagcgtgatatccgccatcagcctccccctcgtggatcaggatggaactactaaaatcataatcaactacagcctcgagcagccctcccagctgcaagtcgtccctcagaacctgaaaaaagagaacccagtcgctaccaactcatgcaaatcagaaaaattgcctgaggacctgaccgtaaaaagtgaaaaagacaagtccttcgagggcggcgtgaacgattcgacatgccttctttgcgatgactgtccaggcgatatcaacgctctgcccgagctgaagcattatgatttgaagcaaccaacgcagcccccacctctcccagctgctgaagctgaaaaacccgagtcgagtgtgtcctccgccaccggcgacggaaacttaagcccttcccaaccccccctcaagaatcttttgagcctcttgaaggcatattatgcccttaatgcccagccgtccgctgaggaattatccaaaattgctgatagtgtgaatctacccctagacgttgtgaagaaatggtttgaaaagatgcaggcagggcaaatctcggtccagtctagtgaaccctcaagtccggagcctggcaaggtgaacatacccgcgaaaaacaacgaccagccacagtccgccaatgcaaatgaaccccaggatagtacagtgaatctgcaatctccattgaagatgactaacagtccagtgctgcctgtcggatccactaccaacggatcacgatccagcacaccatctcctagccccctgaaccttagtagctcccggaatactcagggctacctttacactgcggagggcgcacaggaggagccacaagtcgagcctctggatttgtccttgcccaagcaacaaggcgagctactggagcggagcacaattaccagtgtgtaccagaacagcgtttacagtgtgcaggaggaaccattaaacctgagctgcgccaagaaagagccacagaaggattcctgcgtgaccgatagtgaacctgtggtgaacgtgattccgccaagcgcgaatccaatcaacatcgctattcccacagtcactgcccagctccccactatcgtcgccatagctgatcagaactccgtgccctgcctacgtgcgctggcagcaaacaaacaaactattctgattccccaggtagcctacacttactctacgactgtgtccccagcagtgcaagaacctcctcttaaagtgatacaacccaatggaaaccaggacgagcgccaggacacctcttccgagggcgtgtctaacgtcgaggatcagaatgatagcgatagcacacctcctaagaaaaagatgaggaagactgagaatggaatgtatgcctgcgatttgtgtgataaaattttccaaaagtcttcttcacttttacgccacaagtacgaacataccgggaagcgaccacatgaatgcggtatttgcaagaaggcgttcaaacataaacaccaccttattgaacacatgagactgcattccggagagaagccttaccagtgcgacaaatgtggtaaaaggtttagccatagtggaagctacagccagcacatgaatcacaggtattcatactgtaaacgtgaagcggaagaacgagacagtacagagcaagaggaagcaggcccagaaattctgtccaacgagcatgtgggtgcgagggcatcaccatctcagggagactctgatgagagagaaagcttaactagagaggaggacgaagattccgaaaaggaagaggaggaagaggacaaggaaatggaggaacttcaggaggaaaaagagtgtgagaagccacaaggcgacgaggaggaggaagaagaagaggaagaggtagaagaagaggaggtcgaagaagcagagaacgaaggcgaggaagccaaaacggagggtcttatgaaggatgatcgggcggagtcgcaagccagttcactgggccagaaggtgggggaaagtagtgaacaggtgtccgaggaaaaaaccaatgaagcctag

SEQ ID NO: 69284 - DNA, 3315 bp, Artificial Sequence
  derived and/or modified sequence
atggcagatggcccacggtgcaagcgcagaaagcaggcaaaccctcgccgaaataacgttaccaactacaacacggtggtcgaaacaaactccgactctgatgatgaggacaagctacacattgtggaggaagagagcgttactgacgccgctgattgtgagggtgtaccagaagacgatctgcccaccgaccagacagtgctgccagggaggagctctgagagagaggggaatgccaagaattgctgggaagacgacattaaggatgacgagtgtgaaagtgacgccgaaaacgaacagaatcatgatcccaatgtggaggaattcctgcagcagcaagataccgccgtgatcttccccgaggcacccgaggaggatcagcgccaggggacgccagaggccagcggacacgatgagaacggcacccccgacgccttcagtcaattgctgacctgcccatactgcgacagaggatacaagagatttacctcactcaaagagcatattaagtatcggcatgagaagaatgaggataacttttcctgtagcctgtgtagctatacgttcgcctatcggactcagctggagaggcacatgacctcccacaagagtgggagagatcagaggcatgtgacacagagcggctgtaaccgcaagttcaagtgcactgagtgcgggaaagcttttaagtacaagcaccatttaaaagaacatttgaggattcattctggcgaaaaaccttacgagtgtccaaactgtaagaagagatttagtcactcaggatcatattcctctcacatctctagcaagaagtgtataagtctgattcccgttaacggaaggcccagaaccggactcaaaactagccaatgttctagccctagcctatccgcctcaccaggctcccccaccagaccccaaattcgtcagaagattgagaacaaaccattgcaagaacagctatctgtgaatcagatcaaaaccgagccagttgactacgagttcaagcctattgtcgtggctagcggcataaattgcagcactcctctgcaaaacggggtctttacaggaggagggccattgcaggccacgtccagcccccagggaatggtacaggccgtggtgctgccaacagtcggattagtgtccccaatcagcatcaacctgagcgacattcagaatgtgttaaaggttgctgtcgatggcaacgtcatcaggcaagtgcttgagaacaatcaggccaacctggcgagtaaggagcaggagaccatcaatgccagccccatccagcaaggcggacattcagtgatcagcgccatctctctgcctttggtggaccaagacggcaccacaaagattattatcaactatagcttagaacagccttcccagctacaggtagtgccccagaatttgaaaaaagaaaatcctgtcgccacgaactcttgtaaatccgaaaaacttccggaggacctgactgttaaaagtgaaaaggacaagtcttttgagggaggcgtaaatgacagcacctgcctactctgcgacgactgtcctggagacattaacgctctgcccgagctcaaacactacgacctgaaacagcccacacagccccctcccctgccagctgccgaggcagagaagccagagagctccgtctccagtgctacaggcgatggaaatctgtccccttctcagcccccactgaaaaatcttctgtccctacttaaagcttactacgcactgaacgcccagccctcagcagaggaattgtctaagatcgccgattccgtgaacctgcccctcgatgtcgtgaagaagtggttcgaaaagatgcaagctgggcaaatatcagtgcagtcctcagagccttcctcgccagagccagggaaagtgaatattcctgctaagaataatgaccaaccgcagtccgccaacgctaatgagcctcaggacagcaccgtgaatctgcagtctccactaaaaatgactaattcaccagttctgcctgtcggctctactaccaacggctccaggagcagcactccaagtccctcccctttgaatctctcttcttccaggaacactcagggatacctgtatacggctgagggtgcccaggaggaaccccaggtcgaacctctcgatcttagccttcccaaacagcagggagagctgctcgagcgttcgacgatcacaagtgtctaccaaaacagcgtctattctgtgcaggaagagccactcaacctctcttgcgcgaagaaggagccacagaaggacagctgcgttactgactcagagccagtggtgaacgtgatccctccatcagcaaacccgattaatattgccataccaacagtgactgcacagctgccgaccattgttgctatcgccgatcagaactccgtgccatgtctgagggccctggccgcaaacaaacaaactattctgattccccaggtagcttatacctacagcacaactgtgtcccctgcggtccaggagccgccactgaaggtaattcagccaaacggcaatcaggacgagcgccaggataccagctctgagggtgtgtccaacgttgaggaccagaacgacagcgactccacaccacctaaaaagaaaatgaggaaaacagaaaatggtatgtacgcgtgcgacctgtgcgacaaaatattccagaagtctagctctctcctgcgacataagtacgaacatacaggaaagagacctcatgaatgcggaatatgcaagaaggcttttaaacataagcatcacttgatcgagcacatgcgactccattccggggagaagccttatcaatgtgataagtgtggaaaacggtttagtcactctggaagttatagtcagcacatgaaccaccgctactcttactgcaagcgcgaggcagaggagcgggacagcactgaacaggaggaagccggtcctgagatcctgagcaacgagcacgttggggctcgcgcatcaccgtctcaaggggactcagacgaacgcgaatcgctgactcgggaggaagacgaggactctgagaaagaagaagaggaagaggataaggagatggaagagttgcaagaagagaaggagtgtgagaagccacagggtgacgaggaggaagaggaggaagaagaagaagttgaagaggaggaggtggaggaggctgagaatgagggcgaggaggccaaaaccgagggcctcatgaaagatgatagggctgagagtcaggcctcgtctctgggccaaaaggtgggggagtcatctgagcaggtgtctgaggaaaagacaaatgaggcctag

SEQ ID NO: 69285 - DNA, 3466 bp, Artificial Sequence
  derived and/or modified sequence
atttagacacaagcgagaggatcatggcggatggccccaggtgtaagcgcagaaagcaggcgaacccgcggcgcaataacgttacaaattataatactgtggtagaaacaaattcagattcagatgatgaagacaaactgcatattgtggaagaagaaagtgttacagatgcagctgactgtgaaggtgtaccagaggatgacctgccaacagaccagacagtgttaccagggaggagcagtgaaagagaagggaatgctaagaactgctgggaggatgacataaaagatgatgaatgcgagtcagatgcagaaaatgagcaaaaccatgatcctaatgttgaagagtttctacaacaacaagacactgctgtcatttttcctgaggcacctgaagaggaccagaggcagggcacaccagaagccagtggtcatgatgaaaatggaacaccagatgcattttcacaattactcacctgtccatattgtgatagaggctataaacgctttacctctctgaaagaacacattaaatatcgtcatgaaaagaatgaagataactttagttgctccctgtgcagttacacctttgcatacagaacccaacttgaacgtcacatgacatcacataaatcaggaagagatcaaagacatgtgacgcagtctgggtgtaatcgtaaattcaaatgcactgagtgtggaaaagctttcaaatacaaacatcacctaaaagagcacttaagaattcacagtggagagaagccatatgaatgcccaaactgcaagaaacgcttttcccattctggctcctatagctcacacataagcagtaagaaatgtatcagcttgatacctgtgaatgggcgaccaagaacaggactcaagacatctcagtgttcttcaccgtctctttcagcatcaccaggcagtcccacacgaccacagatacggcaaaagatagagaataaaccccttcaagaacaactttctgttaaccaaattaaaactgaacctgtggattatgaattcaaacccatagtggttgcttcaggaatcaactgttcaacccctttacaaaatggggttttcactggtggtggcccattacaggcaaccagttctcctcagggcatggtgcaagctgttgttctgccaacagttggtttggtgtctcccataagtatcaatttaagtgatattcagaatgtacttaaagtggcggtagatggtaatgtaataaggcaagtgttggagaataatcaagccaatcttgcatccaaagaacaagaaacaatcaatgcttcacccatacaacaaggtggccattctgttatttcagccatcagtcttcctttggttgatcaagatggaacaaccaaaattatcatcaactacagtcttgagcagcctagccaacttcaagttgttcctcaaaatttaaaaaaagaaaatccagtcgctacaaacagttgtaaaagtgaaaagttaccagaagatcttactgttaagtctgagaaggacaaaagctttgaagggggggtgaatgatagcacttgtcttctgtgtgatgattgtccaggagatattaatgcacttccagaattaaagcactatgacctaaagcagcctactcagcctcctccactccctgcagcagaagctgagaagcctgagtcctctgtttcatcagctactggagatggcaatttgtctcctagtcagccacctttaaagaacctcttgtctctcctaaaagcatattatgctttgaatgcacaaccaagtgcagaagagctctcaaaaattgctgattcagtaaacctaccactggatgtagtaaaaaagtggtttgaaaagatgcaagctggacagatttcagtgcagtcttctgaaccatcttctcctgaaccaggcaaagtaaatatccctgccaagaacaatgatcagcctcaatctgcaaatgcaaatgaaccccaggacagcacagtaaatctacaaagtcctttgaagatgactaactccccagttttaccagtgggatcaaccaccaatggttccagaagtagtacaccatccccatcacctctaaacctttcctcatccagaaatacacagggttacttgtacacagctgagggtgcacaagaagagccacaagtagaacctcttgatctttcactaccaaagcaacagggagaattattagaaaggtcaactatcactagtgtttaccagaacagtgtttattctgtccaggaagaacccttgaacttgtcttgcgcaaaaaaggagccacaaaaggacagttgtgttacagactcagaaccagttgtaaatgtaatcccaccaagtgccaaccccataaatatcgctatacctacagtcactgcccagttacccacaatcgtggccattgctgaccagaacagtgttccatgcttaagagcgctagctgccaataagcaaacgattctgattccccaggtggcatacacctactcaactacggtcagccctgcagtccaagaaccacccttgaaagtgatccagccaaatggaaatcaggatgaaagacaagatactagctcagaaggagtatcaaatgtagaggatcagaatgactctgattctacaccgcccaaaaagaaaatgcggaagacagaaaatggaatgtatgcttgtgatttgtgtgacaagatattccaaaagagtagttcattattgagacataaatatgaacacacaggtaaaagacctcatgagtgtggaatctgtaaaaaggcatttaaacacaaacatcatttgattgaacacatgcgattacattctggagaaaagccctatcaatgtgacaaatgtggaaagcgcttctcacactctgggtcttattctcaacacatgaatcatcgctactcctactgtaagagagaagcggaagaacgtgacagcacagagcaggaagaggcagggcctgaaatcctctcgaatgagcacgtgggtgccagggcgtctccctcacagggcgactcggacgagagagagagtttgacaagggaagaggatgaagacagtgaaaaagaggaagaggaggaggataaagagatggaagaattgcaggaagaaaaagaatgtgaaaaaccacaaggggatgaggaagaggaggaggaggaggaagaagtggaagaagaagaggtagaagaggcagagaatgagggagaagaagcaaaaactgaaggtctgatgaaggatgacagggctgaaagtcaagcaagcagcttaggacaaaaagtaggcgagagtagtgagcaagtgtctgaagaaaagacaaatgaagcctaatcgtttttctagaaggaaaataaattctaattgataatgaatttcgttcaatattatccttgcttttcatggaaacacagtaacctgtatgctgtgattcctgttcactactgtgtaaagtaaaaact

SEQ ID NO: 69286 - protein, 1057 aa, Artificial Sequence
  derived and/or modified sequence
MADGPRCKRRKQANPRRNNGKEGQEILGPEAQADEAGCTVKDDECESDAENEQNHDPNVEEFLQQQDTAVIFPEAPEEDQRQGTPEASGHDENGTPDAFSQLLTCPYCDRGYKRFTSLKEHIKYRHEKNEDNFSCSLCSYTFAYRTQLERHMTSHKSGRDQRHVTQSGCNRKFKCTECGKAFKYKHHLKEHLRIHSGEKPYECPNCKKRFSHSGSYSSHISSKKCISLIPVNGRPRTGLKTSQCSSPSLSASPGSPTRPQIRQKIENKPLQEQLSVNQIKTEPVDYEFKPIVVASGINCSTPLQNGVFTGGGPLQATSSPQGMVQAVVLPTVGLVSPISINLSDIQNVLKVAVDGNVIRQVLENNQANLASKEQETINASPIQQGGHSVISAISLPLVDQDGTTKIIINYSLEQPSQLQVVPQNLKKENPVATNSCKSEKLPEDLTVKSEKDKSFEGGVNDSTCLLCDDCPGDINALPELKHYDLKQPTQPPPLPAAEAEKPESSVSSATGDGNLSPSQPPLKNLLSLLKAYYALNAQPSAEELSKIADSVNLPLDVVKKWFEKMQAGQISVQSSEPSSPEPGKVNIPAKNNDQPQSANANEPQDSTVNLQSPLKMTNSPVLPVGSTTNGSRSSTPSPSPLNLSSSRNTQGYLYTAEGAQEEPQVEPLDLSLPKQQGELLERSTITSVYQNSVYSVQEEPLNLSCAKKEPQKDSCVTDSEPVVNVIPPSANPINIAIPTVTAQLPTIVAIADQNSVPCLRALAANKQTILIPQVAYTYSTTVSPAVQEPPLKVIQPNGNQDERQDTSSEGVSNVEDQNDSDSTPPKKKMRKTENGMYACDLCDKIFQKSSSLLRHKYEHTGKRPHECGICKKAFKHKHHLIEHMRLHSGEKPYQCDKCGKRFSHSGSYSQHMNHRYSYCKREAEERDSTEQEEAGPEILSNEHVGARASPSQGDSDERESLTREEDEDSEKEEEEEDKEMEELQEEKECEKPQGDEEEEEEEEEVEEEEVEEAENEGEEAKTEGLMKDDRAESQASSLGQKVGESSEQVSEEKTNEA

SEQ ID NO: 69287 - DNA, 3174 bp, Artificial Sequence
  derived and/or modified sequence
atggccgacggccccagatgcaagagaagaaagcaggccaaccccagaagaaacaacggcaaggagggccaggagatcctgggccccgaggcccaggccgacgaggccggctgcaccgtgaaggacgacgagtgcgagagcgacgccgagaacgagcagaaccacgaccccaacgtggaggagttcctgcagcagcaggacaccgccgtgatcttccccgaggcccccgaggaggaccagagacagggcacccccgaggccagcggccacgacgagaacggcacccccgacgccttcagccagctgctgacctgcccctactgcgacagaggctacaagagattcaccagcctgaaggagcacatcaagtacagacacgagaagaacgaggacaacttcagctgcagcctgtgcagctacaccttcgcctacagaacccagctggagagacacatgaccagccacaagagcggcagagaccagagacacgtgacccagagcggctgcaacagaaagttcaagtgcaccgagtgcggcaaggccttcaagtacaagcaccacctgaaggagcacctgagaatccacagcggcgagaagccctacgagtgccccaactgcaagaagagattcagccacagcggcagctacagcagccacatcagcagcaagaagtgcatcagcctgatccccgtgaacggcagacccagaaccggcctgaagaccagccagtgcagcagccccagcctgagcgccagccccggcagccccaccagaccccagatcagacagaagatcgagaacaagcccctgcaggagcagctgagcgtgaaccagatcaagaccgagcccgtggactacgagttcaagcccatcgtggtggccagcggcatcaactgcagcacccccctgcagaacggcgtgttcaccggcggcggccccctgcaggccaccagcagcccccagggcatggtgcaggccgtggtgctgcccaccgtgggcctggtgagccccatcagcatcaacctgagcgacatccagaacgtgctgaaggtggccgtggacggcaacgtgatcagacaggtgctggagaacaaccaggccaacctggccagcaaggagcaggagaccatcaacgccagccccatccagcagggcggccacagcgtgatcagcgccatcagcctgcccctggtggaccaggacggcaccaccaagatcatcatcaactacagcctggagcagcccagccagctgcaggtggtgccccagaacctgaagaaggagaaccccgtggccaccaacagctgcaagagcgagaagctgcccgaggacctgaccgtgaagagcgagaaggacaagagcttcgagggcggcgtgaacgacagcacctgcctgctgtgcgacgactgccccggcgacatcaacgccctgcccgagctgaagcactacgacctgaagcagcccacccagcccccccccctgcccgccgccgaggccgagaagcccgagagcagcgtgagcagcgccaccggcgacggcaacctgagccccagccagccccccctgaagaacctgctgagcctgctgaaggcctactacgccctgaacgcccagcccagcgccgaggagctgagcaagatcgccgacagcgtgaacctgcccctggacgtggtgaagaagtggttcgagaagatgcaggccggccagatcagcgtgcagagcagcgagcccagcagccccgagcccggcaaggtgaacatccccgccaagaacaacgaccagccccagagcgccaacgccaacgagccccaggacagcaccgtgaacctgcagagccccctgaagatgaccaacagccccgtgctgcccgtgggcagcaccaccaacggcagcagaagcagcacccccagccccagccccctgaacctgagcagcagcagaaacacccagggctacctgtacaccgccgagggcgcccaggaggagccccaggtggagcccctggacctgagcctgcccaagcagcagggcgagctgctggagagaagcaccatcaccagcgtgtaccagaacagcgtgtacagcgtgcaggaggagcccctgaacctgagctgcgccaagaaggagccccagaaggacagctgcgtgaccgacagcgagcccgtggtgaacgtgatcccccccagcgccaaccccatcaacatcgccatccccaccgtgaccgcccagctgcccaccatcgtggccatcgccgaccagaacagcgtgccctgcctgagagccctggccgccaacaagcagaccatcctgatcccccaggtggcctacacctacagcaccaccgtgagccccgccgtgcaggagccccccctgaaggtgatccagcccaacggcaaccaggacgagagacaggacaccagcagcgagggcgtgagcaacgtggaggaccagaacgacagcgacagcaccccccccaagaagaagatgagaaagaccgagaacggcatgtacgcctgcgacctgtgcgacaagatcttccagaagagcagcagcctgctgagacacaagtacgagcacaccggcaagagaccccacgagtgcggcatctgcaagaaggccttcaagcacaagcaccacctgatcgagcacatgagactgcacagcggcgagaagccctaccagtgcgacaagtgcggcaagagattcagccacagcggcagctacagccagcacatgaaccacagatacagctactgcaagagagaggccgaggagagagacagcaccgagcaggaggaggccggccccgagatcctgagcaacgagcacgtgggcgccagagccagccccagccagggcgacagcgacgagagagagagcctgaccagagaggaggacgaggacagcgagaaggaggaggaggaggaggacaaggagatggaggagctgcaggaggagaaggagtgcgagaagccccagggcgacgaggaggaggaggaggaggaggaggaggtggaggaggaggaggtggaggaggccgagaacgagggcgaggaggccaagaccgagggcctgatgaaggacgacagagccgagagccaggccagcagcctgggccagaaggtgggcgagagcagcgagcaggtgagcgaggagaagaccaacgaggcctag

SEQ ID NO: 69288 - DNA, 3174 bp, Artificial Sequence
  derived and/or modified sequence
atggccgatggccctcgctgcaagcgccgtaaacaggcaaacccaaggcgaaataacgggaaagaaggccaagaaatactgggcccagaagctcaggcagacgaagccggatgtacagtcaaggatgatgaatgtgaatctgacgctgagaacgaacaaaaccatgatcctaatgtggaggaattcttgcagcagcaggacaccgcagtaatattccccgaggccccggaagaagaccagcgccagggaaccccggaagccagtgggcacgacgagaatgggactcctgatgctttctcccaattgctgacatgtccatattgcgatcggggctacaaaaggttcactagcctcaaggagcatattaagtacaggcacgaaaaaaacgaagataatttcagctgtagcctatgttcctataccttcgcctatcgcactcagctggaaagacacatgacaagtcataaaagtgggagggaccagcggcacgtgacacagagcgggtgtaaccggaagttcaagtgcacggagtgcggaaaggccttcaaatacaaacaccaccttaaggaacatttgcggattcattcaggcgaaaagccatatgaatgcccgaactgcaagaaaagattttcacactctggatcgtactctagtcatatctccagcaagaaatgcatttcactgatccccgttaacggaagaccccgaacaggactgaaaacatcacagtgttccagcccctccctgtcagcgagcccaggaagccctacccgccctcagattcgacagaagatcgaaaacaaacccctgcaagagcaactatcagtaaatcaaatcaagaccgaaccagttgattatgagtttaaacccatcgtggtcgcctccgggataaattgcagcaccccgctccagaacggggtgttcaccggaggtggacctttgcaggctacaagcagtccccaagggatggtccaggccgtggtcttgcctaccgtcggcttagtgagccctattagcatcaatttgtccgatatacaaaacgtcctgaaagtcgctgttgacgggaatgtgatacgtcaggttctggagaataaccaggctaatttagcttccaaagaacaggaaacaataaacgcgagtccaatccaacaggggggtcatagtgtgatatccgccatctcactgccattggttgaccaggacggcaccactaagatcataattaactattctttggagcagcccagtcaactacaggttgtcccccagaacttaaagaaagaaaatccagtcgctaccaactcttgcaaaagcgagaaactgcccgaggacttaacagtgaaatccgagaaagacaagagttttgaagggggcgttaacgactctacatgcctcctctgcgacgactgtcccggagatataaacgcactccccgagctgaaacattatgaccttaagcagcccactcaacctccccctttaccagcagctgaggccgagaagcccgagtcttctgtatcaagcgccactggggacgggaatctgtccccttctcagccgccgcttaaaaacctcctgagcctgctcaaagcttactacgccctgaacgcccagccctctgcagaggagttgtctaagattgctgattcagtgaacctccctctggatgttgtgaaaaagtggtttgagaagatgcaagccggccagatcagcgttcaatctagtgagccaagctcgcctgaacctggcaaggtgaacattccagcaaagaataacgaccaaccccagtctgctaacgctaatgagccccaggacagcaccgtgaacttgcagtcgcccctgaagatgacgaatagtcccgtgttgcccgtaggctcaaccactaacggatctcgctcatctaccccttcccctagcccactgaacctttcaagctctaggaacactcaagggtatctgtataccgcggaaggagctcaggaggagcctcaggtggaaccccttgacctgagtctgcctaagcagcagggcgagttgcttgagagaagtactattacttcagtgtaccaaaacagtgtgtattctgttcaggaggagccgttgaatctatcctgcgccaagaaagagcctcaaaaggatagctgcgttacagatagtgagcccgtcgttaacgtgatcccccccagcgctaatccaatcaatatcgcgataccgaccgtcactgctcagctgcctactatcgtggcgatcgccgatcagaattccgtgccatgtctccgagctctggcggcaaacaagcaaacgatcttgatcccccaggtagcttatacttactctaccaccgtgtctcctgccgtccaggagcccccgctgaaggttatccagcctaatggaaatcaagacgagaggcaagataccagctccgaaggcgtctccaacgtggaggaccagaatgatagcgattctacaccccccaagaagaaaatgcgcaaaactgaaaacggcatgtacgcttgtgatttgtgcgacaagatctttcagaagagttcctccctgttaagacacaaatacgagcacacagggaaaaggcctcacgagtgcggtatctgcaagaaggccttcaaacacaagcatcaccttatcgagcacatgcggcttcacagcggagaaaaaccctatcaatgcgataagtgcggcaaacgtttcagtcactcaggtagctatagccagcatatgaaccataggtattcttactgtaaaagggaggcagaggagcgagattcaacagaacaggaagaggcaggtcccgagatcctctcaaatgaacatgtaggcgcccgagcctctcctagccagggcgattccgacgagagggagagcctgactcgcgaggaagacgaggactctgaaaaggaggaggaagaagaagataaagaaatggaggagctacaggaagagaaggagtgtgagaaaccacaaggcgatgaggaggaggaggaggaagaggaagaggttgaggaggaggaggtggaagaggcagagaatgaaggagaagaggcaaaaactgagggcctgatgaaggacgatagggccgagagccaggcatctagtttgggccagaaagtgggtgaatcaagcgaacaggtctccgaggagaagaccaacgaagcctag

SEQ ID NO: 69289 - DNA, 3174 bp, Artificial Sequence
  derived and/or modified sequence
atggctgatggcccccgctgcaagaggaggaagcaggccaaccccaggagaaataatggcaaggagggccaggagatcctgggccctgaggcccaggctgatgaggccggctgcaccgtgaaggatgatgaatgtgagagtgatgctgaaaatgagcagaaccacgaccccaacgtggaggagttcctgcagcagcaggacacagctgtgatcttccctgaggcccctgaggaggaccagaggcagggcaccccagaggccagcggccatgatgaaaatggcaccccagatgccttcagccagctgctgacctgcccctactgtgaccggggctacaagcgcttcaccagcctgaaggagcacatcaagtacagacatgagaagaatgaagacaacttcagctgcagcctgtgcagctacacctttgcctaccgcacccagctggagcggcacatgaccagccacaagagcggccgggaccagagacatgtgacccagagcggctgcaacaggaagttcaagtgcacagaatgtgggaaggccttcaagtacaagcaccacctgaaggagcacctgcgcatccacagcggggagaagccctatgagtgccccaactgcaagaagcgcttcagccacagcggcagctacagcagccacatcagcagcaagaagtgcatcagcctcatccctgtgaatggccggcccaggacaggcctgaagaccagccagtgcagcagccccagcctgagcgccagccctggcagccccacccggccccagatccggcagaagattgagaacaagcccctgcaggagcagctgtctgtgaaccagatcaagacagagcctgtggactatgagttcaagcccatcgtggtggccagcggcatcaactgcagcacccccctgcagaatggagtcttcaccggcggcggccccctgcaggccaccagcagcccccagggcatggtgcaggccgtggtgctgcccaccgtgggcctggtgagccccatcagcatcaacctgagtgacatccagaatgtgctgaaggtggccgtggatggaaatgtcatccggcaggtgctggagaacaaccaggccaacctggccagcaaggagcaggagaccatcaatgccagccccatccagcagggcggccacagcgtcatcagcgccatcagcctgcccctggtggaccaggacggcaccaccaagatcatcatcaactacagcctggagcagcccagccagctgcaggtggtgccccagaacctgaagaaggagaaccctgtggccaccaacagctgcaagtctgagaagctgcctgaggacctgactgtgaagtctgagaaggacaagagctttgaaggaggagtgaatgacagcacctgcctgctgtgtgatgactgccctggggacatcaatgccctgcctgagctgaagcactatgacctgaagcagcccacccagcccccacccctgcctgctgctgaggccgagaagccagagagctctgtgagcagcgccactggagatggcaacctgagccccagccagccccccctgaagaacctgctgagcctgctgaaggcctactatgccctgaatgcccagcccagcgctgaggagctgagcaagattgctgacagcgtgaacctgcccctggatgtggtgaagaagtggtttgagaagatgcaggccggccagatctctgtgcagagcagcgagcccagcagccctgagcccgggaaggtgaacatcccagccaagaacaatgaccagccccagagcgccaatgccaatgagccccaggacagcacagtgaacctgcagagccccctgaagatgaccaacagccctgtgctgcctgtgggcagcaccaccaacggcagccgcagcagcacccccagccccagccccctgaacctgagcagcagcaggaacacccagggctacctgtacacagctgagggcgcccaggaggagccccaggtggagcccctggacctgagcctgcccaagcagcagggcgagctgctggagaggagcaccatcacctctgtgtaccagaacagcgtgtacagcgtgcaggaggagcccctgaacctgagctgtgccaagaaggagccccagaaggacagctgtgtgacagattctgagcctgtggtgaatgtcatccccccatctgccaaccccatcaacatcgccatccccaccgtgacagcccagctgcccaccatcgtggccatcgctgaccagaacagcgtgccctgcctgcgggccctggccgccaacaagcagaccatcctgatcccccaggtggcctacacctacagcaccaccgtgtccccagctgtgcaggagccccccctgaaggtgatccagcccaatggaaaccaggatgagcggcaggacaccagcagcgagggcgtgtccaatgtggaggaccagaatgacagcgacagcaccccacccaagaagaagatgaggaagacagaaaatggcatgtatgcctgtgacctgtgtgacaagatcttccagaagagcagcagcctgctgcggcacaagtatgagcacacaggcaagaggcctcatgaatgtggcatctgcaagaaggccttcaagcacaagcaccacctgattgagcacatgaggctgcacagcggggagaagccctaccagtgtgacaagtgtgggaagcgcttcagccacagcggcagctacagccagcacatgaaccaccgctacagctactgcaagcgggaggccgaggagcgggacagcacagagcaggaggaggccggccctgagatcctgagcaatgaacatgtgggcgcccgggccagccccagccagggcgacagtgatgagcgggagagcctgacccgggaggaggatgaagattctgagaaggaggaggaggaggaggacaaggagatggaggagctgcaggaggagaaggaatgtgagaagccccagggagatgaggaggaggaggaggaggaggaggaggtggaggaggaggaggtggaggaggccgagaatgaaggagaggaggccaagacagagggcctgatgaaggatgacagagctgagagccaggccagcagcctgggccagaaggtgggggagagcagcgagcaggtgtctgaggagaagaccaatgaggcctag

SEQ ID NO: 69290 - DNA, 3174 bp, Artificial Sequence
  derived and/or modified sequence
atggccgacggcccccggtgcaagcggcggaagcaggccaacccccgtcgaaataacgggaaggagggacaggagattttaggcccagaggctcaagcagacgaagccggatgcactgtgaaagacgacgaatgcgagtctgatgctgagaatgagcaaaatcatgatcctaacgtcgaggagtttctccagcaacaggataccgctgtgatctttccagaggcccccgaggaggatcagagacaaggtacccctgaagctagcgggcacgatgagaacggaactccggacgctttctctcaattgctgacctgcccatattgtgaccggggatataagaggtttacatcactgaaggaacacatcaagtataggcatgaaaagaacgaagataacttcagctgctcactatgctcctatacatttgcctacagaacacaacttgaacggcatatgacatcccataagtcaggccgggaccagcgccatgtgactcagagtggctgcaaccgaaaatttaaatgcaccgagtgcggcaaggccttcaaatacaaacaccacctgaaagaacatctccggattcactcaggcgaaaagccctacgagtgtcccaattgcaaaaagagatttagccacagcggctcatattccagtcacattagctctaagaagtgcatcagcttgatcccagtgaacggccgcccacgtactggtctgaagacctctcagtgtagttctcccagcctatcagcctcacctgggagtccaacacggccacagatacgacagaaaattgagaacaagcctctccaagaacagctctccgtcaaccaaatcaagacagagcccgtggattacgagtttaaacctatcgtggtggcgagtggcatcaactgctccactcctctccagaacggcgtttttacaggagggggtccgctgcaggcaacaagtagtccccagggcatggtccaggcagtggtacttcccacagttggactggttagtcccatttccatcaatctgtctgatatccagaatgttctcaaggtcgccgtggacggcaatgttatacgtcaggtcttggagaataaccaggcaaacctagcaagtaaggagcaggagacaatcaacgcaagcccaatccagcagggcggccattcagtgatctctgcgatcagtctgccccttgtcgatcaggacgggacgactaagattatcataaactattcactcgagcagccaagccagttacaggtggttccgcagaaccttaagaaggagaaccctgtggctacgaacagttgtaagagcgagaagctgcccgaagatctgaccgtgaaaagtgagaaggacaagtctttcgaaggaggcgtgaacgattccacctgcttgttgtgtgatgattgcccgggagacatcaacgcgctaccagaactgaaacactacgacctgaagcagccaacacagcctcccccgctccccgcggctgaggctgaaaagcccgagagtagcgtatctagtgctactggagatggaaacttgagtccgtcacagccacctctcaaaaaccttctgtcgctgctaaaggcatactacgcccttaatgctcagccatcagccgaggagctctcaaaaatagccgacagcgtaaacctgcctctcgatgtcgtgaagaagtggtttgaaaagatgcaagctggccaaatttctgttcagtcctccgaaccctcttctcctgagccagggaaggtaaacatacccgcaaagaacaacgaccaaccacagagtgccaacgcaaatgagcctcaggactcgactgtgaatctccagtcccccctgaagatgacaaactcacctgttctgcctgtcggctccaccacaaacgggtcaagatccagcacccctagcccatctccgttaaacctgtccagtagccgaaatacacagggttacctttataccgcagaaggagcccaggaggagcctcaggtggagccactggaccttagtcttcccaaacaacaaggggaactcctcgaacggtcaacaatcacctcagtgtaccaaaactctgtgtacagcgttcaggaggaaccccttaacctgtcctgtgctaaaaaagagcctcaaaaagactcatgtgtgactgattctgagcctgtggtgaacgtcattccaccatcagccaatccaatcaatatcgccattccgaccgtgactgcgcaactgccaactatcgtagcaattgctgatcagaattccgttccctgtcttcgggctctcgcagccaataaacaaaccattcttatcccgcaggtggcgtatacatacagtaccacggtctcacctgctgtacaagagccacccctgaaggtgattcagcctaacggtaatcaggacgagcggcaggacacttcttctgaaggggtaagtaacgtcgaggaccaaaacgattctgacagtaccccccccaaaaaaaaaatgaggaaaaccgaaaatggaatgtacgcttgcgacctgtgtgacaagatcttccagaagtcaagctccctactgaggcataagtatgagcacactggcaaacgaccccacgagtgcgggatctgcaagaaggcctttaagcacaaacaccatctgattgaacatatgcgccttcactcaggcgagaagccttaccagtgtgataagtgcggaaagcggttctcccatagcggctcatactcacagcatatgaatcatagatattcctactgtaagagagaagcggaggagagggacagtacagaacaggaagaggctggtccggagattctgtcaaatgaacacgtcggcgcccgtgcatccccatcacagggcgacagcgacgaacgtgagtcactcacacgagaagaggacgaagattcagaaaaggaagaagaagaggaggataaagagatggaggaactccaggaggagaaggaatgcgagaagcctcagggtgatgaagaggaggaggaagaggaggaagaggtagaggaggaggaagtggaggaggccgaaaacgaaggcgaggaagcgaaaacagaaggcctcatgaaggatgacagagccgaaagtcaggcatcttctcttgggcagaaagtcggcgagtcttccgaacaggtctccgaggagaaaacaaacgaagcttag

SEQ ID NO: 69291 - DNA, 3174 bp, Artificial Sequence
  derived and/or modified sequence
atggcagacggcccacgctgcaagaggcgcaagcaagccaacccccgaaggaataatgggaaggagggtcaggagatcctcggtcccgaagctcaggccgatgaggccggatgcaccgtgaaggatgatgaatgtgaatccgacgcggagaatgaacagaaccacgacccgaatgtcgaggaatttttgcagcagcaggacacagctgtcatcttccccgaagcccctgaggaagaccagcgccaggggacaccagaagcgtccggccatgatgaaaacggcactcctgatgccttctctcaactactaacttgtccctactgcgaccggggatacaaacgcttcacatccttaaaggaacacattaaataccgccacgagaaaaatgaggacaatttctcctgcagtttgtgttcctacactttcgcttacagaacacagctggagaggcatatgacatcacacaagtcaggccgtgatcagcgtcatgtcacccagagcggttgtaacagaaaatttaagtgcaccgagtgcggtaaggcctttaagtataaacaccatctgaaggagcacctccggattcactctggggaaaagccctatgagtgccctaactgtaagaaacgcttttctcacagtggtagttatagttcccacatttcctctaagaagtgcatcagtttgattcccgtcaacgggcgaccgaggaccggcctgaaaacctcccagtgtagcagtccaagtctcagcgcttctccaggtagtcccacccgccctcagatccgacagaagatcgagaataagccactgcaagagcagttgtctgtaaaccagataaaaacagagcctgtggattacgaatttaagccaatcgttgttgcgtctggcataaattgctccactcccttgcaaaacggcgtgttcactgggggagggccactccaggccacgtcgtccccacagggcatggttcaggccgtggtgctgcccacagttggactcgtgtcccctatctccatcaatttgagcgatattcagaacgtattgaaagtggcagtcgacggcaacgtaattcgccaggtgctggagaacaatcaggcgaatctagcttccaaagaacaggaaaccattaacgcttcccccatccaacaaggtgggcactcagtcatcagtgccatctccctgcccctcgtggatcaggacgggaccaccaagataattatcaattatagcctggagcagcctagccaattgcaggtggtcccccaaaacctgaaaaaagagaatcccgtggctactaatagttgcaagtctgaaaagctcccggaagacctcaccgttaagagcgaaaaagataaaagtttcgagggcggtgtaaacgactcgacctgcttattgtgcgatgattgccctggcgatatcaatgcactgccggagctgaaacattatgacttaaagcagcctacccagccccctcctctgcccgcagctgaggccgagaagcctgaatcaagcgtctcaagtgccacaggtgatggtaatttgtctccaagccaaccaccactgaagaacttgctcagcctcctgaaggcctattacgcgttgaatgcccaaccttctgcagaagaactgtcaaagatcgctgacagcgttaatttgcccctcgatgtggttaaaaagtggtttgaaaagatgcaggctgggcagatttcagtacagagctctgagccctcctctcccgagcctgggaaggtaaatattcccgctaagaataatgaccagccacagtccgccaatgctaacgagccccaggattcaactgtgaacctgcaatcccccctcaaaatgacgaacagccctgtcctccccgtgggatccacaaccaatggatcccggagcagcacccccagcccctctcccctgaatctgtcatcaagccggaacacacaaggttacctgtatacggccgaaggggctcaggaggagccccaggtcgagccgctggaccttagcttacctaaacagcagggtgagttgctggagcggagcaccatcaccagcgtttatcagaattccgtctattcggtgcaggaggaacctctgaatctcagctgcgccaaaaaggagccccaaaaggatagctgcgttacagactctgagccagtggtgaacgtgatcccgccatccgccaatccgatcaacatcgctatccctaccgtgacagcccagctccccacaatcgtcgccatcgccgaccagaattcagtcccttgcctgcgcgcactagccgctaacaaacaaactattctgatcccgcaagtggcttacacgtatagcactaccgttagccctgccgtgcaggaacctcccttgaaagtgatccagcctaacggaaatcaggacgagcggcaggacacaagctctgaaggggtcagtaacgtggaggaccaaaatgacagtgatagtacgccaccaaagaaaaaaatgagaaagaccgaaaatggaatgtatgcatgcgatctatgtgataaaatttttcagaagtcctcaagcctgctgagacataagtatgaacacacagggaaacgcccacacgaatgcggcatttgtaaaaaggcgtttaaacacaagcatcatctgattgagcacatgcggctacattctggcgagaagccctaccagtgtgataagtgcggcaagagattttcgcatagcggatcatattcccagcatatgaatcatagatattcctattgcaaacgcgaggcggaagagagggacagtacagagcaggaggaggcaggccctgagatactttcaaatgaacatgtgggcgcacgggcttctcctagccagggcgactcagatgagagagagtctttaactagagaggaagatgaggatagcgagaaggaggaagaagaggaagacaaggaaatggaggagctgcaagaggaaaaggagtgtgagaaaccacagggcgatgaagaggaggaggaagaagaggaggaagtggaggaggaagaagtagaagaggccgaaaatgaaggagaagaggcaaagacagaaggtttgatgaaagatgacagagccgagagtcaggcttcctctctcggacagaaggtgggagaatcatccgaacaggtatccgaggaaaaaactaatgaagcttag

SEQ ID NO: 69292 - DNA, 3315 bp, Artificial Sequence
  derived and/or modified sequence
aagcgagaggatcatggcggatggccccaggtgtaagcgcagaaagcaggcgaacccgcggcgcaataacggaaaggaagggcaagaaatcctggggcctgaagctcaggcagatgaagcaggatgtacagtaaaagatgatgaatgcgagtcagatgcagaaaatgagcaaaaccatgatcctaatgttgaagagtttctacaacaacaagacactgctgtcatttttcctgaggcacctgaagaggaccagaggcagggcacaccagaagccagtggtcatgatgaaaatggaacaccagatgcattttcacaattactcacctgtccatattgtgatagaggctataaacgctttacctctctgaaagaacacattaaatatcgtcatgaaaagaatgaagataactttagttgctccctgtgcagttacacctttgcatacagaacccaacttgaacgtcacatgacatcacataaatcaggaagagatcaaagacatgtgacgcagtctgggtgtaatcgtaaattcaaatgcactgagtgtggaaaagctttcaaatacaaacatcacctaaaagagcacttaagaattcacagtggagagaagccatatgaatgcccaaactgcaagaaacgcttttcccattctggctcctatagctcacacataagcagtaagaaatgtatcagcttgatacctgtgaatgggcgaccaagaacaggactcaagacatctcagtgttcttcaccgtctctttcagcatcaccaggcagtcccacacgaccacagatacggcaaaagatagagaataaaccccttcaagaacaactttctgttaaccaaattaaaactgaacctgtggattatgaattcaaacccatagtggttgcttcaggaatcaactgttcaacccctttacaaaatggggttttcactggtggtggcccattacaggcaaccagttctcctcagggcatggtgcaagctgttgttctgccaacagttggtttggtgtctcccataagtatcaatttaagtgatattcagaatgtacttaaagtggcggtagatggtaatgtaataaggcaagtgttggagaataatcaagccaatcttgcatccaaagaacaagaaacaatcaatgcttcacccatacaacaaggtggccattctgttatttcagccatcagtcttcctttggttgatcaagatggaacaaccaaaattatcatcaactacagtcttgagcagcctagccaacttcaagttgttcctcaaaatttaaaaaaagaaaatccagtcgctacaaacagttgtaaaagtgaaaagttaccagaagatcttactgttaagtctgagaaggacaaaagctttgaagggggggtgaatgatagcacttgtcttctgtgtgatgattgtccaggagatattaatgcacttccagaattaaagcactatgacctaaagcagcctactcagcctcctccactccctgcagcagaagctgagaagcctgagtcctctgtttcatcagctactggagatggcaatttgtctcctagtcagccacctttaaagaacctcttgtctctcctaaaagcatattatgctttgaatgcacaaccaagtgcagaagagctctcaaaaattgctgattcagtaaacctaccactggatgtagtaaaaaagtggtttgaaaagatgcaagctggacagatttcagtgcagtcttctgaaccatcttctcctgaaccaggcaaagtaaatatccctgccaagaacaatgatcagcctcaatctgcaaatgcaaatgaaccccaggacagcacagtaaatctacaaagtcctttgaagatgactaactccccagttttaccagtgggatcaaccaccaatggttccagaagtagtacaccatccccatcacctctaaacctttcctcatccagaaatacacagggttacttgtacacagctgagggtgcacaagaagagccacaagtagaacctcttgatctttcactaccaaagcaacagggagaattattagaaaggtcaactatcactagtgtttaccagaacagtgtttattctgtccaggaagaacccttgaacttgtcttgcgcaaaaaaggagccacaaaaggacagttgtgttacagactcagaaccagttgtaaatgtaatcccaccaagtgccaaccccataaatatcgctatacctacagtcactgcccagttacccacaatcgtggccattgctgaccagaacagtgttccatgcttaagagcgctagctgccaataagcaaacgattctgattccccaggtggcatacacctactcaactacggtcagccctgcagtccaagaaccacccttgaaagtgatccagccaaatggaaatcaggatgaaagacaagatactagctcagaaggagtatcaaatgtagaggatcagaatgactctgattctacaccgcccaaaaagaaaatgcggaagacagaaaatggaatgtatgcttgtgatttgtgtgacaagatattccaaaagagtagttcattattgagacataaatatgaacacacaggtaaaagacctcatgagtgtggaatctgtaaaaaggcatttaaacacaaacatcatttgattgaacacatgcgattacattctggagaaaagccctatcaatgtgacaaatgtggaaagcgcttctcacactctgggtcttattctcaacacatgaatcatcgctactcctactgtaagagagaagcggaagaacgtgacagcacagagcaggaagaggcagggcctgaaatcctctcgaatgagcacgtgggtgccagggcgtctccctcacagggcgactcggacgagagagagagtttgacaagggaagaggatgaagacagtgaaaaagaggaagaggaggaggataaagagatggaagaattgcaggaagaaaaagaatgtgaaaaaccacaaggggatgaggaagaggaggaggaggaggaagaagtggaagaagaagaggtagaagaggcagagaatgagggagaagaagcaaaaactgaaggtctgatgaaggatgacagggctgaaagtcaagcaagcagcttaggacaaaaagtaggcgagagtagtgagcaagtgtctgaagaaaagacaaatgaagcctaatcgtttttctagaaggaaaataaattctaattgataatgaatttcgttcaatattatccttgcttttcatggaaacacagtaacctgtatgctgtgattcctgttcactactgtgtaaagtaaaaact

SEQ ID NO: 69293 - protein, 1125 aa, Artificial Sequence
  derived and/or modified sequence
MADGPRCKRRKQANPRRNNVTNYNTVVETNSDSDDEDKLHIVEEESVTDAADCEGVPEDDLPTDQTVLPGRSSEREGNAKNCWEDDTGKEGQEILGPEAQADEAGCTVKDDECESDAENEQNHDPNVEEFLQQQDTAVIFPEAPEEDQRQGTPEASGHDENGTPDAFSQLLTCPYCDRGYKRFTSLKEHIKYRHEKNEDNFSCSLCSYTFAYRTQLERHMTSHKSGRDQRHVTQSGCNRKFKCTECGKAFKYKHHLKEHLRIHSGEKPYECPNCKKRFSHSGSYSSHISSKKCISLIPVNGRPRTGLKTSQCSSPSLSASPGSPTRPQIRQKIENKPLQEQLSVNQIKTEPVDYEFKPIVVASGINCSTPLQNGVFTGGGPLQATSSPQGMVQAVVLPTVGLVSPISINLSDIQNVLKVAVDGNVIRQVLENNQANLASKEQETINASPIQQGGHSVISAISLPLVDQDGTTKIIINYSLEQPSQLQVVPQNLKKENPVATNSCKSEKLPEDLTVKSEKDKSFEGGVNDSTCLLCDDCPGDINALPELKHYDLKQPTQPPPLPAAEAEKPESSVSSATGDGNLSPSQPPLKNLLSLLKAYYALNAQPSAEELSKIADSVNLPLDVVKKWFEKMQAGQISVQSSEPSSPEPGKVNIPAKNNDQPQSANANEPQDSTVNLQSPLKMTNSPVLPVGSTTNGSRSSTPSPSPLNLSSSRNTQGYLYTAEGAQEEPQVEPLDLSLPKQQGELLERSTITSVYQNSVYSVQEEPLNLSCAKKEPQKDSCVTDSEPVVNVIPPSANPINIAIPTVTAQLPTIVAIADQNSVPCLRALAANKQTILIPQVAYTYSTTVSPAVQEPPLKVIQPNGNQDERQDTSSEGVSNVEDQNDSDSTPPKKKMRKTENGMYACDLCDKIFQKSSSLLRHKYEHTGKRPHECGICKKAFKHKHHLIEHMRLHSGEKPYQCDKCGKRFSHSGSYSQHMNHRYSYCKREAEERDSTEQEEAGPEILSNEHVGARASPSQGDSDERESLTREEDEDSEKEEEEEDKEMEELQEEKECEKPQGDEEEEEEEEEVEEEEVEEAENEGEEAKTEGLMKDDRAESQASSLGQKVGESSEQVSEEKTNEA

SEQ ID NO: 69294 - protein, 289 aa, Artificial Sequence
  derived and/or modified sequence
MADGPRCKRRKQANPRRNNVTNYNTVVETNSDSDDEDKLHIVEEESVTDAADCEGVPEDDLPTDQTVLPGRSSEREGNAKNCWEDDTGKEGQEILGPEAQADEAGCTVKDDECESDAENEQNHDPNVEEFLQQQDTAVIFPEAPEEDQRQGTPEASGHDENGTPDAFSQLLTCPYCDRGYKRFTSLKEHIKYRHEKNEDNFSCSLCSYTFAYRTQLERHMTSHKSGRDQRHVTQSGCNRKFKCTECGKAFKYKHHLKEHLRIHSGEKPYECPNCKKRFSHSGSYSSHIS

SEQ ID NO: 69295 - DNA, 3378 bp, Artificial Sequence
  derived and/or modified sequence
atggccgacggccccagatgcaagagaagaaagcaggccaaccccagaagaaacaacgtgaccaactacaacaccgtggtggagaccaacagcgacagcgacgacgaggacaagctgcacatcgtggaggaggagagcgtgaccgacgccgccgactgcgagggcgtgcccgaggacgacctgcccaccgaccagaccgtgctgcccggcagaagcagcgagagagagggcaacgccaagaactgctgggaggacgacaccggcaaggagggccaggagatcctgggccccgaggcccaggccgacgaggccggctgcaccgtgaaggacgacgagtgcgagagcgacgccgagaacgagcagaaccacgaccccaacgtggaggagttcctgcagcagcaggacaccgccgtgatcttccccgaggcccccgaggaggaccagagacagggcacccccgaggccagcggccacgacgagaacggcacccccgacgccttcagccagctgctgacctgcccctactgcgacagaggctacaagagattcaccagcctgaaggagcacatcaagtacagacacgagaagaacgaggacaacttcagctgcagcctgtgcagctacaccttcgcctacagaacccagctggagagacacatgaccagccacaagagcggcagagaccagagacacgtgacccagagcggctgcaacagaaagttcaagtgcaccgagtgcggcaaggccttcaagtacaagcaccacctgaaggagcacctgagaatccacagcggcgagaagccctacgagtgccccaactgcaagaagagattcagccacagcggcagctacagcagccacatcagcagcaagaagtgcatcagcctgatccccgtgaacggcagacccagaaccggcctgaagaccagccagtgcagcagccccagcctgagcgccagccccggcagccccaccagaccccagatcagacagaagatcgagaacaagcccctgcaggagcagctgagcgtgaaccagatcaagaccgagcccgtggactacgagttcaagcccatcgtggtggccagcggcatcaactgcagcacccccctgcagaacggcgtgttcaccggcggcggccccctgcaggccaccagcagcccccagggcatggtgcaggccgtggtgctgcccaccgtgggcctggtgagccccatcagcatcaacctgagcgacatccagaacgtgctgaaggtggccgtggacggcaacgtgatcagacaggtgctggagaacaaccaggccaacctggccagcaaggagcaggagaccatcaacgccagccccatccagcagggcggccacagcgtgatcagcgccatcagcctgcccctggtggaccaggacggcaccaccaagatcatcatcaactacagcctggagcagcccagccagctgcaggtggtgccccagaacctgaagaaggagaaccccgtggccaccaacagctgcaagagcgagaagctgcccgaggacctgaccgtgaagagcgagaaggacaagagcttcgagggcggcgtgaacgacagcacctgcctgctgtgcgacgactgccccggcgacatcaacgccctgcccgagctgaagcactacgacctgaagcagcccacccagcccccccccctgcccgccgccgaggccgagaagcccgagagcagcgtgagcagcgccaccggcgacggcaacctgagccccagccagccccccctgaagaacctgctgagcctgctgaaggcctactacgccctgaacgcccagcccagcgccgaggagctgagcaagatcgccgacagcgtgaacctgcccctggacgtggtgaagaagtggttcgagaagatgcaggccggccagatcagcgtgcagagcagcgagcccagcagccccgagcccggcaaggtgaacatccccgccaagaacaacgaccagccccagagcgccaacgccaacgagccccaggacagcaccgtgaacctgcagagccccctgaagatgaccaacagccccgtgctgcccgtgggcagcaccaccaacggcagcagaagcagcacccccagccccagccccctgaacctgagcagcagcagaaacacccagggctacctgtacaccgccgagggcgcccaggaggagccccaggtggagcccctggacctgagcctgcccaagcagcagggcgagctgctggagagaagcaccatcaccagcgtgtaccagaacagcgtgtacagcgtgcaggaggagcccctgaacctgagctgcgccaagaaggagccccagaaggacagctgcgtgaccgacagcgagcccgtggtgaacgtgatcccccccagcgccaaccccatcaacatcgccatccccaccgtgaccgcccagctgcccaccatcgtggccatcgccgaccagaacagcgtgccctgcctgagagccctggccgccaacaagcagaccatcctgatcccccaggtggcctacacctacagcaccaccgtgagccccgccgtgcaggagccccccctgaaggtgatccagcccaacggcaaccaggacgagagacaggacaccagcagcgagggcgtgagcaacgtggaggaccagaacgacagcgacagcaccccccccaagaagaagatgagaaagaccgagaacggcatgtacgcctgcgacctgtgcgacaagatcttccagaagagcagcagcctgctgagacacaagtacgagcacaccggcaagagaccccacgagtgcggcatctgcaagaaggccttcaagcacaagcaccacctgatcgagcacatgagactgcacagcggcgagaagccctaccagtgcgacaagtgcggcaagagattcagccacagcggcagctacagccagcacatgaaccacagatacagctactgcaagagagaggccgaggagagagacagcaccgagcaggaggaggccggccccgagatcctgagcaacgagcacgtgggcgccagagccagccccagccagggcgacagcgacgagagagagagcctgaccagagaggaggacgaggacagcgagaaggaggaggaggaggaggacaaggagatggaggagctgcaggaggagaaggagtgcgagaagccccagggcgacgaggaggaggaggaggaggaggaggaggtggaggaggaggaggtggaggaggccgagaacgagggcgaggaggccaagaccgagggcctgatgaaggacgacagagccgagagccaggccagcagcctgggccagaaggtgggcgagagcagcgagcaggtgagcgaggagaagaccaacgaggcctag

SEQ ID NO: 69296 - DNA, 870 bp, Artificial Sequence
  derived and/or modified sequence
atggccgacggccccagatgcaagagaagaaagcaggccaaccccagaagaaacaacgtgaccaactacaacaccgtggtggagaccaacagcgacagcgacgacgaggacaagctgcacatcgtggaggaggagagcgtgaccgacgccgccgactgcgagggcgtgcccgaggacgacctgcccaccgaccagaccgtgctgcccggcagaagcagcgagagagagggcaacgccaagaactgctgggaggacgacaccggcaaggagggccaggagatcctgggccccgaggcccaggccgacgaggccggctgcaccgtgaaggacgacgagtgcgagagcgacgccgagaacgagcagaaccacgaccccaacgtggaggagttcctgcagcagcaggacaccgccgtgatcttccccgaggcccccgaggaggaccagagacagggcacccccgaggccagcggccacgacgagaacggcacccccgacgccttcagccagctgctgacctgcccctactgcgacagaggctacaagagattcaccagcctgaaggagcacatcaagtacagacacgagaagaacgaggacaacttcagctgcagcctgtgcagctacaccttcgcctacagaacccagctggagagacacatgaccagccacaagagcggcagagaccagagacacgtgacccagagcggctgcaacagaaagttcaagtgcaccgagtgcggcaaggccttcaagtacaagcaccacctgaaggagcacctgagaatccacagcggcgagaagccctacgagtgccccaactgcaagaagagattcagccacagcggcagctacagcagccacatcagctag

SEQ ID NO: 69297 - DNA, 1932 bp, Artificial Sequence
  derived and/or modified sequence
atggccgacggccccagatgcaagagaagaaagcaggccaaccccagaagaaacaacggcacccccgacgccttcagccagctgctgacctgcccctactgcgacagaggctacaagagattcaccagcctgaaggagcacatcaagtacagacacgagaagaacgaggacaacttcagctgcagcctgtgcagctacaccttcgcctacagaacccagctggagagacacatgaccagccacaagagcggcagagaccagagacacgtgacccagagcggctgcaacagaaagttcaagtgcaccgagtgcggcaaggccttcaagtacaagcaccacctgaaggagcacctgagaatccacagcggcgagaagccctacgagtgccccaactgcaagaagagattcagccacagcggcagctacagcagccacatcagcagcaagaagtgcatcagcctgatccccgtgaacggcagacccagaaccggcctgaagaccagccagtgcagcagccccagcctgagcgccagccccggcagccccaccagaccccagatcagacagaagatcgagaacaagcccctgcaggagcagctgagcgtgaaccagatcaagaccgagcccgtggactacgagttcaagcccatcgtggtggccagcggcatcaactgcagcacccccctgcagaacggcgtgttcaccggcggcggccccctgcaggccaccagcagcccccagggcatggtgcaggccgtggtgctgcccaccgtgggcctggtgagccccatcagcatcaacctgagcgacatccagaacgtgctgaaggtggccgtggacggcaacgtgatcagacaggtgctggagaacaaccaggccaacctggccagcaaggagcaggagaccatcaacgccagccccatccagcagggcggccacagcgtgatcagcgccatcagcctgcccctggtggaccaggacggcaccaccaagatcatcatcaactacagcctggagcagcccagccagctgcaggtggtgccccagaacctgaagaaggagaaccccgtggccaccaacagctgcaagagcgagaagctgcccgaggacctgaccgtgaagagcgagaaggacaagagcttcgagggcggcgtgaacgacagcacctgcctgctgtgcgacgactgccccggcgacatcaacgccctgcccgagctgaagcactacgacctgaagcagcccacccagcccccccccctgcccgccgccgaggccgagaagcccgagagcagcgtgagcagcgccaccggcgacggcaacctgagccccagccagccccccctgaagaacctgctgagcctgctgaaggcctactacgccctgaacgcccagcccagcgccgaggagctgagcaagatcgccgacagcgtgaacctgcccctggacgtggtgaagaagtggttcgagaagatgcaggccggccagatcagcgtgcagagcagcgagcccagcagccccgagcccggcaaggtgaacatccccgccaagaacaacgaccagccccagagcgccaacgccaacgagccccaggacagcaccgtgaacctgcagagccccctgaagatgaccaacagccccgtgctgcccgtgggcagcaccaccaacggcagcagaagcagcacccccagccccagccccctgaacctgagcagcagcagaaacacccagggctacctgtacaccgccgagggcgcccaggaggagccccaggtggagcccctggacctgagcctgcccaagcagcagggcgaggaggccaagaccgagggcctgatgaaggacgacagagccgagagccaggccagcagcctgggccagaaggtgggcgagagcagcgagcaggtgagcgaggagaagaccaacgaggcctag

SEQ ID NO: 69298 - DNA, 3048 bp, Artificial Sequence
  derived and/or modified sequence
atgatgaacgccagccagatgcagaagatgagcaagaccatgatcctgatgctgaagagcttctacaacaacaagaccctgctgagcttcttcctgagacacctgaagagaaccagaggcagagcccaccagaagcccgtggtgatgatgaagatggagcaccagatgcacttccacaactacagccccgtgcacatcgtgatcggctacaagagattcaccagcctgaaggagcacatcaagtacagacacgagaagaacgaggacaacttcagctgcagcctgtgcagctacaccttcgcctacagaacccagctggagagacacatgaccagccacaagagcggcagagaccagagacacgtgacccagagcggctgcaacagaaagttcaagtgcaccgagtgcggcaaggccttcaagtacaagcaccacctgaaggagcacctgagaatccacagcggcgagaagccctacgagtgccccaactgcaagaagagattcagccacagcggcagctacagcagccacatcagcagcaagaagtgcatcagcctgatccccgtgaacggcagacccagaaccggcctgaagaccagccagtgcagcagccccagcctgagcgccagccccggcagccccaccagaccccagatcagacagaagatcgagaacaagcccctgcaggagcagctgagcgtgaaccagatcaagaccgagcccgtggactacgagttcaagcccatcgtggtggccagcggcatcaactgcagcacccccctgcagaacggcgtgttcaccggcggcggccccctgcaggccaccagcagcccccagggcatggtgcaggccgtggtgctgcccaccgtgggcctggtgagccccatcagcatcaacctgagcgacatccagaacgtgctgaaggtggccgtggacggcaacgtgatcagacaggtgctggagaacaaccaggccaacctggccagcaaggagcaggagaccatcaacgccagccccatccagcagggcggccacagcgtgatcagcgccatcagcctgcccctggtggaccaggacggcaccaccaagatcatcatcaactacagcctggagcagcccagccagctgcaggtggtgccccagaacctgaagaaggagaaccccgtggccaccaacagctgcaagagcgagaagctgcccgaggacctgaccgtgaagagcgagaaggacaagagcttcgagggcggcgtgaacgacagcacctgcctgctgtgcgacgactgccccggcgacatcaacgccctgcccgagctgaagcactacgacctgaagcagcccacccagcccccccccctgcccgccgccgaggccgagaagcccgagagcagcgtgagcagcgccaccggcgacggcaacctgagccccagccagccccccctgaagaacctgctgagcctgctgaaggcctactacgccctgaacgcccagcccagcgccgaggagctgagcaagatcgccgacagcgtgaacctgcccctggacgtggtgaagaagtggttcgagaagatgcaggccggccagatcagcgtgcagagcagcgagcccagcagccccgagcccggcaaggtgaacatccccgccaagaacaacgaccagccccagagcgccaacgccaacgagccccaggacagcaccgtgaacctgcagagccccctgaagatgaccaacagccccgtgctgcccgtgggcagcaccaccaacggcagcagaagcagcacccccagccccagccccctgaacctgagcagcagcagaaacacccagggctacctgtacaccgccgagggcgcccaggaggagccccaggtggagcccctggacctgagcctgcccaagcagcagggcgagctgctggagagaagcaccatcaccagcgtgtaccagaacagcgtgtacagcgtgcaggaggagcccctgaacctgagctgcgccaagaaggagccccagaaggacagctgcgtgaccgacagcgagcccgtggtgaacgtgatcccccccagcgccaaccccatcaacatcgccatccccaccgtgaccgcccagctgcccaccatcgtggccatcgccgaccagaacagcgtgccctgcctgagagccctggccgccaacaagcagaccatcctgatcccccaggtggcctacacctacagcaccaccgtgagccccgccgtgcaggagccccccctgaaggtgatccagcccaacggcaaccaggacgagagacaggacaccagcagcgagggcgtgagcaacgtggaggaccagaacgacagcgacagcaccccccccaagaagaagatgagaaagaccgagaacggcatgtacgcctgcgacctgtgcgacaagatcttccagaagagcagcagcctgctgagacacaagtacgagcacaccggcaagagaccccacgagtgcggcatctgcaagaaggccttcaagcacaagcaccacctgatcgagcacatgagactgcacagcggcgagaagccctaccagtgcgacaagtgcggcaagagattcagccacagcggcagctacagccagcacatgaaccacagatacagctactgcaagagagaggccgaggagagagacagcaccgagcaggaggaggccggccccgagatcctgagcaacgagcacgtgggcgccagagccagccccagccagggcgacagcgacgagagagagagcctgaccagagaggaggacgaggacagcgagaaggaggaggaggaggaggacaaggagatggaggagctgcaggaggagaaggagtgcgagaagccccagggcgacgaggaggaggaggaggaggaggaggaggtggaggaggaggaggtggaggaggccgagaacgagggcgaggaggccaagaccgagggcctgatgaaggacgacagagccgagagccaggccagcagcctgggccagaaggtgggcgagagcagcgagcaggtgagcgaggagaagaccaacgaggcctag

SEQ ID NO: 69299 - DNA, 3378 bp, Artificial Sequence
  derived and/or modified sequence
atggctgacggtccacgatgcaagcgcagaaagcaagctaaccctaggagaaataatgtcacaaactataataccgtggtggagaccaatagcgatagcgacgacgaggataaactccatattgtcgaagaggagagcgtgaccgatgcagcagactgcgagggagtgcccgaagatgatttgccaaccgaccaaactgtgttgcctgggcgatcatctgagcgggaaggtaacgccaaaaactgttgggaggatgacaccggtaaagaaggacaggagatcctaggtcctgaagctcaggcagatgaggctggctgtacggtgaaagacgacgagtgtgagtccgatgctgaaaacgagcaaaaccacgacccgaatgttgaggagttcctccagcagcaagacaccgccgtgatttttccagaggccccggaggaagatcaaagacagggcacacccgaggcgagtgggcatgacgagaatggaacacccgacgcttttagccagctcctaacctgtccatattgcgatcgtggctacaagaggtttactagccttaaggagcacattaagtacaggcacgagaaaaatgaggacaatttcagctgttctctttgctcctatacgttcgcctatcggactcaactcgaacgccacatgactagtcacaaatccggacgcgatcaacgccacgtgacccagtccggttgcaaccgaaaatttaaatgcacagagtgcggcaaagcctttaaatataagcaccacctgaaggaacacctgaggattcactcaggggaaaaaccctatgaatgtcccaattgcaagaaaagattttcccacagtgggtcttactctagccatatatcatccaagaagtgcatctcactgattcctgttaatggacgtccacggactggactgaagacatctcagtgcagctcaccatcactttccgcgagcccgggctccccgactcgcccacaaataagacaaaagatcgagaacaagccactccaggagcagctctccgtcaatcagataaaaacagaaccggtggactacgagttcaagccaatcgtcgtagcaagcgggatcaactgttctactcccttgcagaacggagtctttaccggcggtgggccattgcaggctacctcctctcctcaaggtatggtacaggctgtggtgctgcccacggtcggcctcgtctcccctatcagcataaacctgtccgatatacaaaacgtgctgaaggtggccgtggacgggaatgtgatcagacaggtcctggagaacaatcaggccaacttagccagcaaggagcaggaaactataaacgcctctcccatacaacaggggggacacagcgtcatatccgctatctctcttcctctggtggatcaggatgggaccacgaagatcattattaattactctcttgagcagccatctcaactgcaggtggtgccgcaaaacttgaaaaaagagaatcccgtcgctacaaacagctgtaagtccgagaaactaccagaagatttgactgtgaagtctgaaaaggacaaatctttcgagggcggagtcaatgactccacatgtctgctgtgtgatgactgtccaggcgacataaatgccttgcctgaactgaaacattacgacttgaaacagcccactcagccccctcccctccccgccgctgaagcggagaagccggaatcatctgtatcctccgcaactggtgatggaaatctcagcccgtcccaaccccccctcaaaaacctcctgagcctgttgaaggcctattacgctcttaacgcccagccaagcgcggaggagctttctaagattgccgattccgtgaatctgccattggatgtggtgaaaaagtggtttgaaaagatgcaggcagggcagatctctgtgcagagctctgaacccagctcccccgagccaggaaaggttaatatcccggccaaaaacaatgatcaaccccaatctgccaatgccaacgagcctcaagactcaaccgtcaacctgcagtcccccctgaaaatgaccaatagccctgtgttacctgttggatccacaaccaatggctccaggtcttctactccaagtccgtcaccactgaatttatcctcaagtaggaacactcagggatatctttacacggctgagggcgctcaggaggagccgcaagtggagccgctcgatctctcactcccgaaacaacaaggagagttgctcgagaggagtaccatcaccagcgtgtaccagaattccgtgtatagtgtgcaagaggagcccctgaatctgagctgtgcaaagaaggagccacagaaagattcatgcgtaactgattcagagccggtcgtcaatgtcatcccgccttccgccaacccaatcaacattgccatccccactgtcactgctcaactacccacaatcgtggccatcgccgatcagaacagtgtgccctgcttgcgcgcgctggccgccaataagcaaaccattttgatacctcaggttgcctacacctactctaccaccgtttctcccgcagtccaggagcctccattgaaggtaattcaaccgaatggcaatcaggatgaaaggcaagatacaagctctgaaggcgtctccaacgtcgaagatcaaaatgacagcgactccacacctccaaagaaaaagatgcgtaagacagaaaatggcatgtacgcttgcgacctgtgtgataaaatttttcagaaatccagtagcctcctccgccataagtacgaacacaccggaaagcggccccacgaatgcggcatctgtaagaaagcctttaagcacaagcaccacctcatagagcatatgcgcctccactcaggagagaagccttaccagtgcgacaaatgcgggaagcgcttcagccacagcggctcctattctcagcacatgaatcacagatattcatattgcaagagggaggcagaggagagggactcaaccgaacaagaagaggcaggccctgaaatcctctcaaatgaacacgtaggggcccgggcctcaccttctcagggcgattctgacgaacgtgagtccctcacccgggaggaggacgaggattctgagaaagaggaggaagaagaggataaagagatggaagaattgcaggaggagaaagaatgtgagaaacctcagggtgacgaagaagaggaggaggaagaagaggaggttgaggaggaggaagttgaggaagcagaaaatgagggtgaggaggcaaaaaccgaggggcttatgaaggatgacagggccgagtcccaggcaagctctctgggccagaaggtcggggaaagcagcgagcaggtgagcgaagagaagaccaacgaagcttag

SEQ ID NO: 69300 - DNA, 870 bp, Artificial Sequence
  derived and/or modified sequence
atggcagacggtccacgttgtaagcggcgtaaacaagcaaatccaagacgtaataatgtgaccaactataacaccgtggtggagactaattccgactcagatgatgaggataaattgcatatcgtagaggaggagagcgtcacggacgctgccgattgcgaaggagtcccggaagatgacctcccgacggaccagaccgtgctacctggtaggtcctctgagcgcgaaggcaatgcgaagaattgttgggaggatgacacagggaaggaaggccaggagatcctcggtcctgaagcccaggctgacgaagctgggtgtactgttaaggatgacgagtgtgaatcagacgcagaaaatgagcagaaccatgatcccaatgttgaggaattcttgcagcagcaggacacagcggtgattttccccgaggcccctgaggaggatcagaggcagggaacaccagaagccagtggacacgacgaaaacggaaccccggacgccttttcacagctgttgacatgtccctattgtgaccgcggttacaaacggttcaccagtctaaaggagcacatcaagtatagacatgaaaagaacgaggataacttttcatgtagtctctgcagttacacctttgcctatcggacccagctcgagcgccatatgacaagtcacaaaagtgggagagatcagcgccatgtaacccaaagcggctgcaataggaaattcaagtgtactgaatgcgggaaagcttttaaatacaagcatcatcttaaagaacatttgcgcattcacagcggggaaaagccttacgagtgcccaaattgcaaaaagcgcttctcgcattctggcagttactctagtcacatcagttag

SEQ ID NO: 69301 - DNA, 1932 bp, Artificial Sequence
  derived and/or modified sequence
atggccgatggacctagatgcaagagacggaagcaggccaacccgcggcgcaataacggtactcccgatgcgttttctcagttgctgacctgtccgtactgcgatcgagggtacaaaagattcacatctctcaaggaacacatcaaatatcgccacgaaaagaacgaggacaacttttcatgcagcttgtgttcttataccttcgcttatcggacccaactcgaacgtcacatgacgtcacacaaaagcggaagggatcaaagacacgtcactcagtcggggtgtaatagaaagtttaaatgtaccgaatgcgggaaagcattcaagtataagcatcacctcaaagaacacctgcgcattcattcaggggaaaagccttacgagtgccctaattgcaaaaagaggttttctcactcaggaagctacagctctcacatttcctccaagaaatgcatctctcttatccctgtaaacggtaggccccgtaccggattgaaaacatcccaatgcagctctccctccctttctgcatccccgggctcaccaacacgaccccagatacgacagaagatcgagaataaaccacttcaggaacagctgtccgtcaaccagataaagactgagcccgtcgattatgaatttaaacccatcgtggttgcctccggcattaactgctctacaccattgcaaaatggcgtgttcaccggcggcggtcctctgcaggctacatcgagtcctcagggaatggtgcaggccgtcgttctaccaaccgtagggctggtgtctcccataagtatcaatctgagcgacatccagaatgttctgaaggtagcggtggatggcaacgtgatccgccaggtacttgagaataaccaggcgaatctggccagtaaggaacaagagaccattaacgctagccccatccaacagggtggccacagtgtgatttctgcaataagtctaccgctcgtggatcaggatgggacaactaagatcataatcaattatagcctggaacagcccagccaactgcaggtcgtaccccagaatcttaagaaggaaaatcccgtcgcaacaaacagctgtaaaagcgaaaagctgccggaggatctcaccgtgaagtcagaaaaggacaagtctttcgagggcggcgtgaatgatagtacttgcctgctgtgtgacgactgtcctggagacataaatgcactgccagagttgaaacattatgatctgaagcagcctacacagccgccaccgctgccggccgccgaggccgaaaaaccggagagctcagtctccagtgcaactggtgacggtaacctctctccatcccagcctccactgaagaacctgctgtccttactgaaggcttactatgcacttaacgcccaaccatcagctgaggagctgtctaagatcgccgactcagtgaatttgcctctcgacgtggtcaagaaatggttcgaaaagatgcaggctggacagatctcggtccaaagctccgagccaagctcccccgaacctggaaaagttaacataccggcaaaaaacaacgaccagcctcagagcgccaatgcaaacgagccacaggatagcaccgtgaacttgcagtctccactgaagatgacaaattcgccagtcctgcctgtggggtctacaacgaatggaagccgatcttctacaccaagcccatccccactgaatttgtcttcctctcggaatacccaggggtatttatatacagcagaaggggctcaggaagagcctcaggtcgagccccttgacttgtctttacccaaacagcagggcgaggaggctaagaccgagggtctgatgaaggacgaccgagccgagtcccaggcgagttccctcgggcaaaaagtgggcgaatctagcgagcaggtgtccgaggaaaaaacaaatgaagcatag

SEQ ID NO: 69302 - DNA, 3048 bp, Artificial Sequence
  derived and/or modified sequence
atgatgaacgccagccaaatgcagaagatgtccaagactatgattttaatgttgaaaagcttctataataacaaaacactactgtcattctttctgcgccatttgaagcgcactcgtggaagggcacaccagaagccagtggtcatgatgaaaatggaacaccaaatgcactttcacaattacagccctgtccacatcgtaatcggctacaaacggtttacaagcctaaaagagcatattaagtatcgccacgaaaagaatgaggacaattttagctgctccctctgcagctacacttttgcctatcggacgcaattggagcgtcatatgaccagtcacaagagtggccgcgaccagagacatgtgactcagtccgggtgcaataggaaattcaagtgtacagaatgtggaaaagcatttaaatataaacatcatcttaaagaacatctccgcatccactctggtgaaaagccctatgaatgtccaaactgcaagaaacgtttctcgcactccgggtcttattcttctcacatctcttcgaagaagtgtataagccttatacccgtcaacgggagaccacgaactggactcaaaacaagccaatgctcttcgccctctctcagcgcttcccccgggtctcccaccaggcctcagatcagacaaaagatcgaaaacaagccactgcaggagcagcttagtgtgaaccagattaagaccgagcctgtggattacgaatttaaacccatagtggtagcttccggcatcaactgtagtactccactgcagaacggggtgttcaccggcggaggccccctccaggcgactagctcaccccaagggatggtgcaggcggtagtgctccctaccgttggactggtgagccctatctctatcaacttgtctgatatccagaatgtgctgaaggtggcggtggatgggaatgtcatcaggcaggtgctagagaataaccaggcaaatcttgccagtaaagaacaggagaccatcaacgcaagccctattcagcaaggggggcactctgtcatcagcgccatcagcctgcctctggtagatcaggacggcacaacgaagatcattatcaactattccctggagcagccatcacagctgcaagtcgtgccccaaaatttgaagaaggagaatccagtggccaccaactcgtgcaagtctgagaagcttcctgaagatttgacagtgaaaagcgaaaaagacaagtcattcgaaggcggagtcaatgacagcacgtgtctgctgtgcgatgattgtcccggagacataaatgcacttccggagctcaaacactacgatctgaagcagcccacacagcctcccccactgcctgctgcggaagcggagaagcccgagagcagcgtgagctcggctacaggagatgggaacttgagccctagtcaacctcccctgaaaaatctattgtctctgctgaaagcatactatgcactcaatgcgcagccctctgcagaagagttgtcaaagatcgcagactctgtaaacctccccctagatgtcgtgaagaagtggtttgaaaagatgcaggcaggccagattagcgtgcaatccagcgaaccctccagtccagaaccggggaaagtgaatattccagccaagaataatgatcagccccagagcgccaacgctaacgagccccaagatagcacagttaatctccaaagcccgctgaaaatgacaaattcaccagtgctccctgtgggttctacaaccaatggttctaggtctagcacacccagtccctcgcccctgaatctgagctcatcgcggaatacccagggatacctctacaccgccgagggcgcccaggaggagccacaggtcgaacctctagacttgtcgctccccaagcaacaaggagagcttcttgagaggagcactattacaagcgtgtaccaaaactccgtgtactccgtccaagaagagcccttgaacctatcctgtgccaagaaagagccgcagaaagactcttgcgtcacagattccgaacccgttgtgaatgtgatcccccccagcgcaaacccaatcaacattgcgatccctaccgtcaccgcccagttacctaccattgtggcaattgctgatcaaaactctgtgccttgcctgagggccttggcggccaacaagcagactattttgatacctcaagtggcttacacttacagtactactgtctcgcctgctgttcaggaaccaccattaaaagttatccagcctaacgggaaccaagacgaacggcaagacacatcgtccgaaggtgtctcgaacgtggaagaccagaacgacagtgatagcacccctcctaagaagaaaatgagaaagacagaaaatggcatgtacgcctgcgatctgtgtgataagatttttcaaaagagctcatcattattacgccacaaatatgagcacaccgggaagagaccccatgagtgcgggatatgcaagaaggccttcaagcataagcatcatctgatagagcacatgcgtcttcacagcggagagaagccctatcagtgtgataaatgcgggaagcgatttagtcacagtggcagctactcccagcacatgaatcatcggtatagttattgcaagcgcgaagcggaagagcgagactcaaccgaacaggaggaagctggtcccgagatcctctcaaatgaacacgtaggagccagggcctcccctagccagggcgacagcgacgagcgcgaatccctgacccgcgaggaggacgaagactctgagaaagaagaagaggaggaggacaaggagatggaagagctgcaggaagagaaagagtgcgaaaagccccaaggggatgaggaagaggaggaggaagaggaggaggtcgaggaggaggaggtcgaggaggccgagaacgagggcgaagaagccaagaccgaaggattaatgaaagacgacagggctgagtcccaggcatcctctctgggacagaaggttggcgagtccagtgagcaggtttccgaggagaaaacaaacgaggcttag

SEQ ID NO: 69303 - DNA, 3378 bp, Artificial Sequence
  derived and/or modified sequence
atggctgatggcccccgctgcaagaggaggaagcaggccaaccccaggagaaataatgtgaccaactacaacacagtggtggagaccaacagcgacagtgatgatgaggacaagctgcacatcgtggaggaggagagcgtgacagatgctgctgactgtgaaggagtgcctgaagatgacctgcccacagaccagacagtgctgcccggccgcagcagcgagcgggagggcaatgccaagaactgctgggaggatgacaccgggaaggagggccaggagatcctgggccctgaggcccaggctgatgaggccggctgcaccgtgaaggatgatgaatgtgagagtgatgctgaaaatgagcagaaccacgaccccaacgtggaggagttcctgcagcagcaggacacagctgtgatcttccctgaggcccctgaggaggaccagaggcagggcaccccagaggccagcggccatgatgaaaatggcaccccagatgccttcagccagctgctgacctgcccctactgtgaccggggctacaagcgcttcaccagcctgaaggagcacatcaagtacagacatgagaagaatgaagacaacttcagctgcagcctgtgcagctacacctttgcctaccgcacccagctggagcggcacatgaccagccacaagagcggccgggaccagagacatgtgacccagagcggctgcaacaggaagttcaagtgcacagaatgtgggaaggccttcaagtacaagcaccacctgaaggagcacctgcgcatccacagcggggagaagccctatgagtgccccaactgcaagaagcgcttcagccacagcggcagctacagcagccacatcagcagcaagaagtgcatcagcctcatccctgtgaatggccggcccaggacaggcctgaagaccagccagtgcagcagccccagcctgagcgccagccctggcagccccacccggccccagatccggcagaagattgagaacaagcccctgcaggagcagctgtctgtgaaccagatcaagacagagcctgtggactatgagttcaagcccatcgtggtggccagcggcatcaactgcagcacccccctgcagaatggagtcttcaccggcggcggccccctgcaggccaccagcagcccccagggcatggtgcaggccgtggtgctgcccaccgtgggcctggtgagccccatcagcatcaacctgagtgacatccagaatgtgctgaaggtggccgtggatggaaatgtcatccggcaggtgctggagaacaaccaggccaacctggccagcaaggagcaggagaccatcaatgccagccccatccagcagggcggccacagcgtcatcagcgccatcagcctgcccctggtggaccaggacggcaccaccaagatcatcatcaactacagcctggagcagcccagccagctgcaggtggtgccccagaacctgaagaaggagaaccctgtggccaccaacagctgcaagtctgagaagctgcctgaggacctgactgtgaagtctgagaaggacaagagctttgaaggaggagtgaatgacagcacctgcctgctgtgtgatgactgccctggggacatcaatgccctgcctgagctgaagcactatgacctgaagcagcccacccagcccccacccctgcctgctgctgaggccgagaagccagagagctctgtgagcagcgccactggagatggcaacctgagccccagccagccccccctgaagaacctgctgagcctgctgaaggcctactatgccctgaatgcccagcccagcgctgaggagctgagcaagattgctgacagcgtgaacctgcccctggatgtggtgaagaagtggtttgagaagatgcaggccggccagatctctgtgcagagcagcgagcccagcagccctgagcccgggaaggtgaacatcccagccaagaacaatgaccagccccagagcgccaatgccaatgagccccaggacagcacagtgaacctgcagagccccctgaagatgaccaacagccctgtgctgcctgtgggcagcaccaccaacggcagccgcagcagcacccccagccccagccccctgaacctgagcagcagcaggaacacccagggctacctgtacacagctgagggcgcccaggaggagccccaggtggagcccctggacctgagcctgcccaagcagcagggcgagctgctggagaggagcaccatcacctctgtgtaccagaacagcgtgtacagcgtgcaggaggagcccctgaacctgagctgtgccaagaaggagccccagaaggacagctgtgtgacagattctgagcctgtggtgaatgtcatccccccatctgccaaccccatcaacatcgccatccccaccgtgacagcccagctgcccaccatcgtggccatcgctgaccagaacagcgtgccctgcctgcgggccctggccgccaacaagcagaccatcctgatcccccaggtggcctacacctacagcaccaccgtgtccccagctgtgcaggagccccccctgaaggtgatccagcccaatggaaaccaggatgagcggcaggacaccagcagcgagggcgtgtccaatgtggaggaccagaatgacagcgacagcaccccacccaagaagaagatgaggaagacagaaaatggcatgtatgcctgtgacctgtgtgacaagatcttccagaagagcagcagcctgctgcggcacaagtatgagcacacaggcaagaggcctcatgaatgtggcatctgcaagaaggccttcaagcacaagcaccacctgattgagcacatgaggctgcacagcggggagaagccctaccagtgtgacaagtgtgggaagcgcttcagccacagcggcagctacagccagcacatgaaccaccgctacagctactgcaagcgggaggccgaggagcgggacagcacagagcaggaggaggccggccctgagatcctgagcaatgaacatgtgggcgcccgggccagccccagccagggcgacagtgatgagcgggagagcctgacccgggaggaggatgaagattctgagaaggaggaggaggaggaggacaaggagatggaggagctgcaggaggagaaggaatgtgagaagccccagggagatgaggaggaggaggaggaggaggaggaggtggaggaggaggaggtggaggaggccgagaatgaaggagaggaggccaagacagagggcctgatgaaggatgacagagctgagagccaggccagcagcctgggccagaaggtgggggagagcagcgagcaggtgtctgaggagaagaccaatgaggcctag

SEQ ID NO: 69304 - DNA, 870 bp, Artificial Sequence
  derived and/or modified sequence
atggctgatggcccccgctgcaagaggaggaagcaggccaaccccaggagaaataatgtgaccaactacaacacagtggtggagaccaacagcgacagtgatgatgaggacaagctgcacatcgtggaggaggagagcgtgacagatgctgctgactgtgaaggagtgcctgaagatgacctgcccacagaccagacagtgctgcccggccgcagcagcgagcgggagggcaatgccaagaactgctgggaggatgacaccgggaaggagggccaggagatcctgggccctgaggcccaggctgatgaggccggctgcaccgtgaaggatgatgaatgtgagagtgatgctgaaaatgagcagaaccacgaccccaacgtggaggagttcctgcagcagcaggacacagctgtgatcttccctgaggcccctgaggaggaccagaggcagggcaccccagaggccagcggccatgatgaaaatggcaccccagatgccttcagccagctgctgacctgcccctactgtgaccggggctacaagcgcttcaccagcctgaaggagcacatcaagtacagacatgagaagaatgaagacaacttcagctgcagcctgtgcagctacacctttgcctaccgcacccagctggagcggcacatgaccagccacaagagcggccgggaccagagacatgtgacccagagcggctgcaacaggaagttcaagtgcacagaatgtgggaaggccttcaagtacaagcaccacctgaaggagcacctgcgcatccacagcggggagaagccctatgagtgccccaactgcaagaagcgcttcagccacagcggcagctacagcagccacatctcctag

SEQ ID NO: 69305 - DNA, 1932 bp, Artificial Sequence
  derived and/or modified sequence
atggctgatggcccccgctgcaagaggaggaagcaggccaaccccaggagaaataatggcaccccagatgccttcagccagctgctgacctgcccctactgtgaccggggctacaagcgcttcaccagcctgaaggagcacatcaagtacagacatgagaagaatgaagacaacttcagctgcagcctgtgcagctacacctttgcctaccgcacccagctggagcggcacatgaccagccacaagagcggccgggaccagagacatgtgacccagagcggctgcaacaggaagttcaagtgcacagaatgtgggaaggccttcaagtacaagcaccacctgaaggagcacctgcgcatccacagcggggagaagccctatgagtgccccaactgcaagaagcgcttcagccacagcggcagctacagcagccacatcagcagcaagaagtgcatcagcctcatccctgtgaatggccggcccaggacaggcctgaagaccagccagtgcagcagccccagcctgagcgccagccctggcagccccacccggccccagatccggcagaagattgagaacaagcccctgcaggagcagctgtctgtgaaccagatcaagacagagcctgtggactatgagttcaagcccatcgtggtggccagcggcatcaactgcagcacccccctgcagaatggagtcttcaccggcggcggccccctgcaggccaccagcagcccccagggcatggtgcaggccgtggtgctgcccaccgtgggcctggtgagccccatcagcatcaacctgagtgacatccagaatgtgctgaaggtggccgtggatggaaatgtcatccggcaggtgctggagaacaaccaggccaacctggccagcaaggagcaggagaccatcaatgccagccccatccagcagggcggccacagcgtcatcagcgccatcagcctgcccctggtggaccaggacggcaccaccaagatcatcatcaactacagcctggagcagcccagccagctgcaggtggtgccccagaacctgaagaaggagaaccctgtggccaccaacagctgcaagtctgagaagctgcctgaggacctgactgtgaagtctgagaaggacaagagctttgaaggaggagtgaatgacagcacctgcctgctgtgtgatgactgccctggggacatcaatgccctgcctgagctgaagcactatgacctgaagcagcccacccagcccccacccctgcctgctgctgaggccgagaagccagagagctctgtgagcagcgccactggagatggcaacctgagccccagccagccccccctgaagaacctgctgagcctgctgaaggcctactatgccctgaatgcccagcccagcgctgaggagctgagcaagattgctgacagcgtgaacctgcccctggatgtggtgaagaagtggtttgagaagatgcaggccggccagatctctgtgcagagcagcgagcccagcagccctgagcccgggaaggtgaacatcccagccaagaacaatgaccagccccagagcgccaatgccaatgagccccaggacagcacagtgaacctgcagagccccctgaagatgaccaacagccctgtgctgcctgtgggcagcaccaccaacggcagccgcagcagcacccccagccccagccccctgaacctgagcagcagcaggaacacccagggctacctgtacacagctgagggcgcccaggaggagccccaggtggagcccctggacctgagcctgcccaagcagcagggcgaggaggccaagacagagggcctgatgaaggatgacagagctgagagccaggccagcagcctgggccagaaggtgggggagagcagcgagcaggtgtctgaggagaagaccaatgaggcctag

SEQ ID NO: 69306 - DNA, 3048 bp, Artificial Sequence
  derived and/or modified sequence
atgatgaatgccagccagatgcagaagatgagcaagaccatgatcctgatgctgaagagcttctacaacaacaagaccctgctgtccttcttcctgcggcacctgaagaggacccggggccgggcccaccagaagcctgtggtgatgatgaagatggagcaccagatgcacttccacaactacagccctgtgcacatcgtcatcggctacaagcgcttcaccagcctgaaggagcacatcaagtacagacatgagaagaatgaagacaacttcagctgcagcctgtgcagctacacctttgcctaccgcacccagctggagcggcacatgaccagccacaagagcggccgggaccagagacatgtgacccagagcggctgcaacaggaagttcaagtgcacagaatgtgggaaggccttcaagtacaagcaccacctgaaggagcacctgcgcatccacagcggggagaagccctatgagtgccccaactgcaagaagcgcttcagccacagcggcagctacagcagccacatcagcagcaagaagtgcatcagcctcatccctgtgaatggccggcccaggacaggcctgaagaccagccagtgcagcagccccagcctgagcgccagccctggcagccccacccggccccagatccggcagaagattgagaacaagcccctgcaggagcagctgtctgtgaaccagatcaagacagagcctgtggactatgagttcaagcccatcgtggtggccagcggcatcaactgcagcacccccctgcagaatggagtcttcaccggcggcggccccctgcaggccaccagcagcccccagggcatggtgcaggccgtggtgctgcccaccgtgggcctggtgagccccatcagcatcaacctgagtgacatccagaatgtgctgaaggtggccgtggatggaaatgtcatccggcaggtgctggagaacaaccaggccaacctggccagcaaggagcaggagaccatcaatgccagccccatccagcagggcggccacagcgtcatcagcgccatcagcctgcccctggtggaccaggacggcaccaccaagatcatcatcaactacagcctggagcagcccagccagctgcaggtggtgccccagaacctgaagaaggagaaccctgtggccaccaacagctgcaagtctgagaagctgcctgaggacctgactgtgaagtctgagaaggacaagagctttgaaggaggagtgaatgacagcacctgcctgctgtgtgatgactgccctggggacatcaatgccctgcctgagctgaagcactatgacctgaagcagcccacccagcccccacccctgcctgctgctgaggccgagaagccagagagctctgtgagcagcgccactggagatggcaacctgagccccagccagccccccctgaagaacctgctgagcctgctgaaggcctactatgccctgaatgcccagcccagcgctgaggagctgagcaagattgctgacagcgtgaacctgcccctggatgtggtgaagaagtggtttgagaagatgcaggccggccagatctctgtgcagagcagcgagcccagcagccctgagcccgggaaggtgaacatcccagccaagaacaatgaccagccccagagcgccaatgccaatgagccccaggacagcacagtgaacctgcagagccccctgaagatgaccaacagccctgtgctgcctgtgggcagcaccaccaacggcagccgcagcagcacccccagccccagccccctgaacctgagcagcagcaggaacacccagggctacctgtacacagctgagggcgcccaggaggagccccaggtggagcccctggacctgagcctgcccaagcagcagggcgagctgctggagaggagcaccatcacctctgtgtaccagaacagcgtgtacagcgtgcaggaggagcccctgaacctgagctgtgccaagaaggagccccagaaggacagctgtgtgacagattctgagcctgtggtgaatgtcatccccccatctgccaaccccatcaacatcgccatccccaccgtgacagcccagctgcccaccatcgtggccatcgctgaccagaacagcgtgccctgcctgcgggccctggccgccaacaagcagaccatcctgatcccccaggtggcctacacctacagcaccaccgtgtccccagctgtgcaggagccccccctgaaggtgatccagcccaatggaaaccaggatgagcggcaggacaccagcagcgagggcgtgtccaatgtggaggaccagaatgacagcgacagcaccccacccaagaagaagatgaggaagacagaaaatggcatgtatgcctgtgacctgtgtgacaagatcttccagaagagcagcagcctgctgcggcacaagtatgagcacacaggcaagaggcctcatgaatgtggcatctgcaagaaggccttcaagcacaagcaccacctgattgagcacatgaggctgcacagcggggagaagccctaccagtgtgacaagtgtgggaagcgcttcagccacagcggcagctacagccagcacatgaaccaccgctacagctactgcaagcgggaggccgaggagcgggacagcacagagcaggaggaggccggccctgagatcctgagcaatgaacatgtgggcgcccgggccagccccagccagggcgacagtgatgagcgggagagcctgacccgggaggaggatgaagattctgagaaggaggaggaggaggaggacaaggagatggaggagctgcaggaggagaaggaatgtgagaagccccagggagatgaggaggaggaggaggaggaggaggaggtggaggaggaggaggtggaggaggccgagaatgaaggagaggaggccaagacagagggcctgatgaaggatgacagagctgagagccaggccagcagcctgggccagaaggtgggggagagcagcgagcaggtgtctgaggagaagaccaatgaggcctag

SEQ ID NO: 69307 - DNA, 3378 bp, Artificial Sequence
  derived and/or modified sequence
atggccgacggcccccggtgcaagcggcggaagcaggccaacccccggagaaacaacgtgacgaattacaacaccgtggtggagacaaactcggacagtgacgacgaagacaaactacatatagtggaggaagagagtgtgacggatgcagccgactgcgagggcgtccctgaagacgatctgcctacagatcagacagtgcttcccggaagatcctcggaacgcgagggaaatgcgaagaactgttgggaggatgacacaggcaaggagggccaggagattcttgggccagaagcccaggcagacgaggccggatgcactgtgaaagacgacgagtgtgagtcagatgcggaaaatgagcagaaccacgatccgaacgttgaagaattccttcaacagcaagatacagcagtcatttttccagaggcaccggaagaagaccagagacaaggaacccctgaggcctcgggacacgacgaaaacggaacaccagatgctttctcccagcttctcacctgcccgtactgtgaccggggctataagcgattcacctctctgaaggagcatatcaaatataggcatgagaaaaacgaagacaattttagctgcagcttatgctcctacaccttcgcctaccggactcagctagagcgtcatatgacctcccataagagcgggcgggaccaaagacatgtaactcaaagcgggtgtaataggaagttcaaatgtacagaatgtgggaaagcttttaaatataagcatcatctgaaggagcacttgagaattcatagtggggagaagccttacgaatgccccaattgcaaaaagcgtttctcccactctggaagttacagctctcatatatcaagcaaaaagtgcatttctttgatcccagtgaacgggcgcccgcgaactggcctgaaaacaagccagtgttcttcaccaagtctatcggccagtcctggctcccccaccaggccgcagatccgtcagaaaattgaaaacaaacctttgcaagagcagctgtcagtgaatcagattaagaccgaacctgttgattatgaatttaagcctattgtggtcgcgagcggtatcaactgctcaacccctttgcagaacggcgtgttcacgggcggtggtccactccaggcgaccagttccccacaaggaatggtacaagccgtggtgctgcctactgtgggactagtgagccccatatctattaacctctcggatattcagaatgtgctgaaggtcgccgtggacggtaacgtgattagacaggtactggaaaacaaccaggctaatctcgcatctaaagaacaggaaactataaacgccagtcccatccagcagggtgggcattcagtcatctcagccatttctctccctctggtggatcaagatggtactaccaaaatcattattaattacagcctcgaacagcccagtcagctgcaggtggtaccgcagaaccttaaaaaggaaaaccccgtggccacaaatagttgtaaatccgagaaactccccgaggacttgacggtcaagagcgagaaagataagagtttcgaagggggggttaatgactcaacatgcttgctgtgtgacgattgccccggggatattaacgccctgccggagcttaagcactacgaccttaagcagccgactcagccccctccgctgcctgcagccgaagcggaaaagcccgaaagcagtgtaagcagcgccacaggggacggaaacctgagtccgtctcagcccccactcaagaacttacttagtctcctaaaggcctattatgctctcaatgctcagccctcagccgaggagttatcaaaaattgcggattcagtgaatctgcccctcgatgtcgtaaaaaagtggttcgagaagatgcaagcaggacagatctcagtgcagagcagcgagcctagcagtccagagccaggaaaggttaatattccagctaagaacaatgatcagccccagtccgcgaacgcaaacgaaccacaggacagtacagtaaacttgcagtctccccttaaaatgacgaactcccctgtcctccccgtcggctccacaacaaacgggtctcggtcttccacaccaagcccctcgcctctgaatctttcgagcagtagaaacacccaaggctacttgtataccgctgagggagcccaggaggagccgcaggtagagcccctggacctgtctctgccaaaacagcagggggaacttttggagaggagcacgattacctcagtctatcaaaacagcgtctactccgtacaggaggagcctctcaacctgtcctgcgccaaaaaggagccacaaaaggattcatgtgtaactgattctgagccagtggtcaacgtcatacccccttcagccaatccgatcaacatcgcgatacccacagtgaccgctcagctgcctactatagttgccattgctgatcagaactccgttccatgtttacgggcactcgctgcaaacaagcagaccatactaatcccgcaggtggcttacacatattcaactaccgtgtcaccagccgttcaggagccacccttgaaggtgatccagcctaatggcaaccaagacgagagacaggacacaagttccgagggtgtttctaacgttgaggatcagaacgatagcgactcgacgccccccaagaagaagatgcggaagaccgaaaatggtatgtacgcctgtgatctctgcgacaagatctttcagaaaagctcgagcctccttagacacaagtatgaacacaccggcaagaggccccacgaatgtggaatctgtaagaaggctttcaagcataaacaccatcttattgaacacatgcggctgcacagcggcgagaagccctatcagtgcgacaagtgtggcaagaggtttagtcacagtggatcttactcgcagcatatgaatcacagatactcatattgcaaaagagaggcagaggagcgagactctacagagcaggaggaagccggaccagaaattcttagcaatgaacatgtgggcgcaagggcaagccctagccagggcgatagtgacgaaagagagagcctgaccagagaggaagatgaagattctgaaaaagaggaggaggaggaggacaaggagatggaggaattgcaggaagagaaggaatgcgaaaagccgcagggcgatgaggaggaagaagaagaagaagaagaggtggaagaggaagaagtcgaggaagcagaaaacgagggtgaagaggcaaagacagagggcctaatgaaggatgaccgcgcagaatcacaggcatcttccctgggtcagaaggttggggagagttctgagcaggtgagcgaggaaaagacaaatgaggcctag

SEQ ID NO: 69308 - DNA, 870 bp, Artificial Sequence
  derived and/or modified sequence
atggccgacggcccccggtgcaagcggcggaagcaggccaacccccgcaggaacaacgtcacgaattataataccgttgtggaaacaaacagcgatagcgacgacgaagacaaactccacattgtggaggaagaaagtgtcaccgatgccgctgattgcgagggcgtacccgaggatgatctccccactgaccagaccgtactcccagggcggagctccgagcgggagggtaatgctaaaaactgctgggaagacgacacaggtaaagagggacaggaaatcctgggtccagaagcacaggccgatgaagccggttgtactgtgaaggatgacgaatgcgagtccgatgccgagaacgagcaaaaccacgaccccaacgtcgaagaattcctccagcagcaggacaccgctgtcatatttcctgaggctcccgaggaggaccagcgccaaggtaccccagaggccagtggtcatgatgagaacggtacgcccgacgcgttcagccagctgctgacgtgcccatattgtgacaggggctataagcgctttacctcccttaaggaacacataaaatacaggcatgaaaagaatgaggacaactttagctgttctctgtgttcatacacatttgcatacagaacccagctagagagacatatgaccagccacaagtccggacgcgatcagcgccacgtgactcagagtggctgtaataggaagttcaaatgcaccgaatgtggcaaggcattcaagtacaaacatcacctgaaggaacatctgcgcatccattccggggagaagccatacgagtgccccaattgtaagaaaagattttctcattccggttcatactcctctcatatcagttag

SEQ ID NO: 69309 - DNA, 1932 bp, Artificial Sequence
  derived and/or modified sequence
atggccgacggcccccggtgcaagcggcggaagcaggccaacccccggcgtaacaacggcactccggacgccttctcacaactgctgacctgcccgtactgcgacagaggctataagcggttcacttctctgaaagagcacattaaataccgccacgaaaagaacgaggataatttctcgtgtagtctctgttcatatacctttgcctaccgaacacagctagagagacacatgaccagtcacaagtccggtcgagaccaacgccatgtgacacagagtggctgcaaccgcaaatttaaatgcacggaatgcggcaaggccttcaaatacaagcatcaccttaaggagcacctacggatccattccggcgagaagccttatgagtgtcccaattgtaagaaacgtttctcccactctggctcctattcgtcccacattagttcaaaaaagtgcatctcactcattcctgtgaacggcaggccacggacagggctcaaaactagtcagtgtagttcccctagcttgtcagctagtcccggctcgccaacccgtccccagatccggcagaagatcgagaacaagccactacaggagcagttatcagtcaaccagattaaaacggagccagtggactacgagttcaagcctatcgtggtcgcctccgggatcaattgctctacaccccttcagaacggagtgtttacaggaggtggccccctgcaggcgacttcctcgccacagggcatggttcaggctgttgtcttgcctactgtgggactggtttctcctataagcatcaaccttagtgatatccagaacgtgctcaaagtggcagtcgacggtaacgttatcagacaggtgctcgagaataaccaggcaaacttggcgtccaaagagcaggagacaatcaatgctagtcccattcagcagggtggtcactctgtaatcagcgctatctctctgcccttagttgaccaagatggaacaaccaaaatcatcatcaattattcactcgagcagccttcacagctgcaggtcgtgcctcagaacttgaaaaaagagaacccagtagctactaactcgtgtaaatcggaaaagctacccgaggatctcacagttaaatcagagaaagataagtctttcgaagggggcgtaaatgattcgacctgcctcctatgcgacgactgtccaggcgacattaacgccctgcccgaattgaaacattatgatttaaagcaacccacccagcctcctccgctgcccgctgccgaggcggagaaacccgagtcttctgtaagttccgctactggggatgggaatttgagcccctcccagccacctctgaagaatctgctgagcctcctaaaggcgtactatgctctgaatgcacagccttccgccgaggagttgtccaaaatcgcagattccgtaaatcttccattggatgtagtgaagaagtggtttgaaaagatgcaggccgggcaaatatccgtgcagtccagcgagcctagcagccctgaaccagggaaagttaacatacctgcaaagaataacgaccagccacagtcagcaaacgccaacgaacctcaggactccacagtgaacctgcaaagtccgttgaagatgacaaactcccccgtattgcctgttggaagtactaccaacggctcccgtagcagcacgccaagtccgtcaccgttgaacctgagctccagtcgaaacacacagggttatctgtataccgccgaaggagctcaggaggaaccccaggttgagcccctggacctctccctgcccaaacagcagggcgaggaagcgaagaccgagggattgatgaaggacgacagagccgaatcccaggcctccagcctaggtcagaaagttggcgagagcagtgagcaggtgtccgaggagaaaaccaatgaggcctag

SEQ ID NO: 69310 - DNA, 3048 bp, Artificial Sequence
  derived and/or modified sequence
atgatgaacgccagccagatgcagaagatgagcaagaccatgatccttatgttgaagtctttttataacaataaaacccttctgagcttcttcctgcgccatttgaagagaacacgaggccgagcccatcagaaaccggtggttatgatgaaaatggaacatcagatgcactttcacaactacagtcccgttcatatagtgatcggctacaaaaggttcactagcctgaaggaacatatcaagtataggcacgaaaagaatgaagacaacttctcatgcagtctatgttcctacacatttgcctatcggactcagcttgagaggcatatgaccagccataaaagtggaagggatcagcggcacgtgacccagtccggatgcaatcggaaatttaagtgcaccgagtgcgggaaggcgttcaaatacaaacaccatctcaaagagcatctgaggattcattctggtgaaaagccatatgagtgccctaattgtaagaagcgcttcagccattctggctcctattcgtctcatatatcatctaaaaaatgtatctcactcattccagtgaacggacgacccaggaccggcctcaaaacgagccagtgttcttccccttccctttccgccagtcctggctctcccacccgccctcagatcaggcagaaaatcgagaataaacctctccaggagcagctcagcgttaatcagataaagaccgagcccgtggactatgaattcaagccaattgtggtcgcaagtgggatcaattgttctactccactgcaaaacggggtatttaccggaggcggtcccctacaggccactagtagccctcagggcatggtgcaagccgtggtgctgcccactgtagggctcgtgtccccaatcagtatcaatctgtcagatatacagaatgtcctcaaggtagcagtcgatggaaacgtgatacggcaagtgcttgagaacaaccaggctaatctggcgtccaaagagcaggaaactataaatgcctctccaattcagcagggcggacactccgtcatctccgctatttctctgccactggtcgaccaggacgggaccacaaagatcatcatcaactatagtcttgaacagccaagtcagctccaggttgtaccccagaaccttaagaaggagaaccctgtggcaactaattcatgcaagagcgaaaaactgcccgaagatttgactgtgaagtcagaaaaagacaagtctttcgagggaggcgtcaacgattccacctgcctgctgtgcgacgactgtcctggagatattaatgcccttcctgaattgaaacattacgatctaaaacaacccacccaacccccccccctgcccgccgcagaagcagagaagccagagtcctcggtgagcagcgccaccggcgatgggaatctctcaccaagccagccccctttaaaaaacctgctctcattgctaaaggcttattacgcccttaacgctcaaccgtctgcagaggaactgtcaaaaatcgccgacagtgtgaatctgcccttggacgtggtgaaaaaatggttcgaaaagatgcaagccggccagatcagtgttcagagcagcgagccaagcagtccagaacctgggaaagttaatattccagccaagaacaatgatcaaccgcaatccgccaacgccaatgagccacaagatagcacggtcaacctgcaatcccctttaaagatgaccaatagcccagtcctgcccgttgggagtactactaacggtagcaggtctagtacgccgagtccatccccgctgaacctatccagctcaagaaacacccaggggtatctgtataccgccgagggggcacaggaggaaccgcaggtagaaccgttagacttatcgcttccaaaacagcagggagagttgctggaaaggtccacaattaccagcgtttaccagaacagtgtgtactcagtccaggaagagcccttaaatctgagctgcgccaaaaaggagccccagaaagacagctgcgtcactgacagcgagcccgttgtgaatgtgatccctccctccgcaaaccccatcaacatcgccattcccaccgtgactgcacaattgccaaccatagtcgcaattgccgaccagaatagcgtcccttgtctaagagctttggccgctaataaacagacaattttgatccctcaagtggcctacacatactcaaccactgtgagtccagccgtgcaggaaccccctttaaaggtgatccagcccaacgggaatcaagacgagagacaagacacgtcttccgagggcgtgagtaacgttgaagaccagaacgacagtgattcgacaccacccaaaaaaaagatgagaaagaccgaaaatggcatgtatgcctgtgacctttgtgacaaaatctttcaaaagagctcctccctactcaggcataaatacgagcatacaggaaagcgcccccatgaatgtggtatttgtaagaaagcctttaaacacaagcaccacctcatcgaacacatgagactgcacagtggcgaaaagccatatcagtgtgataagtgcggaaagaggtttagccattccggctcatattcccagcacatgaaccatcgctattcttattgcaagagggaagcagaggaacgtgactctacagagcaggaggaggcaggcccggaaatattatcaaacgagcatgtgggggctcgcgccagcccttctcaaggagacagtgatgaacgggagtccctcacccgcgaggaggacgaggacagcgaaaaagaggaagaggaggaggacaaagagatggaagagctgcaagaggagaaagaatgtgaaaagccccagggagatgaagaggaggaagaggaggaagaagaagtcgaagaggaggaggtggaggaggctgagaatgaaggtgaggaagctaagactgagggtctgatgaaagatgacagagctgaatcgcaggctagtagcttgggccaaaaagtgggtgagtctagtgagcaggtcagtgaggagaaaaccaatgaggcctag

SEQ ID NO: 69311 - DNA, 3378 bp, Artificial Sequence
  derived and/or modified sequence
atggcagatggtcctagatgtaaacgtcgcaagcaagcaaaccctcgaagaaacaatgtgacaaactacaataccgtggtggagaccaattcagatagtgatgatgaggataagctgcatatcgtggaagaggaaagcgtcacagatgccgctgactgtgaaggcgtgcctgaagatgacctgccaactgaccaaacagttttgcccggacggtctagcgaacgcgagggcaatgcaaaaaattgttgggaggacgataccgggaaagaaggacaggagattctgggacctgaagctcaggccgacgaggcaggttgtactgttaaggacgacgaatgcgagagtgacgccgagaatgagcaaaaccacgatccgaacgtggaagagtttctgcagcaacaggatacagctgtgatatttccagaggcaccggaggaggaccagaggcagggaactcccgaagcatccggacatgatgagaacggtacgccagacgcgttcagccagcttctcacatgcccatattgcgacagaggctacaagaggttcacctcccttaaggaacacattaagtatagacacgaaaaaaatgaggataatttttcctgctccctgtgttcctacacgttcgcttatagaacccagttagagaggcatatgaccagccataagtctgggcgagatcagcgacatgtcacccagagcggttgcaatcgcaagtttaagtgcaccgaatgtggcaaggctttcaaatacaaacatcacctaaaggagcacctgcgaattcacagcggagaaaagccgtacgagtgcccaaactgcaagaaaagatttagccactctggttcatatagttcccacatttcctctaagaagtgtattagtctcatcccagtcaatggtagacccaggactgggttgaagacctctcagtgtagcagtcccagcctgtctgccagtcccggaagcccgaccaggcctcagattcgacagaaaatcgagaacaagccattgcaggaacagctgtctgtaaatcagatcaagactgaaccagtggattatgaattcaaacccattgtagtggcaagtggcatcaattgctctacaccactgcagaacggagtctttaccggtggagggccacttcaggcaacgagcagtccacagggaatggtacaggccgtggtactgcccacggtggggctggtgagcccaatctcaatcaacctttcagacatacagaacgttctcaaggtcgctgtcgatgggaacgtgattcggcaagtccttgaaaacaaccaggcaaatctggcctccaaagaacaagagaccataaacgccagccctatccaacaggggggtcactctgttatctctgctatttctctgccccttgtagatcaggatgggaccactaagattatcataaattacagcctcgagcagccgagtcaactccaagttgttcctcagaatttgaagaaggagaaccctgtggcgactaattcttgcaagtccgagaagctgcctgaagatctgactgtcaagtccgaaaaagataaatctttcgaaggtggggtaaatgatagcacatgtttactgtgcgacgactgtcccggagatatcaacgcattacctgagctaaagcattacgatctgaaacagccaacgcaaccacctcctctgcctgcagccgaagccgagaagcctgagtcaagcgtctcctccgccaccggggatggtaatctgagtccttctcaacctccactgaagaacctactgagtctgctgaaggcttactatgcgctgaatgcccagcctagcgcagaagaactttccaaaattgccgacagcgtgaacctgccactggacgttgttaagaaatggttcgagaagatgcaggccggtcagatcagcgttcaaagcagcgaaccttcatctccagaacccggaaaggttaacatccctgccaagaacaatgatcagcctcagagcgccaatgccaacgagccacaggactccaccgtcaatttacagtccccactgaaaatgactaatagcccagtgctgcctgtcggttctactacaaatggttcccggagctccacaccttctcccagccccctgaatttgagttcttctcggaacacccaggggtatttgtacaccgctgaaggtgctcaggaggaaccccaggttgaaccccttgacttgagtctgcccaaacagcagggtgagctgctggaacgaagcaccatcactagcgtgtatcagaattctgtctactccgtgcaagaagaaccgctcaacctttcctgtgccaaaaaggagcctcagaaagactcatgtgtcactgacagcgagcctgtggtgaatgtgatacccccatctgctaatccgattaacattgctattcccaccgtgaccgctcaactaccaacgatcgttgctatcgccgaccaaaactccgtgccgtgcctgagggccctggccgcaaataaacaaaccattctcattcctcaagtagcatatacctatagcactaccgtgagtccggcagtacaagagcctccactgaaggtgatccaaccgaatggaaaccaggacgagcgccaagatactagtagcgaaggtgtaagcaacgttgaggaccaaaatgattctgactccactcctcccaagaaaaaaatgaggaagactgagaatggtatgtatgcatgtgacctgtgcgataaaatttttcagaagagctccagcttactgcgccataaatacgaacataccggcaagcgtccacacgagtgtggaatctgcaagaaggctttcaagcataaacatcatctgatcgagcatatgaggctgcatagcggggagaagccttaccagtgcgacaagtgtggaaagcgtttttcgcacagcgggtcgtattctcagcacatgaaccatcgctactcatactgcaagagagaggctgaagaacgagacagcacagagcaggaagaagcaggcccagagattctaagtaacgaacacgttggcgctcgcgctagcccaagtcaaggcgacagcgacgagcgggagagtcttacacgggaggaggacgaggattctgaaaaagaggaggaggaggaggacaaagagatggaggagctgcaggaggaaaaagagtgcgaaaaacctcagggggatgaggaagaagaggaagaggaggaggaagtcgaagaggaagaggttgaagaagcagaaaacgagggagaggaggcgaaaacggaggggctgatgaaggacgaccgggctgaatcccaggcgagtagccttggacagaaggtcggagagtcttctgagcaggtaagcgaagaaaaaacaaatgaggcatag

SEQ ID NO: 69312 - DNA, 870 bp, Artificial Sequence
  derived and/or modified sequence
atggcagatggtccacggtgtaaaaggaggaagcaggcgaaccccaggagaaataatgtcaccaactataatactgtcgtggagacaaattcagactcagatgatgaggataagctccatatcgtcgaggaagagagtgtaacagacgcggctgactgtgagggtgtgcccgaagatgacttacctactgaccagactgtcctacctggccgatcttcagagagagaagggaacgctaagaactgctgggaggatgatacggggaaagaggggcaggagatcctgggtcccgaggcccaggccgatgaggcagggtgcactgtgaaggatgatgaatgcgagtccgatgcggaaaatgagcagaaccatgatccaaatgtggaggagttccttcagcagcaggacacggccgtgatttttcccgaagcacctgaagaagaccagcgacaaggaacccctgaagcttctggacatgatgagaatgggactccagacgcttttagccagcttttaacttgcccttattgcgaccggggttacaagcggtttacatctctcaaagagcacattaagtacaggcacgagaaaaatgaggataacttttcctgcagtctgtgcagttacacatttgcctatagaacacagctggagcgccatatgactagccataaaagcggcagagaccagcgccacgttacccagtcagggtgtaataggaagtttaagtgcacagagtgtggtaaggcattcaagtataagcaccacctaaaagaacacctgcgtattcacagcggcgaaaaaccctacgaatgcccgaactgcaagaagcgattctcccattctgggtcttactcgagtcacatcagttag

SEQ ID NO: 69313 - DNA, 1932 bp, Artificial Sequence
  derived and/or modified sequence
atggcagatggaccacgttgcaagcgtcgcaaacaggccaatcctaggaggaacaatggaacaccggacgccttttcccagttactgacatgcccgtattgcgaccgaggatataaacggttcacatctctgaaggaacacattaagtaccgccatgagaagaacgaggacaatttcagttgttccctgtgctcatacacattcgcttatcgaactcagctagaaagacacatgacaagccacaagtccggccgtgaccaacgtcacgtcactcaatcaggatgcaaccggaagttcaagtgtaccgagtgtggcaaagcttttaagtacaaacatcacttaaaggagcacttgcgtattcactcaggggaaaaaccatacgaatgccccaattgtaagaaacgcttctcacattccggatcttattcctcacatatttctagcaaaaaatgtatcagcttgattccagttaatggaaggcccagaacaggcttaaagacgtcacagtgctcctctcccagcctgtcggccagccctggatcccccactcgaccccagattcgccagaagatcgaaaacaaaccccttcaggagcagctctccgtgaatcagattaaaaccgaaccagttgattatgagtttaagccgatagtagtggcctctggcattaattgcagcacccctctgcaaaacggcgttttcacgggcggagggccactacaagccaccagttcgcctcaagggatggtgcaggccgtggtgctgcctacagttgggttggtaagtccgatcagcattaacctgagtgacatccagaatgttttaaaggtggctgtcgacggcaatgtgattaggcaggtgctggagaataaccaggcaaatctagcctcaaaggaacaagaaacaattaatgcatctcctattcagcaaggcggacacagcgtcatctccgccatttccctgcccctcgtcgaccaggacggaactactaaaatcatcatcaattattccctggaacagcctagccagcttcaggtcgtgccacagaacttgaaaaaggagaatcctgtggcgactaatagttgcaagtcggaaaaactacctgaggaccttaccgttaagtccgagaaggacaagagcttcgagggaggagtgaatgactctacctgccttctgtgtgacgattgtcccggtgacattaacgccctgcctgagttaaagcactacgatttaaagcagcctactcaacctccgcctctgcctgccgctgaagccgaaaagccagagagcagcgtgagctctgccactggagacgggaatttgagcccatcacagcccccacttaagaatctgctgagcctcctcaaggcttattacgccctgaacgcccaaccttccgctgaggaattgagcaagatcgccgacagtgtgaatctgccactggacgtggtgaagaagtggtttgagaagatgcaggccggtcagatctccgtgcagtcatccgagccttcgagtcccgagcctggcaaagttaacatcccagcaaagaataacgaccaaccccagtcagcaaatgcaaatgagccacaggacagtacagtaaacctgcagtcgcccttgaaaatgaccaactccccagtcctgcccgtcgggtctaccacaaacggctcacgatctagtacgccttctcccagtcctttaaatctcagcagttcaaggaacacccaggggtacctgtatacagcggagggggcacaggaggaaccccaggtcgagcctcttgatctgtcgctcccgaaacaacaaggcgaggaggcaaaaaccgaaggcctgatgaaagacgaccgcgcagagtcgcaggcgagcagcctgggtcaaaaggtgggtgagagtagtgagcaggtgagcgaggagaaaaccaacgaggcctag

SEQ ID NO: 69314 - DNA, 3048 bp, Artificial Sequence
  derived and/or modified sequence
atgatgaacgccagtcagatgcagaaaatgagcaagaccatgatcctgatgctgaaaagcttttataataacaagactctgctttcgttcttcctgaggcatcttaaacgcacccgcggacgtgcccaccagaagccagtcgtgatgatgaaaatggagcatcagatgcatttccacaactattctccagtgcatatagtgataggctacaagaggttcacctccttgaaagagcacatcaagtacaggcatgagaagaacgaagacaacttcagctgcagcttatgtagctatacgtttgcttatagaacccagcttgagcggcatatgacatcccataaaagtggtagagaccaacgtcacgttacccagtctggctgtaaccgaaagttcaagtgtaccgagtgtggaaaggccttcaagtataaacaccacctgaaggaacacctgagaatccatagtggggagaaaccatacgagtgccccaattgcaaaaaaagattttctcactccgggtcttatagttcccacataagctctaagaagtgcatttccctgatacctgtaaatgggagaccgaggactgggctaaaaacttctcagtgctcaagcccttctctcagtgccagtcctggcagccctactaggcctcagattagacagaaaatcgagaacaagcctctccaggagcagctgtctgtgaatcaaattaaaactgagccggtcgactatgagttcaagcccattgtggtagcatcaggcattaactgttccactccccttcaaaatggagtgttcaccggcggaggtcccttgcaggctaccagctcccctcaggggatggttcaagcggtagtgctcccgactgtgggactcgtaagtcccatcagcatcaatctatctgatattcagaatgtgctgaaggtcgccgtggacggtaacgtcatccgccaagtccttgagaataatcaggcaaatcttgcctctaaagaacaggagaccattaacgcgtcacccatccagcagggaggccactcagtgatttctgccatctcactaccactcgttgaccaggacggcactaccaagataataattaactacagcctagagcagccgagccagctgcaggtggtaccccaaaacctcaagaaggagaatccggtggccacaaacagctgcaaaagtgagaaactgccagaggatctgacggttaagtcggagaaagataagtcgttcgaggggggagttaacgactccacctgtctgctttgcgacgactgtcccggagacattaatgctcttccagagctgaagcactatgacttaaagcaacctacgcagcctccacccctaccggcagcagaggctgagaagcccgaatctagcgtgtctagcgctactggagacggcaatttaagtcccagtcagcctccgctgaaaaatctgctttcacttcttaaagcctattacgccctcaatgcccagccctcagccgaggagttaagtaaaattgcggatagcgttaatctccccctggacgtggtgaaaaagtggttcgagaaaatgcaagccggacaaatttccgttcagtcctccgaaccttcttctccagagccgggtaaggtcaacataccggctaaaaataatgaccagccacagagtgcaaatgccaatgaaccacaggattctactgtcaacctgcagtctccactgaagatgaccaactctcctgtactgcctgtgggcagtacaaccaatggcagtagatcgtccacaccttcaccttcacccttgaacctctcatcatccaggaacacccagggttatttatacacagctgaaggggcacaggaagaaccgcaagtggagccactggatctctctctgcccaagcagcagggtgaactgcttgagcgtagcaccatcacatctgtctatcagaattccgtgtactctgtacaggaggagcctctgaacctctcctgcgctaaaaaggagccccaaaaggatagctgcgtgacagacagcgaacccgtggtcaacgtgatacccccatcagctaaccccatcaatatcgctattccaacagtaacagcacaactgcctaccatcgtcgcaatagccgatcagaacagtgttccttgccttagagccctggctgcgaataagcagactattttaatcccccaggttgcatatacttatagtacaacggtatcaccagcggtccaagaacctcctctcaaggtaattcagcccaacggtaatcaggatgagcgccaagacacttctagcgaaggggttagtaatgttgaggaccaaaatgattccgactctacgcctccaaaaaagaaaatgcggaaaaccgagaacggcatgtacgcctgcgacctgtgtgataaaatctttcagaaaagcagttcactgctgaggcacaagtatgaacatacgggaaaacggccacatgagtgcggaatatgcaagaaggctttcaagcacaaacatcatctcattgaacatatgaggctgcactccggagaaaaaccataccagtgtgacaaatgcggaaagaggttcagtcatagtggatcctactctcagcacatgaatcacaggtactcgtattgcaagagggaggccgaagagcgagattctacagaacaggaggaggctggtccggaaatactatcgaacgaacacgtcggtgcacgcgcaagccctagccaaggggatagcgacgagcgagagtccctcacaagagaagaagacgaagacagcgaaaaggaggaggaggaagaggacaaagagatggaagagctgcaggaggaaaaagaatgcgaaaagccccagggtgacgaggaggaagaagaggaagaggaagaagttgaggaagaggaggttgaggaagccgagaacgagggcgaagaggcaaaaacagaggggctgatgaaggatgaccgagccgagagccaggcaagttccctcggccaaaaggtgggagaatctagtgagcaggtctcagaggaaaagacaaatgaagcgtag

SEQ ID NO: 69315 - DNA, 5990 bp, Artificial Sequence
  derived and/or modified sequence
gggggggaagggggagggagggggaggaggtgactcgagcatttagacacaagcgagaggatcatggcggatggccccaggtgtaagcgcagaaagcaggcgaacccgcggcgcaataacgttacaaattataatactgtggtagaaacaaattcagattcagatgatgaagacaaactgcatattgtggaagaagaaagtgttacagatgcagctgactgtgaaggtgtaccagaggatgacctgccaacagaccagacagtgttaccagggaggagcagtgaaagagaagggaatgctaagaactgctgggaggatgacacaggaaaggaagggcaagaaatcctggggcctgaagctcaggcagatgaagcaggatgtacagtaaaagatgatgaatgcgagtcagatgcagaaaatgagcaaaaccatgatcctaatgttgaagagtttctacaacaacaagacactgctgtcatttttcctgaggcacctgaagaggaccagaggcagggcacaccagaagccagtggtcatgatgaaaatggaacaccagatgcattttcacaattactcacctgtccatattgtgatagaggctataaacgctttacctctctgaaagaacacattaaatatcgtcatgaaaagaatgaagataactttagttgctccctgtgcagttacacctttgcatacagaacccaacttgaacgtcacatgacatcacataaatcaggaagagatcaaagacatgtgacgcagtctgggtgtaatcgtaaattcaaatgcactgagtgtggaaaagctttcaaatacaaacatcacctaaaagagcacttaagaattcacagtggagagaagccatatgaatgcccaaactgcaagaaacgcttttcccattctggctcctatagctcacacataagcagtaagaaatgtatcagcttgatacctgtgaatgggcgaccaagaacaggactcaagacatctcagtgttcttcaccgtctctttcagcatcaccaggcagtcccacacgaccacagatacggcaaaagatagagaataaaccccttcaagaacaactttctgttaaccaaattaaaactgaacctgtggattatgaattcaaacccatagtggttgcttcaggaatcaactgttcaacccctttacaaaatggggttttcactggtggtggcccattacaggcaaccagttctcctcagggcatggtgcaagctgttgttctgccaacagttggtttggtgtctcccataagtatcaatttaagtgatattcagaatgtacttaaagtggcggtagatggtaatgtaataaggcaagtgttggagaataatcaagccaatcttgcatccaaagaacaagaaacaatcaatgcttcacccatacaacaaggtggccattctgttatttcagccatcagtcttcctttggttgatcaagatggaacaaccaaaattatcatcaactacagtcttgagcagcctagccaacttcaagttgttcctcaaaatttaaaaaaagaaaatccagtcgctacaaacagttgtaaaagtgaaaagttaccagaagatcttactgttaagtctgagaaggacaaaagctttgaagggggggtgaatgatagcacttgtcttctgtgtgatgattgtccaggagatattaatgcacttccagaattaaagcactatgacctaaagcagcctactcagcctcctccactccctgcagcagaagctgagaagcctgagtcctctgtttcatcagctactggagatggcaatttgtctcctagtcagccacctttaaagaacctcttgtctctcctaaaagcatattatgctttgaatgcacaaccaagtgcagaagagctctcaaaaattgctgattcagtaaacctaccactggatgtagtaaaaaagtggtttgaaaagatgcaagctggacagatttcagtgcagtcttctgaaccatcttctcctgaaccaggcaaagtaaatatccctgccaagaacaatgatcagcctcaatctgcaaatgcaaatgaaccccaggacagcacagtaaatctacaaagtcctttgaagatgactaactccccagttttaccagtgggatcaaccaccaatggttccagaagtagtacaccatccccatcacctctaaacctttcctcatccagaaatacacagggttacttgtacacagctgagggtgcacaagaagagccacaagtagaacctcttgatctttcactaccaaagcaacagggagaattattagaaaggtcaactatcactagtgtttaccagaacagtgtttattctgtccaggaagaacccttgaacttgtcttgcgcaaaaaaggagccacaaaaggacagttgtgttacagactcagaaccagttgtaaatgtaatcccaccaagtgccaaccccataaatatcgctatacctacagtcactgcccagttacccacaatcgtggccattgctgaccagaacagtgttccatgcttaagagcgctagctgccaataagcaaacgattctgattccccaggtggcatacacctactcaactacggtcagccctgcagtccaagaaccacccttgaaagtgatccagccaaatggaaatcaggatgaaagacaagatactagctcagaaggagtatcaaatgtagaggatcagaatgactctgattctacaccgcccaaaaagaaaatgcggaagacagaaaatggaatgtatgcttgtgatttgtgtgacaagatattccaaaagagtagttcattattgagacataaatatgaacacacaggtaaaagacctcatgagtgtggaatctgtaaaaaggcatttaaacacaaacatcatttgattgaacacatgcgattacattctggagaaaagccctatcaatgtgacaaatgtggaaagcgcttctcacactctgggtcttattctcaacacatgaatcatcgctactcctactgtaagagagaagcggaagaacgtgacagcacagagcaggaagaggcagggcctgaaatcctctcgaatgagcacgtgggtgccagggcgtctccctcacagggcgactcggacgagagagagagtttgacaagggaagaggatgaagacagtgaaaaagaggaagaggaggaggataaagagatggaagaattgcaggaagaaaaagaatgtgaaaaaccacaaggggatgaggaagaggaggaggaggaggaagaagtggaagaagaagaggtagaagaggcagagaatgagggagaagaagcaaaaactgaaggtctgatgaaggatgacagggctgaaagtcaagcaagcagcttaggacaaaaagtaggcgagagtagtgagcaagtgtctgaagaaaagacaaatgaagcctaatcgtttttctagaaggaaaataaattctaattgataatgaatttcgttcaatattatccttgcttttcatggaaacacagtaacctgtatgctgtgattcctgttcactactgtgtaaagtaaaaactaaaaaaatacaaaatacaaaacacacacacacacacacacacacacacacacacacacacaaaataaatccgggtgtgcctgaacctcagacctagtaatttttcatgcagttttcaaagttaggaacaagtttgtaacatgcagcagattagaaaaccttaatgactcagagagcaacaatacaagaggttaaaggaagctgattaattagatatgcatctggcattgttttatcttatcagtattatcactcttatgttggtttattcttaagctgtacaattgggagaaattttataattttttattggtaaacatatgctaaatccgcttcagtattttattatgttttttaaaatgtgagaacttctgcactacaaaattcccttcacagagaagtataatgtagttccaacccgtgctaactaccttttataaattcagtctagaaggtagtaatttctaatatttagatgtcttagtagagcgtattatcatttaaagtgtattgttagccttaagaaagcagctgatagaagaactgaagtttcttactcacgtggtttaaaatggagttcaaaagattgccattgagttctgattgcagggactaacaatgttaatctgataaggacagcaaaatcatcagaatcagtgtttgtgattgtgtttgaatatgtggtaacatatgaaggatatgacatgaagctttgtatctcctttggccttaagcaagacctgtgtgctgtaagtgccatttctcagtattttcaaggctctaacccgccttcatccaatgtgtggcctacaataactagcatttgttgatttgtctcttgtatcaaaattcccaaataaaacttaaaaccactgactctgtcagagaaactgaaacactgggacatttcatccttcaattcctcggtattgattttatgttgattgattttcagaatttctctacagaaacgaaagggaaattttctaatctgctttatccatgtacttgcatttcagacatggacatgctattgttatttggctcataactgtttccaaatgttagttattatggacccaatttattaacaacattagctgatttttacctatcagtattattttatttcttttagtttatagatctgtgcaacatttttgtactgtatgtcttcaaacctggcagtattaatacccttcttactgacatatgtacttttagttttagaaaacttttatatttatgtgtcttatttttatatttctttatttattacacagtgtagtgtataatactgtagtttgtattaatacaataatatattttagtatgaaaatttggaaagttgataagatttaaagtagagatgcaattggttctcctgcattgagatttgatttaacagtgttatgttaacatttatacttgccttggactgtagaacagaacttaaatgggaatgtattagttttacaactacaatcaagtcattttacctttacccagtttttaatataaaacttaaattttgaaattcactgtgtgactaatagcatgatgctctgcagttttattaagaaatcagcctaaccatacaactctcatttccttagtaagccaaattaggattaacttctataaacagtgttgggaacaatgtttaacattttgtgccaatttgttcctgtattcatgtatgtaagttacagatctgactcttcatttttaagttccttgttacatcatggtcattttctagttttttaccagactcccatctcacaataaaatgcatcaacaagcctgaactgctgtcattcttttcatcattatcagtattttctttggaaaactgtgaaatggggtacattgtcatcctgcatttgattcatcttgagctgaatttgggtaacactaaatgttttagacattctccactaaattatggattttcttgtggctaaatgtttctggagaggtcagagttgacaaaacctcttcacaggttgctccttcttcctgaaatccttaatcctccgcatttcatgcttcaggtcatttcagggaagcctgggtttagatgcctttctgactctcagctcctgcacttctgtcatcatacctctgatactattatttatattccttccccactaggaacaggaaccacatttgtcatagtcactctcacattcctcactgcctaacagggtgcctggcataagttgggacaacagatatttgttgaataaaaatataatttgcatgtttatggagctcagctatgttctcactttttttgcttctaattccagaatatatgttaaatgatctaataatttgattattttcttataagtcttattaaacactagtcataatagacacaataaattatgccttctttttctattgcctt

SEQ ID NO: 69316 - DNA, 887 bp, Artificial Sequence
  derived and/or modified sequence
agacacaagcgagaggatcatggcggatggccccaggtgtaagcgcagaaagcaggcgaacccgcggcgcaataacgttacaaattataatactgtggtagaaacaaattcagattcagatgatgaagacaaactgcatattgtggaagaagaaagtgttacagatgcagctgactgtgaaggtgtaccagaggatgacctgccaacagaccagacagtgttaccagggaggagcagtgaaagagaagggaatgctaagaactgctgggaggatgacacaggaaaggaagggcaagaaatcctggggcctgaagctcaggcagatgaagcaggatgtacagtaaaagatgatgaatgcgagtcagatgcagaaaatgagcaaaaccatgatcctaatgttgaagagtttctacaacaacaagacactgctgtcatttttcctgaggcacctgaagaggaccagaggcagggcacaccagaagccagtggtcatgatgaaaatggaacaccagatgcattttcacaattactcacctgtccatattgtgatagaggctataaacgctttacctctctgaaagaacacattaaatatcgtcatgaaaagaatgaagataactttagttgctccctgtgcagttacacctttgcatacagaacccaacttgaacgtcacatgacatcacataaatcaggaagagatcaaagacatgtgacgcagtctgggtgtaatcgtaaattcaaatgcactgagtgtggaaaagctttcaaatacaaacatcacctaaaagagcacttaagaattcacagtggagagaagccatatgaatgcccaaactgcaagaaacgcttttcccattctggctcctatagctcacacataagca

SEQ ID NO: 69317 - DNA, 2312 bp, Artificial Sequence
  derived and/or modified sequence
atttagacacaagcgagaggatcatggcggatggccccaggtgtaagcgcagaaagcaggcgaacccgcggcgcaataacggaacaccagatgcattttcacaattactcacctgtccatattgtgatagaggctataaacgctttacctctctgaaagaacacattaaatatcgtcatgaaaagaatgaagataactttagttgctccctgtgcagttacacctttgcatacagaacccaacttgaacgtcacatgacatcacataaatcaggaagagatcaaagacatgtgacgcagtctgggtgtaatcgtaaattcaaatgcactgagtgtggaaaagctttcaaatacaaacatcacctaaaagagcacttaagaattcacagtggagagaagccatatgaatgcccaaactgcaagaaacgcttttcccattctggctcctatagctcacacataagcagtaagaaatgtatcagcttgatacctgtgaatgggcgaccaagaacaggactcaagacatctcagtgttcttcaccgtctctttcagcatcaccaggcagtcccacacgaccacagatacggcaaaagatagagaataaaccccttcaagaacaactttctgttaaccaaattaaaactgaacctgtggattatgaattcaaacccatagtggttgcttcaggaatcaactgttcaacccctttacaaaatggggttttcactggtggtggcccattacaggcaaccagttctcctcagggcatggtgcaagctgttgttctgccaacagttggtttggtgtctcccataagtatcaatttaagtgatattcagaatgtacttaaagtggcggtagatggtaatgtaataaggcaagtgttggagaataatcaagccaatcttgcatccaaagaacaagaaacaatcaatgcttcacccatacaacaaggtggccattctgttatttcagccatcagtcttcctttggttgatcaagatggaacaaccaaaattatcatcaactacagtcttgagcagcctagccaacttcaagttgttcctcaaaatttaaaaaaagaaaatccagtcgctacaaacagttgtaaaagtgaaaagttaccagaagatcttactgttaagtctgagaaggacaaaagctttgaagggggggtgaatgatagcacttgtcttctgtgtgatgattgtccaggagatattaatgcacttccagaattaaagcactatgacctaaagcagcctactcagcctcctccactccctgcagcagaagctgagaagcctgagtcctctgtttcatcagctactggagatggcaatttgtctcctagtcagccacctttaaagaacctcttgtctctcctaaaagcatattatgctttgaatgcacaaccaagtgcagaagagctctcaaaaattgctgattcagtaaacctaccactggatgtagtaaaaaagtggtttgaaaagatgcaagctggacagatttcagtgcagtcttctgaaccatcttctcctgaaccaggcaaagtaaatatccctgccaagaacaatgatcagcctcaatctgcaaatgcaaatgaaccccaggacagcacagtaaatctacaaagtcctttgaagatgactaactccccagttttaccagtgggatcaaccaccaatggttccagaagtagtacaccatccccatcacctctaaacctttcctcatccagaaatacacagggttacttgtacacagctgagggtgcacaagaagagccacaagtagaacctcttgatctttcactaccaaagcaacagggagaagaagcaaaaactgaaggtctgatgaaggatgacagggctgaaagtcaagcaagcagcttaggacaaaaagtaggcgagagtagtgagcaagtgtctgaagaaaagacaaatgaagcctaatcgtttttctagaaggaaaataaattctaattgataatgaatttcgttcaatattatccttgcttttcatggaaacacagtaacctgtatgctgtgattcctgttcactactgtgtaaagtaaaaactaaaaaaatacaaaatacaaaacacacacacacacacacacacacacacacacacacacacaaaataaatccgggtgtgcctgaacctcagacctagtaatttttcatgcagttttcaaagttaggaacaagtttgtaacatgcagcagattagaaaaccttaatgactcagagagcaacaatacaagaggttaaaggaagctgattaattagatatgcatctggcattg

SEQ ID NO: 69318 - DNA, 3306 bp, Artificial Sequence
  derived and/or modified sequence
aagcgagaggatcatggcggatggccccaggtgtaagcgcagaaagcaggcgaacccgcggcgcaataacggaaaggaagggcaagaaatcctggggcctgaagctcaggcagatgaagcaggatgtacagtaaaagatgatgaatgcgagtcagatgcagaaaatgagcaaaaccatgatcctaatgttgaagagtttctacaacaacaagacactgctgtcatttttcctgaggcacctgaagaggaccagaggcagggcacaccagaagccagtggtcatgatgaaaatggaacaccagatgcattttcacaattactcacctgtccatattgtgataggctataaacgctttacctctctgaaagaacacattaaatatcgtcatgaaaagaatgaagataactttagttgctccctgtgcagttacacctttgcatacagaacccaacttgaacgtcacatgacatcacataaatcaggaagagatcaaagacatgtgacgcagtctgggtgtaatcgtaaattcaaatgcactgagtgtggaaaagctttcaaatacaaacatcacctaaaagagcacttaagaattcacagtggagagaagccatatgaatgcccaaactgcaagaaacgcttttcccattctggctcctatagctcacacataagcagtaagaaatgtatcagcttgatacctgtgaatgggcgaccaagaacaggactcaagacatctcagtgttcttcaccgtctctttcagcatcaccaggcagtcccacacgaccacagatacggcaaaagatagagaataaaccccttcaagaacaactttctgttaaccaaattaaaactgaacctgtggattatgaattcaaacccatagtggttgcttcaggaatcaactgttcaacccctttacaaaatggggttttcactggtggtggcccattacaggcaaccagttctcctcagggcatggtgcaagctgttgttctgccaacagttggtttggtgtctcccataagtatcaatttaagtgatattcagaatgtacttaaagtggcggtagatggtaatgtaataaggcaagtgttggagaataatcaagccaatcttgcatccaaagaacaagaaacaatcaatgcttcacccatacaacaaggtggccattctgttatttcagccatcagtcttcctttggttgatcaagatggaacaaccaaaattatcatcaactacagtcttgagcagcctagccaacttcaagttgttcctcaaaatttaaaaaaagaaaatccagtcgctacaaacagttgtaaaagtgaaaagttaccagaagatcttactgttaagtctgagaaggacaaaagctttgaagggggggtgaatgatagcacttgtcttctgtgtgatgattgtccaggagatattaatgcacttccagaattaaagcactatgacctaaagcagcctactcagcctcctccactccctgcagcagaagctgagaagcctgagtcctctgtttcatcagctactggagatggcaatttgtctcctagtcagccacctttaaagaacctcttgtctctcctaaaagcatattatgctttgaatgcacaaccaagtgcagaagagctctcaaaaattgctgattcagtaaacctaccactggatgtagtaaaaaagtggtttgaaaagatgcaagctggacagatttcagtgcagtcttctgaaccatcttctcctgaaccaggcaaagtaaatatccctgccaagaacaatgatcagcctcaatctgcaaatgcaaatgaaccccaggacagcacagtaaatctacaaagtcctttgaagatgactaactccccagttttaccagtgggatcaaccaccaatggttccagaagtagtacaccatccccatcacctctaaacctttcctcatccagaaatacacagggttacttgtacacagctgagggtgcacaagaagagccacaagtagaacctcttgatctttcactaccaaagcaacagggagaattattagaaaggtcaactatcactagtgtttaccagaacagtgtttattctgtccaggaagaacccttgaacttgtcttgcgcaaaaaaggagccacaaaaggacagttgtgttacagactcagaaccagttgtaaatgtaatcccaccaagtgccaaccccataaatatcgctatacctacagtcactgcccagttacccacaatcgtggccattgctgaccagaacagtgttccatgcttaagagcgctagctgccaataagcaaacgattctgattccccaggtggcatacacctactcaactacggtcagccctgcagtccaagaaccacccttgaaagtgatccagccaaatggaaatcaggatgaaagacaagatactagctcagaaggagtatcaaatgtagaggatcagaatgactctgattctacaccgcccaaaaagaaaatgcggaagacagaaaatggaatgtatgcttgtgatttgtgtgacaagatattccaaaagagtagttcattattgagacataaatatgaacacacaggtaaaagacctcatgagtgtggaatctgtaaaaaggcatttaaacacaaacatcatttgattgaacacatgcgattacattctggagaaaagccctatcaatgtgacaaatgtggaaagcgcttctcacactctgggtcttattctcaacacatgaatcatcgctactcctactgtaagagagaagcggaagaacgtgacagcacagagcaggaagaggcagggcctgaaatcctctcgaatgagcacgtgggtgccagggcgtctccctcacagggcgactcggacgagagagagagtttgacaagggaagaggatgaagacagtgaaaaagaggaagaggaggaggataaagagatggaagaattgcaggaagaaaaagaatgtgaaaaaccacaaggggatgaggaagaggaggaggaggaggaagaagtggaagaagaagaggtagaagaggcagagaatgagggagaagaagcaaaaactgaaggtctgatgaaggatgacagggctgaaagtcaagcaagcagcttaggacaaaaagtaggcgagagtagtgagcaagtgtctgaagaaaagacaaatgaagcctaatcgtttttctagaaggaaaataaattctaattgataatgaatttcgttcaatattatccttgcttttcatggaaacacagtaacctgtatgctgtgattcctgttcactactgtgtaaagt

SEQ ID NO: 69319 - protein, 375 aa, Artificial Sequence
  derived and/or modified sequence
MERASCLLLLLLPLVHVSATTPEPCELDDEDFRCVCNFSEPQPDWSEAFQCVSAVEVEIHAGGLNLEPFLKRVDADADPRQYADTVKALRVRRLTVGAAQVPAQLLVGALRVLAYSRLKELTLEDLKITGTMPPLPLEATGLALSSLRLRNVSWATGRSWLAELQQWLKPGLKVLSIAQAHSPAFSCEQVRAFPALTSLDLSDNPGLGERGLMAALCPHKFPAIQNLALRNTGMETPTGVCAALAAAGVQPHSLDLSHNSLRATVNPSAPRCMWSSALNSLNLSFAGLEQVPKGLPAKLRVLDLSCNRLNRAPQPDELPEVDNLTLDGNPFLVPGTALPHEGSMNSGVVPACARSTLSVGVSGTLVLLQGARGFA

SEQ ID NO: 69320 - DNA, 1128 bp, Artificial Sequence
  derived and/or modified sequence
atggagcgcgcttcttgccttttgctgttgctgctgcctctcgtgcacgtcagcgcaaccacaccagagccctgcgaacttgatgacgaagattttaggtgcgtgtgcaacttttcggagcctcagccggattggagcgaggcctttcaatgcgtcagcgccgtagaagtcgagatacacgctggaggcctgaacctggaaccatttcttaagcgtgtagacgccgacgcagatccccggcagtacgccgacacagtgaaagctttaagagtgagacgtttgactgttggagccgcccaagtccctgctcagctgctggttggcgctcttagagttctcgcatattctcgcctgaaggaactgacattggaagatctcaagatcaccggcactatgccacctctgcccctagaggctactggacttgctttgtcctctcttcgactgcgaaacgtgtcttgggccaccgggagatcatggcttgctgagctgcagcagtggctgaaacctgggctcaaggtgctctcaattgcgcaagcacacagccccgccttctcttgtgaacaggtgagggccttccccgcactgaccagcctggacctgagtgacaacccgggactcggcgaacgaggattaatggctgccttatgtccccacaaatttccggctatacagaaccttgcactcagaaacactgggatggaaacccctacaggggtgtgcgccgctttggccgctgcaggagtccagccccactctttggaccttagtcataattccttacgggctacggttaatccttcagctccccgatgcatgtggtcttcagctctgaatagtttgaacttgtcttttgcaggcctcgagcaggtccccaaagggctcccggcaaagctacgtgtgctcgatctttcctgcaacagactcaatagagctccgcagcctgacgagctccctgaagtcgataatctcaccttggatggcaatccgttcttagtgcccggaactgctctgccacatgagggtagcatgaattccggggtggtccccgcctgtgcaaggtcgacactgtccgttggcgtttccggcacgctggttctgctccagggcgctcggggatttgcctag

SEQ ID NO: 69321 - DNA, 1128 bp, Artificial Sequence
  derived and/or modified sequence
atggaacgagcaagttgcctcctactgctccttctcccattggtgcatgtgagtgctactacacccgagccctgcgaactagacgacgaggattttaggtgcgtgtgcaatttcagtgaacctcaaccagactggtccgaggctttccaatgtgtctccgccgtagaggtggagatccatgcgggcgggctgaatcttgaaccattcctgaaacgggttgacgccgacgccgatcctcggcagtatgccgatactgtgaaggctctgagggtgagaaggctgacagtgggcgctgcacaggtccccgcccagctgctggtgggcgcactgagggtacttgcctactcacggctgaaagaacttacgcttgaggatctgaaaatcacaggaaccatgcctccactccctctggaggccaccggtctggccctgtccagcttgcgacttaggaatgtgtcttgggcaactggtaggtcctggctcgccgagctgcagcagtggctgaaacctgggttaaaagttttaagcatcgctcaggcgcattctcccgcattttcatgcgagcaagtgagggccttccctgctctgaccagtctggatctctctgacaatcctggactgggcgagcgagggctcatggccgctctttgccctcataagttccccgcaattcaaaatctcgctttaagaaacacaggtatggaaacacccacgggagtgtgcgccgcccttgcggccgcaggggttcagccacatagtctggacctctcacataattcattacgcgccacagtcaatcctagcgcccccagatgcatgtggtcctcagcgctcaacagcctgaatctgagtttcgcgggactggagcaggtgcccaagggcctgccggctaagctgcgggtgttggacctgtcttgcaaccgactgaaccgcgccccacaacctgacgagctaccagaagttgataatctgactctggatggtaacccttttctcgtcccggggacggccctgccccacgaggggtcaatgaacagcggtgtggttccggcgtgcgcacggtcaactctgtctgtgggcgtcagtggaactctcgtacttctgcagggtgcccgagggtttgcctag

SEQ ID NO: 69322 - DNA, 1128 bp, Artificial Sequence
  derived and/or modified sequence
atggagcgggccagctgcctgctgctgctgctgctgcccctggtgcacgtgtctgccaccaccccagagccctgtgagctggatgatgaggacttccgctgtgtgtgcaacttcagcgagccccagcctgactggagcgaggccttccagtgtgtgtctgctgtggaggtggagatccatgctgggggcctgaacctggagcccttcctgaagagggtggatgctgatgctgacccccggcagtatgctgacacagtgaaggccctgcgggtgcggcggctgactgtgggcgccgcccaggtgcctgcccagctgctggtgggcgccctgcgggtgctggcctacagccggctgaaggagctgaccctggaggacctgaagatcaccggcaccatgccacccctgcccctggaggccaccggcctggccctgagcagcctgcggctgagaaatgtgtcctgggccaccggccgctcctggctggccgagctgcagcagtggctgaagccaggcctgaaggtgctgagcatcgcccaggcccacagccctgccttcagctgtgagcaggtgcgggccttccctgccctgaccagcctggacctgagtgacaaccctggcctgggggagcggggcctgatggccgccctgtgcccccacaagtttcctgccatccagaacctggccctgaggaacacaggcatggagacccccaccggggtgtgtgccgccctggccgctgctggggtgcagccccacagcctggacctgagccacaacagcctgcgggccaccgtgaaccccagcgccccccgctgcatgtggagcagcgccctgaacagcctgaacctgagctttgctggcctggagcaggtgcccaagggcctgcctgccaagctgcgggtgctggacctgagctgcaaccggctgaacagagccccccagccagatgagctgcctgaggtggacaacctgaccctggatggcaaccccttcctggtgcccggcacagccctgccccatgagggctccatgaacagcggcgtggtgcctgcctgtgcccggagcaccctgtctgtgggcgtgtctggcaccctggtgctgctgcagggcgcccggggctttgcctag

SEQ ID NO: 69323 - DNA, 1128 bp, Artificial Sequence
  derived and/or modified sequence
atggagcgggccagctgcctgctgctgctgctgctgcccctggtgcatgtgtctgcaacaacccccgagccgtgtgagttggatgacgaggacttccggtgcgtgtgtaatttttccgagccacagccagactggtccgaggcatttcagtgtgtctcagcggtggaggttgaaatccacgcaggcgggctaaatctcgaacccttcctcaagcgggttgatgcagacgctgatcctaggcaatatgctgatacagtaaaggctcttcgagtgagacggctgaccgtgggtgctgctcaggtccccgcgcagctgctagtgggcgccttacgtgtcctagcctactcccggctgaaggaactcacactcgaagatcttaagatcactggtacgatgcctcccctgcctctcgaggctaccggactcgcactgagtagcttgaggctaagaaacgtgtcctgggctaccggcaggagctggctggccgagctccagcagtggctgaagcccgggttaaaagtcctgagcattgcccaggcacacagtcccgccttctcatgcgaacaagtcagagccttccctgccctgacctctttggacctctctgataaccccgggctgggggaacgaggcttaatggccgcactgtgtccgcataaattccccgcaattcagaatttggcactgagaaacaccggcatggaaacacctactggagtctgtgccgcactcgctgctgccggagtccagccccattctctcgatctttcacataattcactgagggccacggtgaatccatctgctccccgctgcatgtggtcctccgcgctcaattctctaaatctttcctttgctgggctggaacaggtcccgaaggggcttcccgccaagcttcgagtgctcgatctaagctgcaatagattaaatagagccccacaaccggacgagcttccagaggtcgacaacctgactctggacggtaacccctttctggtaccgggtacagcgttaccccacgaaggctcgatgaatagcggtgtggtgcccgcatgcgcccggagcaccctgtctgtcggcgtgtccggaacgctggttctgttgcagggcgcacggggttttgcctag

SEQ ID NO: 69324 - DNA, 1128 bp, Artificial Sequence
  derived and/or modified sequence
atggagcgggccagctgcctgctgctgctgctgctgcccctggtgcatgtctcagccacaacacctgaaccatgtgaactcgatgatgaggacttccggtgcgtgtgcaacttttccgaaccacagcctgactggtctgaagctttccagtgcgtttctgccgtggaggtggagattcacgccgggggactaaacctggaaccatttctgaaaagggtggatgccgacgctgacccccggcagtatgccgatacggtgaaggcactacgcgttcggcgcctcacagtgggggctgcacaagtcccagctcagcttttggtgggagctctgagggttctcgcctactcacggcttaaagagttgacactggaagacttgaagattacaggcaccatgccacctctccctctcgaggccaccggcctggctctgagtagtttgcggttgcggaatgtgtcatgggctactggccggagctggctcgctgaactccagcaatggctgaagccgggcttgaaagttttaagtattgctcaggctcatagcccagctttttcctgcgaacaggtgcgtgcattccccgctttgacatccctagatctctctgacaatcctggactgggggagagaggcctgatggcggccctatgcccgcacaagtttccagccattcaaaacctggccttacgtaatacaggcatggagacacccactggggtatgcgctgcccttgcagccgctggagtgcagcctcacagtctagatttatctcacaattcacttcgcgccactgtcaatccaagcgcgcccagatgtatgtggagtagcgccctgaattcactgaacctgagtttcgccggcctcgaacaagttcccaagggcctgccagcaaagctccgtgtccttgacctgtcgtgtaatagattgaaccgagcgccgcaacccgatgaactccctgaagtagacaacttgactctggacggcaaccccttcctggtcccaggcacagccctgccccacgagggttctatgaacagcggagtggtgccggcctgtgcccgaagcaccttgtctgtgggcgtgtctgggactctggtccttctccagggcgcaaggggctttgcctag

SEQ ID NO: 69325 - DNA, 1128 bp, Artificial Sequence
  derived and/or modified sequence
atggaaagggcctcctgtctcctccttctcctgctccctctggtgcacgtgagtgcaaccacacccgaaccatgtgaactagatgacgaagactttagatgcgtctgtaatttttccgagcctcagcccgactggtccgaggccttccagtgtgtatctgctgttgaggtcgagattcacgcgggaggactcaatctggaaccatttctaaagcgggttgatgcggatgcggatccacgccagtacgccgacaccgtgaaggccctcagggtccggagactgaccgtgggagcagcgcaggtgccagcccagcttctcgtgggcgcactgagagtgctggcatattcgcgcctgaaggagctgacacttgaggacttgaaaatcacagggacaatgccgcctctccccctggaagccacaggtctggccctgagttccttaagattgcgtaacgtttcgtgggctactggacgtagctggctcgctgagctccagcaatggctgaagcctggactaaaggttctgtcaattgcacaagcccactctccagctttttcctgtgaacaagtaagagcttttcctgctcttacatcgctagacttatccgacaatcccggactcggagagcggggtctgatggcagcgctgtgcccccacaagtttccagctattcagaacctggcgctgcgaaatacaggaatggaaacacccactggcgtgtgtgccgcactggccgcagccggagtccagccgcactctctggatctctctcacaacagcttacgggctacagtgaatccctccgctccacggtgcatgtggtctagcgcactgaacagcctgaaccttagctttgccggactggagcaggtgccaaaaggactgcccgctaagctgcgggtgctggatctctcgtgtaatcgacttaacagggctccacagcccgatgagctccccgaggtggataatctcaccctagacggcaaccccttcctggtcccgggaaccgccctaccccacgaaggatccatgaatagcggagtcgtgccagcctgtgctaggagcaccttatccgtaggtgtctcgggcactctggtcctgttacagggtgctcgaggcttcgcctag

SEQ ID NO: 69326 - DNA, 1128 bp, Artificial Sequence
  derived and/or modified sequence
atggagcgggcatcttgtctgctgctgctgctactgccactggttcacgtgtcggccaccacccctgaaccgtgcgagctggacgacgaagacttcagatgtgtttgtaatttcagcgagccccagccagattggtcagaagccttccaatgcgtgtcagcggtggaggtggaaatccacgccggtgggctaaacctggagccttttttaaagagagtcgatgccgatgcagatcctaggcagtacgccgatactgtgaaggcccttcgcgtgaggcggcttacggtgggagctgcccaggtgcccgctcaactccttgtgggagctctgcgagtattagcatatagtcgactgaaggagctcacgctggaagatctcaaaattactggcacgatgcctcctctgcccctggaggctacaggcctggctcttagcagcctcagactgcggaacgtgtcttgggctacaggcaggtcatggttagcagagctacagcagtggcttaagcctgggcttaaggtattgtcaatcgcccaagcccacagcccagctttctcttgtgagcaagttcgcgcatttcccgcattgacgtctttagatctttccgataatcctggcctcggggaaagaggcttaatggcggcactgtgcccacacaagttccctgcaatacagaacctcgcccttcggaatactgggatggaaactcccacgggagtgtgcgctgccttagcagctgccggtgtacagcctcactcgttagatctgagtcacaactcattaagagccacagttaaccctagcgctccacggtgcatgtggtcttctgctctgaacagcctcaatctttcatttgctgggttggaacaggtacctaagggattgcctgctaaattaagagtactggatctcagctgcaacaggctgaaccgcgcaccgcagccagacgaacttcccgaggtcgataatcttaccttagacggaaacccttttttggtgcccggaactgccctgccccatgaaggaagcatgaactcaggggttgtccccgcatgtgctaggtcaacattatcagtgggtgtgtccggaactttagtcctgctgcagggcgctcgcggttttgcatag

SEQ ID NO: 69327 - DNA, 1886 bp, Artificial Sequence
  derived and/or modified sequence
aattctaccccccttggtgccaacagatgaggttcacaatctcttccacaaaacatgcagttaaatatctgaggatattcagggacttggatttggtggcaggagatcaacataaaccaagacaaggaagaagtcaaagaaatgaatcaagtagattctctgggatataaggtagggggattggggggttggatagtgcagagtatggtactggcctaaggcactgaggatcatccttttcccacacccaccagagaaggcttaggctcccgagtcaacagggcattcaccgcctggggcgcctgagtcatcaggacactgccaggagacacagaaccctagatgccctgcagaatccttcctgttacggtccccctccctgaaacatccttcattgcaatatttccaggaaaggaagggggctggctcggaggaagagaggtggggaggtgatcagggttcacagaggagggaactgaatgacatcccaggattacataaactgtcagaggcagccgaagagttcacaagtgtgaagcctggaagccggcgggtgccgctgtgtaggaaagaagctaaagcacttccagagcctgtccggagctcagaggttcggaagacttatcgaccatggagcgcgcgtcctgcttgttgctgctgctgctgccgctggtgcacgtctctgcgaccacgccagaaccttgtgagctggacgatgaagatttccgctgcgtctgcaacttctccgaacctcagcccgactggtccgaagccttccagtgtgtgtctgcagtagaggtggagatccatgccggcggtctcaacctagagccgtttctaaagcgcgtcgatgcggacgccgacccgcggcagtatgctgacacggtcaaggctctccgcgtgcggcggctcacagtgggagccgcacaggttcctgctcagctactggtaggcgccctgcgtgtgctagcgtactcccgcctcaaggaactgacgctcgaggacctaaagataaccggcaccatgcctccgctgcctctggaagccacaggacttgcactttccagcttgcgcctacgcaacgtgtcgtgggcgacagggcgttcttggctcgccgagctgcagcagtggctcaagccaggcctcaaggtactgagcattgcccaagcacactcgcctgccttttcctgcgaacaggttcgcgccttcccggcccttaccagcctagacctgtctgacaatcctggactgggcgaacgcggactgatggcggctctctgtccccacaagttcccggccatccagaatctagcgctgcgcaacacaggaatggagacgcccacaggcgtgtgcgccgcactggcggcggcaggtgtgcagccccacagcctagacctcagccacaactcgctgcgcgccaccgtaaaccctagcgctccgagatgcatgtggtccagcgccctgaactccctcaatctgtcgttcgctgggctggaacaggtgcctaaaggactgccagccaagctcagagtgctcgatctcagctgcaacagactgaacagggcgccgcagcctgacgagctgcccgaggtggataacctgacactggacgggaatcccttcctggtccctggaactgccctcccccacgagggctcaatgaactccggcgtggtcccagcctgtgcacgttcgaccctgtcggtgggggtgtcgggaaccctggtgctgctccaaggggcccggggctttgcctaagatccaagacagaataatgaatggactcaaactgccttggcttcaggggagtcccgtcaggacgttgaggacttttcgaccaattcaaccctttgccccacctttattaaaatcttaaacaacgggtc

SEQ ID NO: 69328 - DNA, 1648 bp, Artificial Sequence
  derived and/or modified sequence
aattctaccccccttggtgccaacagatgaggttcacaatctcttccacaaaacatgcagttaaatatctgaggatattcagggacttggatttggtggcaggagatcaacataaaccaagacaaggaagaagtcaaagaaatgaatcaagtagattctctgggatataaggaaaggaagggggctggctcggaggaagagaggtggggaggtgatcagggttcacagaggagggaactgaatgacatcccaggattacataaactgtcagaggcagccgaagagttcacaagtgtgaagcctggaagccggcgggtgccgctgtgtaggaaagaagctaaagcacttccagagcctgtccggagctcagaggttcggaagacttatcgaccatggagcgcgcgtcctgcttgttgctgctgctgctgccgctggtgcacgtctctgcgaccacgccagaaccttgtgagctggacgatgaagatttccgctgcgtctgcaacttctccgaacctcagcccgactggtccgaagccttccagtgtgtgtctgcagtagaggtggagatccatgccggcggtctcaacctagagccgtttctaaagcgcgtcgatgcggacgccgacccgcggcagtatgctgacacggtcaaggctctccgcgtgcggcggctcacagtgggagccgcacaggttcctgctcagctactggtaggcgccctgcgtgtgctagcgtactcccgcctcaaggaactgacgctcgaggacctaaagataaccggcaccatgcctccgctgcctctggaagccacaggacttgcactttccagcttgcgcctacgcaacgtgtcgtgggcgacagggcgttcttggctcgccgagctgcagcagtggctcaagccaggcctcaaggtactgagcattgcccaagcacactcgcctgccttttcctgcgaacaggttcgcgccttcccggcccttaccagcctagacctgtctgacaatcctggactgggcgaacgcggactgatggcggctctctgtccccacaagttcccggccatccagaatctagcgctgcgcaacacaggaatggagacgcccacaggcgtgtgcgccgcactggcggcggcaggtgtgcagccccacagcctagacctcagccacaactcgctgcgcgccaccgtaaaccctagcgctccgagatgcatgtggtccagcgccctgaactccctcaatctgtcgttcgctgggctggaacaggtgcctaaaggactgccagccaagctcagagtgctcgatctcagctgcaacagactgaacagggcgccgcagcctgacgagctgcccgaggtggataacctgacactggacgggaatcccttcctggtccctggaactgccctcccccacgagggctcaatgaactccggcgtggtcccagcctgtgcacgttcgaccctgtcggtgggggtgtcgggaaccctggtgctgctccaaggggcccggggctttgcctaagatccaagacagaataatgaatggactcaaactgccttggcttcaggggagtcccgtcaggacgttgaggacttttcgaccaattcaaccctttgccccacctttattaaaatcttaaacaacgggtc

SEQ ID NO: 69329 - DNA, 1128 bp, Artificial Sequence
  derived and/or modified sequence
atggagagagccagctgcctgctgctgctgctgctgcccctggtgcacgtgagcgccaccacccccgagccctgcgagctggacgacgaggacttcagatgcgtgtgcaacttcagcgagccccagcccgactggagcgaggccttccagtgcgtgagcgccgtggaggtggagatccacgccggcggcctgaacctggagcccttcctgaagagagtggacgccgacgccgaccccagacagtacgccgacaccgtgaaggccctgagagtgagaagactgaccgtgggcgccgcccaggtgcccgcccagctgctggtgggcgccctgagagtgctggcctacagcagactgaaggagctgaccctggaggacctgaagatcaccggcaccatgccccccctgcccctggaggccaccggcctggccctgagcagcctgagactgagaaacgtgagctgggccaccggcagaagctggctggccgagctgcagcagtggctgaagcccggcctgaaggtgctgagcatcgcccaggcccacagccccgccttcagctgcgagcaggtgagagccttccccgccctgaccagcctggacctgagcgacaaccccggcctgggcgagagaggcctgatggccgccctgtgcccccacaagttccccgccatccagaacctggccctgagaaacaccggcatggagacccccaccggcgtgtgcgccgccctggccgccgccggcgtgcagccccacagcctggacctgagccacaacagcctgagagccaccgtgaaccccagcgcccccagatgcatgtggagcagcgccctgaacagcctgaacctgagcttcgccggcctggagcaggtgcccaagggcctgcccgccaagctgagagtgctggacctgagctgcaacagactgaacagagccccccagcccgacgagctgcccgaggtggacaacctgaccctggacggcaaccccttcctggtgcccggcaccgccctgccccacgagggcagcatgaacagcggcgtggtgcccgcctgcgccagaagcaccctgagcgtgggcgtgagcggcaccctggtgctgctgcagggcgccagaggcttcgcctag

SEQ ID NO: 69330 - protein, 3037 aa, Artificial Sequence
  derived and/or modified sequence
MHLHQVLTGAVNPGDNCYSVGSVGDVPFTAYGSGCDIVILANDFECVQIIPGAKHGNIQVSCVECSNQQGRIAASYGNAVCIFEPLGINSHKRNCQLKCQWLKTGQFFLSSVTYNLAWDPQDNRLLTATDSIQLWAPPGDDILEEEEEIDNTVPPVLNDWKCVWQCKTSVSVHLMEWSPDGEYFATAGKDDCLLKVWYPMTGWKSSIIPQDHHEVKRRQSSTQFSFVYLAHPRAVTGFSWRKTSKYMPRGSVCNVLLTSCHDGVCRLWAETLLPEDCLLGEQICETTTSSIASSLSHAGRHKDRIQHALETIHHLKNLRKGQRRSSVLVTHAELMPDQTAMHEVQRHISHHANALCHFHIAASINPATDIPNVLVGTAFNVDDGNGGFVVHWLNNKEFHFTSSTEVFMHQLRKLSDKQVDHENDDADREDEEHSQEDRERGLHMKLDHDLSLDRESEAGTGSSEHEDGEREGSPRTYSRLSVPMPLPTVLLDRKIETLLTEWNKNPDMLFTIHPVDGTFLVWHVKYLDEYNPGIFRQVQVSFSSRIPVAFPSGDASSLSKNIMMYACINATKDSHHTLLHQEGMSVGSPHGSQPHSRSHSTHMNILAPTVMMISKHIDGSLNQWAVTFADKSAFTTVLTVSHKFRYCGHRFHLNDLACHSVLPLLLTSSHHNALLTPELDCQWDSDNKLSRLMDPVKHIKGSSKQPLRNAATRTFHDPNAIYSELILWRVDPIGPLSYTGGVSELARINSLHTSAFSNVAWLPTLIPSYCLGTYCNSASACFVASDGKNLRLYQAVVDARKLLDELSDPESSKLIGEVFNIVSQQSTARPGCIIELDAITNQCGSNTQLLHVFQEDFIIGYKPHKEDMEKKETEIFFQPSQGYRPPPFSEKFFLVVIEKDSNNNSILHMWHLHLKSVQACLAKASEGASSESLLSVPGQKNVDSSPETSPSVSPMPHSSSIANLQTASKLILSSRLVYSQPLDLPESVEVIRATPSAGHLSSSSIYPVCLAPYLVVTTCSDNKVRFWKCCMEANPECNKSDEKEIYHWKRWPLMNDEGEDNSSTVSIVGRPVAVSCSYTGRLAVAYKQPIHHNGFVSKEFSMHVCIFECESTGGSEWVLEQTIHLDDLVKVGSVLDSRVSVDSNLFVYSKSDALLSKDRYLIPNIKHLVHLDWVSKEDGSHILTVGVGANIFMYGRLSGIVTEQTNSKDGVAVITLPLGGSIKQGVKSRWVLLRSIDLVSSVDGTPSLPVSLSWVRDGILVVGMDCEMHVYAQWKHAVKFGDTEADSSNAEEAAMQDHSTFKSNMLARKSVVEGTAISDDVFCSPTVIQDGGLFEAAHVLSPTLPQYHPTQLLELMDLGKVRRAKAILSHLVKCIAGEVAIVRDPDAGEGTKRHLSRTISVSGSTAKETVTVGKDGTRDYTEIDSIPPLPLYALLAADQDTSYRISEESTKIPQSYEDQTVSQPEDQYSELFQIQDIPTDDIDLEPEKRENKSKVINLSQYGPAYFGQEHARVLSSHLMHSSLPGLTRLEQMFLVALADTVATTSTELDESRDKSCSGRDTLDECGLRYLLAMRLHTCLLTSLPPLYRVQLLHQGVSTCHFAWAFHSEAEEELINMIPAIQRGDPQWSELRAMGIGWWVRNINTLRRCIEKVAKASFQRNNDALDAALFYLSMKKKAVVWGLFRSQHDEKMTTFFSHNFNEDRWRKAALKNAFSLLGKQRFEQSAAFFLLAGSLKDAIEVCLEKMEDIQLAMVIARLYESEFETSSTYISILNQKILGCQKDGSGFSCKRLHPDPFLRSLAYWVMKDYTRALDTLLEQTPKEDDEHQVIIKSCNPVAFSFYNYLRTHPLLIRRNLASPEGTLATLGLKTEKNFVDKINLIERKLFFTTANAHFKVGCPVLALEVLSKIPKVTKTSALSAKKDQPDFISHRMDDVPSHSKALSDGNGSSGIEWSNVTSSQYDWSQPIVKVDEEPLNLDWGEDHDSALDEEEDDAVGLVMKSTDAREKDKQSDQKASDPNMLLTPQEEDDPEGDTEVDVIAEQLKFRACLKILMTELRTLATGYEVDGGKLRFQLYNWLEKEIAALHEICNHESVIKEYSSKTYSKVESDLLDQEEMVDKPDIGSYERHQIERRRLQAKREHAERRKSWLQKNQDLLRVFLSYCSLHGAQGGGLASVRMELKFLLQESQQETTVKQLQSPLPLPTTLPLLSASIASTKTVIANPVLYLNNHIHDILYTIVQMKTPPHPSIEDVKVHTLHSLAASLSASIYQALCDSHSYSSQTEGNQFTGMAYQGLLLSDRRRLRTESIEEHATPNSSPAQWPGVSSLINLLSSAQDEDQPKLNILLCEAVVAVYLSLLIHALATNSSSELFRLAAHPLNNRMWAAVFGGGVKLVVKPRRQSENISAPPVLSEDIDKHRRRFNMRMLVPGRPVKDATPPPVPAERPSYKEKFIPPELSMWDYFVAKPFLPLSDSGVIYDSDESIHSDEEDDAFFSDTQIQEHQDPNSYSWALLHLTMVKLALHNVKNFFPIAGLEFSELPVTSPLGIAVIKNLENWEQILQEKMDQFEGPPPNYINTYPTDLSVGAGPAILRNKAMLEPENTPFKSRDSSAFPVKRLWHFLVKQEVLQETFIRYIFTKKRKQSEVEADLGYPGGKAKVIHKESDMIMAFSVNKANCNEIVLASTHDVQELDVTSLLACQSYIWIGEEYDRESKSSDDVDYRGSTTTLYQPSATSYSASQVHPPSSLPWLGTGQTSTGASVLMKRNLHNVKRMTSHPVHQYYLTGAQDGSVRMFEWTRPQQLVCFRQAGNARVTRLYFNSQGNKCGVADGEGFLSIWQVNQTASNPKPYMSWQCHSKATSDFAFITSSSLVATSGHSNDNRNVCLWDTLISPGNSLIHGFTCHDHGATVLQYAPKQQLLISGGRKGHVCIFDIRQRQLIHTFQAHDSAIKALALDPYEEYFTTGSAEGNIKVWRLTGHGLIHSFKSEHAKQSIFRNIGAGVMQIDIIQGNRLFSCGADGTLKTRVLPNAFNIPNRILDIL

SEQ ID NO: 69331 - DNA, 9114 bp, Artificial Sequence
  derived and/or modified sequence
atgcacctgcaccaggtgctgacaggtgccgtgaaccctggggataattgctactccgtaggatctgtgggcgacgttccatttactgcctacggaagtgggtgcgatatcgtcatactcgcaaatgatttcgagtgcgtccagatcattcccggtgcgaagcatggaaatattcaagtcagctgcgtagaatgctctaatcagcaagggcgaattgcagccagctacgggaatgcagtgtgtatctttgagcccttggggatcaactcgcacaaacgtaattgccagcttaagtgccagtggctgaaaaccggtcagttcttcctgagcagtgtaacctacaatttagcctgggacccacaggacaataggctgctaactgcaacggattctatccagctctgggcgccccccggagacgacatcctggaggaagaggaagaaatcgacaacactgttccccctgtgctcaacgattggaaatgcgtctggcagtgcaagacatctgtgagcgtacacttaatggagtggtcacccgacggcgagtacttcgcaaccgctggcaaagacgattgcctgctgaaagtctggtatcccatgactggctggaagagttcaataatcccgcaggaccaccacgaagtaaagcgccggcagagctccactcaattctccttcgtgtacctggcccatcctagagctgtgactggcttcagttggcgaaagacctccaaatatatgcccaggggctcggtgtgtaatgttctcctcacatcatgccatgacggagtctgtcgactgtgggctgagactctgctccctgaagactgtttacttggcgagcagatttgcgaaaccacgacaagtagcatcgcaagtagtctcagccatgcggggcgccataaagaccgcattcaacatgccttagaaaccatccaccatttaaaaaacctgcgcaagggacagaggcgctcctctgtgctcgtgacacacgcagagctgatgcctgatcagacagccatgcacgaagtgcagaggcacatcagtcaccacgctaatgccctgtgccatttccacatcgcagcatccattaatccggctaccgacatcccgaacgtgctggtcggcactgcctttaatgtggatgacggtaacggagggttcgtggtccactggctgaacaataaggagttccactttacttcctcaactgaagtctttatgcaccagctgcggaagctatcagacaaacaagtggatcatgagaatgacgatgccgatcgcgaagacgaggaacacagccaggaggatcgggagcgtgggctgcatatgaaacttgatcacgacctgtcgctcgacagggagagcgaagcagggacagggagtagcgagcacgaggatggtgagcgtgaggggagcccacggacctattccagactgtccgtgcctatgccactgcccaccgttttgttggatcggaaaatcgagaccctgcttacagaatggaataagaacccggatatgctgtttaccatccaccccgtcgacggcactttcctcgtgtggcatgtaaagtacctcgatgaatacaatcccgggatcttccgccaggtccaggtgagtttcagtagcagaatcccagtggcattcccttcaggtgacgcgagttctttatccaagaacattatgatgtatgcctgcatcaatgccacgaaggacagtcatcataccctcttgcatcaggaaggcatgagtgtcgggtctccacacggctctcagccccactccaggtcccactctacacatatgaacatattggcacccaccgtcatgatgatctcaaaacacatagatggatctctgaatcagtgggctgtgaccttcgcggacaagtcagcctttaccactgttctgaccgttagccacaagtttcgttactgtggccataggtttcatctgaatgacctggcctgtcattccgtcttgcccttgctccttacctcaagtcaccacaatgcactgttgaccccggaattagattgccagtgggactccgacaacaaactgtctcgcctcatggaccctgtgaaacacattaaaggatcctctaaacagcctctgaggaatgccgccacaaggacctttcatgaccccaatgcaatctatagcgagttaattctgtggagggttgaccccattggcccgctaagctacaccggcggggtgagcgagctggcccggatcaacagtctacataccagcgcattcagtaacgtggcatggctgcccactctgatccccagttactgccttgggacatattgcaacagcgcttctgcctgcttcgtggcaagtgacggcaaaaacctgcgactctatcaggccgttgtcgatgctcggaaactgctggatgaattatcggaccctgaatcctctaagctgattggcgaagtgttcaacatcgtgagtcagcagtccactgccagaccagggtgcattattgagctagatgcaatcaccaatcagtgtgggagcaacacacagcttcttcatgtgttccaagaggactttataataggctacaagccacacaaagaggacatggagaaaaaagagactgagatcttcttccagccatcacaggggtatagaccgccgcctttttccgagaagttcttcctagtcgtaatagaaaaggattctaacaataattccatacttcacatgtggcacctgcatctcaagagcgtgcaggcatgcctggcgaaagcctctgagggtgctagcagcgaatctcttttgagcgtccccgggcaaaagaatgtcgactctagccctgaaaccagcccttcagtgtcacccatgccgcactcctcttccatcgccaatctccagacagccagtaagctgattctgtcctcacgcctcgtatactcccagccactggatttacccgagtccgtggaagtgatacgcgcaacgccttcagcaggacatctttcctcatcttccatctacccagtgtgcttggcgccctacttagttgtaacaacctgttccgataataaggtccggttttggaagtgctgtatggaggccaatcctgaatgtaataagagcgacgagaaggaaatttaccactggaagaggtggcccctcatgaatgatgaaggcgaggacaattccagtaccgtttccatcgttggacgacccgtggccgtgtcatgctcctataccggaaggctcgccgtggcatacaaacagccgattcaccacaacggcttcgtttcgaaagagttttcaatgcacgtgtgcatttttgagtgcgagtccaccggcggaagtgagtgggttttagagcagaccattcatttagacgatttggtcaaggtaggttccgttctggatagcagggtgtcagttgactctaacctgtttgtgtactctaagtcagatgcgcttctctccaaagatcggtatctgattccaaatattaaacacttagttcatctggactgggtgtcaaaggaagacggcagccatattctcaccgtaggtgtgggcgccaatatttttatgtacggccggctgtcaggaattgtgaccgagcagaccaactccaaggatggcgtagccgtcattacactgcccctcgggggctctatcaaacagggggtgaagtcgaggtgggtactacttcggtctatcgatctcgtctctagtgtagacggcaccccctctctgccggtgtccctctcttgggtgcgcgatggaatcctggttgtcggaatggattgtgaaatgcacgtctatgcgcaatggaagcacgcagtgaaattcggcgatacagaagcagatagcagcaatgccgaagaagcagccatgcaggatcattccaccttcaagtccaacatgctggctagaaagtccgtggtagagggcacagccatcagtgatgacgtgttttgctcccccaccgtgattcaggatggaggcctattcgaggccgcgcacgtgttgagccccacgctgccgcaatatcatccaacacagctgctcgagctgatggaccttgggaaggtgcggagagccaaagcaattctgtcccatctagtcaagtgtattgcaggcgaggtggcaatcgttcgcgaccctgatgccggggaaggtaccaagcggcatctcagtcgaacaatcagtgtgtccgggtctacagctaaggaaacagtaacagttggcaaggatggcactcgtgattacacagaaatcgactctatccctcccctcccactctacgcactgttagccgccgaccaggatacttcatacagaatatctgaggaatctacgaagattcctcagtcctacgaggaccagacggtcagccagcctgaggaccagtactcggagctgttccaaatccaggacataccaactgacgacattgacctggagcctgagaagcgggagaataaatcaaaggtgattaacctgtcccaatacggtcccgcatacttcggccaggagcatgccagggttctttcaagccatctgatgcacagctccctcccaggtcttactcgtttagagcagatgtttcttgtagcgctggccgatactgtggcgaccacttctacagaattagacgagagtcgcgacaagtcctgttccggacgcgacacgctagacgaatgtggcctgcggtatctattagctatgaggctccatacatgcttattgacatccttgcccccgctatacagagtccaacttctgcatcagggggtatccacatgtcacttcgcttgggccttccacagtgaagcggaggaggaactgatcaacatgattcctgctatccagaggggcgaccctcaatggtctgagctccgagccatggggataggttggtgggtgagaaatattaatacgctccgccggtgtatcgagaaggtggcaaaggcgtccttccagagaaataacgatgcattagacgccgccttgttctacctgtcaatgaaaaagaaagccgtggtttgggggttatttaggtcacagcacgacgagaagatgaccacattcttctcgcataacttcaacgaagataggtggaggaaggcagctttgaaaaacgctttctcccttctgggcaaacagagattcgaacagagcgctgccttctttctcctcgccggctcattgaaggatgccatcgaagtttgcctggaaaagatggaagatattcagctcgccatggtaattgccaggctgtatgagagtgaatttgaaactagcagcacctatatctctatccttaatcaaaagatcctgggctgtcagaaagatggatccggattttcctgtaaacggctgcacccagacccatttctgagatccctggcctactgggtcatgaaggactatacacgcgccctggatacgctgttggaacagacacctaaagaggatgacgagcatcaggtgatcattaaatcatgcaatcctgtcgcatttagcttttataattaccttcggactcacccccttttaatcaggcggaaccttgcaagccccgaaggcaccctggcaaccttgggactgaaaactgagaagaattttgttgacaagattaacttaatagaaaggaaactgtttttcactactgctaacgcacatttcaaggtcggttgcccagttctcgcattagaagttctgtctaagataccaaaggtcaccaagacctcagcgctgtcagctaaaaaagaccagcctgattttatttctcatcggatggatgacgtaccttcacacagcaaagctttatcagacggcaatggatcaagcgggatcgaatggtccaacgtgacgtcttctcagtacgattggtctcagccaattgttaaagttgacgaggagcccttgaatctcgactggggagaagatcatgattccgccctcgacgaggaagaagacgacgcagtcggactggtaatgaaatcaactgatgcgcgcgagaaggataagcagtcagaccagaaagcttccgaccctaatatgctgctcacaccgcaagaggaggatgatcccgagggtgacactgaagttgacgttatcgctgagcagctgaagtttagggcatgccttaaaatcctgatgactgaattgcgaactctcgctaccgggtatgaagtggacggtggtaaattgcgcttccaactgtacaactggttagagaaggagattgccgccttgcatgaaatttgcaaccatgaaagcgtgattaaagaatatagctcaaagacctactcgaaagtggagagtgatctcttggaccaagaggagatggtggacaagcctgatataggatcatatgaaagacatcagattgagcgaagacgactgcaggccaagcgcgaacacgccgaacgccgtaagtcctggcttcagaagaatcaggacctgctgcgggtgttcctgtcttattgctctctgcacggcgcacaaggtggtggacttgcatccgtacggatggagttaaagttccttctccaggaatctcaacaggaaactacagtcaagcagctacagagccctcttccactacctactaccctccctctgctatcggcctctattgctagtacaaagaccgtgatagccaaccccgtgctgtaccttaacaaccacatccacgatatcctgtacactatcgtccaaatgaaaactcctcctcacccatcgatcgaagatgttaaagtgcacactcttcatagcctggccgcctctctcagcgcgagcatctatcaggcgctctgtgatagccattcttactctagtcaaaccgagggaaaccagtttacggggatggcttaccaggggctcctgttgagcgatagacggcggctgcgtaccgagtccatcgaagagcacgctaccccgaattccagtccagcccagtggccaggagtcagtagcctgatcaatcttctgtcatcagcccaggacgaagaccagccaaagctgaacatcctcctgtgtgaagctgtcgtggcagtgtacctcagcctactgattcatgcgttagctaccaactcctcctcagagctgtttagattggctgctcacccgttgaacaatcgcatgtgggcagctgtgtttggtggtggtgtgaagctcgttgtcaaacccaggagacagtcagagaatatttcagccccccccgtgttatcggaagatatagataaacatcgtcgccgatttaacatgcggatgctggtgcctggacggcctgtcaaagacgcgaccccacctccagtgccagccgaaagaccaagttacaaggaaaaatttataccgccagagctgagtatgtgggactacttcgtggcaaagccattcctgcctctcagtgactccggggtaatctacgacagtgacgagtcgatccacagcgatgaagaggacgatgcgtttttctctgatacacagattcaggagcaccaggaccccaatagttatagctgggccctcttgcacctgacgatggtgaaactcgccctgcataatgtgaagaattttttccctattgcgggcctggaattctctgagcttcccgtcactagccccctgggcattgcagtgatcaaaaacctagaaaattgggagcagatccttcaggagaagatggaccaattcgaggggccacccccaaattacatcaacacgtacccaaccgacctgtcagtcggtgccggcccggccatcctgcggaataaggctatgttagagcctgagaacactccttttaagtccagggacagctccgctttccctgtgaagcgtctatggcactttctagtgaagcaggaggttttacaagaaacatttatcagatatatcttcaccaaaaagcgcaagcagagcgaagtggaagcagatcttggttaccccggagggaaggcaaaagtaatccataaggaaagcgatatgattatggcgttcagcgtcaataaagccaactgcaacgagatcgttttagcaagcacacatgatgttcaggagctcgatgttacaagcctcctggcttgtcagtcctacatttggatcggggaggagtacgaccgtgagtcaaaatcttccgatgacgtagattatagggggtccaccaccactctgtatcaacctagcgcaacgtcttacagcgcaagccaagtccatccacctagcagcctgccgtggctgggcactggccagacatccactggcgcttctgtgcttatgaagaggaatctccataacgttaaaaggatgacctcacatccagtccaccagtattacctcaccggtgcccaagacggaagtgttagaatgttcgaatggacacggccacaacaactggtatgtttccggcaagctggcaacgcccgggtcaccaggctgtacttcaatagtcagggaaataaatgcggcgtagcagacggggagggattcctctccatctggcaggtgaatcagaccgctagcaaccccaagccttatatgtcatggcaatgtcactcgaaggcaaccagtgactttgcctttataaccagcagcagcctggtcgcaacaagcgggcactccaatgataatcgcaacgtgtgcctctgggacactttgatatctcccggaaatagcttaatccacggttttacatgccatgatcatggggctacagtactgcagtacgcccctaaacaacaactgctgatttctggtgggaggaagggccacgtgtgtatcttcgacatcagacaaaggcagctgatccacacttttcaagcccatgactccgctatcaaggccctcgccttggacccctatgaggagtacttcacaactggaagcgccgagggtaatattaaagtctggcggttaactgggcatggcttgatccattcttttaagtccgaacatgccaaacagagtatctttcggaacattggtgcgggcgttatgcaaattgacataattcagggaaacaggcttttctcctgcggggccgacgggaccctgaagacacgggttcttccaaacgcattcaatatcccaaatcggatcctcgacattctctag

SEQ ID NO: 69332 - DNA, 9114 bp, Artificial Sequence
  derived and/or modified sequence
atgcacctgcaccaggtgctgaccggggctgtgaaccctggggacaactgctacagcgtgggctctgtgggagatgtgcccttcaccgcctacggcagcggctgtgacatcgtcatcctggccaatgactttgaatgtgtgcagatcatccctggggccaagcacggcaacatccaggtgtcctgtgtggagtgcagcaaccagcagggcagaattgctgccagctatggaaatgctgtgtgcatctttgagcccctgggcatcaacagccacaagaggaactgccagctgaagtgccagtggctgaagacaggccagttcttcctgagctctgtgacctacaacctggcctgggacccccaggacaaccggctgctgacagccacagacagcatccagctgtgggcccctcctggagatgacatcctggaggaggaggaggagattgacaacacagtgccccctgtgctgaatgactggaagtgtgtgtggcagtgcaagacctctgtgtctgtgcacctgatggagtggagcccagatggagagtactttgccacagctgggaaggatgactgcctgctgaaggtgtggtaccccatgacaggctggaagagcagcatcatcccccaggaccaccacgaggtgaagaggcggcagagcagcacccagttctcctttgtgtacctggcccaccccagggctgtgacaggcttctcctggaggaagaccagcaagtacatgccccggggctctgtgtgcaatgtgctgctgaccagctgccatgatggagtgtgccgcctgtgggccgagaccctgctgcctgaggactgcctgctgggggagcagatctgtgagaccaccaccagcagcatcgccagcagcctgagccacgccggccgccacaaggaccgcatccagcacgccctggagaccatccaccacctgaagaacctgaggaagggccagaggaggagctctgtgctggtgacccacgccgagctgatgccagaccagacagccatgcatgaggtgcagaggcacatcagccaccacgccaatgccctgtgccacttccacatcgccgccagcatcaacccagccacagacatccccaacgtgctggtgggcacagccttcaacgtggatgatggaaatggaggctttgtggtgcactggctgaacaacaaggagttccacttcaccagcagcacagaggtgttcatgcaccagctgaggaagctgagtgacaagcaggtggaccatgaaaatgatgatgctgacagagaagatgaggagcacagccaggaggaccgggagcggggcctgcacatgaagctggaccatgacctgagcctggaccgggagagcgaggccggcaccggcagcagcgagcatgaagatggagagcgggagggcagccccaggacctacagccggctgtctgtgcccatgcccctgcccaccgtgctgctggacaggaagattgagaccctgctgacagagtggaacaagaacccagacatgctgttcaccatccaccctgtggatggcaccttcctggtgtggcacgtgaagtacctggatgagtacaaccctggcatcttccggcaggtgcaggtgtccttcagcagccgcatccctgtggccttccccagcggagatgccagcagcctgagcaagaacatcatgatgtatgcctgcatcaatgccaccaaggacagccaccacaccctgctgcaccaggagggcatgtctgtgggcagcccccacggcagccagccccacagccgcagccacagcacccacatgaacatcctggcccccaccgtgatgatgatcagcaagcacattgatggcagcctgaaccagtgggccgtgacctttgctgacaagagcgccttcaccaccgtgctgactgtgagccacaagttccgctactgcggccaccgcttccacctgaatgacctggcctgccacagcgtgctgcccctgctgctgaccagcagccaccacaatgccctgctgaccccagagctggactgccagtgggacagcgacaacaagctgagccggctgatggaccctgtgaagcacatcaagggcagcagcaagcagcccctgagaaatgctgccaccaggaccttccatgaccccaatgccatctacagcgagctgatcctgtggagggtggaccccatcggccccctgagctacacaggaggagtgtctgagctggcccgcatcaacagcctgcacaccagcgccttcagcaatgtggcctggctgcccaccctcatccccagctactgcctgggcacctactgcaacagcgccagcgcctgctttgtggccagtgatggcaagaacctgcggctgtaccaggccgtggtggatgccaggaagctgctggatgagctgagtgaccctgagagcagcaagctgattggagaggtgttcaacatcgtgtcccagcagagcacagcccggcccggctgcatcatcgagctggatgccatcaccaaccagtgtggcagcaacacccagctgctgcacgtgttccaggaggacttcatcatcggctacaagccccacaaggaggacatggagaagaaggagacagagatcttcttccagcccagccagggctacagacctccacccttcagcgagaagttcttcctggtggtgattgagaaggacagcaacaacaacagcatcctgcacatgtggcacctgcacctgaagtctgtgcaggcctgcctggccaaggccagcgagggcgccagcagcgagagcctgctgtctgtgcccggccagaagaatgtggacagcagccctgagaccagccccagcgtgagccccatgccccacagcagcagcatcgccaacctgcagacagccagcaagctgatcctgagcagccggctggtgtacagccagcccctggacctgcctgagagcgtggaggtgatccgggccacccccagcgctggccacctgagcagcagcagcatctaccctgtgtgcctggccccctacctggtggtgaccacctgcagcgacaacaaggtgcgcttctggaagtgctgcatggaggccaaccctgagtgcaacaagagtgatgagaaggagatctaccactggaagcgctggcccctgatgaatgatgaaggagaggacaacagcagcacagtgtccatcgtgggccggcctgtggccgtgtcctgcagctacacaggccgcctggccgtggcctacaagcagcccatccaccacaatggatttgtgtccaaggagttctccatgcacgtgtgcatctttgaatgtgagagcactggaggcagcgagtgggtgctggagcagaccatccacctggatgacctggtgaaggtgggctctgtgctggacagccgggtgtctgtggacagcaacctgtttgtgtacagcaagagtgatgccctgctgagcaaggaccgctacctgatccccaacatcaagcacctggtgcacctggactgggtgtccaaagaagatggcagccacatcctgactgtgggcgtgggcgccaacatcttcatgtatggccgcctgagcggcatcgtgacagagcagaccaacagcaaggatggagtggccgtcatcaccctgcccctgggcggcagcatcaagcagggcgtgaagagccgctgggtgctgctgcggagcattgacctggtgtcctctgtggatggcacccccagcctgcctgtgtccctgtcctgggtgagagatggcatcctggtggtgggcatggactgtgagatgcacgtgtatgcccagtggaagcatgctgtgaagtttggagacacagaagctgacagcagcaatgctgaggaggccgccatgcaggaccacagcaccttcaagagcaacatgctggccaggaagtctgtggtggagggcacagccatcagtgatgatgtgttctgcagccccaccgtcatccaggacggcggcctgtttgaggccgcccacgtgctgagccccaccctgccccagtaccaccccacccagctgctggagctgatggacctgggcaaggtgcggcgggccaaggccatcctgagccacctggtgaagtgcatcgccggggaggtggccatcgtgcgggaccctgatgctggggagggcaccaagaggcacctgagcaggaccatctctgtgtctggcagcacagccaaggagaccgtgacagtgggcaaggatggcacccgggactacacagaaattgacagcatcccccccctgcccctgtatgccctgctggccgctgaccaggacaccagctaccgcatcagcgaggagagcaccaagatcccccagagctatgaggaccagacagtgtcccagcctgaggaccagtacagcgagctgttccagatccaggacatccccacagatgacatcgacctggagcctgagaagcgggagaacaagagcaaggtgatcaacctgagccagtatggccctgcctacttcggccaggagcacgcccgggtgctgagcagccacctgatgcacagcagcctgcccggcctgacccggctggagcagatgttcctggtggccctggccgacacagtggccaccaccagcacagagctggatgagagccgggacaagagctgcagcggccgggacaccctggatgaatgtggcctgcgctacctgctggccatgaggctgcacacctgcctgctgaccagcctgccccccctgtacagagtgcagctgctgcaccagggcgtgtccacctgccactttgcctgggccttccacagcgaggccgaggaggagctgatcaacatgatcccagccatccagagaggagacccccagtggagcgagctgcgggccatgggcatcggctggtgggtgaggaacatcaacaccctgcggcgctgcatcgagaaggtggccaaggccagcttccagagaaataatgatgccctggatgctgccctcttctacctgtccatgaagaagaaggctgtggtgtggggcctcttccgcagccagcatgatgagaagatgaccaccttcttcagccacaacttcaatgaagatcgctggaggaaggccgccctgaagaatgccttcagcctgctgggcaagcagagatttgagcagagcgctgccttcttcctgctggccggcagcctgaaggatgccatcgaggtgtgcctggagaagatggaggacatccagctggccatggtgattgcccggctgtatgagagcgagtttgagaccagcagcacctacatcagcatcctgaaccagaagatcctgggctgccagaaggatggcagcggcttcagctgcaagaggctgcacccagaccccttcctgcggagcctggcctactgggtgatgaaggactacacccgggccctggacaccctgctggagcagacccccaaggaggatgatgagcaccaggtgatcatcaagagctgcaaccctgtggccttctccttctacaactacctgcggacccaccccctgctgatcagaagaaacctggccagccctgagggcaccctggccaccctgggcctgaagacagagaagaactttgtggacaagatcaacctgattgaaaggaagctgttcttcaccacagccaatgcccacttcaaggtgggctgccctgtgctggccctggaggtgctgagcaagatccccaaggtgaccaagaccagcgccctgagcgccaagaaggaccagcctgacttcatcagccacaggatggatgatgtgcccagccacagcaaggccctgagtgatggaaatggcagcagcggcatcgagtggagcaatgtgaccagcagccagtatgactggagccagcccatcgtgaaggtggatgaggagcccctgaacctggactggggcgaggaccatgacagcgccctggatgaggaggaggatgatgctgtgggcctggtgatgaagagcacagatgcccgggagaaggacaagcagagcgaccagaaggccagtgaccccaacatgctgctgaccccccaggaggaggatgatcctgagggggacacagaggtggatgtgattgctgagcagctgaagttccgggcctgcctgaagatcctgatgacagagctgcggaccctggccaccggctatgaggtggatggcggcaagctgcgcttccagctgtacaactggctggagaaggagattgctgccctgcacgagatctgcaaccacgagagcgtcatcaaggagtacagcagcaagacctacagcaaggtggagagtgacctgctggaccaggaggagatggtggacaagccagacatcggcagctatgaaagacaccagattgaaagaagaaggctgcaggccaagcgggagcacgccgagaggaggaagtcctggctgcagaagaaccaggacctgctgcgggtcttcctgagctactgcagcctgcatggagcccagggcggcggcctggcctctgtgaggatggagctgaagttcctgctgcaggagagccagcaggagaccaccgtgaagcagctgcagagccccctgcccctgcccaccaccctgcccctgctgagcgccagcatcgccagcaccaagacagtgattgccaaccctgtgctgtacctgaacaaccacatccatgacatcctgtacaccatcgtgcagatgaagaccccaccccaccccagcattgaagatgtgaaggtgcacaccctgcacagcctggccgccagcctgagcgccagcatctaccaggccctgtgtgacagccacagctacagcagccagacagagggcaaccagttcaccggcatggcctaccagggcctgctgctgagtgacagaagaaggctgaggacagagagcattgaggagcacgccacccccaacagcagccctgcccagtggccaggagtgagcagcctcatcaacctgctgagcagcgcccaggatgaggaccagcccaagctgaacatcctgctgtgtgaggccgtggtggccgtgtacctgagcctgctgattcatgccctggccaccaacagcagcagcgagctgttccggctggccgcccaccccctgaacaacaggatgtgggccgctgtgtttggaggaggagtgaagctggtggtgaagccccggcggcagagcgagaacatcagcgcccctcctgtgctgtctgaagatattgacaagcacagaagacgcttcaacatgaggatgctggtgcccggccggcctgtgaaggatgccaccccacctcctgtgcctgctgagcggcccagctacaaggagaagttcatccccccagagctgtccatgtgggactactttgtggccaagcccttcctgcccctgagtgacagcggggtcatctatgacagtgatgagagcatccacagtgatgaagaagatgatgccttcttcagtgacacccagatccaggagcaccaggaccccaacagctacagctgggccctgctgcacctgaccatggtgaagctggccctgcacaacgtgaagaacttcttccccatcgccggcctggagttcagcgagctgcctgtgaccagccccctgggcattgctgtgatcaagaacctggagaactgggagcagatcctgcaggagaagatggaccagtttgagggccccccacccaactacatcaacacctaccccacagacctgtctgtgggcgccggccctgccatcctgaggaacaaggccatgctggagcctgagaacacccccttcaagagccgggacagcagcgccttccctgtgaagaggctgtggcacttcctggtgaagcaggaggtgctgcaggagaccttcatccgctacatcttcaccaagaagaggaagcagagcgaggtggaggccgacctgggctacccaggcggcaaggccaaggtgatccacaaggagagtgacatgatcatggccttctctgtgaacaaggccaactgcaatgaaattgtgctggccagcacccatgatgtgcaggagctggatgtgaccagcctgctggcctgccagagctacatctggattggagaggagtatgaccgggagagcaagagcagtgatgatgtggactaccggggcagcaccaccaccctgtaccagcccagcgccaccagctacagcgccagccaggtgcacccccccagcagcctgccctggctgggcaccggccagaccagcactggagcctctgtgctgatgaagaggaacctgcacaacgtgaagaggatgaccagccaccctgtgcaccagtactacctgactggagcccaggacggctctgtgaggatgtttgagtggacccggccccagcagctggtgtgcttccggcaggccggaaatgcccgggtgacccggctgtacttcaacagccagggcaacaagtgtggggtggctgatggagagggcttcctgagcatctggcaggtgaaccagacagccagcaaccccaagccctacatgtcctggcagtgccacagcaaggccaccagtgactttgccttcatcaccagcagcagcctggtggccaccagcggccacagcaatgacaacagaaatgtgtgcctgtgggacaccctcatcagccctggcaacagcctcatccacggcttcacctgccacgaccacggggccaccgtgctgcagtatgcccccaagcagcagctgctgatcagcggcggcaggaagggccacgtgtgcatctttgacatccggcagaggcagctgatccacaccttccaggcccatgacagcgccatcaaggccctggccctggacccctatgaggagtacttcaccaccggcagcgctgagggcaacatcaaggtgtggaggctgactggacatggcctcatccacagcttcaagtcagaacatgccaagcagagcatcttcaggaacatcggggccggcgtgatgcagattgacatcatccagggcaacagactcttcagctgtggggctgatggcaccctgaagaccagggtgctgcccaatgccttcaacatccccaaccgcatcctggacatcctgtag

SEQ ID NO: 69333 - DNA, 9114 bp, Artificial Sequence
  derived and/or modified sequence
atgcacctgcaccaggtgctgaccggcgccgtgaaccccggcgacaattgctactccgtgggctcagtcggggatgtccccttcaccgcatacggtagtggctgcgatatcgttatcctagcaaacgactttgagtgcgtgcaaataataccgggagctaaacacggaaacatccaggttagctgcgtagaatgcagcaatcaacaaggtcgtattgctgccagctacggtaacgcagtttgtatattcgagcctctgggtataaatagccataaaagaaactgtcagctgaaatgccagtggctgaagaccggtcagttttttctcagtagcgtcacttataatctggcctgggacccccaagacaatcggttgttaaccgcaaccgacagtatccaactgtgggctccccctggggacgacatcctggaggaagaggaggagatcgataataccgtgccaccagtactgaacgattggaaatgcgtgtggcagtgcaagacaagtgtgagcgtgcatctgatggagtggagtccagatggtgaatactttgcaacggcaggaaaggatgactgcctcctgaaagtctggtaccccatgaccggttggaagagctctatcattccgcaggatcatcatgaggtaaaacggcggcaatcatccacacagttttcttttgtatatctggcacacccaagagctgtcaccggattctcttggcgcaagacctctaaatacatgccaagaggctctgtgtgcaatgtcctcttgaccagttgtcatgatggtgtctgtcggctgtgggctgaaactctgctccccgaagattgtctgcttggcgaacagatttgtgagactacgaccagctccatcgccagtagcctgtcccatgctggacgtcacaaggatagaatccaacacgccctcgagactatccaccatctgaagaatctcagaaaggggcaacggagaagcagcgtacttgttacacacgcggaactaatgccagatcagacggccatgcatgaggttcagcgacacatctctcatcacgccaacgctttatgccactttcatatagccgcttcaataaaccctgccaccgatatccctaacgtattggtaggcactgccttcaacgtggacgacggcaatggggggttcgttgtgcactggctcaacaacaaggaattccacttcacgagtagcaccgaagtatttatgcaccagctgcggaaattgagtgataaacaggtcgatcacgaaaatgacgacgctgacagagaggatgaagagcattcccaggaagatcgcgaacgcggactccacatgaagctagaccatgacctgtccttggatcgagagtccgaggctgggacggggtcgtccgagcacgaggatggagagagagagggctccccaaggacatactcaaggttgtcagtgcccatgcccctgccaacagtactgttggataggaagattgaaactctcctgactgaatggaacaaaaaccccgacatgctttttacaatccatccagttgatggcacctttctggtttggcacgtaaaatatttggacgaatataatcccggcatatttcgacaagtacaggtcagtttttcttccagaatccccgtagcgtttccaagtggtgatgccagctctttgtcaaagaacatcatgatgtacgcatgcattaatgccaccaaggattcacaccacactctgttacatcaggaagggatgagcgtggggtcaccgcatggctcccaaccccacagccggagccattccacccacatgaacattttggcaccaaccgtgatgatgatcagcaaacacattgatggaagcctgaaccagtgggcagtgacgttcgcagacaagtccgctttcacaactgtgctgacagtctcgcacaaatttaggtactgcggccacaggttccatctcaacgacctggcctgtcactcagttctgccattgcttctgacttcctcccatcacaacgcactactgacaccagaactggactgtcaatgggactccgataataagttgtctagactgatggatcccgtgaagcacatcaaaggatcctccaagcagcctctgcgtaacgcagcaactagaactttccatgatcctaatgccatctatagcgagttaatcctctggcgggtggaccctatcggcccactttcatataccgggggcgtctctgaacttgcacgtatcaatagcctgcatacaagcgccttttccaacgtagcctggctcccaaccctgattccctcctactgcctggggacgtactgcaacagtgcaagcgcatgctttgtggcttctgatggaaagaatctgagactttaccaggctgtggtggatgccagaaagctcctagatgaacttagcgaccctgagtcctccaagttgataggcgaggtgttcaacatcgtctcacagcagtcaacagcccggcctggatgcattatcgagctggacgcgatcaccaatcagtgtggttcaaatacacagctacttcacgtgttccaggaggacttcatcatcggctacaagccgcataaggaggacatggaaaagaaggaaacagagatcttcttccagcccagccaaggatatcgcccccctccgttctcagaaaaatttttcctcgtggttatcgagaaggacagcaataacaattccatactacacatgtggcacctgcacctgaagtcggtgcaagcttgtctggctaaagccagtgagggtgcctctagcgagtctttactgtctgttccaggtcaaaaaaatgtggactcctctccagagacctccccgtccgtaagtccgatgccccacagttcatctatagcgaacttgcagaccgcctctaaattgattttgtcctcacgcttggtctacagccaaccgctcgacttgccggaatccgtggaagtgatccgggccacgcccagcgcgggtcacttgtctagcagctccatataccctgtctgtttggctccctacttagtggttacgacttgttccgacaataaagtccggttctggaaatgttgtatggaagccaatcctgagtgtaataagtcagacgagaaagagatttaccattggaagcggtggcctctaatgaacgacgaaggggaggataattccagcactgttagtatcgtgggccgcccggtggccgtgagctgcagctacaccggaagactagccgtggcttacaaacaacccatccaccataatgggtttgtgtcaaaagagtttagcatgcatgtatgcatttttgaatgcgaatctactggtgggagcgagtgggtgttggagcagactatccatcttgacgatctggtcaaggtcggatccgtcctggactctagagtgtctgttgattctaatctgtttgtgtatagcaaatcggacgccttacttagcaaagatcgatatctcatcccgaatatcaagcatctcgtgcatcttgactgggtcagcaaggaagatggttctcacattctgacagtcggcgtaggcgctaatatcttcatgtatgggagattaagcgggatagtgacggagcaaactaactcaaaagatggggttgcagtgatcacactacctctgggaggaagtatcaaacagggggttaagagcagatgggtattactccggtccattgatctggtttccagtgtggacggtacaccctcccttccagttagtctaagctgggtccgggatgggatcctggtggtgggcatggactgcgagatgcacgtctatgcacagtggaagcatgccgttaaatttggagacaccgaggcggactccagcaacgccgaggaagcagccatgcaagaccattccacattcaagtccaacatgttagcaagaaagagtgtggtcgaagggacagccattagcgatgatgtgttctgcagtccaactgttattcaggacggcggcctgttcgaagcggcacacgtactgagcccgaccctgccacagtaccatccgactcaactgctcgagctgatggacttggggaaggttcgccgcgcgaaggcgattttgtctcacttggtgaagtgcatcgccggtgaggtggcaatcgtgagggaccctgacgccggtgaggggacgaaacggcacttatcacggacaatctccgtcagcggatctacagcaaaagagacagtcacagtgggcaaggacggcacgcgggactacacagaaattgactcaatccctcctctccccctttacgcacttctcgcagctgaccaggacaccagctacaggatctctgaagaatctactaagatacctcagtcttacgaagatcagaccgtgtctcagcctgaagaccagtactccgagctgtttcaaatccaagatatacctaccgatgacattgacctcgagcccgagaagcgagagaacaagtctaaggtcatcaacctgtcgcagtacgggccggcttactttggtcaggaacatgccagggtgctctcctcccacttaatgcacagctctttgcccggcctgactaggctggagcaaatgtttctagtggcactcgcagatacagtcgcaaccaccagcaccgaactggatgagtcacgcgacaagagctgctcaggcagagacactctagatgagtgcggcttgaggtacttactcgccatgcggctgcacacttgcctgctgacttctctgccgcccctataccgcgttcaacttctacatcagggcgtctctacttgccatttcgcctgggcgtttcacagcgaggctgaagaagaacttattaacatgatccccgccatacagagaggcgaccctcaatggtccgagctgcgagctatgggtatcggttggtgggtccgtaacatcaacaccctccggcgatgtatcgaaaaggttgcgaaggcctccttccagcgtaataatgatgcgttagatgctgcccttttctatctgtcgatgaagaaaaaggcagtcgtgtggggactgtttcgcagccagcacgatgagaaaatgaccacgtttttttctcataactttaacgaagaccgttggcgcaaagccgcgctgaaaaatgcattttcccttctcggtaagcagcgctttgagcagtcagctgccttctttttactggcaggcagtctgaaagacgctatcgaagtctgtcttgagaagatggaagatattcagctggccatggtcatcgctcgcctctacgaatcagaattcgagacaagtagcacctacattagtatccttaatcagaaaattctcggctgtcagaaagacggttctggattctcctgcaagaggcttcacccagacccatttctccggagtttagcctattgggtgatgaaggattatactcgcgcgttggacacactgttagagcagaccccgaaagaagacgatgaacatcaggttatcataaagtcttgcaatccagtggctttcagtttttacaattaccttagaacgcatcccttactgattagacgcaacctggcatctccagagggaaccttagctaccctgggcctgaaaacagagaagaattttgtcgacaagattaacctgatcgaacggaagctgtttttcacaaccgctaacgcccacttcaaggtcgggtgtccagtccttgccctggaagtcctttcgaaaatccccaaggtcactaagacctcagcactcagtgcgaaaaaagaccaaccagatttcattagtcatagaatggatgatgtgccctctcactctaaggctttatctgacggcaacgggtcaagtggaatcgaatggagtaatgtgacctcttcccagtacgactggagccagccaattgttaaagtggatgaggaaccactgaacctggattggggagaagatcacgactccgcactggatgaagaagaagacgatgccgtcggtttagtgatgaagagtactgatgcgcgggagaaagataagcaaagcgaccagaaagcctccgatccgaacatgttgctcactccccaggaggaagatgatccagagggggacactgaggttgatgtcatcgccgaacagttgaagtttcgcgcctgtttgaaaattctcatgaccgagctgcgaacgctcgcaacaggttatgaggtcgacggtggcaaactccgattccaattatataactggctggagaaagagatcgccgcattgcacgagatttgtaatcacgaatcagtcattaaagagtattcaagtaagacctatagcaaagttgagagcgacctgctcgaccaagaagaaatggtggataagcctgacatcggatcttatgaacggcaccagatcgaacgaaggcgtttacaggctaagagggagcacgccgagaggagaaaaagttggctgcagaagaaccaagatcttttgagagtgtttctctcttattgcagtctgcatggagcacagggcggcggtttggcctctgtgcgaatggagcttaaatttctgttacaagaaagtcagcaagaaacaactgtgaagcaattgcagtctcctttgcctttaccaaccacccttcctctgctgtctgcaagcatcgcctccacgaaaacggtgattgctaaccccgtgctttatctaaataatcacattcacgatatactgtatacgattgtgcagatgaaaacccctcctcatccttctatcgaggacgtcaaggtccataccctgcactcgctcgccgctagcttatcagccagtatataccaagctctatgcgacagccactcctactcctcacaaaccgagggcaaccagttcactggtatggcctaccaagggttgctcctttctgataggagacgcctcaggaccgaatcaatcgaggagcatgcaacccccaacagttcacctgcacagtggcccggagtgtcctctctgatcaacttactttcaagtgcacaagatgaggatcaacctaagctgaacatcctgctatgtgaggccgtcgtagccgtgtacctatcccttctcatacatgcgctggctaccaattccagcagtgagctctttcgcctggccgcacaccccttgaacaataggatgtgggctgcggtgtttggcggcggcgtgaaattagtagtaaagccacggcgacagtcagaaaacatctcagcccccccagtcctcagtgaggacatcgataaacatcgacgccggtttaatatgcgcatgttggtgcctgggagacctgtgaaggacgcaacaccaccaccggtccccgctgaacgcccctcctataaagaaaaattcattccgcctgagctgagcatgtgggactactttgtggcaaagccgtttctcccactaagtgactcaggagtaatctacgacagcgacgagagcatccattccgacgaggaagacgatgctttcttctctgatacgcagatccaggaacaccaggacccaaacagttactcttgggccctgctgcatctgaccatggtcaaactggctctgcacaacgtcaagaacttcttccccattgcaggtttggagttcagtgagttacccgtcacttctccactaggcatcgctgttattaagaacttagagaattgggagcaaatactccaggagaaaatggatcagtttgagggcccccccccaaattatataaacacctatccaactgacctatctgttggagcgggcccagcaatcctccgcaataaagccatgctggagcccgaaaatacacctttcaagtctagggacagctccgccttccccgtaaaacggctgtggcacttcttagtaaaacaagaagtattgcaggaaaccttcattagatatatttttacaaagaaacggaagcagagcgaggtagaagccgacctggggtatcctggtgggaaagccaaagttatccacaaagagtccgatatgattatggcattttccgtcaataaggccaattgcaatgaaatcgtacttgcgtctacacacgatgtccaggagctggacgtgacctcactgctggcgtgccagtcttatatttggattggagaagagtatgatagagaaagcaaatccagtgacgatgttgattataggggttccaccactactttatatcaacccagcgccacctcttattccgcctcgcaggtgcatccaccgagttccctaccgtggttgggcactggccagaccagcacaggcgccagcgtgctgatgaaaaggaacctccataacgtcaagaggatgacaagtcacccagtgcaccagtattatctaactggtgcccaggacggaagcgtgagaatgttcgagtggacccggccccagcagcttgtgtgtttccgacaagcaggaaatgctagggttacgcgcttgtacttcaacagccagggaaacaagtgtggcgtggcagatggagaagggtttttgagcatatggcaggttaaccagacggccagcaaccccaaaccttatatgtcttggcaatgccatagcaaggctacgtccgattttgcttttattacctcctcaagcctggtcgccacctcaggacacagcaatgacaaccgcaatgtgtgcctgtgggacacactgatctccccaggcaacagccttatacatggatttacatgtcacgatcatggcgcgaccgtgctgcagtacgccccaaagcagcagttgctgatcagtggaggacgaaagggccatgtgtgtatttttgacatccggcagaggcagcttatccacaccttccaagcacatgacagtgccatcaaagctctcgcacttgatccctatgaggaatactttaccaccgggagcgccgagggcaatatcaaggtttggagactgacaggtcatggcctcattcacagctttaagtcagagcacgcgaaacaaagtattttccgaaacatcggggccggggtcatgcaaatcgacattatccagggcaataggcttttctcctgtggtgcagacggaacactgaagactcgagtgttgcctaatgcgttcaatattcccaaccgcatcctggacattctgtag

SEQ ID NO: 69334 - DNA, 9113 bp, Artificial Sequence
  derived and/or modified sequence
atgcacctgcaccaagttcttaccggcgctgtcaacccaggggataattgttatagcgttggttccgtgggggacgtgcccttcacggcctacggcagcgggtgtgacatagtgatactggccaacgattttgagtgcgtgcagataatccccggtgcaaaacacggaaatatccaggtctcctgcgtggagtgtagcaatcagcaggggaggattgctgcttcctatggcaatgctgtgtgtattttcgagccactaggcatcaacagtcacaagcgtaattgccagcttaagtgtcagtggctcaaaaccggccagttctttttgtcgagcgtaacctataacctggcctgggatccacaggacaacagactcctgactgccaccgacagcatccaactctgggccccacccggagacgatatcctggaagaggaagaggagatcgacaataccgtgcccccagttctaaatgattggaagtgtgtgtggcagtgcaaaacctcagtgtctgtacatctgatggaatggtctcctgatggcgaatatttcgccacagccggaaaggacgattgcctgcttaaggtgtggtacccaatgacagggtggaaaagctctataattccccaggaccatcatgaggtgaagcgcagacagagttccacgcagttttctttcgtttacctggctcaccctagagcagttaccgggttttcatggagaaaaacgtccaagtatatgccgcgtggatctgtctgtaacgtgctgctgacgtcttgtcacgacggagtttgcagactgtgggccgagaccctgctaccagaggattgtctcctcggcgaacagatatgcgaaacgaccacatcatctatcgcctcctctttgtctcatgcgggaaggcacaaggaccgcattcaacacgctttagagacaattcaccatctgaagaatcttcgcaaggggcagcgcagatcctctgtgctggtgactcacgctgaactgatgcctgatcagactgccatgcatgaggtgcagagacacatatctcaccacgccaatgctctttgccactttcatattgccgcatcaattaaccctgccacagatattccgaatgtgttggtcggtacagctttcaacgtcgatgacggcaacggaggcttcgtcgtacattggctgaataataaagaatttcacttcacctcctctaccgaggttttcatgcaccagctgagaaagctatctgacaaacaggtggaccatgaaaatgatgacgcagaccgcgaggatgaagagcattctcaggaagacagagagcgcggactccatatgaagctggaccatgacttgagcctggaccgggagtcagaagcaggcaccggctcctcagaacatgaggatggcgagcgtgagggctcaccgagaacctactcccgcctgagtgtgcctatgcctctccctaccgtactgctcgacaggaaaatagagaccctgcttacagagtggaacaagaatcctgacatgttgttcacaattcacccggtggatggcacttttctagtgtggcacgtaaagtatcttgatgaatacaaccctggaattttcaggcaagttcaagtgtccttctcctcacgaatacctgtcgcattccctagtggtgatgcgtctagcctctcgaaaaacatcatgatgtacgcatgtattaatgcgacgaaggactctcatcacactttgctccatcaggagggcatgagcgtcggtagcccccacgggtcccaacctcattcaaggtcccactcgactcatatgaatattttagcccctactgttatgatgatttctaagcatatagatggatccttgaatcagtgggctgttacctttgctgacaagtctgcttttacaacagtgttgacagtttcccacaagtttcgttactgcggccacaggttccacttgaacgatcttgcttgtcactccgtgctgccactgctcctgacctccagccaccacaacgccttgttgacccccgagttggactgccaatgggacagtgacaataagctctctcggctgatggacccagtcaagcacattaagggtagttccaaacagcccctgagaaatgcagcgaccaggacattccatgaccccaatgccatttactctgaactgattttgtggagggtagatccgatcggcccactgagctacaccggaggagtctccgagctcgctagaattaactcactgcacaccagtgccttcagcaacgtggcttggcttcctacactgatacctagctactgcctgggaacctattgcaactcagctagtgcatgtttcgtggccagcgacggcaagaacctgcgcctttatcaggcagtggtcgacgccagaaagctcctggacgagctcagtgacccggagtcatctaaattaattggggaggtgtttaacatcgttagccagcagtccacagcgagacccggatgcatcatcgagctggacgctatcacaaatcagtgcgggtccaacactcagttgctccacgtattccaagaggactttataattggctataaaccccataaagaggacatggagaaaaaagagaccgagatctttttccagccctcgcagggctaccgaccaccgcctttctccgaaaagttcttcttggtcgtcatcgagaaggactctaacaacaacagcatactgcacatgtggcaccttcatttaaaatctgtccaggcctgtctggctaaggctagcgaaggcgcttcatcagagagcctgctgtccgtcccgggacagaagaatgtagactcatctccggagacaagcccatctgtgagccctatgccacactcaagtagtatcgcaaatttgcagactgccagcaagttgattttatcctcccggctggtgtactctcaacctctcgacctacctgagagcgttgaggttatcagagcaaccccttccgctggccatttgtcgtcaagtagcatctaccctgtgtgcctcgctccataccttgtggtgacaacttgctcggacaacaaagtgcgattttggaagtgttgcatggaggccaatcctgaatgcaataagtctgacgaaaaagaaatctatcactggaaacgctggcctctcatgaacgacgaaggtgaggacaactcttccaccgtgtcaattgttggtcgcccagttgctgtgtcctgttcatacactggccgtttagctgtggcttacaagcagcctattcaccacaatggttttgtttccaaagagttttccatgcatgtttgcatttttgagtgtgagtccaccggcggtagtgagtgggttttggagcagaccatccacctagacgatcttgtgaaggtcggctctgtgctcgatagcagagtttctgtggactcaaatcttttcgtttatagcaaaagcgacgcactgctgtccaaagatcgctatctgattccgaacataaaacatcttgtgcaccttgattgggtgagcaaggaggatggatctcacatccttactgtgggcgtgggagccaatatcttcatgtatggcaggctctccgggatagtgaccgaacagacaaacagcaaagacggagtcgccgtgattactctgcctctggggggaagtattaagcaaggcgtgaaaagccgctgggtcctgctgcgtagtattgatctagtcagttctgtggacggcacacctagtctgcccgtttcgctctcttgggtccgcgatggtattttggtggtggggatggattgcgagatgcatgtgtacgctcagtggaagcatgccgtcaagttcggagacaccgaagccgatagcagcaacgctgaggaagccgctatgcaagaccactcgaccttcaaaagtaacatgctggcaaggaaaagcgtcgtggaaggtaccgccatctctgatgatgtcttttgcagtcctaccgtcatccaggacggcggactgttcgaggcagcccacgtgctgagcccaacgctgccccaataccaccctacccagctgcttgagctgatggatctgggtaaagtaaggcgagctaaggcaatccttagccatctagtgaagtgcatcgcgggtgaagtggcgattgtgagggaccctgacgcgggagaggggaccaaacgccaccttagcaggaccattagcgtatcaggctccacagcgaaggagaccgtgactgtgggtaaagatggtacgcgcgactacacagaaattgactccatccctccccttccactgtacgcgctgttagccgcagaccaggacacctcataccgcatcagcgaggagtccacaaaaatcccacagagttacgaggatcagaccgtttcgcagcctgaggaccagtactcggagctcttccaaattcaggacatccccaccgatgatattgatctcgaaccagagaagcgggagaacaagtcgaaagtgatcaacctgtcgcaatatggaccggcatatttcggacaggagcatgctagggtgcttagttcccatctcatgcattcctccttgccaggcctcacacgtctcgagcagatgtttctcgtggccctggctgacaccgtagcaactacatccaccgaactggacgagtctagggacaaaagttgcagcggaagggatactcttgacgaatgcgggttgagataccttttagcaatgcggctccacacctgcttgctgacctccctccccccactctacagggttcagctgcttcaccaaggggttagcacatgtcactttgcttgggcatttcactccgaggcggaggaagagctgatcaatatgattccggctatccagcggggagatccccagtggtcagagttacgggcaatgggcataggctggtgggtgagaaatatcaatacacttagacggtgcattgaaaaagtcgccaaggctagttttcaacggaacaatgacgccctcgacgctgccttgttctatctaagtatgaaaaaaaaagccgtcgtatggggactcttccgatcccagcatgatgaaaagatgacaaccttcttttctcacaactttaacgaggacaggtggcgcaaggctgccctgaagaatgccttctcgcttctggggaaacagcgcttcgaacagtccgccgcattttttctcctggcgggttcactcaaggacgccatcgaggtgtgcctcgaaaaaatggaggatatccaactggcaatggtgatcgcccgactgtatgaaagtgagtttgagacaagttcaacctatatctcaatactgaatcaaaaaatcttaggatgtcaaaaggatggcagcgggttcagctgtaagagactccatccagatcccttcctgcggtccctggcatattgggtcatgaaggactacactcgtgctctggataccttgctggaacagacaccaaaggaagacgacgaacaccaggtgatcattaaatcgtgcaacccagtggcctttagcttctataattacctccgtactcaccctctgctaatccgcagaaatctggccagcccagaagggacattagccaccctcggcctcaaaacagagaaaaattttgttgacaagataaatctgattgagcgtaagctgttcttcaccacagccaatgcacacttcaaagttgggtgtcctgtcctggcactagaggtccttagtaagatccctaaggtcacgaagacctccgctctgagcgcaaagaaggaccaacccgacttcattagccacagaatggacgatgtgccctcgcacagcaaggcactcagcgatggcaacgggagttctggaattgagtggtccaatgtcacttcatcccagtatgattggagccagccaatcgtgaaagtggacgaggagcctctgaacctggattggggcgaagaccacgattccgctttagacgaagaagaggatgatgcggtcgggctggtcatgaagagtacggatgctcgtgagaaggacaagcagagtgatcagaaggccagcgatcccaacatgcttctgacaccccaggaagaagacgatcctgagggcgatactgaggtagacgtgatcgctgaacaattaaaatttcgggcttgcctgaaaatacttatgacagagctgcgaaccctggccaccgggtacgaagtggatggcggaaaactgagattccaactctacaattggctggagaaagaaatcgctgccctccatgagatttgcaatcacgagtcagtaatcaaggaatactccagtaaaacctattccaaggtcgagtctgacctacttgatcaagaagaaatggtagataaacctgatattgggagttatgagaggcatcagatcgagagacggaggctgcaagctaaaagagaacatgccgaaaggagaaagtcttggctccagaaaaatcaggacttgctgagggtatttctgagttactgctctctgcacggggcacagggcggtggacttgcgagcgtgagaatggagctgaagtttctgctgcaagaaagccagcaggagacaaccgtgaagcaactgcagtcccccttacctcttccaacgacccttccattgttgtctgcaagcatcgctagtacaaagaccgtcatcgccaatcctgtgctgtacctaaataaccacattcacgatatcttgtataccatcgtgcagatgaagacgcccccacacccatcgatcgaggacgtgaaagtgcacacactacacagcctggctgccagtctatcagcatctatttatcaggccctgtgtgattctcactcatactctagccagacagaggggaaccagttcactgggatggcatatcagggccttctgctttcggaccggcgtcggttaaggaccgagtcaatcgaggagcacgctacacccaacagcagtccggctcagtggcccggagttagctccctgattaacctactgagctccgctcaggatgaagaccagccaaagctgaacatccttctgtgtgaagccgtcgtggcagtctacttgtccctgttaatccatgccctcgccacaaatagttcttctgagctctttaggttggctgcacacccactgaataacaggatgtgggcagcagtcttcgggggtggcgtgaaactggtggtgaagcccaggcggcagtctgagaacatcagtgcccctccggtgctctctgaagacattgataaacatcgcagacgcttcaacatgcggatgctggtgcccggtcgacctgtcaaagacgcgacgcctcctccagtgcccgctgagaggccctcgtacaaggagaagttcataccgccagagctgtcaatgtgggactacttcgtagctaagcctttcctacccctttctgactcaggcgtcatatacgactccgatgagtctatccactcagacgaggaagatgacgcttttttctctgatactcagattcaggagcaccaggaccccaacagctattcctgggctctgttgcacttaaccatggtcaaattggccttgcacaacgtgaagaatttcttccctatagctgggctcgagttcagcgaactgccggtaaccagccctctggggatcgccgtgatcaagaatctagagaattgggagcagatccttcaagaaaagatggatcagtttgaggggcctcctcctaattacattaacacttaccctacagatctctcggtcggggcaggacccgctattctccggaacaaggcaatgcttgaacccgagaatactccattcaaaagccgggattcttctgctttccctgtcaagagactgtggcatttcctggtcaaacaggaagtgctgcaagagacattcatcaggtatatttttaccaagaaaaggaagcaaagcgaagtggaggcagatttggggtatcccggtgggaaagctaaggtaatccataaggaaagcgacatgattatggcttttagcgtcaacaaagccaattgtaatgaaattgtgctggcaagcacacatgatgtgcaggaactggatgtcactagcctgctagcctgtcagagctacatttggatcggcgaggaatacgatcgggaaagtaaaagttcagacgacgtggattaccgagggagtacaactacgctgtatcaaccaagcgcaacatcttactccgcctcacaggtgcatccgcctagctctttaccttggttgggaaccggccaaacttcgaccggcgcaagtgtgctgatgaagcgtaacctgcacaatgtcaaacgcatgacctcccatcccgttcaccagtactacctcaccggcgcacaggatggtagtgtgcgaatgttcgagtggacgagaccacaacagcttgtgtgctttaggcaggccggtaatgctcgggttacgcgcctgtattttaactcccaagggaacaagtgcggagtggcggatggcgaggggttcctcagtatttggcaggtgaaccagaccgcctcgaaccccaaaccatacatgagctggcagtgccacagcaaagcaacatccgattttgcattcatcacgtcaagcagtctggtcgccaccagtggacatagtaacgataaccggaatgtttgcctctgggacactctgatctcgccgggaaattccctaatccacggattcacttgtcacgaccacggagccaccgtcctgcagtatgcccctaaacagcagctgctgataagcggtgggcgtaagggacatgtgtgcatcttcgatattcgtcaacgtcagctgattcacacattccaggcacacgactcagcgattaaagcactggccttggatccttatgaagaatactttacaacagggagcgctgaaggtaacatcaaggtatggaggttgactgggcacgggctgattcattccttcaaatctgagcatgcgaagcagagtattttccggaacatcggggcaggagttatgcagatcgatatcattcaggggaaccggttgttctcctgtggagccgatggcacactgaaaacacgcgttttgcccaacgccttcaatatacctaataggatcctggacatcctgta

SEQ ID NO: 69335 - DNA, 9114 bp, Artificial Sequence
  derived and/or modified sequence
atgcacctgcaccaggtgctgaccggcgccgtgaaccccggcgacaactgctacagcgtgggcagcgtgggcgacgtgcccttcaccgcctacggcagcggctgcgacatcgtgatcctggccaacgacttcgagtgcgtgcagatcatccccggcgccaagcacggcaacatccaggtgagctgcgtggagtgcagcaaccagcagggcagaatcgccgccagctacggcaacgccgtgtgcatcttcgagcccctgggcatcaacagccacaagagaaactgccagctgaagtgccagtggctgaagaccggccagttcttcctgagcagcgtgacctacaacctggcctgggacccccaggacaacagactgctgaccgccaccgacagcatccagctgtgggccccccccggcgacgacatcctggaggaggaggaggagatcgacaacaccgtgccccccgtgctgaacgactggaagtgcgtgtggcagtgcaagaccagcgtgagcgtgcacctgatggagtggagccccgacggcgagtacttcgccaccgccggcaaggacgactgcctgctgaaggtgtggtaccccatgaccggctggaagagcagcatcatcccccaggaccaccacgaggtgaagagaagacagagcagcacccagttcagcttcgtgtacctggcccaccccagagccgtgaccggcttcagctggagaaagaccagcaagtacatgcccagaggcagcgtgtgcaacgtgctgctgaccagctgccacgacggcgtgtgcagactgtgggccgagaccctgctgcccgaggactgcctgctgggcgagcagatctgcgagaccaccaccagcagcatcgccagcagcctgagccacgccggcagacacaaggacagaatccagcacgccctggagaccatccaccacctgaagaacctgagaaagggccagagaagaagcagcgtgctggtgacccacgccgagctgatgcccgaccagaccgccatgcacgaggtgcagagacacatcagccaccacgccaacgccctgtgccacttccacatcgccgccagcatcaaccccgccaccgacatccccaacgtgctggtgggcaccgccttcaacgtggacgacggcaacggcggcttcgtggtgcactggctgaacaacaaggagttccacttcaccagcagcaccgaggtgttcatgcaccagctgagaaagctgagcgacaagcaggtggaccacgagaacgacgacgccgacagagaggacgaggagcacagccaggaggacagagagagaggcctgcacatgaagctggaccacgacctgagcctggacagagagagcgaggccggcaccggcagcagcgagcacgaggacggcgagagagagggcagccccagaacctacagcagactgagcgtgcccatgcccctgcccaccgtgctgctggacagaaagatcgagaccctgctgaccgagtggaacaagaaccccgacatgctgttcaccatccaccccgtggacggcaccttcctggtgtggcacgtgaagtacctggacgagtacaaccccggcatcttcagacaggtgcaggtgagcttcagcagcagaatccccgtggccttccccagcggcgacgccagcagcctgagcaagaacatcatgatgtacgcctgcatcaacgccaccaaggacagccaccacaccctgctgcaccaggagggcatgagcgtgggcagcccccacggcagccagccccacagcagaagccacagcacccacatgaacatcctggcccccaccgtgatgatgatcagcaagcacatcgacggcagcctgaaccagtgggccgtgaccttcgccgacaagagcgccttcaccaccgtgctgaccgtgagccacaagttcagatactgcggccacagattccacctgaacgacctggcctgccacagcgtgctgcccctgctgctgaccagcagccaccacaacgccctgctgacccccgagctggactgccagtgggacagcgacaacaagctgagcagactgatggaccccgtgaagcacatcaagggcagcagcaagcagcccctgagaaacgccgccaccagaaccttccacgaccccaacgccatctacagcgagctgatcctgtggagagtggaccccatcggccccctgagctacaccggcggcgtgagcgagctggccagaatcaacagcctgcacaccagcgccttcagcaacgtggcctggctgcccaccctgatccccagctactgcctgggcacctactgcaacagcgccagcgcctgcttcgtggccagcgacggcaagaacctgagactgtaccaggccgtggtggacgccagaaagctgctggacgagctgagcgaccccgagagcagcaagctgatcggcgaggtgttcaacatcgtgagccagcagagcaccgccagacccggctgcatcatcgagctggacgccatcaccaaccagtgcggcagcaacacccagctgctgcacgtgttccaggaggacttcatcatcggctacaagccccacaaggaggacatggagaagaaggagaccgagatcttcttccagcccagccagggctacagacccccccccttcagcgagaagttcttcctggtggtgatcgagaaggacagcaacaacaacagcatcctgcacatgtggcacctgcacctgaagagcgtgcaggcctgcctggccaaggccagcgagggcgccagcagcgagagcctgctgagcgtgcccggccagaagaacgtggacagcagccccgagaccagccccagcgtgagccccatgccccacagcagcagcatcgccaacctgcagaccgccagcaagctgatcctgagcagcagactggtgtacagccagcccctggacctgcccgagagcgtggaggtgatcagagccacccccagcgccggccacctgagcagcagcagcatctaccccgtgtgcctggccccctacctggtggtgaccacctgcagcgacaacaaggtgagattctggaagtgctgcatggaggccaaccccgagtgcaacaagagcgacgagaaggagatctaccactggaagagatggcccctgatgaacgacgagggcgaggacaacagcagcaccgtgagcatcgtgggcagacccgtggccgtgagctgcagctacaccggcagactggccgtggcctacaagcagcccatccaccacaacggcttcgtgagcaaggagttcagcatgcacgtgtgcatcttcgagtgcgagagcaccggcggcagcgagtgggtgctggagcagaccatccacctggacgacctggtgaaggtgggcagcgtgctggacagcagagtgagcgtggacagcaacctgttcgtgtacagcaagagcgacgccctgctgagcaaggacagatacctgatccccaacatcaagcacctggtgcacctggactgggtgagcaaggaggacggcagccacatcctgaccgtgggcgtgggcgccaacatcttcatgtacggcagactgagcggcatcgtgaccgagcagaccaacagcaaggacggcgtggccgtgatcaccctgcccctgggcggcagcatcaagcagggcgtgaagagcagatgggtgctgctgagaagcatcgacctggtgagcagcgtggacggcacccccagcctgcccgtgagcctgagctgggtgagagacggcatcctggtggtgggcatggactgcgagatgcacgtgtacgcccagtggaagcacgccgtgaagttcggcgacaccgaggccgacagcagcaacgccgaggaggccgccatgcaggaccacagcaccttcaagagcaacatgctggccagaaagagcgtggtggagggcaccgccatcagcgacgacgtgttctgcagccccaccgtgatccaggacggcggcctgttcgaggccgcccacgtgctgagccccaccctgccccagtaccaccccacccagctgctggagctgatggacctgggcaaggtgagaagagccaaggccatcctgagccacctggtgaagtgcatcgccggcgaggtggccatcgtgagagaccccgacgccggcgagggcaccaagagacacctgagcagaaccatcagcgtgagcggcagcaccgccaaggagaccgtgaccgtgggcaaggacggcaccagagactacaccgagatcgacagcatcccccccctgcccctgtacgccctgctggccgccgaccaggacaccagctacagaatcagcgaggagagcaccaagatcccccagagctacgaggaccagaccgtgagccagcccgaggaccagtacagcgagctgttccagatccaggacatccccaccgacgacatcgacctggagcccgagaagagagagaacaagagcaaggtgatcaacctgagccagtacggccccgcctacttcggccaggagcacgccagagtgctgagcagccacctgatgcacagcagcctgcccggcctgaccagactggagcagatgttcctggtggccctggccgacaccgtggccaccaccagcaccgagctggacgagagcagagacaagagctgcagcggcagagacaccctggacgagtgcggcctgagatacctgctggccatgagactgcacacctgcctgctgaccagcctgccccccctgtacagagtgcagctgctgcaccagggcgtgagcacctgccacttcgcctgggccttccacagcgaggccgaggaggagctgatcaacatgatccccgccatccagagaggcgacccccagtggagcgagctgagagccatgggcatcggctggtgggtgagaaacatcaacaccctgagaagatgcatcgagaaggtggccaaggccagcttccagagaaacaacgacgccctggacgccgccctgttctacctgagcatgaagaagaaggccgtggtgtggggcctgttcagaagccagcacgacgagaagatgaccaccttcttcagccacaacttcaacgaggacagatggagaaaggccgccctgaagaacgccttcagcctgctgggcaagcagagattcgagcagagcgccgccttcttcctgctggccggcagcctgaaggacgccatcgaggtgtgcctggagaagatggaggacatccagctggccatggtgatcgccagactgtacgagagcgagttcgagaccagcagcacctacatcagcatcctgaaccagaagatcctgggctgccagaaggacggcagcggcttcagctgcaagagactgcaccccgaccccttcctgagaagcctggcctactgggtgatgaaggactacaccagagccctggacaccctgctggagcagacccccaaggaggacgacgagcaccaggtgatcatcaagagctgcaaccccgtggccttcagcttctacaactacctgagaacccaccccctgctgatcagaagaaacctggccagccccgagggcaccctggccaccctgggcctgaagaccgagaagaacttcgtggacaagatcaacctgatcgagagaaagctgttcttcaccaccgccaacgcccacttcaaggtgggctgccccgtgctggccctggaggtgctgagcaagatccccaaggtgaccaagaccagcgccctgagcgccaagaaggaccagcccgacttcatcagccacagaatggacgacgtgcccagccacagcaaggccctgagcgacggcaacggcagcagcggcatcgagtggagcaacgtgaccagcagccagtacgactggagccagcccatcgtgaaggtggacgaggagcccctgaacctggactggggcgaggaccacgacagcgccctggacgaggaggaggacgacgccgtgggcctggtgatgaagagcaccgacgccagagagaaggacaagcagagcgaccagaaggccagcgaccccaacatgctgctgaccccccaggaggaggacgaccccgagggcgacaccgaggtggacgtgatcgccgagcagctgaagttcagagcctgcctgaagatcctgatgaccgagctgagaaccctggccaccggctacgaggtggacggcggcaagctgagattccagctgtacaactggctggagaaggagatcgccgccctgcacgagatctgcaaccacgagagcgtgatcaaggagtacagcagcaagacctacagcaaggtggagagcgacctgctggaccaggaggagatggtggacaagcccgacatcggcagctacgagagacaccagatcgagagaagaagactgcaggccaagagagagcacgccgagagaagaaagagctggctgcagaagaaccaggacctgctgagagtgttcctgagctactgcagcctgcacggcgcccagggcggcggcctggccagcgtgagaatggagctgaagttcctgctgcaggagagccagcaggagaccaccgtgaagcagctgcagagccccctgcccctgcccaccaccctgcccctgctgagcgccagcatcgccagcaccaagaccgtgatcgccaaccccgtgctgtacctgaacaaccacatccacgacatcctgtacaccatcgtgcagatgaagacccccccccaccccagcatcgaggacgtgaaggtgcacaccctgcacagcctggccgccagcctgagcgccagcatctaccaggccctgtgcgacagccacagctacagcagccagaccgagggcaaccagttcaccggcatggcctaccagggcctgctgctgagcgacagaagaagactgagaaccgagagcatcgaggagcacgccacccccaacagcagccccgcccagtggcccggcgtgagcagcctgatcaacctgctgagcagcgcccaggacgaggaccagcccaagctgaacatcctgctgtgcgaggccgtggtggccgtgtacctgagcctgctgatccacgccctggccaccaacagcagcagcgagctgttcagactggccgcccaccccctgaacaacagaatgtgggccgccgtgttcggcggcggcgtgaagctggtggtgaagcccagaagacagagcgagaacatcagcgccccccccgtgctgagcgaggacatcgacaagcacagaagaagattcaacatgagaatgctggtgcccggcagacccgtgaaggacgccacccccccccccgtgcccgccgagagacccagctacaaggagaagttcatcccccccgagctgagcatgtgggactacttcgtggccaagcccttcctgcccctgagcgacagcggcgtgatctacgacagcgacgagagcatccacagcgacgaggaggacgacgccttcttcagcgacacccagatccaggagcaccaggaccccaacagctacagctgggccctgctgcacctgaccatggtgaagctggccctgcacaacgtgaagaacttcttccccatcgccggcctggagttcagcgagctgcccgtgaccagccccctgggcatcgccgtgatcaagaacctggagaactgggagcagatcctgcaggagaagatggaccagttcgagggccccccccccaactacatcaacacctaccccaccgacctgagcgtgggcgccggccccgccatcctgagaaacaaggccatgctggagcccgagaacacccccttcaagagcagagacagcagcgccttccccgtgaagagactgtggcacttcctggtgaagcaggaggtgctgcaggagaccttcatcagatacatcttcaccaagaagagaaagcagagcgaggtggaggccgacctgggctaccccggcggcaaggccaaggtgatccacaaggagagcgacatgatcatggccttcagcgtgaacaaggccaactgcaacgagatcgtgctggccagcacccacgacgtgcaggagctggacgtgaccagcctgctggcctgccagagctacatctggatcggcgaggagtacgacagagagagcaagagcagcgacgacgtggactacagaggcagcaccaccaccctgtaccagcccagcgccaccagctacagcgccagccaggtgcacccccccagcagcctgccctggctgggcaccggccagaccagcaccggcgccagcgtgctgatgaagagaaacctgcacaacgtgaagagaatgaccagccaccccgtgcaccagtactacctgaccggcgcccaggacggcagcgtgagaatgttcgagtggaccagaccccagcagctggtgtgcttcagacaggccggcaacgccagagtgaccagactgtacttcaacagccagggcaacaagtgcggcgtggccgacggcgagggcttcctgagcatctggcaggtgaaccagaccgccagcaaccccaagccctacatgagctggcagtgccacagcaaggccaccagcgacttcgccttcatcaccagcagcagcctggtggccaccagcggccacagcaacgacaacagaaacgtgtgcctgtgggacaccctgatcagccccggcaacagcctgatccacggcttcacctgccacgaccacggcgccaccgtgctgcagtacgcccccaagcagcagctgctgatcagcggcggcagaaagggccacgtgtgcatcttcgacatcagacagagacagctgatccacaccttccaggcccacgacagcgccatcaaggccctggccctggacccctacgaggagtacttcaccaccggcagcgccgagggcaacatcaaggtgtggagactgaccggccacggcctgatccacagcttcaagagcgagcacgccaagcagagcatcttcagaaacatcggcgccggcgtgatgcagatcgacatcatccagggcaacagactgttcagctgcggcgccgacggcaccctgaagaccagagtgctgcccaacgccttcaacatccccaacagaatcctggacatcctgtag

SEQ ID NO: 69336 - DNA, 10400 bp, Artificial Sequence
  derived and/or modified sequence
acagagggaaacggctctcgcagcccgaggagggtcaggcgcggagcttgtcgcacctcccgcgcattctgtccagcccgggctccggagatgcatctgcatcaggtcctcaccggagctgtcaaccctggagacaactgctactccgtgggcagcgtcggggatgtccccttcacggcatatggatcaggctgtgatattgttattttggcaaatgactttgaatgtgtacagatcattcctggtgctaagcatggaaacatccaagtcagctgtgtggagtgttctaaccaacaaggaagaattgcagcttcatatggtaatgctgtttgtatatttgagcccttgggcataaattctcataaaagaaattgtcaactcaagtgccagtggcttaaaactgggcagttttttttgagttctgtgacatacaacttagcatgggatcctcaagataatagattgttgacagcaactgattctattcagttgtgggctcctccaggagatgatattctggaagaggaggaagaaattgataatacagttcctcctgttttaaatgattggaagtgtgtctggcagtgcaaaacctcagtatctgtacatttgatggaatggtctcctgatggtgaatattttgctactgctggaaaggatgattgtcttttgaaagtgtggtatcctatgactggttggaagtcttcaattatacctcaggatcatcatgaagtaaaaaggagacagtcctctactcaattttcttttgtttacttggcacatccccgagctgtgacaggtttttcgtggcgcaaaactagcaagtatatgcccaggggttctgtctgtaatgtgttgttaacttcatgtcatgatggtgtgtgccggctctgggcagaaactttattaccagaagactgtcttttgggtgagcagatttgtgagactaccacttccagcattgccagcagcctttctcatgctggaagacacaaagacagaatacagcatgctcttgagacaatacaccatttgaaaaatttaaggaaaggacagaggaggtcatctgttcttgtaactcatgctgaattaatgcccgaccagacagcaatgcatgaagttcaaagacacatttcccaccatgcaaatgcactctgtcattttcatattgcagcaagcatcaaccctgccacagatattccaaatgtcttggttggcactgcatttaatgttgatgatggaaatgggggctttgtagttcattggttaaacaacaaggaatttcattttacatcatctacagaagtatttatgcatcaattacgaaaactttctgataagcaggtagatcatgaaaatgatgatgcagatagagaagatgaggaacattcacaggaggatagagaacggggtttacatatgaaattagaccatgatttatccctggatagagaatctgaggcaggtacaggatcatcagaacatgaagatggagaaagagaaggaagtcctagaacttactcacgacttagtgtaccaatgccactgcctacggttctgcttgatcggaagattgaaacgctgctaactgaatggaataagaatcctgatatgctttttacaatacaccctgtagatggtacctttctagtgtggcatgtgaagtatttggatgaatataatcctggaatatttagacaagttcaggtttctttttcttctcggattcctgttgcatttccctctggtgatgcaagctctcttagtaaaaatatcatgatgtatgcctgtataaatgcgacaaaagattctcaccacacgctgttacaccaggaggggatgtctgtaggcagtcctcacggatcacagccacactctagatcccacagtacacatatgaacatcttagctcccacagtaatgatgatctctaaacacatagatggttctttaaatcagtgggcagtcacttttgctgataagtctgcctttaccactgttctaactgtatctcacaaatttagatattgcggtcatcgatttcacctcaatgacctggcatgtcattcagttttaccactgttattgacatcctctcatcataatgctctattgactcctgaattagattgtcagtgggactcagacaataaattaagtagattaatggaccctgtaaaacatataaaaggttcctcgaaacaacctcttagaaatgcagcaactcgtacatttcatgacccaaatgcaatctacagtgaacttattctgtggcgtgtagacccaataggacctttgtcatacactggaggagtatcagaattggctcgaattaactctttacatacctcagcgttctctaatgtggcttggcttccaactctcattcccagttactgtctaggcacatactgcaattctgcaagtgcttgctttgttgcttctgatggcaaaaatctgagactctatcaagctgtagtggatgcaaggaaattattagatgaattgtcagacccagaatcttcaaaacttattggagaagtgtttaatattgtgagccaacagtctactgctcgacctggctgcattattgaactcgacgcaataaccaaccaatgtggctcaaatacacagttgcttcatgtgtttcaagaagacttcattataggatataaaccacataaggaagatatggagaaaaaggaaacagaaatattttttcagccatcacaaggataccgcccaccaccattttcagaaaagttctttctagtagtaattgagaaggacagcaataataactctattctgcatatgtggcaccttcatcttaaatctgtacaagcatgtttagctaaagcttcagaaggggcttcctctgagagtctactttcagtccctggacagaagaacgtagattcttctccagaaacctctcctagtgtgagccccatgccacattcttcatcaattgccaatcttcaaactgccagtaaacttattctgagttctagactggtgtatagccaaccccttgatctcccagaatcagttgaagtaataagagcaacgccttcagcaggccatctgagttcttcttcaatttatccagtgtgccttgcaccttatttagtggttacaacttgttctgacaataaagtacgcttctggaaatgttgtatggaagccaacccagagtgtaataaaagtgatgagaaagaaatttatcattggaagagatggcctttgatgaatgatgaaggagaagataatagcagtacagtgagcattgtgggaagaccagttgctgttagctgttcatacacaggtcgccttgcagtggcttataagcagcctatccaccataatggttttgtttctaaagaattttccatgcatgtttgtatatttgaatgtgaatctacaggaggatcagagtgggttttagaacaaacaattcatcttgatgatttggttaaggttgggagtgtacttgattcaagggtcagcgtcgacagtaatctgtttgtgtatagcaagtcagatgcactcttgagcaaggatagatatcttattccgaatatcaaacatttagtacatttggactgggtatcaaaagaagatggctcccacattcttacagtgggagtcggtgcgaatatcttcatgtatggaaggctttcaggaattgtgactgagcaaaccaacagtaaggatggagtagctgtcatcactttaccactaggtggtagtatcaagcaaggagttaagtcaagatgggttcttcttagatctatagacttggtatcttctgttgatggtactccttcactgcctgtttctctctcttgggtaagagatgggatattggtggtaggaatggattgtgaaatgcatgtatatgcacagtggaagcatgctgtcaaatttggagacactgaagctgatagttctaatgcagaagaggcagcaatgcaagatcattcgacctttaaatctaatatgctggcaagaaaaagtgttgttgaaggaacagctatttctgatgatgttttttgttcaccaactgtaattcaagatggtggcttatttgaggctgcacatgtactttcccctactcttccacaatatcatccaactcagctgttagaattgatggatttagggaaagtgcgaagggctaaagccattctctctcatttagtaaaatgtattgcaggtgaagtagcaatagttagagatcctgatgctggagaaggaactaagcgacatctctctcgaactattagtgtaagtggcagtacagcaaaggaaacagtcaccgtaggaaaagatggtactcgagattatactgagatagattctatccctccactaccactatatgcattacttgctgcagatcaagatacatcctacagaatttcagaagaaagtacaaagataccacagagctatgaagatcagacagtaagtcaaccagaggatcagtattcagagctgtttcaaatccaggatataccaacggatgatattgatttagagcctgaaaagagagaaaacaaatcaaaagtaataaatctttctcaatatggaccagcttactttggccaagaacatgcaagggtactttcaagtcatcttatgcactcaagtctaccaggccttacccgtttggagcagatgttccttgtagctttggctgatacagtggctactactagtactgagcttgatgaaagcagagataagagttgctcaggaagagatacattagatgagtgtggtttgagatacttgttagctatgcgcctacacacatgccttttgacatcgctgcctcctttataccgagtgcagctacttcatcaaggtgtctctacatgccattttgcctgggcttttcattctgaggctgaagaagaactgattaatatgattccagcaattcagagaggggacccccagtggtctgaattaagagctatgggcataggatggtgggtgaggaacattaacacgcttcgaagatgcattgaaaaggttgccaaagcttcttttcaaaggaacaatgatgccttagatgctgcactattctacctttcaatgaagaagaaagcagtagtgtggggtctgtttaggtcacagcatgatgaaaaaatgacaacatttttcagccacaactttaatgaagatagatggcgaaaagctgctttgaaaaatgctttttccttacttggaaaacaacgctttgaacaatcggctgcttttttcttgctagctggttcattgaaagatgccatagaggtatgtcttgaaaaaatggaagatattcagctagccatggttattgcccgtttatatgaatctgaatttgagacttcatccacttatatatccatcctaaatcagaagattttgggttgccaaaaggatggctcaggattcagttgcaaaagattacatcctgatcctttcctgcgtagtcttgcctattgggtaatgaaagattacacccgagccttggacacattactggaacaaacaccaaaggaggatgatgaacatcaagttatcatcaagtcttgtaacccggtggcatttagtttttataactaccttcgaactcatcctttgctcattcgaagaaatcttgcctcccctgaaggaactttggcaaccttaggtctcaaaactgagaagaactttgttgataaaattaacctcatagaaagaaaattattctttaccactgcaaatgctcattttaaagttggatgccctgttttagccttggaggtactctccaaaattccaaaagtaaccaaaacatctgccttatctgcaaaaaaagatcagcctgacttcatttctcacaggatggatgatgtaccttcacattcaaaagctctgagtgatggcaatggaagttctggcattgaatggtcaaatgtaacttcatcacagtatgactggagtcagccaatagtaaaagttgatgaggaacctcttaatcttgattggggtgaagatcacgacagtgccttagatgaagaggaagacgatgctgttggtttagtgatgaaaagtacagatgccagggaaaaagataaacaatcagatcagaaggcctcagaccctaacatgttattaacacctcaggaagaggatgatcctgaaggtgatactgaagttgatgtgattgctgaacaactaaaattcagagcttgtttaaagatccttatgactgaattaagaacattggctacaggttatgaagtagatggaggaaaactcagatttcaactctataactggcttgaaaaggaaattgctgccttgcatgagatatgtaatcatgaatcagttattaaagagtattccagtaagacatattccaaagtagagagtgatctgctggatcaggaagaaatggtagacaaaccagatattggttcctatgagcgccatcaaatagaaagaagaagattgcaggccaaacgagagcatgcagaaagacgaaagtcgtggttgcagaaaaaccaagatctcctgagagtatttctcagctactgtagccttcatggggcccaaggtggtggtttggcttcagtaaggatggaactcaaatttttgctacaagaatcacaacaggaaactacagtaaagcagctccagtctccactaccactgcctaccaccctacctctgctttcagcaagtattgcgtcaacaaaaacagtcatagctaatcctgtattgtacttaaataatcacatccatgatatactttatactattgttcagatgaaaacaccacctcatcccagtattgaagatgtgaaggtgcacacacttcattcactagcagcatcactttctgcatcaatttaccaagcattatgtgacagtcatagctacagcagtcaaacagaaggaaatcagtttacaggaatggcttatcaaggacttcttttaagtgatcgtagaagactaaggacagaaagcattgaagaacacgcaacaccaaattcatctcctgctcaatggcctggtgtgagctcacttattaatcttttgagttcagcccaagatgaagaccagccaaaactgaacattttgctatgtgaagctgttgttgctgtttacttaagtttattgatacatgctcttgccacaaattcctccagtgaattatttcggcttgcagcccacccattaaataatcgaatgtgggctgctgtttttggaggcggtgtaaaacttgttgtgaaacctcgaagacaatcagaaaatatttcagcacctcctgtcctttctgaagacatagataaacaccgtaggagatttaacatgagaatgctcgtccctggaaggcctgtaaaagatgctaccccaccaccggtgcctgcagaaagaccatcttacaaagaaaaatttattcctcccgaacttagtatgtgggattattttgttgcaaagccatttcttcctttgtctgatagtggtgttatatatgattctgatgaaagcattcatagtgatgaagaagatgatgcctttttttcagatacacaaatacaggagcaccaagatccaaattcctatagctgggctcttctacatttgacaatggttaaactagcacttcacaatgtcaagaatttctttcctattgctggactggaattctctgagctgcctgtaacatcaccattaggtattgctgtgattaaaaacttggagaactgggaacagatcttgcaagagaaaatggatcagtttgaaggtccaccccctaactatatcaacacatatccaactgacctttcagtgggagctggaccagctattcttcgaaataaagcaatgctagaacctgaaaataccccattcaagtcccgggattcttctgcatttccagtcaaacgactttggcatttccttgttaaacaagaggtccttcaagagacatttattagatatattttcactaagaaaagaaagcagagtgaggttgaagctgatctgggctatccaggtggaaaggcgaaagtcatccataaggaatctgatatgatcatggcattttctgttaataaggcaaattgtaatgaaattgttttggcttcaacacatgatgttcaagaacttgatgttacttctctactggcctgtcagtcatacatatggatcggagaagaatatgacagagaatccaaaagttcagatgatgttgattatcgtggttccactacaactctttatcaacccagtgcaacatcctattcagcaagtcaggtgcatccaccttcatctctgccatggctgggcactggacagactagcactggagctagtgtgcttatgaaaaggaatctacataatgttaagagaatgacttcacacccagtccatcaatactatcttacaggtgctcaggacggcagtgtacgaatgtttgaatggacgcggcctcagcaacttgtctgctttcgtcaagctggcaatgcaagagttactagattatattttaattcacaaggcaacaagtgtggtgttgcggatggagagggttttctgagtatctggcaagttaaccaaactgcatcaaatcctaaaccttatatgagttggcagtgccacagtaaagccacaagtgactttgcatttattacctcttcaagtctagttgccacatctggacactccaatgacaatagaaatgtttgcctctgggacacattaatatcacccggaaacagcctcattcatggtttcacgtgccacgatcatggtgccacggtactgcagtatgcacccaaacagcaactcctaatctcggggggtaggaaaggacacgtctgcatttttgacatcaggcaaaggcagctcattcacacgttccaggcccatgactcagctattaaggctctggccttggatccctatgaggaatattttaccacaggttcagcagaaggtaacataaaggtttggagattgacaggccatggcctaattcattcatttaaaagtgaacatgctaagcagtccatatttcgaaacattggggctggagtcatgcagattgacatcatccagggcaatcggctcttctcctgtggtgcagatggcacgctgaaaaccagggttttgcccaatgcttttaacatccctaacagaattcttgacattctataaagattggggttttatttttatatacatttcagttaaaaggcacactacagtcatcactaggcaattctgctttctaagcagttgtattgaaaacagagaatctctgtgtagaatttgaatatgacccaagctgagtattatctaaacaggttggtggaatgaatgcgcatgtaccttattatgctgacatactaaaaaaaataaaacctagtattgtatgaaggatagctattctttacagcatttagcaaacctgattcagaaaacatttgagattagcaaattagtaacttgaaataatgaaaaggacgtttataccaaattaaggaagaaaatgttgctgatttgggtttttcttcctgttcttaccactgactgaagcatgcctgcagtctcctcctctgttgaatgaaggataatcataaggtgtttgttaggagcgctagaccacctggaaaactttcttagctgtggagcagtgcgcagtgaccagttctctgctgtgagaggccgtttccattctttcctgctgaatatttttcctgttagtgtttatactgagctagtactgtaacttgcaaatgagtgcaaatttaaatgcaatgttttactcacaatttgcacattcacattttttggactgctagtttttctatttaaatatttgccttcatgttaggaatgtactatgtgaacatgacatatttgtagttaaccaaacacaccttcttagtccagtttagtactttttcttttcgtgtattcaaggttaaacacccaaacatttaaggatatgttgaaactacaccaatagagcatttcatatcataattaaaatgaatgttaggcttcttgtggccagttaatagttgatgagattggtgacattatttattgccacagcctattgtataaactatgcagagttaaatatttgcttgtaaaatattagccaatgttgtcattattttgatgtatttccttggttatgaccaaaaatatgttgagatactgaaactaatgtctgtgtgtttaaatgtttaccagcaaattgtcttatcatgttaatgagaatgttcaatgcctgtgtggtaaatagtaaatacaatggcataaaagtaactttctctgaagatgtgatgttcaggctgtgaaatatatatgtaaaagaaaaataaatgttatttgttagagtt

SEQ ID NO: 69337 - protein, 2400 aa, Artificial Sequence
  derived and/or modified sequence
MHLHQVLTGAVNPGDNCYSVGSVGDVPFTAYGSGCDIVILANDFECVQIIPGAKHGNIQVSCVECSNQQGRIAASYGNAVCIFEPLGINSHKRNCQLKCQWLKTGQFFLSSVTYNLAWDPQDNRLLTATDSIQLWAPPGDDILEEEEEIDNTVPPVLNDWKCVWQCKTSVSVHLMEWSPDGEYFATAGKDDCLLKVWYPMTGWKSSIIPQDHHEVKRRQSSTQFSFVYLAHPRAVTGFSWRKTSKYMPRGSVCNVLLTSCHDGVCRLWAETLLPEDCLLGEQICETTTSSIASSLSHAGRHKDRIQHALETIHHLKNLRKGQRRSSVLVTHAELMPDQTAMHEVQRHISHHANALCHFHIAASINPATDIPNVLVGTAFNVDDGNGGFVVHWLNNKEFHFTSSTEVFMHQLRKLSDKQVDHENDDADREDEEHSQEDRERGLHMKLDHDLSLDRESEAGTGSSEHEDGEREGSPRTYSRLSVPMPLPTVLLDRKIETLLTEWNKNPDMLFTIHPVDGTFLVWHVKYLDEYNPGIFRQVQVSFSSRIPVAFPSGDASSLSKNIMMYACINATKDSHHTLLHQEGMSVGSPHGSQPHSRSHSTHMNILAPTVMMISKHIDGSLNQWAVTFADKSAFTTVLTVSHKFRYCGHRFHLNDLACHSVLPLLLTSSHHNALLTPELDCQWDSDNKLSRLMDPVKHIKGSSKQPLRNAATRTFHDPNAIYSELILWRVDPIGPLSYTGGVSELARINSLHTSAFSNVAWLPTLIPSYCLGTYCNSASACFVASDGKNLRLYQAVVDARKLLDELSDPESSKLIGEVFNIVSQQSTARPGCIIELDAITNQCGSNTQLLHVFQEDFIIGYKPHKEDMEKKETEIFFQPSQGYRPPPFSEKFFLVVIEKDSNNNSILHMWHLHLKSVQACLGRDTLDECGLRYLLAMRLHTCLLTSLPPLYRVQLLHQGVSTCHFAWAFHSEAEEELINMIPAIQRGDPQWSELRAMGIGWWVRNINTLRRCIEKVAKASFQRNNDALDAALFYLSMKKKAVVWGLFRSQHDEKMTTFFSHNFNEDRWRKAALKNAFSLLGKQRFEQSAAFFLLAGSLKDAIEVCLEKMEDIQLAMVIARLYESEFETSSTYISILNQKILGCQKDGSGFSCKRLHPDPFLRSLAYWVMKDYTRALDTLLEQTPKEDDEHQVIIKSCNPVAFSFYNYLRTHPLLIRRNLASPEGTLATLGLKTEKNFVDKINLIERKLFFTTANAHFKVGCPVLALEVLSKIPKVTKTSALSAKKDQPDFISHRMDDVPSHSKALSDGNGSSGIEWSNVTSSQYDWSQPIVKVDEEPLNLDWGEDHDSALDEEEDDAVGLVMKSTDAREKDKQSDQKASDPNMLLTPQEEDDPEGDTEVDVIAEQLKFRACLKILMTELRTLATGYEVDGGKLRFQLYNWLEKEIAALHEICNHESVIKEYSSKTYSKVESDLLDQEEMVDKPDIGSYERHQIERRRLQAKREHAERRKSWLQKNQDLLRVFLSYCSLHGAQGGGLASVRMELKFLLQESQQETTVKQLQSPLPLPTTLPLLSASIASTKTVIANPVLYLNNHIHDILYTIVQMKTPPHPSIEDVKVHTLHSLAASLSASIYQALCDSHSYSQTEGNQFTGMAYQGLLLSDRRRLRTESIEEHATPNSSPAQWPGVSSLINLLSSAQDEDQPKLNILLCEAVVAVYLSLLIHALATNSSSELFRLAAHPLNNRMWAAVFGGGVKLVVKPRRQSENISAPPVLSEDIDKHRRRFNMRMLVPGRPVKDATPPPVPAERPSYKEKFIPPELSMWDYFVAKPFLPLSDSGVIYDSDESIHSDEEDDAFFSDTQIQEHQDPNSYSWALLHLTMVKLALHNVKNFFPIAGLEFSELPVTSPLGIAVIKNLENWEQILQEKMDQFEGPPPNYINTYPTDLSVGAGPAILRNKAMLEPENTPFKSRDSSAFPVKRLWHFLVKQEVLQETFIRYIFTKKRKQSEVEADLGYPGGKAKVIHKESDMIMAFSVNKANCNEIVLASTHDVQELDVTSLLACQSYIWIGEEYDRESKSSDDVDYRGSTTTLYQPSATSYSASQVHPPSSLPWLGTGQTSTGASVLMKRNLHNVKRMTSHPVHQYYLTGAQDGSVRMFEWTRPQQLVCFRQAGNARVTRLYFNSQGNKCGVADGEGFLSIWQVNQTASNPKPYMSWQCHSKATSDFAFITSSSLVATSGHSNDNRNVCLWDTLISPGNSLIHGFTCHDHGATVLQYAPKQQLLISGGRKGHVCIFDIRQRQLIHTFQAHDSAIKALALDPYEEYFTTGSAEGNIKVWRLTGHGLIHSFKSEHAKQSIFRNIGAGVMQIDIIQGNRLFSCGADGTLKTRVLPNAFNIPNRILDIL

SEQ ID NO: 69338 - DNA, 7203 bp, Artificial Sequence
  derived and/or modified sequence
atgcacctgcatcaggttctgactggagcggtgaaccccggtgacaactgctatagtgtcggctccgtgggcgacgtgccatttaccgcctacggttccggatgtgacatcgttattctggccaatgattttgagtgtgttcagattattccaggcgccaagcatggcaatatccaagtctcatgcgtcgagtgcagcaatcagcagggacgcatcgcggcgtcttatgggaacgccgtttgcattttcgaacccctggggataaacagtcacaagcggaattgccagctcaaatgccaatggctgaagacaggccagttttttttatcttcggtgacatacaacctagcctgggacccccaagacaatcgccttttgactgccacagactcaatccaattgtgggctccccccggggatgacatattggaggaagaggaggaaattgataacacggtgccgcccgttctcaacgactggaagtgcgtgtggcagtgtaaaacaagtgtatcagtccatctaatggagtggtcccctgatggcgagtattttgctactgctggaaaggatgactgtctcctgaaggtctggtacccaatgacgggctggaaatcttcaatcatacctcaggaccatcacgaagttaaaaggcgccagtccagcacacagttcagcttcgtgtacctggcccatcctagggccgttactggtttttcctggcggaagacctccaagtacatgcctcggggttcagtgtgcaatgtgcttctcacaagctgccacgacggcgtgtgtcgcctctgggcagagacactcctcccagaagattgtttattgggcgaacagatttgcgaaacgactacttcttcaatcgccagctccctgtcacacgccggccggcataaagatcggattcagcatgccctggaaaccatccaccaccttaaaaacctgcgcaaaggccaacggcgttcttcagtattggtaacccacgccgagcttatgccagatcaaaccgcaatgcatgaagttcagaggcacataagtcaccatgccaacgccctgtgccactttcacatcgccgcctcgatcaaccccgcgaccgacattccaaacgtgctagtgggaaccgcattcaacgtggacgatggaaatggcggattcgtggtccactggttgaacaacaaagagttccatttcacttcgagcacagaggtattcatgcaccaattaagaaagctaagtgacaaacaggtagatcacgagaatgatgatgccgatcgggaggacgaggagcacagtcaggaagatcgcgaacgtggcctccacatgaagcttgatcacgatctgtcgctagacagagaatcggaggcagggaccgggtcatcagagcatgaggatggggagagagaggggtcccctagaacatactccagactcagtgtgcctatgccactccccactgtccttttggaccggaagattgagacactcttgaccgaatggaataagaaccccgatatgctcttcacgatccatccagtcgatggcacgttcttagtatggcacgttaagtaccttgacgagtacaatcctggaatattcaggcaggtccaagtgagctttagctcgcgaattcccgtcgcctttccctccggtgatgcttcatccctttctaagaatataatgatgtacgcctgtataaacgcaactaaggactcccatcatacactgctccaccaggaagggatgagcgtaggctcccctcacgggtcacaaccccattcccgctcccactcgactcacatgaacatattggcgccaaccgtgatgatgatcagtaaacatatcgacgggtcactaaatcagtgggcggtcactttcgctgacaagtctgctttcaccactgtactgactgtgagccacaagtttagatattgtggccaccgctttcatctaaatgatctggcctgtcacagtgtgctgcctctgctcctgacgagctcacatcacaatgctctgctgacccctgaactagattgccagtgggattctgataacaagctttctagattgatggatccagttaaacacattaagggaagctcaaagcaacccctgcggaacgccgccactcgtactttccatgatcccaacgctatctactcagagctcattctgtggcgcgtggacccgattggtcctctctcttacactggcggtgtgtccgaactcgctaggatcaactcgctgcacaccagcgctttctctaacgtcgcatggctgccaactctgattccaagctattgcttaggaacgtattgtaacagcgcatcagcttgcttcgttgccagcgatggtaagaatctgagattatatcaggcggtcgtggacgcaaggaagctccttgatgaattgtccgaccctgagagttccaagctgattggagaagtgttcaacatcgtttcccagcagagtaccgctcgcccaggatgcattatcgaactagacgccatcaccaatcagtgtgggtccaatacacagctgctgcacgtttttcaagaagattttatcattggctataagccccataaagaggacatggaaaagaaagaaacagaaattttttttcagccatcccagggatacaggcctcccccgtttagcgaaaagttttttcttgtggtgattgagaaagatagcaataacaatagcattctacacatgtggcatttacacttgaaaagcgttcaggcttgcctcggcagagatacactggatgagtgtggcctccggtatctcctggccatgcggctccatacttgtctcctcacatcgctcccacccctgtacagggtgcagctcttgcatcagggagtgtctacctgccatttcgcttgggcctttcactctgaagccgaggaagagcttataaacatgattcctgctatccagcggggggatccccagtggtccgaactgcgggcaatgggcatcggctggtgggtgcgtaacatcaacacgctgaggcgatgcatcgagaaggtcgcaaaggcgtcctttcagaggaataacgatgctttagacgccgcattattctatctttcgatgaagaagaaggctgtggtgtggggactttttagatctcagcatgatgagaagatgacaacgtttttttctcacaactttaacgaggataggtggagaaaggcggcacttaaaaacgccttttctttgctggggaaacagaggtttgaacagtccgctgcgttctttctgctggccgggtctctgaaagatgcaatcgaggtgtgtctggagaaaatggaggacatccaactggccatggtcattgcacgcttgtacgaatccgagttcgaaacctcaagcacgtatatcagtattttaaatcaaaagatcctgggctgccagaaagatggaagcggcttctcgtgtaagcgcctccaccccgacccattcctgcggtcactcgcatattgggtgatgaaggattatacacgcgccttagacacgttgctggaacagactccaaaggaggatgatgagcaccaggttattattaaaagttgcaacccagttgccttttctttctataattacctaaggactcaccctttgttgattcgcaggaatttagcctcacctgaaggcactctggccacactggggctgaaaaccgagaagaacttcgtggataaaatcaaccttatcgagagaaagcttttctttactaccgccaatgctcactttaaagtcggttgtcccgtccttgccttagaggtgctgtcgaaaatccccaaggtcacaaagacttctgcactttccgcaaagaaggaccagcccgatttcatcagccacagaatggacgacgtgccatcccactctaaggccctaagcgacggcaatggtagctctgggatcgaatggagcaacgtgacgagcagtcagtacgattggtcacaacccattgtgaaggtcgacgaggaacctctgaacctggactggggggaagaccacgattcagcgctggatgaggaggaagatgatgctgtaggcctcgtgatgaagtcaacggacgcgcgcgaaaaggacaagcagagcgaccagaaggcttccgatcccaatatgcttctgactcctcaggaggaagacgatccagagggggataccgaagtcgatgttatagccgaacaactgaagtttagagcgtgtctgaagattcttatgaccgagctaagaaccctagctaccggatacgaggttgatggcggtaaactgcggttccagctgtataattggctcgagaaagagatcgctgccctgcacgaaatatgtaatcatgagtcagtcattaaggagtattctagcaagacctacagtaaagtcgagagcgacctgctggatcaagaggagatggttgacaagcctgatattggcagttatgaaaggcaccagattgagcggcggaggttacaggccaagcgagaacacgcggaaagacgaaaatcttggctgcagaagaatcaggatttacttcgggtcttcctctcatactgctctctgcacggagcccaggggggagggctggcttcagtacgcatggagctcaagttcttgttgcaggagtctcagcaggagacaacagtgaagcagctgcaaagcccgctgccactcccaacgaccctcccgctgttatcagctagcatagctagtactaaaacagttattgcgaacccagtcctctacctcaataaccacattcatgacattctttacaccattgtccagatgaagacccctcctcacccctccatagaagacgtgaaagtgcacacccttcattctttagccgctagcttaagtgctagtatctaccaggccctttgtgatagccactcttatagccaaactgaaggaaaccagttcacaggcatggcctaccaaggcctcctactgtcagaccgcaggcggctgcgcacagagagcatagaagaacacgccacacctaacagctcacctgcccagtggcccggagtgtccagcttgatcaacttgctgagtagtgcccaggatgaagaccagccaaaacttaatatcctcttatgcgaggccgtggtggcagtgtatctgagcctgctgattcacgctctggcaaccaacagttcctccgagctgttccggttagcggctcaccctctaaacaacaggatgtgggcggctgtgttcggaggaggtgtgaaattagtggtgaagccccgcaggcagagtgagaatatctcagctccaccggtgcttagcgaagacattgataagcaccggcggaggtttaacatgagaatgctagtgcccggtcgtcctgtgaaggacgcgactccaccccccgtccctgcggagcgcccaagctacaaagaaaaatttatcccacccgagctgtcaatgtgggactattttgtcgcgaaaccattcctgccacttagcgattcaggagtcatctacgactccgatgaaagtattcacagtgatgaggaggatgatgctttctttagtgacacccagatccaggagcaccaagaccctaactcatattcttgggctttgctgcatttaaccatggtgaagctggccttgcataatgtgaagaatttttttcccattgccggattggaattctcagaactgccagtgacatcgcctctgggaattgctgttattaagaacctcgaaaactgggaacagattcttcaggaaaaaatggaccaattcgagggccctcctccaaactacatcaacacttatcccactgacctgtctgtcggggccggacccgctatcctgagaaacaaggccatgctggaacccgagaatactccctttaaaagtagagatagcagtgcgttccctgtcaagcggttgtggcactttctggtgaaacaagaggtgcttcaggagacatttatcagatatatctttacaaagaagcgcaagcaatcggaggtggaggctgatctcgggtacccagggggtaaagcgaaggtcatccacaaagaaagcgatatgatcatggcattctctgtgaacaaggctaattgtaatgaaattgtcctcgccagcacccatgatgtgcaagagctggatgttaccagcctgctggcatgccaatcttatatttggattggggaggagtacgaccgtgagtcaaaaagttccgatgatgtagactatcgggggtctaccacaacactgtaccagcccagcgccacgtcttactctgcttcccaggttcaccccccatcaagtctgccatggcttggaactgggcaaacctctactggagcttcagtgctcatgaagcgtaaccttcacaatgtgaagcggatgacctctcatcctgtgcaccagtactacctgaccggcgcacaagatggcagtgtgcggatgtttgaatggacaagaccccagcaactggtttgttttcgccaggctgggaatgccagagtgaccagattatacttcaattcacagggaaacaaatgtggagtggcggacggtgaaggcttcctgagcatctggcaggttaatcagactgcatccaatcccaaaccttacatgtcatggcaatgccacagcaaagcgacaagcgacttcgctttcataacaagttcctccctggttgccaccagcggccactcaaacgacaataggaacgtgtgcctgtgggacaccctgatttctcctgggaattccctgattcatggatttacctgtcacgaccacggggccactgtcctgcagtacgcccctaagcaacagctgctgatttcaggaggccggaaaggccacgtctgtatttttgacatccgccagaggcagctcattcacacttttcaggctcacgattcagccatcaaggccctggcgctggatccttacgaagagtattttacaaccggctccgctgaaggcaacataaaagtgtggcgactaaccgggcacggattgatccactcctttaagtccgagcatgccaagcagtcaatcttccgtaatataggtgctggggtaatgcaaatcgatatcatccaaggcaatcgcctcttttcgtgcggcgctgacgggacactgaagacgcgggtgcttcccaacgcctttaacattccaaacaggatcttggacatcctgtag

SEQ ID NO: 69339 - DNA, 7203 bp, Artificial Sequence
  derived and/or modified sequence
atgcacctgcaccaggtgctgaccggggctgtgaaccctggggacaactgctacagcgtgggctctgtgggagatgtgcccttcaccgcctacggcagcggctgtgacatcgtcatcctggccaatgactttgaatgtgtgcagatcatccctggggccaagcacggcaacatccaggtgtcctgtgtggagtgcagcaaccagcagggcagaattgctgccagctatggaaatgctgtgtgcatctttgagcccctgggcatcaacagccacaagaggaactgccagctgaagtgccagtggctgaagacaggccagttcttcctgagctctgtgacctacaacctggcctgggacccccaggacaaccggctgctgacagccacagacagcatccagctgtgggcccctcctggagatgacatcctggaggaggaggaggagattgacaacacagtgccccctgtgctgaatgactggaagtgtgtgtggcagtgcaagacctctgtgtctgtgcacctgatggagtggagcccagatggagagtactttgccacagctgggaaggatgactgcctgctgaaggtgtggtaccccatgacaggctggaagagcagcatcatcccccaggaccaccacgaggtgaagaggcggcagagcagcacccagttctcctttgtgtacctggcccaccccagggctgtgacaggcttctcctggaggaagaccagcaagtacatgccccggggctctgtgtgcaatgtgctgctgaccagctgccatgatggagtgtgccgcctgtgggccgagaccctgctgcctgaggactgcctgctgggggagcagatctgtgagaccaccaccagcagcatcgccagcagcctgagccacgccggccgccacaaggaccgcatccagcacgccctggagaccatccaccacctgaagaacctgaggaagggccagaggaggagctctgtgctggtgacccacgccgagctgatgccagaccagacagccatgcatgaggtgcagaggcacatcagccaccacgccaatgccctgtgccacttccacatcgccgccagcatcaacccagccacagacatccccaacgtgctggtgggcacagccttcaacgtggatgatggaaatggaggctttgtggtgcactggctgaacaacaaggagttccacttcaccagcagcacagaggtgttcatgcaccagctgaggaagctgagtgacaagcaggtggaccatgaaaatgatgatgctgacagagaagatgaggagcacagccaggaggaccgggagcggggcctgcacatgaagctggaccatgacctgagcctggaccgggagagcgaggccggcaccggcagcagcgagcatgaagatggagagcgggagggcagccccaggacctacagccggctgtctgtgcccatgcccctgcccaccgtgctgctggacaggaagattgagaccctgctgacagagtggaacaagaacccagacatgctgttcaccatccaccctgtggatggcaccttcctggtgtggcacgtgaagtacctggatgagtacaaccctggcatcttccggcaggtgcaggtgtccttcagcagccgcatccctgtggccttccccagcggagatgccagcagcctgagcaagaacatcatgatgtatgcctgcatcaatgccaccaaggacagccaccacaccctgctgcaccaggagggcatgtctgtgggcagcccccacggcagccagccccacagccgcagccacagcacccacatgaacatcctggcccccaccgtgatgatgatcagcaagcacattgatggcagcctgaaccagtgggccgtgacctttgctgacaagagcgccttcaccaccgtgctgactgtgagccacaagttccgctactgcggccaccgcttccacctgaatgacctggcctgccacagcgtgctgcccctgctgctgaccagcagccaccacaatgccctgctgaccccagagctggactgccagtgggacagcgacaacaagctgagccggctgatggaccctgtgaagcacatcaagggcagcagcaagcagcccctgagaaatgctgccaccaggaccttccatgaccccaatgccatctacagcgagctgatcctgtggagggtggaccccatcggccccctgagctacacaggaggagtgtctgagctggcccgcatcaacagcctgcacaccagcgccttcagcaatgtggcctggctgcccaccctcatccccagctactgcctgggcacctactgcaacagcgccagcgcctgctttgtggccagtgatggcaagaacctgcggctgtaccaggccgtggtggatgccaggaagctgctggatgagctgagtgaccctgagagcagcaagctgattggagaggtgttcaacatcgtgtcccagcagagcacagcccggcccggctgcatcatcgagctggatgccatcaccaaccagtgtggcagcaacacccagctgctgcacgtgttccaggaggacttcatcatcggctacaagccccacaaggaggacatggagaagaaggagacagagatcttcttccagcccagccagggctacagacctccacccttcagcgagaagttcttcctggtggtgattgagaaggacagcaacaacaacagcatcctgcacatgtggcacctgcacctgaagtctgtgcaggcctgcctgggccgggacaccctggatgaatgtggcctgcgctacctgctggccatgaggctgcacacctgcctgctgaccagcctgccccccctgtacagagtgcagctgctgcaccagggcgtgtccacctgccactttgcctgggccttccacagcgaggccgaggaggagctgatcaacatgatcccagccatccagagaggagacccccagtggagcgagctgcgggccatgggcatcggctggtgggtgaggaacatcaacaccctgcggcgctgcatcgagaaggtggccaaggccagcttccagagaaataatgatgccctggatgctgccctcttctacctgtccatgaagaagaaggctgtggtgtggggcctcttccgcagccagcatgatgagaagatgaccaccttcttcagccacaacttcaatgaagatcgctggaggaaggccgccctgaagaatgccttcagcctgctgggcaagcagagatttgagcagagcgctgccttcttcctgctggccggcagcctgaaggatgccatcgaggtgtgcctggagaagatggaggacatccagctggccatggtgattgcccggctgtatgagagcgagtttgagaccagcagcacctacatcagcatcctgaaccagaagatcctgggctgccagaaggatggcagcggcttcagctgcaagaggctgcacccagaccccttcctgcggagcctggcctactgggtgatgaaggactacacccgggccctggacaccctgctggagcagacccccaaggaggatgatgagcaccaggtgatcatcaagagctgcaaccctgtggccttctccttctacaactacctgcggacccaccccctgctgatcagaagaaacctggccagccctgagggcaccctggccaccctgggcctgaagacagagaagaactttgtggacaagatcaacctgattgaaaggaagctgttcttcaccacagccaatgcccacttcaaggtgggctgccctgtgctggccctggaggtgctgagcaagatccccaaggtgaccaagaccagcgccctgagcgccaagaaggaccagcctgacttcatcagccacaggatggatgatgtgcccagccacagcaaggccctgagtgatggaaatggcagcagcggcatcgagtggagcaatgtgaccagcagccagtatgactggagccagcccatcgtgaaggtggatgaggagcccctgaacctggactggggcgaggaccatgacagcgccctggatgaggaggaggatgatgctgtgggcctggtgatgaagagcacagatgcccgggagaaggacaagcagagcgaccagaaggccagtgaccccaacatgctgctgaccccccaggaggaggatgatcctgagggggacacagaggtggatgtgattgctgagcagctgaagttccgggcctgcctgaagatcctgatgacagagctgcggaccctggccaccggctatgaggtggatggcggcaagctgcgcttccagctgtacaactggctggagaaggagattgctgccctgcacgagatctgcaaccacgagagcgtcatcaaggagtacagcagcaagacctacagcaaggtggagagtgacctgctggaccaggaggagatggtggacaagccagacatcggcagctatgaaagacaccagattgaaagaagaaggctgcaggccaagcgggagcacgccgagaggaggaagtcctggctgcagaagaaccaggacctgctgcgggtcttcctgagctactgcagcctgcatggagcccagggcggcggcctggcctctgtgaggatggagctgaagttcctgctgcaggagagccagcaggagaccaccgtgaagcagctgcagagccccctgcccctgcccaccaccctgcccctgctgagcgccagcatcgccagcaccaagacagtgattgccaaccctgtgctgtacctgaacaaccacatccatgacatcctgtacaccatcgtgcagatgaagaccccaccccaccccagcattgaagatgtgaaggtgcacaccctgcacagcctggccgccagcctgagcgccagcatctaccaggccctgtgtgacagccacagctacagccagacagagggcaaccagttcaccggcatggcctaccagggcctgctgctgagtgacagaagaaggctgaggacagagagcattgaggagcacgccacccccaacagcagccctgcccagtggccaggagtgagcagcctcatcaacctgctgagcagcgcccaggatgaggaccagcccaagctgaacatcctgctgtgtgaggccgtggtggccgtgtacctgagcctgctgatccacgccctggccaccaacagcagcagcgagctgttccggctggccgcccaccccctgaacaacaggatgtgggccgctgtgtttggaggcggcgtgaagctggtggtgaagccccggcggcagagcgagaacatcagcgcccctcctgtgctgtctgaggacatcgacaagcacagaagacgcttcaacatgaggatgctggtgcccggccggcctgtgaaggatgccaccccacctcctgtgcctgctgagcggcccagctacaaggagaagttcatccccccagagctgtccatgtgggactactttgtggccaagcccttcctgcccctgagtgacagcggggtcatctatgacagtgatgagagcatccacagtgatgaggaggatgatgccttcttcagtgacacccagatccaggagcaccaggaccccaacagctacagctgggccctgctgcacctgaccatggtgaagctggccctgcacaacgtgaagaacttcttccccatcgccggcctggagttcagcgagctgcctgtgaccagccccctgggcattgctgtgatcaagaacctggagaactgggagcagatcctgcaggagaagatggaccagtttgagggccccccacccaactacatcaacacctaccccacagacctgtctgtgggcgccggccctgccatcctgaggaacaaggccatgctggagcctgagaacacccccttcaagagccgggacagcagcgccttccctgtgaagaggctgtggcacttcctggtgaagcaggaggtgctgcaggagaccttcatccgctacatcttcaccaagaagaggaagcagagcgaggtggaggccgacctgggctacccaggcggcaaggccaaggtgatccacaaggagagtgacatgatcatggccttctctgtgaacaaggccaactgcaatgagatcgtgctggccagcacccatgatgtgcaggagctggatgtgaccagcctgctggcctgccagagctacatctggattggagaggagtatgaccgggagagcaagagcagtgatgatgtggactaccggggcagcaccaccaccctgtaccagcccagcgccaccagctacagcgccagccaggtgcacccccccagcagcctgccctggctgggcaccggccagaccagcactggagcctctgtgctgatgaagaggaacctgcacaacgtgaagaggatgaccagccaccctgtgcaccagtactacctgaccggggcccaggacggctctgtgaggatgtttgagtggacccggccccagcagctggtgtgcttccggcaggccggaaatgcccgggtgacccggctgtacttcaacagccagggcaacaagtgtggggtggctgatggagagggcttcctgagcatctggcaggtgaaccagacagccagcaaccccaagccctacatgtcctggcagtgccacagcaaggccaccagtgactttgccttcatcaccagcagcagcctggtggccaccagcggccacagcaatgacaacagaaatgtgtgcctgtgggacaccctcatcagccctggcaacagcctcatccacggcttcacctgccacgaccatggagccaccgtgctgcagtatgcccccaagcagcagctgctgatcagcggcggcaggaaaggacatgtgtgcatctttgacatccggcagaggcagctgatccacaccttccaggcccatgattctgccatcaaggccctggccctggacccctatgaggagtacttcaccactggatctgctgagggcaacatcaaggtgtggaggctgaccggccacggcctcatccacagcttcaagtctgagcacgccaagcagagcatcttcagaaatattggagctggggtgatgcagattgacatcatccagggcaacagactcttcagctgtggggctgatggcaccctgaagaccagggtgctgcccaatgccttcaacatccccaaccgcatcctggacatcctgtag

SEQ ID NO: 69340 - DNA, 7203 bp, Artificial Sequence
  derived and/or modified sequence
atgcacctgcaccaggtgctgaccggcgccgtgaaccccggcgacaactgttattccgtgggtagcgtgggtgatgtgcctttcaccgcttatggatctggatgcgacatcgttatccttgccaatgactttgagtgtgtacagatcatccccggagcaaaacacggaaatatacaggtgagctgcgtcgagtgtagtaatcaacaagggcgcatcgcggcatcatatggtaacgcagtgtgtatcttcgagcctctgggcatcaactcccacaagcgtaactgtcagctgaaatgccagtggcttaagacagggcagttctttctttcatctgtgacttacaacttggcctgggacccacaggataacagactcctgaccgccacagatagtatccagctttgggcccccccaggcgatgacatcttggaagaggaggaagagatcgataatacagtgcccccagtgttaaatgattggaagtgcgtctggcagtgtaagacctcggtgagcgtgcacttgatggagtggagcccagacggtgaatatttcgcaaccgccggcaaggacgactgcttgctgaaagtctggtaccctatgaccggttggaaatcatcgatcattcctcaagaccaccacgaagtgaagaggcgacagagttctactcaattttcttttgtctatttagcccatcctcgggctgtcaccggattctcctggaggaaaacttcgaaatatatgcccagaggctcggtctgcaatgtactgcttacctcctgccatgatggcgtttgtagattgtgggcagaaacactcctgcctgaagattgcctgctcggggagcagatctgcgaaactacaacgtcgagtattgcatccagtctatcccatgcgggaaggcataaggatcggatccaacacgctttggaaactatacaccacctgaagaatctcaggaaaggccagaggcgctcctccgtcctggtaacgcacgccgagttgatgcccgatcagacagccatgcatgaagttcagcgtcatatttcacatcatgccaacgctctgtgtcatttccacatcgcagcgtccattaatcctgccaccgatattcccaacgttctggttgggaccgcgttcaacgtggatgatggaaacggcggctttgttgtgcactggctgaacaataaagaattccactttacttcaagcacggaggtttttatgcaccagctcagaaagcttagtgacaagcaggtcgatcatgagaacgatgatgccgaccgcgaggacgaggaacactctcaagaggaccgggagagaggcctccatatgaagttggatcacgatttgtctttagatcgcgagtcagaagccggcaccgggtcatccgagcatgaagacggggagagagagggtagcccccggacttatagccgcctttccgtgccaatgcctctgccaacagttctgctggatcgtaagatcgaaaccctgctgacagaatggaacaagaaccctgacatgctatttaccatccaccccgtggacggtacttttcttgtgtggcatgtcaaatacctcgacgaatacaaccccgggatttttaggcaggtgcaggtgtccttttcctcccgcatacctgtagcattccctagcggagatgccagttctctgtctaaaaatattatgatgtacgcctgcatcaatgctaccaaggattcacaccacaccctgctccaccaggaaggaatgtcagtgggaagcccacatggatctcagccacactccagaagccatagcacccacatgaacatcctcgcacctacagtcatgatgatatcaaagcacatcgatggatcattgaatcagtgggctgttacattcgccgacaaaagcgcctttacgacagtgcttaccgttagccataaattccgctactgcggccaccgtttccacctgaatgaccttgcctgtcattccgttctacccctgctgctaaccagcagtcaccacaacgccctgctgacccctgagctggattgccagtgggactccgataacaagttgagcaggctgatggatcctgttaagcacatcaagggctcctccaaacaaccactgcggaacgccgccacgaggacttttcacgatccgaatgcaatctattccgaattaatcttgtggcgggttgaccccatcggccccctttcatacacaggcggagtgtctgaattggctcggatcaatagcctgcacacctctgctttttccaatgtagcctggctgcccacactcataccttcatactgtctcggaacatactgcaattctgcctccgcctgcttcgtagcttccgatgggaagaatctcagactttaccaagcggtcgtggacgctcgaaagttgctcgacgagctgagtgaccctgagtccagtaaactgataggggaagtctttaatattgtcagccaacagagcactgcacgcccggggtgtatcatcgagctagacgccataaccaaccagtgtggatcgaacacacagctattgcacgtattccaagaagactttataatagggtacaaacctcataaggaggatatggagaaaaaggagactgagatatttttccagccatcccagggctatagacccccgccattcagcgagaaattcttcttggtggtcatagagaaagacagtaacaataactccattcttcacatgtggcatctgcacctgaaatctgtccaagcatgcctaggtcgggataccttggacgagtgcggcctgcggtacctgcttgctatgagattgcatacatgcctgctgaccagccttcctcccctctatcgcgtacaattgcttcatcagggtgtttcaacgtgtcattttgcttgggccttccattcagaagccgaagaggaattgatcaacatgatcccagccatccagcgcggagatccacagtggtcagaactccgggccatggggatcggttggtgggtcagaaatataaacacattgcggcggtgtatcgagaaagtggctaaggcgtccttccaacgcaataacgatgcactcgacgcggccctcttctaccttagcatgaagaagaaagcagtcgtctggggtcttttccgctctcagcatgatgagaagatgacaacttttttttcacataactttaacgaggatagatggcggaaggccgccctgaaaaacgccttttctttacttggtaaacaacggttcgaacagtcagcagcattttttctactggctggctccctcaaggatgccatcgaggtatgtttggaaaaaatggaggacatccagctggctatggtgattgcaaggttgtatgagagcgagttcgagacctcctcaacctacatctcaattctgaaccagaaaattttgggctgccagaaggacgggtctgggttcagctgcaaacgcttacacccagatccatttcttcgctccctagcctactgggtgatgaaggactacacgcgcgcactggatacgcttctggaacagactccgaaagaggacgatgagcatcaggtcatcattaaatcttgtaacccagtagccttcagtttttataactaccttcgaacccaccctctgctgatcaggcggaacctggcctccccggaagggaccctagctacattaggtcttaaaaccgagaagaatttcgtcgacaaaatcaatctgattgagcgaaaattgttttttacaacagctaatgcccattttaaagttggctgccctgtcttagctcttgaggtcttaagcaaaatccccaaagttacaaagacatctgccctttccgccaagaaggatcagccagactttatttctcacagaatggacgatgttccaagtcatagtaaggctctgtcagacggaaacggctcctctggcatcgagtggagtaacgtgacttccagtcagtacgattggtcgcagcccatagttaaagtggacgaagagcccctgaatctagactggggagaagaccacgattctgctctcgacgaagaggaagacgatgctgtaggcttagtgatgaagtcaacggacgcccgcgaaaaggataaacagagcgaccagaaagcctctgatcccaacatgctcctgaccccccaagaggaggatgacccagaaggcgataccgaagtggatgtgatagctgagcagttgaagttcagagcctgtctcaagatacttatgacagaactgcgaaccttggctacaggatacgaggttgacggagggaagctgcggttccagctgtacaattggctggaaaaagaaattgctgccctgcacgagatctgtaaccacgagagcgtgattaaggagtacagctctaagacatacagcaaggtcgagagcgatctcctggaccaggaagagatggtggataagcccgacatcggatcttacgagcggcaccagatcgagcgacgcaggttgcaagccaaaagagaacacgctgagcggaggaagtcctggcttcagaaaaatcaggatctgttacgcgtcttcctaagttattgttccctccatggtgctcaggggggtggactggccagcgtccgcatggagttgaaatttctcctccaagagtcccagcaggaaaccacagtgaaacagttacagtcccccttgccattaccaaccacacttcctctcctgtccgcttcaatcgcatctaccaaaacagtaatagccaacccggtgctttatctgaacaatcatatacacgacatcttatatactatagtacagatgaagacaccccctcatccatctattgaggacgtcaaagtgcatactctgcactccctggctgctagcctgtctgcttctatttatcaagcactgtgcgacagccattcctactcacagaccgaggggaatcagtttactggcatggcttaccagggcctgctcctcagtgatagacggcggctcaggaccgagagtattgaggaacatgctacgcctaacagtagccccgcccaatggcctggggtgtcatcacttataaacttactgtcctccgctcaggacgaagaccagccaaaactgaatatcttgctatgcgaggccgtggtcgccgtatatctgtcgttgctgattcatgctctggccactaactcttcctcggagttgtttcgcctggctgcacacccgctgaataaccgcatgtgggctgccgtttttggtggaggggtcaaactcgtggtgaagccaagaaggcagtctgaaaacatctccgctcctcccgtgctttccgaagatatcgataaacaccggcgtcggttcaatatgcgtatgctggtcccaggtcgccccgtcaaagacgcaaccccacctcccgttcctgccgaaaggccctcgtacaaggagaaattcataccaccagagctgtccatgtgggactactttgtagctaagccgttcctgccacttagcgacagcggcgtaatctacgactctgatgagtcaatccactccgacgaagaagacgacgccttcttctccgatacgcaaatccaggagcatcaggatcctaactcttatagttgggccctgttgcatctcaccatggtaaaactggctttgcataatgtcaaaaacttttttcctatagctgggttggaattttccgaacttcccgtcaccagcccattgggcatagccgtaatcaagaatctcgagaattgggagcagattcttcaggagaaaatggaccagttcgaggggccccctcccaactacatcaacacgtatcctacagatttatcagtcggcgcaggcccggcaatcctgcggaataaagccatgctggagccagaaaatactccctttaagagccgagactcatccgcgttccccgttaagagactgtggcacttcctcgtgaagcaggaggtattgcaggaaacttttattcggtacatttttacaaagaagcgtaaacagagcgaggttgaggctgatttagggtatcccggtgggaaggccaaggtgattcacaaggagagtgacatgataatggcattctccgtgaacaaggccaactgtaatgaaatagtacttgcttctacacatgatgtgcaggaattggacgtgacatcgcttcttgcatgccaatcatatatatggattggggaagagtatgaccgcgagtccaagtcaagtgacgatgtagactaccgcgggtccactacaacactatatcagccaagcgcaactagctattctgcatctcaagtacaccccccaagctcgctgccttggctggggaccggccagacgagcactggggcttctgtgctgatgaaacgcaacctgcacaacgtgaaacgcatgacgtctcacccagtgcatcagtactacctaacaggagcccaggacgggagtgtcagaatgttcgaatggacccggccacagcaattagtctgcttcagacaggcaggcaatgcccgggttactagattgtactttaactcccaggggaacaagtgcggagttgcagatggcgagggctttctctccatttggcaagtgaaccagacagcctctaatcctaagccttatatgagctggcagtgtcactctaaagccacatccgatttcgcctttattacgtcgtcatccctggttgcgacaagcggccactcaaatgacaacaggaacgtgtgtctatgggacaccctgattagccccgggaacagcctgatacacggattcacatgccacgaccatggggctacggtgctccaatacgcacctaagcagcagctccttatttctggtggccgtaaggggcacgtttgcatatttgatatccggcagaggcagctgatccacaccttccaggcccacgactcagcaattaaggcgctcgcgctggacccttacgaggagtacttcactactggctctgccgagggcaatatcaaagtctggagactgacaggccacggtctgattcactccttcaaatctgaacatgcgaaacagtctatctttcgaaatatcggcgcgggtgtaatgcaaatcgacatcattcaggggaatcgccttttttcgtgtggcgcagacggtacattgaagaccagagtcctacccaacgccttcaatatccctaatcggatccttgatattctctag

SEQ ID NO: 69341 - DNA, 7202 bp, Artificial Sequence
  derived and/or modified sequence
atgcatttgcaccaggtgctcaccggagcagtgaaccccggtgacaactgttacagtgtgggatctgtgggggatgtgcccttcactgcatacgggtcagggtgtgatattgttatcttagcaaacgacttcgaatgcgtacaaatcattcccggagctaagcacggaaatatccaggtgagttgcgtggaatgcagtaaccagcaaggtcgaattgccgcttcctacggcaacgccgtctgcatttttgagcccctgggcataaattcgcataagcggaattgccagctgaaatgtcaatggctaaagactgggcagttcttcttgtctagcgtgacatacaatctcgcctgggacccacaggataacaggctgctaaccgcgaccgactcaattcagctctgggcccctcccggagacgacatcctggaggaggaggaggagatagataataccgtccctcccgtgctgaacgattggaaatgcgtttggcagtgcaagaccagcgtgtctgtccatttgatggaatggagccccgatggcgagtactttgctacagcagggaaggatgattgtttattgaaggtgtggtaccccatgacaggttggaagtcctcaattatcccccaggatcatcacgaggtgaaaagacggcagtcctcaacgcagtttagctttgtgtacctggctcaccctcgagcagtgaccggcttctcctggagaaagacatcgaagtacatgcctagaggttctgtttgcaatgtgctgcttacgagctgtcatgatggagtctgccgcctttgggccgaaaccctgctccctgaggactgtctgttgggagagcagatttgcgaaacaaccacctcatctatcgccagtagtctgagtcacgccggtcggcacaaggaccggatacagcacgccttggaaaccatccaccacctgaagaatctccgcaagggacagagaaggtctagcgtgctcgtgacgcacgctgaactgatgcctgatcagaccgccatgcatgaagtccaacgacatataagccatcatgctaatgctctgtgccacttccacattgcagcatcaattaaccccgcaacggatattcccaacgttctggtagggaccgcatttaatgtcgacgatggcaacggaggctttgtggtgcactggttgaacaacaaggaattccatttcacctcatctacagaagtatttatgcaccagcttcgaaagctttccgataaacaggttgatcatgagaatgatgacgcggacagagaggatgaggagcatagccaagaagacagggagcgcggactccacatgaaactcgatcacgaccttagcctggacagggagagtgaggctggaacgggcagttcagagcatgaagatggagaacgtgaagggtccccacgtacttactctcgcctctccgtacctatgcctctcccaaccgtgcttctagatcgaaagatcgagaccctgctcaccgagtggaacaaaaatccggacatgctgtttacaatccatcctgttgacggcacttttcttgtttggcatgtcaaatatctggatgaatataatcctggaatttttagacaggttcaggtgtctttttccagtaggatcccagtggcatttccgagtggtgacgcatctagcctgtcaaaaaacatcatgatgtatgcctgcatcaacgctaccaaggactctcaccatactttactccaccaggagggcatgtctgtcggtagccctcatggaagtcagccccacagcagatcccactctactcacatgaacattttggcgcctaccgttatgatgatatccaagcacatcgatggcagcttgaatcaatgggccgtaaccttcgctgacaagtctgccttcacaaccgtgttgactgtgtcacacaagtttcggtactgcggccaccggttccacctcaatgatttggcttgtcacagcgttctgccacttttgcttacctcttcgcaccataacgcgttgttgacaccagagctggactgtcaatgggacagtgacaacaaactttctcgcctaatggacccagtgaaacacataaaaggctccagtaagcagcctctgcgaaatgctgccactcgaacattccatgatcccaatgcgatatactcggagctgattctatggcgggtggacccgatcggccctttatcatatactggaggagtgtcagaactcgcgagaatcaattctctacacactagcgctttctcaaatgtggcgtggctcccaactttaatcccaagctactgtctgggaacatattgtaactccgcctctgcttgcttcgtcgcttccgacggcaagaacctgcggctgtatcaggcagttgtggatgctcgaaaattgcttgacgaactgtctgaccccgagagctcaaagctaatcggggaggtgtttaacatcgtgtctcagcagtctacagccaggccaggctgtatcatcgaactcgacgctatcaccaatcaatgtgggtcaaatacccagctgctccatgtgttccaagaagacttcataatcggctacaagccccacaaggaggacatggaaaaaaaagagaccgagattttctttcaaccctcgcagggatacagaccccctcctttttctgagaagttttttctggttgtgattgagaaggatagtaacaacaattcgattctgcacatgtggcatctgcatctgaagtctgtccaggcttgtctggggagagacaccctcgatgaatgcggactcaggtacctcttagcaatgaggctgcacacatgtctcttaacatccttgccgcctctgtatagggtgcagctgttgcatcaaggcgtgtcaacttgccatttcgcttgggcgttccattcggaggctgaggaagaactcatcaacatgatacctgctattcaacggggagacccccagtggtccgagttgcgggcaatgggaattgggtggtgggtacgtaacattaacactcttagacgctgtattgagaaagtcgccaaggcctccttccaacggaataacgacgccctagatgctgcgctgttttatctaagcatgaaaaaaaaggccgtggtgtggggtttgttccggtcgcaacacgatgagaagatgacgacattcttttcccacaacttcaatgaggatagatggagaaaagcagccctcaagaatgcattctctctgctgggaaaacagcgttttgaacaaagcgccgctttttttctccttgctggctccctgaaggacgctatcgaggtgtgcctggagaaaatggaggacattcagctagcaatggtgattgcgagactgtacgaaagcgagtttgagactagctccacgtacattagcattctcaaccaaaagattctgggatgccagaaggacggatccgggttttcctgcaaacgccttcaccctgatccctttctgagaagcctggcctactgggtgatgaaggactatactcgggctctggatacactcctggaacagacccccaaagaggacgacgagcaccaggtgataatcaaatcctgcaaccctgtcgccttctcattctataactatttgcgcacacaccctctgttgattcgaagaaatctggcgtcgcctgagggcaccttggcgactctcggtttgaagaccgagaaaaattttgttgacaaaatcaacctcatcgagagaaaattgttctttacaaccgctaacgctcacttcaaagtggggtgtcccgtgctggccctggaggtgctttctaaaatcccaaaggtcactaagacctctgctctgagtgccaaaaaggaccaacctgactttatttcccaccgtatggacgatgtcccgagccactcaaaagctctgtctgatggcaatggatcatcaggcattgaatggagcaacgtcactagctctcaatacgactggtcccagcccattgttaaggttgatgaggagccattgaacttggactggggcgaggatcacgattctgcattggacgaggaggaagacgacgccgtggggctagtaatgaagagcacggatgcgagggagaaggataaacaatccgaccagaaggcatctgatcccaacatgctgctgaccccacaggaggaggatgacccagagggggacacggaggtcgatgtgatagctgagcagctcaagttccgggcatgtctgaagatcctgatgaccgagctgagaacgctcgctacaggctacgaggttgacgggggtaagctccgctttcagttatacaactggctggagaaagagatcgccgcacttcacgagatctgtaaccatgagagtgtaattaaggaatattccagtaaaacttactctaaggtagaatctgacttgctggatcaggaagaaatggttgataaacctgatattggcagctatgaaagacatcagatcgaacgccgtcgactacaagcaaaacgagagcatgctgaaaggcgaaaaagttggctgcagaagaaccaggatctgcttcgcgtgttcttgtcttattgtagccttcatggggctcaaggtggcggtttagcttcggtcagaatggaactcaaattcttgctgcaggaaagccaacaagagaccacggtgaagcagcttcaatctcctcttcccctcccaaccacacttcctcttctgtctgcttcaattgcttcaacaaagacagtgattgcaaatccagtgctatacctgaataatcacatccacgacatcctctacacaattgttcaaatgaagacaccaccacacccatcaatagaggatgtcaaagtgcatacactccactcacttgccgcaagcctgagtgcatctatttaccaggctctctgtgatagtcactcctactcccaaacagagggaaaccagttcaccggcatggcttaccagggccttcttctgagcgatcggaggcgcctacgcacagaaagcatcgaggaacacgccactcctaattcaagccccgctcaatggcctggagtgtcttcattaatcaacttgctttcgagtgcgcaagatgaggatcagcccaagcttaacatcctgctgtgtgaggctgttgtggctgtgtatctgagtcttctaatccatgcccttgctacgaactcctcctctgaattatttagacttgccgcacatccactgaacaaccgtatgtgggccgctgtgtttggcggtggcgtgaaattagtggtgaagccacggcgtcagagtgaaaacatctcagccccaccggttctatccgaagatatcgacaaacaccgacggcgattcaatatgagaatgttggtcccgggacgcccagtaaaggatgctaccccccctcctgttccagccgaacgtccatcctataaggagaagtttatacctcctgagttgagcatgtgggattattttgtggccaaacccttcttgcccttgtcggactctggcgtgatatatgattctgacgaaagcatccacagcgatgaggaggacgacgcctttttctcagacacccaaatccaggagcaccaagatcccaattcgtacagttgggctcttctgcacttgactatggtcaagttggcccttcacaacgtaaagaacttcttcccaattgcaggcctggagttctctgaactacctgttacgagcccactggggatagcggtcataaagaacctcgaaaactgggagcagatcctgcaagagaagatggatcagtttgaaggccctccaccaaattacattaatacctatcctactgatctatccgtgggcgctggccctgccattctgaggaacaaagctatgctggagcctgagaatacaccatttaagtccagggactcttccgcctttcctgtgaaaagactgtggcactttctcgtgaaacaagaggtgttgcaggagaccttcatccgctatatctttactaaaaaacgcaagcagtccgaggtcgaggctgatctgggctacccaggtgggaaagccaaggtgattcacaaggagagtgacatgatcatggcattttccgttaataaagctaactgtaacgaaattgttctcgcctccacacacgacgtacaggagctagacgtgacctctctgcttgcatgtcaatcctacatttggatcggagaggagtacgatcgcgaatctaagtctagcgatgatgtcgactatcggggttccaccacaaccctctatcagccctcagcaacaagctacagtgcatctcaggttcacccaccgagctcccttccttggctcggtacgggacagacttctactggggcatccgtgctgatgaaaagaaatctccataatgtcaaaaggatgacttctcaccccgttcatcagtactatctgactggtgctcaagacggctcagtgcgaatgttcgagtggactcgtccccaacagctggtttgttttcgccaggcaggaaacgccagagtgacccgcctgtactttaatagtcagggaaacaaatgtggggtggcagatggcgaaggctttttatccatctggcaggttaaccagaccgctagtaaccctaagccatacatgtcatggcagtgtcatagcaaggcaaccagcgatttcgcctttatcacttccagctccctggtggctacatccgggcacagtaacgataaccgaaatgtgtgtttgtgggacacccttatttcccccggaaattctttaatacacggctttacctgtcacgaccatggggctacggtcctgcagtacgccccaaagcagcagctactgatctccgggggacgaaaagggcacgtttgtatattcgatatccgtcaacggcagttaatccacactttccaggctcatgattctgccattaaggccctagcgttggacccttacgaggaatacttcaccaccggttccgcagaggggaatattaaggtgtggcgcctaaccggccacggtctaattcatagtttcaagtctgagcatgcgaaacaatctatttttaggaatattggtgccggagtgatgcagatcgatattatccaaggcaatcgcctgttctcatgtggtgcagatggcaccctgaagacccgcgttctgcctaatgcattcaacatacccaacaggattctcgacatcctgta

SEQ ID NO: 69342 - DNA, 7203 bp, Artificial Sequence
  derived and/or modified sequence
atgcacctgcaccaggtgctgaccggcgccgtgaaccccggcgacaactgctacagcgtgggcagcgtgggcgacgtgcccttcaccgcctacggcagcggctgcgacatcgtgatcctggccaacgacttcgagtgcgtgcagatcatccccggcgccaagcacggcaacatccaggtgagctgcgtggagtgcagcaaccagcagggcagaatcgccgccagctacggcaacgccgtgtgcatcttcgagcccctgggcatcaacagccacaagagaaactgccagctgaagtgccagtggctgaagaccggccagttcttcctgagcagcgtgacctacaacctggcctgggacccccaggacaacagactgctgaccgccaccgacagcatccagctgtgggccccccccggcgacgacatcctggaggaggaggaggagatcgacaacaccgtgccccccgtgctgaacgactggaagtgcgtgtggcagtgcaagaccagcgtgagcgtgcacctgatggagtggagccccgacggcgagtacttcgccaccgccggcaaggacgactgcctgctgaaggtgtggtaccccatgaccggctggaagagcagcatcatcccccaggaccaccacgaggtgaagagaagacagagcagcacccagttcagcttcgtgtacctggcccaccccagagccgtgaccggcttcagctggagaaagaccagcaagtacatgcccagaggcagcgtgtgcaacgtgctgctgaccagctgccacgacggcgtgtgcagactgtgggccgagaccctgctgcccgaggactgcctgctgggcgagcagatctgcgagaccaccaccagcagcatcgccagcagcctgagccacgccggcagacacaaggacagaatccagcacgccctggagaccatccaccacctgaagaacctgagaaagggccagagaagaagcagcgtgctggtgacccacgccgagctgatgcccgaccagaccgccatgcacgaggtgcagagacacatcagccaccacgccaacgccctgtgccacttccacatcgccgccagcatcaaccccgccaccgacatccccaacgtgctggtgggcaccgccttcaacgtggacgacggcaacggcggcttcgtggtgcactggctgaacaacaaggagttccacttcaccagcagcaccgaggtgttcatgcaccagctgagaaagctgagcgacaagcaggtggaccacgagaacgacgacgccgacagagaggacgaggagcacagccaggaggacagagagagaggcctgcacatgaagctggaccacgacctgagcctggacagagagagcgaggccggcaccggcagcagcgagcacgaggacggcgagagagagggcagccccagaacctacagcagactgagcgtgcccatgcccctgcccaccgtgctgctggacagaaagatcgagaccctgctgaccgagtggaacaagaaccccgacatgctgttcaccatccaccccgtggacggcaccttcctggtgtggcacgtgaagtacctggacgagtacaaccccggcatcttcagacaggtgcaggtgagcttcagcagcagaatccccgtggccttccccagcggcgacgccagcagcctgagcaagaacatcatgatgtacgcctgcatcaacgccaccaaggacagccaccacaccctgctgcaccaggagggcatgagcgtgggcagcccccacggcagccagccccacagcagaagccacagcacccacatgaacatcctggcccccaccgtgatgatgatcagcaagcacatcgacggcagcctgaaccagtgggccgtgaccttcgccgacaagagcgccttcaccaccgtgctgaccgtgagccacaagttcagatactgcggccacagattccacctgaacgacctggcctgccacagcgtgctgcccctgctgctgaccagcagccaccacaacgccctgctgacccccgagctggactgccagtgggacagcgacaacaagctgagcagactgatggaccccgtgaagcacatcaagggcagcagcaagcagcccctgagaaacgccgccaccagaaccttccacgaccccaacgccatctacagcgagctgatcctgtggagagtggaccccatcggccccctgagctacaccggcggcgtgagcgagctggccagaatcaacagcctgcacaccagcgccttcagcaacgtggcctggctgcccaccctgatccccagctactgcctgggcacctactgcaacagcgccagcgcctgcttcgtggccagcgacggcaagaacctgagactgtaccaggccgtggtggacgccagaaagctgctggacgagctgagcgaccccgagagcagcaagctgatcggcgaggtgttcaacatcgtgagccagcagagcaccgccagacccggctgcatcatcgagctggacgccatcaccaaccagtgcggcagcaacacccagctgctgcacgtgttccaggaggacttcatcatcggctacaagccccacaaggaggacatggagaagaaggagaccgagatcttcttccagcccagccagggctacagacccccccccttcagcgagaagttcttcctggtggtgatcgagaaggacagcaacaacaacagcatcctgcacatgtggcacctgcacctgaagagcgtgcaggcctgcctgggcagagacaccctggacgagtgcggcctgagatacctgctggccatgagactgcacacctgcctgctgaccagcctgccccccctgtacagagtgcagctgctgcaccagggcgtgagcacctgccacttcgcctgggccttccacagcgaggccgaggaggagctgatcaacatgatccccgccatccagagaggcgacccccagtggagcgagctgagagccatgggcatcggctggtgggtgagaaacatcaacaccctgagaagatgcatcgagaaggtggccaaggccagcttccagagaaacaacgacgccctggacgccgccctgttctacctgagcatgaagaagaaggccgtggtgtggggcctgttcagaagccagcacgacgagaagatgaccaccttcttcagccacaacttcaacgaggacagatggagaaaggccgccctgaagaacgccttcagcctgctgggcaagcagagattcgagcagagcgccgccttcttcctgctggccggcagcctgaaggacgccatcgaggtgtgcctggagaagatggaggacatccagctggccatggtgatcgccagactgtacgagagcgagttcgagaccagcagcacctacatcagcatcctgaaccagaagatcctgggctgccagaaggacggcagcggcttcagctgcaagagactgcaccccgaccccttcctgagaagcctggcctactgggtgatgaaggactacaccagagccctggacaccctgctggagcagacccccaaggaggacgacgagcaccaggtgatcatcaagagctgcaaccccgtggccttcagcttctacaactacctgagaacccaccccctgctgatcagaagaaacctggccagccccgagggcaccctggccaccctgggcctgaagaccgagaagaacttcgtggacaagatcaacctgatcgagagaaagctgttcttcaccaccgccaacgcccacttcaaggtgggctgccccgtgctggccctggaggtgctgagcaagatccccaaggtgaccaagaccagcgccctgagcgccaagaaggaccagcccgacttcatcagccacagaatggacgacgtgcccagccacagcaaggccctgagcgacggcaacggcagcagcggcatcgagtggagcaacgtgaccagcagccagtacgactggagccagcccatcgtgaaggtggacgaggagcccctgaacctggactggggcgaggaccacgacagcgccctggacgaggaggaggacgacgccgtgggcctggtgatgaagagcaccgacgccagagagaaggacaagcagagcgaccagaaggccagcgaccccaacatgctgctgaccccccaggaggaggacgaccccgagggcgacaccgaggtggacgtgatcgccgagcagctgaagttcagagcctgcctgaagatcctgatgaccgagctgagaaccctggccaccggctacgaggtggacggcggcaagctgagattccagctgtacaactggctggagaaggagatcgccgccctgcacgagatctgcaaccacgagagcgtgatcaaggagtacagcagcaagacctacagcaaggtggagagcgacctgctggaccaggaggagatggtggacaagcccgacatcggcagctacgagagacaccagatcgagagaagaagactgcaggccaagagagagcacgccgagagaagaaagagctggctgcagaagaaccaggacctgctgagagtgttcctgagctactgcagcctgcacggcgcccagggcggcggcctggccagcgtgagaatggagctgaagttcctgctgcaggagagccagcaggagaccaccgtgaagcagctgcagagccccctgcccctgcccaccaccctgcccctgctgagcgccagcatcgccagcaccaagaccgtgatcgccaaccccgtgctgtacctgaacaaccacatccacgacatcctgtacaccatcgtgcagatgaagacccccccccaccccagcatcgaggacgtgaaggtgcacaccctgcacagcctggccgccagcctgagcgccagcatctaccaggccctgtgcgacagccacagctacagccagaccgagggcaaccagttcaccggcatggcctaccagggcctgctgctgagcgacagaagaagactgagaaccgagagcatcgaggagcacgccacccccaacagcagccccgcccagtggcccggcgtgagcagcctgatcaacctgctgagcagcgcccaggacgaggaccagcccaagctgaacatcctgctgtgcgaggccgtggtggccgtgtacctgagcctgctgatccacgccctggccaccaacagcagcagcgagctgttcagactggccgcccaccccctgaacaacagaatgtgggccgccgtgttcggcggcggcgtgaagctggtggtgaagcccagaagacagagcgagaacatcagcgccccccccgtgctgagcgaggacatcgacaagcacagaagaagattcaacatgagaatgctggtgcccggcagacccgtgaaggacgccacccccccccccgtgcccgccgagagacccagctacaaggagaagttcatcccccccgagctgagcatgtgggactacttcgtggccaagcccttcctgcccctgagcgacagcggcgtgatctacgacagcgacgagagcatccacagcgacgaggaggacgacgccttcttcagcgacacccagatccaggagcaccaggaccccaacagctacagctgggccctgctgcacctgaccatggtgaagctggccctgcacaacgtgaagaacttcttccccatcgccggcctggagttcagcgagctgcccgtgaccagccccctgggcatcgccgtgatcaagaacctggagaactgggagcagatcctgcaggagaagatggaccagttcgagggccccccccccaactacatcaacacctaccccaccgacctgagcgtgggcgccggccccgccatcctgagaaacaaggccatgctggagcccgagaacacccccttcaagagcagagacagcagcgccttccccgtgaagagactgtggcacttcctggtgaagcaggaggtgctgcaggagaccttcatcagatacatcttcaccaagaagagaaagcagagcgaggtggaggccgacctgggctaccccggcggcaaggccaaggtgatccacaaggagagcgacatgatcatggccttcagcgtgaacaaggccaactgcaacgagatcgtgctggccagcacccacgacgtgcaggagctggacgtgaccagcctgctggcctgccagagctacatctggatcggcgaggagtacgacagagagagcaagagcagcgacgacgtggactacagaggcagcaccaccaccctgtaccagcccagcgccaccagctacagcgccagccaggtgcacccccccagcagcctgccctggctgggcaccggccagaccagcaccggcgccagcgtgctgatgaagagaaacctgcacaacgtgaagagaatgaccagccaccccgtgcaccagtactacctgaccggcgcccaggacggcagcgtgagaatgttcgagtggaccagaccccagcagctggtgtgcttcagacaggccggcaacgccagagtgaccagactgtacttcaacagccagggcaacaagtgcggcgtggccgacggcgagggcttcctgagcatctggcaggtgaaccagaccgccagcaaccccaagccctacatgagctggcagtgccacagcaaggccaccagcgacttcgccttcatcaccagcagcagcctggtggccaccagcggccacagcaacgacaacagaaacgtgtgcctgtgggacaccctgatcagccccggcaacagcctgatccacggcttcacctgccacgaccacggcgccaccgtgctgcagtacgcccccaagcagcagctgctgatcagcggcggcagaaagggccacgtgtgcatcttcgacatcagacagagacagctgatccacaccttccaggcccacgacagcgccatcaaggccctggccctggacccctacgaggagtacttcaccaccggcagcgccgagggcaacatcaaggtgtggagactgaccggccacggcctgatccacagcttcaagagcgagcacgccaagcagagcatcttcagaaacatcggcgccggcgtgatgcagatcgacatcatccagggcaacagactgttcagctgcggcgccgacggcaccctgaagaccagagtgctgcccaacgccttcaacatccccaacagaatcctggacatcctgtag

SEQ ID NO: 69343 - DNA, 7465 bp, Artificial Sequence
  derived and/or modified sequence
acagagggaaacggctctcgcagcccgaggagggtcaggcgcggagcttgtcgcacctcccgcgcattctgtccagcccgggctccggagatgcatctgcatcaggtcctcaccggagctgtcaaccctggagacaactgctactccgtgggcagcgtcggggatgtccccttcacggcatatggatcaggctgtgatattgttattttggcaaatgactttgaatgtgtacagatcattcctggtgctaagcatggaaacatccaagtcagctgtgtggagtgttctaaccaacaaggaagaattgcagcttcatatggtaatgctgtttgtatatttgagcccttgggcataaattctcataaaagaaattgtcaactcaagtgccagtggcttaaaactgggcagttttttttgagttctgtgacatacaacttagcatgggatcctcaagataatagattgttgacagcaactgattctattcagttgtgggctcctccaggagatgatattctggaagaggaggaagaaattgataatacagttcctcctgttttaaatgattggaagtgtgtctggcagtgcaaaacctcagtatctgtacatttgatggaatggtctcctgatggtgaatattttgctactgctggaaaggatgattgtcttttgaaagtgtggtatcctatgactggttggaagtcttcaattatacctcaggatcatcatgaagtaaaaaggagacagtcctctactcaattttcttttgtttacttggcacatccccgagctgtgacaggtttttcgtggcgcaaaactagcaagtatatgcccaggggttctgtctgtaatgtgttgttaacttcatgtcatgatggtgtgtgccggctctgggcagaaactttattaccagaagactgtcttttgggtgagcagatttgtgagactaccacttccagcattgccagcagcctttctcatgctggaagacacaaagacagaatacagcatgctcttgagacaatacaccatttgaaaaatttaaggaaaggacagaggaggtcatctgttcttgtaactcatgctgaattaatgcccgaccagacagcaatgcatgaagttcaaagacacatttcccaccatgcaaatgcactctgtcattttcatattgcagcaagcatcaaccctgccacagatattccaaatgtcttggttggcactgcatttaatgttgatgatggaaatgggggctttgtagttcattggttaaacaacaaggaatttcattttacatcatctacagaagtatttatgcatcaattacgaaaactttctgataagcaggtagatcatgaaaatgatgatgcagatagagaagatgaggaacattcacaggaggatagagaacggggtttacatatgaaattagaccatgatttatccctggatagagaatctgaggcaggtacaggatcatcagaacatgaagatggagaaagagaaggaagtcctagaacttactcacgacttagtgtaccaatgccactgcctacggttctgcttgatcggaagattgaaacgctgctaactgaatggaataagaatcctgatatgctttttacaatacaccctgtagatggtacctttctagtgtggcatgtgaagtatttggatgaatataatcctggaatatttagacaagttcaggtttctttttcttctcggattcctgttgcatttccctctggtgatgcaagctctcttagtaaaaatatcatgatgtatgcctgtataaatgcgacaaaagattctcaccacacgctgttacaccaggaggggatgtctgtaggcagtcctcacggatcacagccacactctagatcccacagtacacatatgaacatcttagctcccacagtaatgatgatctctaaacacatagatggttctttaaatcagtgggcagtcacttttgctgataagtctgcctttaccactgttctaactgtatctcacaaatttagatattgcggtcatcgatttcacctcaatgacctggcatgtcattcagttttaccactgttattgacatcctctcatcataatgctctattgactcctgaattagattgtcagtgggactcagacaataaattaagtagattaatggaccctgtaaaacatataaaaggttcctcgaaacaacctcttagaaatgcagcaactcgtacatttcatgacccaaatgcaatctacagtgaacttattctgtggcgtgtagacccaataggacctttgtcatacactggaggagtatcagaattggctcgaattaactctttacatacctcagcgttctctaatgtggcttggcttccaactctcattcccagttactgtctaggcacatactgcaattctgcaagtgcttgctttgttgcttctgatggcaaaaatctgagactctatcaagctgtagtggatgcaaggaaattattagatgaattgtcagacccagaatcttcaaaacttattggagaagtgtttaatattgtgagccaacagtctactgctcgacctggctgcattattgaactcgacgcaataaccaaccaatgtggctcaaatacacagttgcttcatgtgtttcaagaagacttcattataggatataaaccacataaggaagatatggagaaaaaggaaacagaaatattttttcagccatcacaaggataccgcccaccaccattttcagaaaagttctttctagtagtaattgagaaggacagcaataataactctattctgcatatgtggcaccttcatcttaaatctgtacaagcatgtttaggaagagatacattagatgagtgtggtttgagatacttgttagctatgcgcctacacacatgccttttgacatcgctgcctcctttataccgagtgcagctacttcatcaaggtgtctctacatgccattttgcctgggcttttcattctgaggctgaagaagaactgattaatatgattccagcaattcagagaggggacccccagtggtctgaattaagagctatgggcataggatggtgggtgaggaacattaacacgcttcgaagatgcattgaaaaggttgccaaagcttcttttcaaaggaacaatgatgccttagatgctgcactattctacctttcaatgaagaagaaagcagtagtgtggggtctgtttaggtcacagcatgatgaaaaaatgacaacatttttcagccacaactttaatgaagatagatggcgaaaagctgctttgaaaaatgctttttccttacttggaaaacaacgctttgaacaatcggctgcttttttcttgctagctggttcattgaaagatgccatagaggtatgtcttgaaaaaatggaagatattcagctagccatggttattgcccgtttatatgaatctgaatttgagacttcatccacttatatatccatcctaaatcagaagattttgggttgccaaaaggatggctcaggattcagttgcaaaagattacatcctgatcctttcctgcgtagtcttgcctattgggtaatgaaagattacacccgagccttggacacattactggaacaaacaccaaaggaggatgatgaacatcaagttatcatcaagtcttgtaacccggtggcatttagtttttataactaccttcgaactcatcctttgctcattcgaagaaatcttgcctcccctgaaggaactttggcaaccttaggtctcaaaactgagaagaactttgttgataaaattaacctcatagaaagaaaattattctttaccactgcaaatgctcattttaaagttggatgccctgttttagccttggaggtactctccaaaattccaaaagtaaccaaaacatctgccttatctgcaaaaaaagatcagcctgacttcatttctcacaggatggatgatgtaccttcacattcaaaagctctgagtgatggcaatggaagttctggcattgaatggtcaaatgtaacttcatcacagtatgactggagtcagccaatagtaaaagttgatgaggaacctcttaatcttgattggggtgaagatcacgacagtgccttagatgaagaggaagacgatgctgttggtttagtgatgaaaagtacagatgccagggaaaaagataaacaatcagatcagaaggcctcagaccctaacatgttattaacacctcaggaagaggatgatcctgaaggtgatactgaagttgatgtgattgctgaacaactaaaattcagagcttgtttaaagatccttatgactgaattaagaacattggctacaggttatgaagtagatggaggaaaactcagatttcaactctataactggcttgaaaaggaaattgctgccttgcatgagatatgtaatcatgaatcagttattaaagagtattccagtaagacatattccaaagtagagagtgatctgctggatcaggaagaaatggtagacaaaccagatattggttcctatgagcgccatcaaatagaaagaagaagattgcaggccaaacgagagcatgcagaaagacgaaagtcgtggttgcagaaaaaccaagatctcctgagagtatttctcagctactgtagccttcatggggcccaaggtggtggtttggcttcagtaaggatggaactcaaatttttgctacaagaatcacaacaggaaactacagtaaagcagctccagtctccactaccactgcctaccaccctacctctgctttcagcaagtattgcgtcaacaaaaacagtcatagctaatcctgtattgtacttaaataatcacatccatgatatactttatactattgttcagatgaaaacaccacctcatcccagtattgaagatgtgaaggtgcacacacttcattcactagcagcatcactttctgcatcaatttaccaagcattatgtgacagtcatagctacagtcaaacagaaggaaatcagtttacaggaatggcttatcaaggacttcttttaagtgatcgtagaagactaaggacagaaagcattgaagaacacgcaacaccaaattcatctcctgctcaatggcctggtgtgagctcacttattaatcttttgagttcagcccaagatgaagaccagccaaaactgaacattttgctatgtgaagctgttgttgctgtttacttaagtttattgatacatgctcttgccacaaattcctccagtgaattatttcggcttgcagcccacccattaaataatcgaatgtgggctgctgtttttggaggcggtgtaaaacttgttgtgaaacctcgaagacaatcagaaaatatttcagcacctcctgtcctttctgaagacatagataaacaccgtaggagatttaacatgagaatgctcgtccctggaaggcctgtaaaagatgctaccccaccaccggtgcctgcagaaagaccatcttacaaagaaaaatttattcctcccgaacttagtatgtgggattattttgttgcaaagccatttcttcctttgtctgatagtggtgttatatatgattctgatgaaagcattcatagtgatgaagaagatgatgcctttttttcagatacacaaatacaggagcaccaagatccaaattcctatagctgggctcttctacatttgacaatggttaaactagcacttcacaatgtcaagaatttctttcctattgctggactggaattctctgagctgcctgtaacatcaccattaggtattgctgtgattaaaaacttggagaactgggaacagatcttgcaagagaaaatggatcagtttgaaggtccaccccctaactatatcaacacatatccaactgacctttcagtgggagctggaccagctattcttcgaaataaagcaatgctagaacctgaaaataccccattcaagtcccgggattcttctgcatttccagtcaaacgactttggcatttccttgttaaacaagaggtccttcaagagacatttattagatatattttcactaagaaaagaaagcagagtgaggttgaagctgatctgggctatccaggtggaaaggcgaaagtcatccataaggaatctgatatgatcatggcattttctgttaataaggcaaattgtaatgaaattgttttggcttcaacacatgatgttcaagaacttgatgttacttctctactggcctgtcagtcatacatatggatcggagaagaatatgacagagaatccaaaagttcagatgatgttgattatcgtggttccactacaactctttatcaacccagtgcaacatcctattcagcaagtcaggtgcatccaccttcatctctgccatggctgggcactggacagactagcactggagctagtgtgcttatgaaaaggaatctacataatgttaagagaatgacttcacacccagtccatcaatactatcttacaggtgctcaggacggcagtgtacgaatgtttgaatggacgcggcctcagcaacttgtctgctttcgtcaagctggcaatgcaagagttactagattatattttaattcacaaggcaacaagtgtggtgttgcggatggagagggttttctgagtatctggcaagttaaccaaactgcatcaaatcctaaaccttatatgagttggcagtgccacagtaaagccacaagtgactttgcatttattacctcttcaagtctagttgccacatctggacactccaatgacaatagaaatgtttgcctctgggacacattaatatcacccggaaacagcctcattcatggtttcacgtgccacgatcatggtgccacggtactgcagtatgcacccaaacagcaactcctaatctcggggggtaggaaaggacacgtctgcatttttgacatcaggcaaaggcagctcattcacacgttccaggcccatgactcagctattaaggctctggccttggatccctatgaggaatattttaccacaggttcagcagaaggtaacataaaggtttggagattgacaggccatggcctaattcattcatttaaaagtgaacatgctaagcagtccatatttcgaaacattggggctggagtcatgcagattgacatcatccagggcaatcggctcttctcctgtggtgcagatggcacgctgaaaaccagggttttgcccaatgcttttaacatccctaacagaattcttgacattctataaagattggggttttatttttatatacatttcagttaaaaggcacactacagtcatcactaggcaattctgctttctaagcagttgtattgaaaacagagaatctctgtgtagaatttgaatatgacccaagctgagtattatctaaacaggttggtggaatgaatgcgcatgt

SEQ ID NO: 69344 - protein, 165 aa, Artificial Sequence
  derived and/or modified sequence
WRWTSCRRSGWGALATRTRRGRPGTPPPPRPSPPDVFAGFAPHPAALGPPTLLADQMSVIGSRKKSVNMTECVPVPSSEHVAEIVGRQGCKIKALRAKTNTYIKTPVRGEEPVFIVTGRKEDVEMAKREILSAAEHFSIIRATRSKAGGLPGAAQGPPNLPGQTT

SEQ ID NO: 69345 - protein, 666 aa, Artificial Sequence
  derived and/or modified sequence
MPSSLGQPDGGGGGGGGGGGVGAAGEDPGPGPAPPPEGAQEAAPAPRPPPEPDDAAAALRLALDQLSALGLGGAGDTDEEGAAGDGAAAAGGADGGAAPEPVPPDGPEAGAPPTLAPAVAPGSLPLLDPNASPPPPPPPRPSPPDVFAGFAPHPAALGPPTLLADQMSVIGSRKKSVNMTECVPVPSSEHVAEIVGRQGCKIKALRAKTNTYIKTPVRGEEPVFIVTGRKEDVEMAKREILSAAEHFSIIRATRSKAGGLPGAAQGPPNLPGQTTIQVRVPYRVVGLVVGPKGATIKRIQQRTHTYIVTPGRDKEPVFAVTGMPENVDRAREEIEAHITLRTGAFTDAGPDSDFHANGTDVCLDLLGAAASLWAKTPNQGRRPPTATAGLRGDTALGAPSAPEAFYAGSRGGPSVPDPGPASPYSGSGNGGFAFGAEGPGAPVGTAAPDDCDFGFDFDFLALDLTVPAAATIWAPFERAAPLPAFSGCSTVNGAPGPPAAGARRSSGAGTPRHSPTLPEPGGLRLELPLSRRGAPDPVGALSWRPPQGPVSFPGGAAFSTATSLPSSPAAAACAPLDSGASENSRKPPSASSAPALARECVVCAEGEVMAALVPCGHNLFCMDCAVRICGKSEPECPACRTPATQAIRVETETPQPGGASALQRQY

SEQ ID NO: 69346 - DNA, 2001 bp, Artificial Sequence
  derived and/or modified sequence
atgccttcctcactgggccagcccgatggaggtggaggcgggggtggtggtggcggcggcgtcggtgccgccggagaagaccctggtcctgggcccgccccaccccctgagggagctcaggaagccgcacctgcccccagaccaccacccgaacctgacgacgccgctgctgccctgagactggctcttgaccagctatctgctctcggcttaggcggtgcaggagacaccgacgaggagggcgctgccggcgatggagcggccgctgccggaggcgctgatggcggcgccgcccccgagcccgttccacccgacggtccagaagcgggtgccccccctactctggcgcctgcagtggcgccggggtctttaccactcctagaccctaatgcatccccccctccacccccccccccccggccatcacctccagatgtgttcgcagggtttgcaccccatcccgctgctttgggaccaccgacgttactggccgatcagatgtcggtcatcggaagtcgtaagaagtccgtcaatatgactgagtgtgtacccgtgccttcttccgagcacgttgcagaaattgtgggtaggcagggctgtaaaattaaggcacttagggccaaaacaaatacctacatcaagaccccggtccgcggtgaggaaccagtctttatcgtgaccgggcgcaaggaggatgtggagatggctaagcgggagattctgtcagcagccgaacatttctctatcatccgcgccacacgcagtaaggccgggggcctgcccggggccgcccagggtccacctaatttacctggtcaaacaactatacaggtccgcgtgccttaccgcgtggtgggattggttgtgggacctaaaggcgccactattaagcgtatccagcagagaacccacacatacattgtgacccctggccgggacaaggaacccgtgttcgccgttacaggaatgcctgagaacgtggaccgcgccagggaggaaatcgaagcccacataacactgagaacaggcgcatttaccgacgctggcccagattcagactttcacgccaacggcacagatgtgtgcctggaccttctgggtgccgccgccagcctttgggctaaaacacccaatcagggaagacgcccccccacggcaacagccgggttgagaggggacacagcactgggagcgccatccgctcccgaggcattttacgctgggagccgaggcggcccttcggtgcctgaccccgggcccgccagcccctattccggctcaggaaacgggggcttcgcctttggggcagaaggtccaggggcccccgtgggaacagctgcccccgatgattgtgatttcgggttcgattttgatttcttagctcttgatcttacagtgcccgccgccgccaccatctgggcccctttcgagcgagctgccccactgcctgccttctcaggatgcagtaccgtgaatggcgctcctggtcccccggccgccggcgcccggcgatcaagcggagccggcacaccacgccattcacctaccctgccagagcccggagggcttcgtctagagttaccactgagccgccggggcgctcccgaccccgtgggcgcactgagctggcgacctccacagggacccgtctctttccccggcggtgcagccttcagcactgccacgtcactgccgagcagtccagcggccgcggcgtgcgccccactggatagtggcgcctcagagaactcgcgcaaacctccttctgcatccagtgcgcctgccctagcccgtgagtgtgtggtgtgtgccgagggcgaagtgatggctgccctggtaccctgcggccataatttgttttgcatggattgtgccgtgcggatctgtggcaagagtgaaccggaatgcccggcttgcaggacccctgcaacacaggcaatccgtgtcgaaacggaaacaccgcagcctggaggtgcctccgcattgcaaagacagtattag

SEQ ID NO: 69347 - DNA, 2001 bp, Artificial Sequence
  derived and/or modified sequence
atgcccagcagcctgggccagccagatggcggcggcggcggcggcggcggcggcggcggcgtgggcgccgccggggaggaccccggccctggccctgcccctcctcctgagggcgcccaggaggccgccccagccccccggcccccacctgagccagatgatgctgctgctgccctgcggctggccctggaccagctgagcgccctgggcctgggcggggccggggacacagatgaggagggcgctgctggagatggagctgctgctgctgggggcgcagatggaggagctgcccctgagcctgtgcccccagatggccctgaggccggggccccacccaccctggccccagctgtggcccctggcagcctgcccctgctggaccccaatgccagccccccacctcctcctccaccccggcccagccccccagatgtgtttgctggctttgccccccaccctgctgccctgggcccccccaccctgctggccgaccagatgtctgtcatcggcagcaggaagaagtctgtgaacatgacagaatgtgtgcctgtgcccagcagcgagcacgtggccgagatcgtgggccggcagggctgcaagatcaaggccctgcgggccaagaccaacacctacatcaagacccctgtgcggggggaggagcccgtcttcatcgtgactggaagaaaagaagatgtggagatggccaagcgggagatcctgtctgctgctgagcacttcagcatcatccgggccaccaggagcaaggccggcggcctgcctggagctgcccagggcccccccaacctgcccggccagaccaccatccaggtgcgggtgccctacagagtggtgggcctggtggtgggccccaagggggccaccatcaagaggatccagcagaggacccacacctacatcgtgaccccaggccgggacaaggagcctgtgtttgctgtgacaggcatgccagaaaatgtggaccgggcccgggaggagattgaggcccacatcaccctgaggactggagccttcacagatgctggccctgacagcgacttccacgccaatggaacagatgtgtgcctggacctgctgggcgctgctgccagcctgtgggccaagacccccaaccagggcagaagaccacccacagccacagctggcctgcggggggacacagccctgggcgcccccagcgcccctgaggccttctacgccggcagcagaggaggccccagcgtgcctgaccccggccctgccagcccctacagcggcagcggaaatggaggctttgccttcggggctgagggccctggggcccctgtgggcacagctgccccagatgactgtgactttggatttgattttgacttcctggccctggacctgactgtgcctgctgctgccaccatctgggccccctttgaaagagctgcccccctgcctgccttcagcggctgcagcacagtgaatggagcccctggccccccagctgctggggcccggcgcagcagcggggccggcacccccaggcacagccccaccctgcctgagcccggcggcctgcggctggagctgcccctgagcagaagaggagccccagaccctgtgggcgccctgtcctggaggcctccccagggccctgtgtccttccctggaggagctgccttcagcacagccaccagcctgcccagcagccctgctgctgctgcctgtgcccccctggacagcggggccagcgagaacagcaggaagcccccatctgccagcagcgccccagccctggccagagaatgtgtggtgtgtgccgagggggaggtgatggccgccctggtgccctgtggccacaacctcttctgcatggactgtgctgtgcgcatctgtgggaagtctgagccagaatgtcctgcctgcaggaccccagccacccaggccatccgggtggagacagagaccccccagcccggcggggccagcgccctgcagaggcagtactag

SEQ ID NO: 69348 - DNA, 2332 bp, Artificial Sequence
  derived and/or modified sequence
tggcgctggaccagctgtcggcgctcgggctggggggcgctggcgacacggacgaggagggggcggccggggacgccgccgccgccccggccgtcgccccccgacgtgttcgcgggcttcgcgccccaccccgcggccctggggcccccgacgctgctggccgaccagatgagcgtgatcggcagccgcaagaaaagcgtcaacatgaccgagtgcgtcccggtgcccagctccgagcacgtcgccgagatcgtgggtcgccagggctgcaagatcaaggccctgcgggccaagacaaacacctacatcaagaccccagtgcggggcgaggagccggtcttcatcgtgaccggccggaaggaggacgtggagatggccaagcgtgagatcctgtcggcggccgaacacttctccatcatccgcgccacgcgcagcaaggccgggggtctgcccggcgccgcccagggcccgcccaaccttcccggacagaccaccatccaggtgcgcgtgccctaccgggtggtggggctggtggtggggcccaagggcgccaccatcaagcgcatccagcagcggacgcacacctacatcgtgacgcccgggcgcgacaaggagccggtgttcgcggtcactgggatgcccgagaacgtggaccgcgcgcgcgaggagatcgaggcgcacatcacgctgcgcactggcgccttcaccgacgcgggccccgacagcgacttccacgccaacggcaccgacgtctgcctggacctgctcggggcggccgccagcctctgggccaagacccccaaccagggacgacggccccccacggccacggccggcctccgcggggacacggccctgggcgcccccagcgcccccgaggccttctacgcgggcagccgcggcggcccctccgtgccggacccaggccccgccagcccctacagcggctccggcaacgggggcttcgccttcggcgcggagggtcccggtgccccggtggggacggccgcccccgacgactgcgacttcggcttcgacttcgacttcctggcgctggacctgaccgtgcccgccgcggccaccatctgggcgccttttgagcgcgccgcccccttgcccgccttcagcggctgctccacggtcaacggagccccgggacctcccgccgccggcgcccggcgcagcagtggggccgggaccccccgccactcgcccacgctgcccgagcccggcggcctccgcctggagctcccgctgtctcgccgtggcgccccggacccggtgggcgcgctgtcctggcgacccccgcagggccccgtatccttcccaggcggcgccgccttctccacggccacctcgctgcccagcagccccgcggccgccgcctgcgcccccctggactccggcgcctccgagaacagccgcaagcccccttcggcgtcctcggccccggccctggcgcgagagtgcgtggtgtgcgccgagggcgaggtgatggctgcgctggtcccctgcggccacaacctcttctgcatggactgcgccgtccgcatctgcggcaagagcgagcccgagtgtcccgcctgccgcacgccggccacccaggccattcgcgtggagacggagaccccgcagcccggcggcgcctcagcccttcaacgacagtattgagtggtcaggttacaataaaccggagagaaaaggtccgcttgcactttttttagttttcttatttttagacacccctcccctccagggtgatctttaaaaaagcaaaacaaaaaacacgacttttccagcgctcagcgttttttcctttcgtccgaagccgttttctgatttgacttttctcgccggccggtctcaggccgcacagacgttccagaggaggagggtgacatttttactccctttttggggctaaccatttatgcttttgtacatcaaccgtgcgcggccggagggggcaggggggcgggggcgaggggcgttccaatcaaatttctaactttctgttaattattaatcccctttttactgcggtttctgttgtcatttttaaaatttttttaatttttttttttttttacttttactttttacctcttgtgtatatgtagggaatttatagggaaatatgtactttatggaataaattttaagaactaaaatatattttattttaaataaagtaatggacctttaatcttacacagctaaattactgattatatatttgctgagctgatttaagggttaaaaaaattgtatcaagagttttattttttgacttcaaagccttcttaataaagcctcttttctacatgtgagc

SEQ ID NO: 69349 - DNA, 2660 bp, Artificial Sequence
  derived and/or modified sequence
atgcccagctcgctcggccagcccgacggcggcgggggcgggggcggcggcggcggcggcgtgggggcggcgggggaggaccccggacccggacctgcgcccccgcccgagggcgcccaggaggccgcgcccgcgccccggccgccgcccgaacccgacgacgcggccgccgcgctccgcctggcgctggaccagctgtcggcgctcgggctggggggcgctggcgacacggacgaggagggggcggccggggacggcgcagcggcggcggggggcgcggacggcggggcggctccggagcctgtgccccccgacggacctgaggccggcgcgcccccgaccctggcccccgccgtggcccccgggtcgctgccgctgctggaccccaacgcgagtcccccgccgccgccgccgccccggccgtcgccccccgacgtgttcgcgggcttcgcgccccaccccgcggccctggggcccccgacgctgctggccgaccagatgagcgtgatcggcagccgcaagaaaagcgtcaacatgaccgagtgcgtcccggtgcccagctccgagcacgtcgccgagatcgtgggtcgccagggctgcaagatcaaggccctgcgggccaagacaaacacctacatcaagaccccagtgcggggcgaggagccggtcttcatcgtgaccggccggaaggaggacgtggagatggccaagcgtgagatcctgtcggcggccgaacacttctccatcatccgcgccacgcgcagcaaggccgggggtctgcccggcgccgcccagggcccgcccaaccttcccggacagaccaccatccaggtgcgcgtgccctaccgggtggtggggctggtggtggggcccaagggcgccaccatcaagcgcatccagcagcggacgcacacctacatcgtgacgcccgggcgcgacaaggagccggtgttcgcggtcactgggatgcccgagaacgtggaccgcgcgcgcgaggagatcgaggcgcacatcacgctgcgcactggcgccttcaccgacgcgggccccgacagcgacttccacgccaacggcaccgacgtctgcctggacctgctcggggcggccgccagcctctgggccaagacccccaaccagggacgacggccccccacggccacggccggcctccgcggggacacggccctgggcgcccccagcgcccccgaggccttctacgcgggcagccgcggcggcccctccgtgccggacccaggccccgccagcccctacagcggctccggcaacgggggcttcgccttcggcgcggagggtcccggtgccccggtggggacggccgcccccgacgactgcgacttcggcttcgacttcgacttcctggcgctggacctgaccgtgcccgccgcggccaccatctgggcgccttttgagcgcgccgcccccttgcccgccttcagcggctgctccacggtcaacggagccccgggacctcccgccgccggcgcccggcgcagcagtggggccgggaccccccgccactcgcccacgctgcccgagcccggcggcctccgcctggagctcccgctgtctcgccgtggcgccccggacccggtgggcgcgctgtcctggcgacccccgcagggccccgtatccttcccaggcggcgccgccttctccacggccacctcgctgcccagcagccccgcggccgccgcctgcgcccccctggactccggcgcctccgagaacagccgcaagcccccttcggcgtcctcggccccggccctggcgcgagagtgcgtggtgtgcgccgagggcgaggtgatggctgcgctggtcccctgcggccacaacctcttctgcatggactgcgccgtccgcatctgcggcaagagcgagcccgagtgtcccgcctgccgcacgccggccacccaggccattcgcgtggagacggagaccccgcagcccggcggcgcctcagcccttcaacgacagtattgagtggtcaggttacaataaaccggagagaaaaggtccgcttgcactttttttagttttcttatttttagacacccctcccctccagggtgatctttaaaaaagcaaaacaaaaaacacgacttttccagcgctcagcgttttttcctttcgtccgaagccgttttctgatttgacttttctcgccggccggtctcaggccgcacagacgttccagaggaggagggtgacatttttactccctttttggggctaaccatttatgcttttgtacatcaaccgtgcgcggccggagggggcaggggggcgggggcgaggggcgttccaatcaaatttctaactttctgttaattattaatcccctttttactgcggtttctgttgtcatttttaaaatttttttaatttttttttttttttacttttactttttacctcttgtgtatatgtagggaatttatagggaaatatgtactttatggaataaattttaagaactaaaatatattttattttaaataaagtaatggacctttaatcttacacagctaaattactgattatatatttgctgagctgatttaagggttaaaaaaattgtatcaagagttttattttttgacttcaaagccttcttaataaagcctcttttctacatgtga

SEQ ID NO: 69350 - DNA, 2001 bp, Artificial Sequence
  derived and/or modified sequence
atgcccagcagcctgggccagcccgacggcggcggcggcggcggcggcgggggtggaggagtaggggccgctggggaagatccagggcctggccccgctcccccgcctgagggcgcccaagaagctgctccagcgcctcgccccccacctgaacccgacgacgccgctgctgcactgagattagctctagaccagttgtccgctctgggcctgggcggagcaggggacacagacgaggaaggtgccgccggggatggcgccgcagcagctggcggcgcagatggcggagctgcccccgaaccagttccccccgatgggcctgaagcgggtgcccctcctactctggcccccgctgttgccccagggtctctgcccctgctggacccaaatgcgagtcctccccctcccccccctcccagaccctctcctccagatgtgtttgccggattcgccccccaccctgcggccctgggacccccaactctactggccgaccaaatgagcgtaattggctcacgaaaaaagtccgtgaacatgaccgaatgcgtgccggttccctcatcagagcatgttgccgagatcgtaggacggcagggctgtaaaattaaagccctgagggcaaaaacgaacacctatatcaaaacaccggtcagaggtgaagagcctgtcttcatcgtgaccggtcggaaagaagacgtggaaatggctaagagggaaatcctgagtgccgcggagcatttcagcattattagggctacccggtcaaaggcaggtgggttaccaggagcagcccaggggcccccaaatttgccaggccagacaaccatccaggtgcgggttccatatcgggtagtgggtctagtggtggggcctaaaggggctacaataaaacgtattcagcaacgtacccacacatacatcgtaacacctggcagagacaaagagccggtgtttgctgttacaggcatgccggagaatgttgacagggctagggaagagattgaggcccacataactctacggacaggcgccttcacagatgccgggcctgatagcgacttccatgctaacggaactgacgtgtgccttgatctgttaggtgcagccgcatccctctgggcaaagacaccgaaccagggccgccgaccgcccacggcaacagcaggactgagaggcgacactgccctgggtgccccttccgcccccgaagcgttctatgcaggtagccggggcggccccagcgtgcccgatcccgggcccgcatctccctacagtggatctgggaatggcggattcgcttttggcgctgaaggtcccggggcacccgtaggaacagctgccccagatgattgcgattttggattcgactttgacttcttagccctggatctcactgtgcctgctgctgctacaatttgggcacctttcgaaagggcagcacccctgccagccttttccgggtgctcgaccgtgaatggagcaccaggtcccccggctgctggagcccggagaagcagcggcgcaggtactcctcgccattcaccgacactgcctgagcctgggggactgcgccttgagctcccactttcaaggcgcggagccccagaccccgtgggagccctctcatggcggcccccgcagggtccagtgtccttccctggcggagccgccttttcaaccgctacgagcctgccatcatccccagccgccgcagcttgcgctccgctggattccggggcttcagaaaactctcgaaagcctcccagcgccagtagtgcccccgccctcgccagagagtgtgtggtctgcgccgagggtgaagttatggccgcactggtcccttgtggtcacaatctgttttgtatggattgtgccgtgcgaatttgcggaaaaagcgaacctgagtgcccagcatgccggaccccagctacccaagcgatccgtgtcgagacagagaccccccagcctggaggcgccagtgcattgcaacgccagtactag

SEQ ID NO: 69351 - DNA, 2001 bp, Artificial Sequence
  derived and/or modified sequence
atgccatcatctttagggcaaccagatggtgggggaggaggaggcggaggcggaggcggtgtgggtgccgcaggcgaggatccaggaccagggccagcccctccacccgagggagctcaggaggctgcaccagcacctcggccacctcctgagccagacgacgcggcagctgccctccgcctggccctggaccagctaagtgcgttagggttagggggagccggtgataccgatgaggagggtgccgcaggagacggtgccgctgctgctgggggagccgatggaggtgccgcacccgaacctgttccacccgatggaccagaagcaggcgcaccacccacattggcccctgcggtcgccccagggtcgctaccgctgctggatcccaacgctagtcccccaccgccaccaccaccaaggccaagtcccccagatgttttcgcaggtttcgcacctcaccccgctgccttgggccctcccacgctcctagccgatcagatgtctgtgatcggctccaggaagaagtctgtgaacatgaccgagtgtgtgccagtgccctcaagcgagcatgttgcagaaattgtaggcagacagggttgtaaaatcaaggccttgcgagccaagacgaacacatatattaagacaccagtgcgcggtgaagagcctgtgtttatcgtgaccggcagaaaagaggacgtggagatggctaaacgggaaatcctctccgccgcagagcatttcagcattatcagggcaactcgctcgaaagcgggtggcctgcccggtgccgctcagggacctcccaacctgccaggacagaccacaattcaggtccgagttccataccgagtcgtaggcctcgtcgtgggccctaagggggctactatcaaacgcatacagcagcgcacccatacgtacatagtgacccccggaagagataaggagcctgtgtttgctgtgaccggaatgccagagaatgtggaccgtgcgcgagaagagatagaggcccatattactttaaggactggtgcttttacagacgccggaccagactctgacttccatgcaaatggcactgatgtttgtctagatttgctgggtgcagctgcatctctctgggctaaaacaccgaatcagggaaggcgcccacctaccgctacagccggactgaggggagatacggccctgggagccccttctgctccagaggccttttacgcaggcagcagaggaggccctagcgttcccgatcctggccctgcgagcccttactctgggtccgggaatggtgggtttgcatttggtgccgaaggtccaggcgctcctgtggggaccgccgctccagatgattgcgattttggcttcgatttcgatttcctcgccctggacttgacggtgccagccgcagctacaatatgggcaccgttcgagcgcgctgctccgcttcctgccttctccggatgcagtaccgtcaatggagcccctggcccaccggcagcaggcgcaagacgtagcagtggcgctggcacccctaggcattccccgacactccctgagcctggcggactgaggctggagcttcccctgagtcgccgtggtgcccctgatcccgtgggtgctctgtcttggagaccccctcaaggccctgtgagttttcccggaggtgccgctttttcaacagctacatccttaccgagttcgcccgctgccgcagcgtgcgcaccactggattctggtgcttccgagaattccaggaagccaccgagcgccagttccgcccctgccttggcacgcgagtgtgttgtttgcgccgaaggcgaagtgatggcagccttggtgccttgcggccataacctattttgtatggattgcgccgtccggatttgcggaaaatcagagcccgagtgccccgcttgtcggacgccagccacacaggccatcagggtcgagacagaaaccccgcagcctggaggagcatctgctttgcagcgccagtattag

SEQ ID NO: 69352 - DNA, 2001 bp, Artificial Sequence
  derived and/or modified sequence
atgcccagcagcctgggccagcccgacggcggcggcggcggcggcggcggcggcggcggcgtgggcgccgccggcgaggaccccggccccggccccgcccccccccccgagggcgcccaggaggccgcccccgcccccagacccccccccgagcccgacgacgccgccgccgccctgagactggccctggaccagctgagcgccctgggcctgggcggcgccggcgacaccgacgaggagggcgccgccggcgacggcgccgccgccgccggcggcgccgacggcggcgccgcccccgagcccgtgccccccgacggccccgaggccggcgccccccccaccctggcccccgccgtggcccccggcagcctgcccctgctggaccccaacgccagccccccccccccccccccccccagacccagcccccccgacgtgttcgccggcttcgccccccaccccgccgccctgggcccccccaccctgctggccgaccagatgagcgtgatcggcagcagaaagaagagcgtgaacatgaccgagtgcgtgcccgtgcccagcagcgagcacgtggccgagatcgtgggcagacagggctgcaagatcaaggccctgagagccaagaccaacacctacatcaagacccccgtgagaggcgaggagcccgtgttcatcgtgaccggcagaaaggaggacgtggagatggccaagagagagatcctgagcgccgccgagcacttcagcatcatcagagccaccagaagcaaggccggcggcctgcccggcgccgcccagggcccccccaacctgcccggccagaccaccatccaggtgagagtgccctacagagtggtgggcctggtggtgggccccaagggcgccaccatcaagagaatccagcagagaacccacacctacatcgtgacccccggcagagacaaggagcccgtgttcgccgtgaccggcatgcccgagaacgtggacagagccagagaggagatcgaggcccacatcaccctgagaaccggcgccttcaccgacgccggccccgacagcgacttccacgccaacggcaccgacgtgtgcctggacctgctgggcgccgccgccagcctgtgggccaagacccccaaccagggcagaagaccccccaccgccaccgccggcctgagaggcgacaccgccctgggcgcccccagcgcccccgaggccttctacgccggcagcagaggcggccccagcgtgcccgaccccggccccgccagcccctacagcggcagcggcaacggcggcttcgccttcggcgccgagggccccggcgcccccgtgggcaccgccgcccccgacgactgcgacttcggcttcgacttcgacttcctggccctggacctgaccgtgcccgccgccgccaccatctgggcccccttcgagagagccgcccccctgcccgccttcagcggctgcagcaccgtgaacggcgcccccggcccccccgccgccggcgccagaagaagcagcggcgccggcacccccagacacagccccaccctgcccgagcccggcggcctgagactggagctgcccctgagcagaagaggcgcccccgaccccgtgggcgccctgagctggagacccccccagggccccgtgagcttccccggcggcgccgccttcagcaccgccaccagcctgcccagcagccccgccgccgccgcctgcgcccccctggacagcggcgccagcgagaacagcagaaagccccccagcgccagcagcgcccccgccctggccagagagtgcgtggtgtgcgccgagggcgaggtgatggccgccctggtgccctgcggccacaacctgttctgcatggactgcgccgtgagaatctgcggcaagagcgagcccgagtgccccgcctgcagaacccccgccacccaggccatcagagtggagaccgagaccccccagcccggcggcgccagcgccctgcagagacagtactag

SEQ ID NO: 69353 - protein, 372 aa, Artificial Sequence
  derived and/or modified sequence
MQTSEREGSGPELSPSVMPEAPLESPPFPTKSPAFDLFNLVLSYKRLEIYLEPLKDAGAWYSVGALMISVPALLGYLQEVCRARLPDSELMRRKYHSVRQEDLQRGRLSRPEAVAEVKSFLIQLEAFLSRLCCTCEAAYRVLHWENPVVSSQFYGALLGTVCMLYLLPLCWVLTLLNSTLFLGNVEFFRVVSEYRASLQQRMNPKQEEHAFESPPPPDVGGKDGLMDSTPALTPTEDLTPGSVEEAEEAEPDEEFKDAIEEDDEGAPCPAEDELALQDNGFLSKNEVLRSKVSRLTERLRKRYPTNNFGNCTGCSATFSVLKKRRSCSNCGNSFCSRCCSFKVPKSSMGATAPEAQRETVFVCASCNQTLSK

SEQ ID NO: 69354 - DNA, 1119 bp, Artificial Sequence
  derived and/or modified sequence
atgcagaccagcgagagagagggcagcggccccgagctgagccccagcgtgatgcccgaggcccccctggagagcccccccttccccaccaagagccccgccttcgacctgttcaacctggtgctgagctacaagagactggagatctacctggagcccctgaaggacgccggcgcctggtacagcgtgggcgccctgatgatcagcgtgcccgccctgctgggctacctgcaggaggtgtgcagagccagactgcccgacagcgagctgatgagaagaaagtaccacagcgtgagacaggaggacctgcagagaggcagactgagcagacccgaggccgtggccgaggtgaagagcttcctgatccagctggaggccttcctgagcagactgtgctgcacctgcgaggccgcctacagagtgctgcactgggagaaccccgtggtgagcagccagttctacggcgccctgctgggcaccgtgtgcatgctgtacctgctgcccctgtgctgggtgctgaccctgctgaacagcaccctgttcctgggcaacgtggagttcttcagagtggtgagcgagtacagagccagcctgcagcagagaatgaaccccaagcaggaggagcacgccttcgagagcccccccccccccgacgtgggcggcaaggacggcctgatggacagcacccccgccctgacccccaccgaggacctgacccccggcagcgtggaggaggccgaggaggccgagcccgacgaggagttcaaggacgccatcgaggaggacgacgagggcgccccctgccccgccgaggacgagctggccctgcaggacaacggcttcctgagcaagaacgaggtgctgagaagcaaggtgagcagactgaccgagagactgagaaagagataccccaccaacaacttcggcaactgcaccggctgcagcgccaccttcagcgtgctgaagaagagaagaagctgcagcaactgcggcaacagcttctgcagcagatgctgcagcttcaaggtgcccaagagcagcatgggcgccaccgcccccgaggcccagagagagaccgtgttcgtgtgcgccagctgcaaccagaccctgagcaagtag

SEQ ID NO: 69355 - DNA, 1119 bp, Artificial Sequence
  derived and/or modified sequence
atgcagaccagcgagcgtgagggctcaggccctgagctctcgccatctgtgatgcccgaggctcctctagaatctccaccattcccgaccaagtcgcccgctttcgacctattcaacctggtcctatcatataaaagactggaaatttacctggaaccactcaaagatgctggagcctggtactctgtcggcgctctgatgatttcagtcccagctctgctgggatacctacaagaggtctgccgagctaggttgcccgattcggagttgatgcgcagaaagtatcacagtgtgcggcaggaggatctgcagaggggcagactatccaggccagaagctgtggctgaggtgaaaagcttccttatccaactggaggctttcttgtctcggctgtgttgtacatgcgaggctgcctaccgagtcctgcactgggaaaatcctgttgttagcagtcagttttatggcgcattgctcggcacggtgtgcatgctctacctgcttccgctttgctgggtgttaacactcctcaacagtactctttttctgggaaatgtcgaattctttcgggtagtttccgagtatcgcgcctctctgcagcaaaggatgaatccaaagcaggaggaacatgctttcgagtcacctcctcctccagatgttgggggcaaggacggattaatggatagtacccccgctctgactccaacagaagatttaactcccggctccgtcgaagaggccgaggaggcggagcccgacgaagaattcaaggacgccatagaagaggatgacgaaggcgcgccctgccccgccgaggacgagctggccctgcaggacaacggttttctgtctaagaacgaagtgctccgatctaaagtttctagattgacagaacggttgcggaagaggtaccccacgaacaacttcggcaattgtaccggctgttcagctactttctcagtgctgaagaagaggagatcctgctccaattgtggcaattccttctgtagccggtgctgcagcttcaaggttccaaaatccagcatgggtgcaactgcgcctgaggcccagcgggaaacagtgtttgtgtgcgcgtcgtgcaaccagaccctgagcaaatag

SEQ ID NO: 69356 - DNA, 1119 bp, Artificial Sequence
  derived and/or modified sequence
atgcagaccagcgagcgggagggcagcggccctgagctgagccccagcgtgatgcctgaggcccccctggagagcccccccttccccaccaagagccctgcctttgacctcttcaacctggtgctgagctacaagaggctggagatctacctggagcccctgaaggatgctggggcctggtacagcgtgggcgccctgatgatctctgtgcctgccctgctgggctacctgcaggaggtgtgccgggcccggctgcctgacagcgagctgatgaggaggaagtaccacagcgtgcggcaggaggacctgcagaggggccgcctgagcaggcctgaggccgtggccgaggtgaagagcttcctgatccagctggaggccttcctgagccggctgtgctgcacctgtgaggccgcctacagagtgctgcactgggagaaccctgtggtgagcagccagttctacggggccctgctgggcaccgtgtgcatgctgtacctgctgcccctgtgctgggtgctgaccctgctgaacagcaccctcttcctgggcaatgtggagttcttccgggtggtgtctgagtaccgggccagcctgcagcagaggatgaaccccaagcaggaggagcacgcctttgagagccccccacctccagatgtgggcggcaaggatggcctgatggacagcaccccagccctgacccccacagaggacctgaccccaggctctgtggaggaggccgaggaggccgagccagatgaggagttcaaggatgccattgaagaagatgatgaaggagccccctgcccagcagaagatgagctggccctgcaggacaatggcttcctgagcaagaatgaggtgctgcggagcaaggtgtcccggctgacagagcggctgaggaagcgctaccccaccaacaactttggaaactgcaccggctgcagcgccaccttctctgtgctgaagaagaggaggagctgcagcaactgtggcaacagcttctgcagccgctgctgcagcttcaaggtgcccaagagctccatgggcgccacagcccctgaggcccagcgggagaccgtgtttgtgtgtgccagctgcaaccagaccctgagcaagtag

SEQ ID NO: 69357 - DNA, 1119 bp, Artificial Sequence
  derived and/or modified sequence
atgcagaccagcgagcgggagggcagcggccccgagctgagcccctcagtgatgccagaagccccactggagagtcccccattccctaccaagtctcctgcctttgatctcttcaatctggttctgagctacaagcgcttagagatatatctggagcctctgaaagacgccggtgcctggtatagcgtaggcgcactgatgatcagcgtccccgccctgttaggctaccttcaggaagtatgcagagctaggctgccagattccgagcttatgcggaggaaatatcattctgtgaggcaggaagacctccaacgagggagactatctcgcccagaggctgtggcggaagtcaaaagctttctcattcagctggaggcttttttgtctcggctgtgttgtacgtgtgaggcggcctaccgtgtcttgcactgggaaaatccagtggtgtcgtcacagttctacggagccttactgggaacagtatgcatgctttacttactgccactgtgttgggtgctgacactgttgaacagcacactcttcctcggcaacgtggagtttttcagagtggtgtcggagtacagggcctcattgcaacagcgcatgaaccctaagcaggaagagcacgccttcgagagtccgccacccccagacgtgggcgggaaggatggcctgatggactctaccccagctcttaccccaacagaggacctgactccgggtagtgtggaggaagctgaagaagccgagccagacgaggagttcaaggatgcgatcgaagaggatgacgaaggtgcgccttgcccagcagaagacgaactggctttacaggacaacggctttctctcaaagaatgaggtcctgcgtagcaaagtcagccggttgacagaacgactcagaaaacggtaccctacaaataactttggtaactgcactgggtgtagcgcgacatttagcgtactgaaaaaaagaagaagctgctctaactgtggaaactctttctgctcacgatgctgttccttcaaagtgccgaagagttcaatgggggcaacagcccccgaggcccagagagagacagttttcgtgtgcgcctcctgcaatcagacattatctaagtag

SEQ ID NO: 69358 - DNA, 1119 bp, Artificial Sequence
  derived and/or modified sequence
atgcagacgtctgaacgcgaagggtcagggccagagctctcccctagtgttatgcctgaggcaccgctggagtctccgccattccccaccaagtcccccgctttcgacctgtttaacttggttttgtcgtataagagactagagatatacctggagccgctgaaagacgccggagcctggtattcagtcggcgcattgatgatctcagtccctgctttgctgggttacttgcaggaagtttgcagagctcggctacctgactctgaactgatgagacggaagtaccattccgtaaggcaagaggatctgcagagagggcgactgtctcggccagaagcagttgccgaagtaaaatcctttctgatccagctggaggctttcctgagcagactgtgctgcacctgtgaagctgcgtatcgggtgctgcactgggaaaaccctgttgtgagttcacagttttatggcgctttgctcggaaccgtgtgcatgctgtatcttctccctctatgttgggtgttaaccctgttaaactcgacgctgtttcttggaaacgttgaatttttcagagtggtgtccgagtaccgagccagtctccagcagcgtatgaatcctaagcaggaggaacacgcatttgagagcccgccacctccggacgtgggaggtaaagacggcctcatggacagcacccccgctttaactcctacagaggacttaacgccgggaagtgtggaagaagcagaagaggccgaacccgacgaagagtttaaagacgctatcgaggaggacgacgagggcgcaccttgcccggctgaagatgaattagccctccaagacaatggttttctctcaaagaatgaggtccttcggtccaaggtctcaaggctgactgagcggcttagaaagaggtaccccacgaataattttgggaattgcactggctgtagcgctacatttagcgtcctcaaaaaacgcagaagctgctccaactgcggcaattccttctgctcccggtgttgttcatttaaggtgccaaaatctagcatgggcgcaacagctccagaagctcagcgcgagactgtgtttgtttgcgcctcctgcaaccaaacgctatccaaatag

SEQ ID NO: 69359 - DNA, 2927 bp, Artificial Sequence
  derived and/or modified sequence
gcagagcgattcgcgtcccggaagcggcggtggcggccgcggcgtaggcggaggagattttcggacctgcgacttccgaacaaccctggcaggaggagcggcgttcagccgggggaggcctgaagaaacgctccggggcccagtggctctacccctgctcctgcccgaccctgccgcctccctcacggagccagcggccgggatgcagacatcagaacgtgaggggagtgggccggagctgagccccagcgtgatgcccgaggctcccctggagtctccaccttttcctaccaagtccccagcgtttgaccttttcaacttggttctctcctacaagaggctggagatctacctggaacccttgaaggatgcaggtgcatggtactcagtaggtgccctgatgatttcagtgcccgccctgctgggctaccttcaggaggtttgccgggcacggctgcctgattccgagctgatgcggaggaagtatcatagcgtgaggcaggaggacctgcagagaggtcgcctgtctcgtcccgaggccgtggctgaggtgaagagcttcttgatccagctggaggccttcctgagccgcctgtgctgcacatgtgaagccgcctaccgcgtgctgcactgggagaaccccgtcgtgtcctcacagttctatggggctcttctgggcacagtctgcatgctgtatttgctgccactctgctgggttctcacccttttaaacagcacgctctttctggggaatgtggagttcttccgagttgtgtctgagtacagggcatctctgcagcagaggatgaacccaaagcaggaagagcatgcctttgagagtcctccaccaccagatgttggggggaaggatggtctgatggacagcacgcctgccctcacacccacggaggacctcacaccgggcagcgtggaggaggctgaggaggctgagccagatgaagagtttaaagatgcgattgaggaggatgatgagggcgccccgtgcccagcagaggatgagctggccctgcaggacaacgggttcctgagcaagaatgaggtgctgcgcagcaaggtgtctcggctcacggagcggctccgcaagcgctaccccaccaacaacttcgggaactgcacgggctgctcggccaccttctcagtgctgaagaagaggcggagctgcagtaattgtggaaacagcttctgctctcgatgctgctccttcaaggtgcccaagtcctccatgggggccacagcccctgaagcccagagggagactgtgtttgtgtgtgcctcgtgtaaccagaccttgagcaagtgagaagagaggccagggtccaaccaggcacccgtccttgggaccagcagtagaccccccactctccccacccctggcccactgtggtgtgtgctgggcaaatgtggcctgaatgctaggtaggcttccccttccttcctcactctctccagctggattctggagctgttctccatccatgagagtggctggcaatggctgctctcaatcccttgagggagaagagcccctggagggcctggcatgtttgtcctgctctgcctgggactgagcgagtggacttagggctgggcaggcagtagccaccagagggcagcagcgaactaggccaggcctgactggggtctgaagatcagggtcagtgtggctgtgcctgggaattccagacctgaggttgggaaaagaggtttttctcctgcagggtactgggccaggccctcagcctcagagagcctgcagaagggcttgggagtgccacaccccatctctgctgattgaatgtccctccaggcaccaggatctcatcatttccccatcagagggtgtggccaggcctaacaagaccatgggtgcttctagaaacagggttgaagttcccagattccctgagaggagaatgtgtataggagggtttggctgagtccttcagcgttaagtggaggaaagcttggggaagccccaatagctggacagacctcggcctcccctcgaagacacctcaattcacagactctcagcccacacaatgccccagtgtccccagctccgctggagcagctgcagggcacttggatcacaacttctgcaccctctgtccagagtctagggcagtcctccactggcccagcactccagtttcctttccctgcctcttgtccaatggagtgggaggccaggtgagtggagcagaggtcctgaagcccttgacccctgggggcctgggtagtgtaggatctcgctgggctgggtcctggattccagggctattccctggaggacagtctcagttatgggataaggccccctgggggtctccatttctttccaacagtttcatgttcactactggactcttacgggctcagtatctctcccttagccatgagctggctcaggcatcccttcccttccctggagctgccctgcctttctcaagtatttatttatttattgcatggttcctgggaacatgtggcacaagtaatgggatgaggaggaattgggggtgggggtcttctacctaggactcttccctggagtcatgggctgcctgggacccaggacccatgagggggctgagaggtttctacactcgaggagcaggggtccagagaggcaggctggggaggcaagggacccatcctaggcccgctttcttgccgagccaagcagcttagctggggctgtgcagccaggggcttacccaggccagtggaggtgccacagccctggggagccagacaggctttggtatcgtatcgcctctgtgtccttttaagagaggagagttcagtaccccgtgctttctttacactggagaggaactaaaaggatctctgtgtctatggagaattgtcaataaaaaggcctcaagcttcttgtttttgtc

SEQ ID NO: 69360 - protein, 318 aa, Artificial Sequence
  derived and/or modified sequence
MQTSEREGSGPELSPSVMPEAPLESPPFPTKSPAFDLFNLVLSYKRLEIYLEPLKDAGDGVRYLLSLIQLEAFLSRLCCTCEAAYRVLHWENPVVSSQFYGALLGTVCMLYLLPLCWVLTLLNSTLFLGNVEFFRVVSEYRASLQQRMNPKQEEHAFESPPPPDVGGKDGLMDSTPALTPTEDLTPGSVEEAEEAEPDEEFKDAIEEDDEGAPCPAEDELALQDNGFLSKNEVLRSKVSRLTERLRKRYPTNNFGNCTGCSATFSVLKKRRSCSNCGNSFCSRCCSFKVPKSSMGATAPEAQRETVFVCASCNQTLSK

SEQ ID NO: 69361 - DNA, 957 bp, Artificial Sequence
  derived and/or modified sequence
atgcagaccagcgagagagagggcagcggccccgagctgagccccagcgtgatgcccgaggcccccctggagagcccccccttccccaccaagagccccgccttcgacctgttcaacctggtgctgagctacaagagactggagatctacctggagcccctgaaggacgccggcgacggcgtgagatacctgctgagcctgatccagctggaggccttcctgagcagactgtgctgcacctgcgaggccgcctacagagtgctgcactgggagaaccccgtggtgagcagccagttctacggcgccctgctgggcaccgtgtgcatgctgtacctgctgcccctgtgctgggtgctgaccctgctgaacagcaccctgttcctgggcaacgtggagttcttcagagtggtgagcgagtacagagccagcctgcagcagagaatgaaccccaagcaggaggagcacgccttcgagagcccccccccccccgacgtgggcggcaaggacggcctgatggacagcacccccgccctgacccccaccgaggacctgacccccggcagcgtggaggaggccgaggaggccgagcccgacgaggagttcaaggacgccatcgaggaggacgacgagggcgccccctgccccgccgaggacgagctggccctgcaggacaacggcttcctgagcaagaacgaggtgctgagaagcaaggtgagcagactgaccgagagactgagaaagagataccccaccaacaacttcggcaactgcaccggctgcagcgccaccttcagcgtgctgaagaagagaagaagctgcagcaactgcggcaacagcttctgcagcagatgctgcagcttcaaggtgcccaagagcagcatgggcgccaccgcccccgaggcccagagagagaccgtgttcgtgtgcgccagctgcaaccagaccctgagcaagtag

SEQ ID NO: 69362 - DNA, 957 bp, Artificial Sequence
  derived and/or modified sequence
atgcagacatccgagcgggagggttcagggcctgaactgagcccttctgtgatgcccgaggcaccgttagagtcaccaccattccctaccaaatcgcctgccttcgatctttttaacctagtgttgagctataaaagacttgagatctacctcgaacccctgaaggacgccggcgatggggtgcgctacctgctgtcacttatccagttggaggcctttctaagcaggctgtgctgcacgtgcgaagcagcgtatagagtactgcactgggagaatcctgttgtgtcgtctcagttttatggggcgttgctgggcaccgtgtgtatgctgtacctactgccactgtgttgggtgcttacgctcctgaacagcacactgttcttggggaacgtggaatttttccgtgtggtgtctgaataccgcgcgtccctgcaacagcgcatgaatcccaagcaagaggagcacgcgtttgaatctccccctccaccggacgtgggcgggaaagacggactaatggactccaccccggctctgacgcctaccgaagatctgactcccggatcagtcgaggaagcggaggaggccgaaccagacgaggagttcaaggatgccatcgaagaggacgacgagggagcaccttgtcccgctgaggatgagctggcgctccaggataatggtttcctgtctaagaacgaggttttaagatctaaagtcagccggttgaccgaacgccttaggaagcgctatcctacgaataatttcggcaattgtacaggctgcagcgccacatttagcgtcctgaaaaagaggagatcttgctccaactgcggcaacagcttctgctcccgctgctgtagcttcaaagtcccgaagagttcaatgggtgcaaccgcccctgaggcacaaagagagacggtcttcgtgtgtgcgtcatgcaaccaaaccttgtccaaatag

SEQ ID NO: 69363 - DNA, 957 bp, Artificial Sequence
  derived and/or modified sequence
atgcagaccagcgagcgggagggcagcggccctgagctgagccccagcgtgatgcctgaggcccccctggagagcccccccttccccaccaagagccctgcctttgacctcttcaacctggtgctgagctacaagaggctggagatctacctggagcccctgaaggatgctggagatggagtgcgctacctgctgagcctcatccagctggaggccttcctgagccggctgtgctgcacctgtgaggccgcctacagagtgctgcactgggagaaccctgtggtgagcagccagttctacggggccctgctgggcaccgtgtgcatgctgtacctgctgcccctgtgctgggtgctgaccctgctgaacagcaccctcttcctgggcaatgtggagttcttccgggtggtgtctgagtaccgggccagcctgcagcagaggatgaaccccaagcaggaggagcacgcctttgagagccccccacctccagatgtgggcggcaaggatggcctgatggacagcaccccagccctgacccccacagaggacctgaccccaggctctgtggaggaggccgaggaggccgagccagatgaggagttcaaggatgccattgaagaagatgatgaaggagccccctgcccagcagaagatgagctggccctgcaggacaatggcttcctgagcaagaatgaggtgctgcggagcaaggtgtcccggctgacagagcggctgaggaagcgctaccccaccaacaactttggaaactgcaccggctgcagcgccaccttctctgtgctgaagaagaggaggagctgcagcaactgtggcaacagcttctgcagccgctgctgcagcttcaaggtgcccaagagctccatgggcgccacagcccctgaggcccagcgggagaccgtgtttgtgtgtgccagctgcaaccagaccctgagcaagtag

SEQ ID NO: 69364 - DNA, 957 bp, Artificial Sequence
  derived and/or modified sequence
atgcagaccagcgagcgggagggcagcggccccgagctgagccccagtgtgatgcctgaggcccccctcgaatcgccaccgtttcccaccaagtctccggccttcgatctgttcaatctagtcctctcatacaagagacttgaaatctatctggagccactcaaagacgccggagacggcgttcgttatctgttgtcgctcatccaactagaagcattcctgagcaggttgtgctgcacttgcgaagccgcttaccgggtgctccactgggaaaatcccgtggtgagttcccagttttacggcgccttgctgggaacagtgtgtatgctgtaccttctccccctgtgctgggtcctgacgcttctgaacagcactctcttcctcggtaatgttgagttctttcgggtggtgtccgagtaccgggcatctttgcagcagagaatgaatcccaagcaagaagagcacgctttcgaaagtccaccacccccggacgtcggcggtaaggatggcctgatggatagcacgccagctctcacacctacagaggacctcactcccggttccgttgaggaggcagaagaagccgagcctgatgaggaattcaaggacgccattgaggaggatgacgagggggcgccctgcccagctgaggacgagttagctctacaagataatggttttctttcgaaaaacgaggtactgcggtctaaagtctcccgtctaaccgagaggctaagaaagagatatccaacaaataacttcggtaactgcacgggctgtagcgcaaccttttctgtgcttaagaagcgcagaagctgcagcaactgcggtaatagcttttgtagcaggtgctgtagcttcaaagtccctaagagttctatgggcgcaacagctcctgaagcccagcgggagactgtcttcgtatgtgcttcttgcaatcagaccctaagcaaatag

SEQ ID NO: 69365 - DNA, 957 bp, Artificial Sequence
  derived and/or modified sequence
atgcagacttccgaaagagagggctccggcccagagttaagcccctctgtaatgcccgaggcccctctggagtcacccccatttccgacgaaaagcccagcatttgatctctttaaccttgtcttgagctacaagcgtctggaaatctatctggagcccctcaaggacgccggagatggggtaaggtatctgctttccttgattcagctggaggctttcttatccagactatgctgtacatgcgaggccgcatacagagtgctacactgggagaacccagtcgtctcctcccagttttacggagctctgctcggaacggtttgcatgctgtacctgctcccactttgttgggtgctgaccctcctgaatagcacgctgttcctgggtaatgtagaattttttcgcgtagtgtcagagtaccgagccagcctgcagcaacgcatgaatcccaagcaagaggagcacgcgttcgagtccccgccacctccggacgttgggggaaaggacggcctgatggactctacccccgctttgaccccaacggaggatcttacccccggaagcgtggaagaagctgaggaggctgagcccgacgaggagtttaaggatgcaattgaagaggatgatgaaggagctccctgcccagctgaggacgaactcgctcttcaggataacggattcctgagcaaaaacgaagtgctcaggtctaaggtaagcaggcttacagagcgtctgagaaagcggtatcccacaaacaacttcggtaactgtaccggctgcagtgccaccttcagtgttctcaagaaaagaaggagttgctctaactgcggcaattccttctgttcaaggtgttgctctttcaaagtgcccaagagtagcatgggcgctactgcccctgaagctcagcgagagacagtgtttgtgtgtgcctcctgcaaccaaacgctatccaaatag

SEQ ID NO: 69366 - DNA, 2765 bp, Artificial Sequence
  derived and/or modified sequence
gcagagcgattcgcgtcccggaagcggcggtggcggccgcggcgtaggcggaggagattttcggacctgcgacttccgaacaaccctggcaggaggagcggcgttcagccgggggaggcctgaagaaacgctccggggcccagtggctctacccctgctcctgcccgaccctgccgcctccctcacggagccagcggccgggatgcagacatcagaacgtgaggggagtgggccggagctgagccccagcgtgatgcccgaggctcccctggagtctccaccttttcctaccaagtccccagcgtttgaccttttcaacttggttctctcctacaagaggctggagatctacctggaacccttgaaggatgcaggtgatggtgttcgatacttgctcagcttgatccagctggaggccttcctgagccgcctgtgctgcacatgtgaagccgcctaccgcgtgctgcactgggagaaccccgtcgtgtcctcacagttctatggggctcttctgggcacagtctgcatgctgtatttgctgccactctgctgggttctcacccttttaaacagcacgctctttctggggaatgtggagttcttccgagttgtgtctgagtacagggcatctctgcagcagaggatgaacccaaagcaggaagagcatgcctttgagagtcctccaccaccagatgttggggggaaggatggtctgatggacagcacgcctgccctcacacccacggaggacctcacaccgggcagcgtggaggaggctgaggaggctgagccagatgaagagtttaaagatgcgattgaggaggatgatgagggcgccccgtgcccagcagaggatgagctggccctgcaggacaacgggttcctgagcaagaatgaggtgctgcgcagcaaggtgtctcggctcacggagcggctccgcaagcgctaccccaccaacaacttcgggaactgcacgggctgctcggccaccttctcagtgctgaagaagaggcggagctgcagtaattgtggaaacagcttctgctctcgatgctgctccttcaaggtgcccaagtcctccatgggggccacagcccctgaagcccagagggagactgtgtttgtgtgtgcctcgtgtaaccagaccttgagcaagtgagaagagaggccagggtccaaccaggcacccgtccttgggaccagcagtagaccccccactctccccacccctggcccactgtggtgtgtgctgggcaaatgtggcctgaatgctaggtaggcttccccttccttcctcactctctccagctggattctggagctgttctccatccatgagagtggctggcaatggctgctctcaatcccttgagggagaagagcccctggagggcctggcatgtttgtcctgctctgcctgggactgagcgagtggacttagggctgggcaggcagtagccaccagagggcagcagcgaactaggccaggcctgactggggtctgaagatcagggtcagtgtggctgtgcctgggaattccagacctgaggttgggaaaagaggtttttctcctgcagggtactgggccaggccctcagcctcagagagcctgcagaagggcttgggagtgccacaccccatctctgctgattgaatgtccctccaggcaccaggatctcatcatttccccatcagagggtgtggccaggcctaacaagaccatgggtgcttctagaaacagggttgaagttcccagattccctgagaggagaatgtgtataggagggtttggctgagtccttcagcgttaagtggaggaaagcttggggaagccccaatagctggacagacctcggcctcccctcgaagacacctcaattcacagactctcagcccacacaatgccccagtgtccccagctccgctggagcagctgcagggcacttggatcacaacttctgcaccctctgtccagagtctagggcagtcctccactggcccagcactccagtttcctttccctgcctcttgtccaatggagtgggaggccaggtgagtggagcagaggtcctgaagcccttgacccctgggggcctgggtagtgtaggatctcgctgggctgggtcctggattccagggctattccctggaggacagtctcagttatgggataaggccccctgggggtctccatttctttccaacagtttcatgttcactactggactcttacgggctcagtatctctcccttagccatgagctggctcaggcatcccttcccttccctggagctgccctgcctttctcaagtatttatttatttattgcatggttcctgggaacatgtggcacaagtaatgggatgaggaggaattgggggtgggggtcttctacctaggactcttccctggagtcatgggctgcctgggacccaggacccatgagggggctgagaggtttctacactcgaggagcaggggtccagagaggcaggctggggaggcaagggacccatcctaggcccgctttcttgccgagccaagcagcttagctggggctgtgcagccaggggcttacccaggccagtggaggtgccacagccctggggagccagacaggctttggtatcgtatcgcctctgtgtccttttaagagaggagagttcagtaccccgtgctttctttacactggagaggaactaaaaggatctctgtgtctatggagaattgtcaataaaaaggcctcaagcttcttgtttttgtc

SEQ ID NO: 69367 - protein, 311 aa, Artificial Sequence
  derived and/or modified sequence
MISVPALLGYLQEVCRARLPDSELMRRKYHSVRQEDLQRGRLSRPEAVAEVKSFLIQLEAFLSRLCCTCEAAYRVLHWENPVVSSQFYGALLGTVCMLYLLPLCWVLTLLNSTLFLGNVEFFRVVSEYRASLQQRMNPKQEEHAFESPPPPDVGGKDGLMDSTPALTPTESLSSQDLTPGSVEEAEEAEPDEEFKDAIEEDDEGAPCPAEDELALQDNGFLSKNEVLRSKVSRLTERLRKRYPTNNFGNCTGCSATFSVLKKRRSCSNCGNSFCSRCCSFKVPKSSMGATAPEAQRETVFVCASCNQTLSK

SEQ ID NO: 69368 - DNA, 936 bp, Artificial Sequence
  derived and/or modified sequence
atgatcagcgtgcccgccctgctgggctacctgcaggaggtgtgcagagccagactgcccgacagcgagctgatgagaagaaagtaccacagcgtgagacaggaggacctgcagagaggcagactgagcagacccgaggccgtggccgaggtgaagagcttcctgatccagctggaggccttcctgagcagactgtgctgcacctgcgaggccgcctacagagtgctgcactgggagaaccccgtggtgagcagccagttctacggcgccctgctgggcaccgtgtgcatgctgtacctgctgcccctgtgctgggtgctgaccctgctgaacagcaccctgttcctgggcaacgtggagttcttcagagtggtgagcgagtacagagccagcctgcagcagagaatgaaccccaagcaggaggagcacgccttcgagagcccccccccccccgacgtgggcggcaaggacggcctgatggacagcacccccgccctgacccccaccgagagcctgagcagccaggacctgacccccggcagcgtggaggaggccgaggaggccgagcccgacgaggagttcaaggacgccatcgaggaggacgacgagggcgccccctgccccgccgaggacgagctggccctgcaggacaacggcttcctgagcaagaacgaggtgctgagaagcaaggtgagcagactgaccgagagactgagaaagagataccccaccaacaacttcggcaactgcaccggctgcagcgccaccttcagcgtgctgaagaagagaagaagctgcagcaactgcggcaacagcttctgcagcagatgctgcagcttcaaggtgcccaagagcagcatgggcgccaccgcccccgaggcccagagagagaccgtgttcgtgtgcgccagctgcaaccagaccctgagcaagtag

SEQ ID NO: 69369 - DNA, 936 bp, Artificial Sequence
  derived and/or modified sequence
atgatatcagtacccgcgttgcttgggtatttgcaggaggtttgtagagctcgcctgcctgactcagaacttatgcgtcgaaaatatcattccgtacggcaagaggatctacagcggggtaggctctctcgacccgaggctgtggctgaggtgaaaagcttcctcattcagctggaggcattcctgagtcgcctctgctgtacctgcgaagccgcttacagggttctccactgggaaaatccagtcgtgagcagtcagttctacggggcattgcttgggacagtgtgtatgttgtacctcctccctctctgttgggtgctaaccctcctgaactccactctcttcttagggaacgtggagttcttcagagtggtgtcagagtaccgcgcaagtctgcagcagcggatgaatcccaagcaagaagaacacgcgtttgagtcgcctccaccccctgacgtgggaggtaaggacggtctcatggattccaccccggccctgactccaacagagagtctgtcaagtcaggacctgactcctggatctgtggaggaagctgaggaggctgaacccgatgaagagttcaaagatgcaattgaagaagacgatgagggcgctccatgtcccgcagaagacgagcttgccctgcaagataacggttttctttccaaaaatgaggtcctgcgttccaaagtgagtagacttaccgagagattgcgtaagagatatccgaccaacaatttcggtaactgcaccggttgttctgcaactttttccgtattgaagaaacgcagatcgtgctctaactgtgggaacagcttttgcagtcggtgctgcagttttaaggtgcccaagtcatctatgggtgctacagctccggaggcacagagagagactgtgttcgtgtgcgcaagttgtaaccagaccctgtccaaatag

SEQ ID NO: 69370 - DNA, 936 bp, Artificial Sequence
  derived and/or modified sequence
atgatctctgtgcctgccctgctgggctacctgcaggaggtgtgccgggcccggctgcctgacagcgagctgatgaggaggaagtaccacagcgtgcggcaggaggacctgcagaggggccgcctgagcaggcctgaggccgtggccgaggtgaagagcttcctgatccagctggaggccttcctgagccggctgtgctgcacctgtgaggccgcctacagagtgctgcactgggagaaccctgtggtgagcagccagttctacggggccctgctgggcaccgtgtgcatgctgtacctgctgcccctgtgctgggtgctgaccctgctgaacagcaccctcttcctgggcaatgtggagttcttccgggtggtgtctgagtaccgggccagcctgcagcagaggatgaaccccaagcaggaggagcacgcctttgagagccccccacctccagatgtgggcggcaaggatggcctgatggacagcaccccagccctgacccccacagagagcctgagcagccaggacctgaccccaggctctgtggaggaggccgaggaggccgagccagatgaggagttcaaggatgccatcgaggaggatgatgagggcgccccctgcccagcagaagatgagctggccctgcaggacaatggcttcctgagcaagaatgaggtgctgcggagcaaggtgtcccggctgacagagcggctgaggaagcgctaccccaccaacaactttggaaactgcaccggctgcagcgccaccttctctgtgctgaagaagagaagaagctgcagcaactgtggcaacagcttctgcagccgctgctgcagcttcaaggtgcccaagagctccatgggcgccacagcccctgaggcccagcgggagaccgtgtttgtgtgtgccagctgcaaccagaccctgagcaagtag

SEQ ID NO: 69371 - DNA, 936 bp, Artificial Sequence
  derived and/or modified sequence
atgatcagcgtgcccgccctgctgggctacctgcaggaggtgtgcagagcacggctccccgactccgaattgatgcgccggaaatatcatagtgtccggcaggaggatctgcagcgtggacgactgagtcgaccggaggcagtagccgaggtgaagagttttctgattcagctcgaggcatttctgtcaagattgtgctgcacctgtgaggccgcatatcgtgttctgcattgggaaaacccggtggtctcttctcaattttacggagccctcctggggaccgtatgcatgctttacttactgcccctctgctgggttctgacactcctgaattctaccttattccttggcaatgtcgaatttttcagggtggtatccgagtatcgggccagccttcaacagagaatgaatcctaagcaggaagaacacgcctttgaatccccgcctccccccgatgtgggagggaaggacggcctgatggattcaactcccgccctcaccccgaccgaatcgctatcctcccaagacctgactcctggatctgtggaggaggccgaagaggcagaacctgacgaagaattcaaggacgccatagaggaggacgatgaaggcgctccctgcccagctgaagatgagctggcacttcaagataacggatttctgtcaaaaaatgaggtgctccgaagtaaggtctcacggttgacggagaggctacgcaaaaggtacccaaccaataattttggtaactgtactggctgcagtgccacatttagtgttctgaagaaacgccggtcatgcagtaattgcggaaattccttctgtagccggtgctgcagtttcaaagtacctaagagtagcatgggcgcaaccgcgccagaagcccagagggagacagtgtttgtgtgcgcaagctgtaatcagacgctgtctaaatag

SEQ ID NO: 69372 - DNA, 936 bp, Artificial Sequence
  derived and/or modified sequence
atgatcagcgttcctgcactgttgggttatctgcaggaggtgtgtagggcaagactccctgatagtgaactcatgaggaggaaataccactcggtgaggcaggaagacctgcagcgcggtcgcctgtcccgcccagaggccgtagcggaggtgaagtcctttttgattcaattggaggcattcctgagccgattatgctgcacctgcgaagcagcgtaccgggtcctccattgggagaaccccgtggtctccagtcagttctatggtgcacttctcggcactgtttgcatgctctatctgttgcctctctgttgggtgctgaccctgctcaactccactttgttcttgggaaatgtcgaattttttcgagtggtctcagagtacagggcctccctgcagcagcggatgaacccgaagcaagaagagcacgccttcgagagtccaccaccacccgatgtgggaggaaaagatggtctgatggactctacaccggctttgacacccacggaatccttgagctcacaagatctgacgccgggatcagtggaggaggcagaagaggctgaaccggacgaggagttcaaggatgcgattgaggaggacgatgagggcgctccgtgtcctgctgaggacgaactggcactgcaagataatggcttcttaagtaagaatgaggtgttgaggtccaaggtaagccgacttactgagagattaaggaagagataccccaccaacaattttggcaattgcacaggatgctccgcaaccttctctgtcctgaagaaaagacggtcttgctcaaactgtggcaattcattctgcagtcggtgttgcagcttcaaagtgcccaaaagttccatgggagcaactgctcccgaggctcaacgggaaactgtgttcgtgtgcgctagttgtaatcagaccctttctaaatag

SEQ ID NO: 69373 - protein, 286 aa, Artificial Sequence
  derived and/or modified sequence
MQTSEREGSGPELSPSVMPEAPLESPPFPTKSPAFDLFNLVLSYKRLEIYLEPLKDAGDGVRYLLRFYGALLGTVCMLYLLPLCWVLTLLNSTLFLGNVEFFRVVSEYRASLQQRMNPKQEEHAFESPPPPDVGGKDGLMDSTPALTPTEDLTPGSVEEAEEAEPDEEFKDAIEEDDEGAPCPAEDELALQDNGFLSKNEVLRSKVSRLTERLRKRYPTNNFGNCTGCSATFSVLKKRRSCSNCGNSFCSRCCSFKVPKSSMGATAPEAQRETVFVCASCNQTLSK

SEQ ID NO: 69374 - DNA, 861 bp, Artificial Sequence
  derived and/or modified sequence
atgcagaccagcgagagagagggcagcggccccgagctgagccccagcgtgatgcccgaggcccccctggagagcccccccttccccaccaagagccccgccttcgacctgttcaacctggtgctgagctacaagagactggagatctacctggagcccctgaaggacgccggcgacggcgtgagatacctgctgagattctacggcgccctgctgggcaccgtgtgcatgctgtacctgctgcccctgtgctgggtgctgaccctgctgaacagcaccctgttcctgggcaacgtggagttcttcagagtggtgagcgagtacagagccagcctgcagcagagaatgaaccccaagcaggaggagcacgccttcgagagcccccccccccccgacgtgggcggcaaggacggcctgatggacagcacccccgccctgacccccaccgaggacctgacccccggcagcgtggaggaggccgaggaggccgagcccgacgaggagttcaaggacgccatcgaggaggacgacgagggcgccccctgccccgccgaggacgagctggccctgcaggacaacggcttcctgagcaagaacgaggtgctgagaagcaaggtgagcagactgaccgagagactgagaaagagataccccaccaacaacttcggcaactgcaccggctgcagcgccaccttcagcgtgctgaagaagagaagaagctgcagcaactgcggcaacagcttctgcagcagatgctgcagcttcaaggtgcccaagagcagcatgggcgccaccgcccccgaggcccagagagagaccgtgttcgtgtgcgccagctgcaaccagaccctgagcaagtag

SEQ ID NO: 69375 - DNA, 861 bp, Artificial Sequence
  derived and/or modified sequence
atgcaaacaagcgaaagggagggaagcgggcctgaactgagccccagtgtcatgcctgaggcccccttggagagcccaccttttcctacaaaaagtccagcttttgacctgttcaatctcgtactgtcttacaaaagactcgagatctatctggagcctttaaaggatgctggtgatggcgtacgctatcttttacggttttatggtgctctactcggaaccgtgtgcatgttatatttgttaccactatgttgggtgcttacgctcctgaattccaccttgtttctagggaacgttgagttttttcgcgtggtgagcgaatacagagcatctttacagcagcgaatgaacccaaaacaggaggaacatgcgtttgagtccccaccaccccctgacgtgggcggaaaggatggcctgatggactcaactccggcactgacaccaaccgaagaccttacgccgggtagcgtagaggaagccgaggaagcagaaccagatgaagagttcaaggatgctattgaagaggacgatgagggagccccctgccctgccgaggatgagctcgccctccaagacaacggattcttaagcaagaacgaagtactgcggtcaaaggtctctcgcctgactgagcgcctgaggaaacgctatccaaccaacaacttcgggaactgtaccgggtgtagcgctacgttctcagttctgaagaagcgcagatcctgttccaattgcggcaacagcttttgttcacggtgctgtagttttaaggtgcctaagtcctccatgggtgccactgctccggaagcacagcgggaaactgttttcgtgtgcgcgagctgcaaccaaacactgagcaagtag

SEQ ID NO: 69376 - DNA, 861 bp, Artificial Sequence
  derived and/or modified sequence
atgcagaccagcgagcgggagggcagcggccctgagctgagccccagcgtgatgcctgaggcccccctggagagcccccccttccccaccaagagccctgcctttgacctcttcaacctggtgctgagctacaagaggctggagatctacctggagcccctgaaggatgctggagatggagtgcgctacctgctgcgcttctacggggccctgctgggcaccgtgtgcatgctgtacctgctgcccctgtgctgggtgctgaccctgctgaacagcaccctcttcctgggcaatgtggagttcttccgggtggtgtctgagtaccgggccagcctgcagcagaggatgaaccccaagcaggaggagcacgcctttgagagccccccacctccagatgtgggcggcaaggatggcctgatggacagcaccccagccctgacccccacagaggacctgaccccaggctctgtggaggaggccgaggaggccgagccagatgaggagttcaaggatgccattgaagaagatgatgaaggagccccctgcccagcagaagatgagctggccctgcaggacaatggcttcctgagcaagaatgaggtgctgcggagcaaggtgtcccggctgacagagcggctgaggaagcgctaccccaccaacaactttggaaactgcaccggctgcagcgccaccttctctgtgctgaagaagaggaggagctgcagcaactgtggcaacagcttctgcagccgctgctgcagcttcaaggtgcccaagagctccatgggcgccacagcccctgaggcccagcgggagaccgtgtttgtgtgtgccagctgcaaccagaccctgagcaagtag

SEQ ID NO: 69377 - DNA, 861 bp, Artificial Sequence
  derived and/or modified sequence
atgcagaccagcgagcgggagggcagcggccccgagctgagccccagtgtaatgcccgaagcccccctggagagtcctccatttcctaccaaatcaccagcattcgatctttttaacctggtcctgtcctacaaacggctcgaaatttatctggagccactaaaggacgccggcgatggtgtcagatacttactgaggttctatggagcgcttctaggtacagtttgtatgctttatcttctcccgctgtgctgggtgttgaccttgttgaattccaccttgttcctgggcaacgtagagttctttcgagtggtgtcggaataccgcgccagtttgcaacaaagaatgaacccaaaacaggaagagcacgcattcgaatcccccccccctcctgacgttggcggtaaagacggcctgatggattctacacctgcactaactcctaccgaagacctgacgcccggcagcgttgaagaggccgaggaagccgaacctgacgaagaattcaaagacgccatagaagaggacgatgagggtgctccatgccccgcagaagacgagctcgcgctccaagataatggcttcctgagcaagaatgaagtgttacgcagtaaggtgtctcgtctgactgaacgtcttagaaaacggtacccaacaaataactttggcaattgtactgggtgcagtgcaacgttttcagtgctaaagaagagaaggtcttgttctaattgcggcaattccttctgttcccggtgttgtagcttcaaagtccccaaaagctctatgggtgctactgccccagaggcacaaagagagaccgtgttcgtgtgcgcttcttgcaaccagacactgagcaaatag

SEQ ID NO: 69378 - DNA, 861 bp, Artificial Sequence
  derived and/or modified sequence
atgcaaacatccgagcgggaaggaagcggccctgagctttcaccttcagtgatgccagaggcgccattagaaagtcctccgtttcctaccaaatctcccgcatttgatctattcaacctggtcctgtcctacaaacgtctggagatctacttagaacccctcaaggacgcgggagatggcgtccggtatctgctcagattttatggagccttgttgggcacagtgtgcatgctgtacctcctaccgctttgctgggttctcaccctattaaattctactctgtttttgggaaatgttgaattcttccgggtagtttcggaataccgcgcttcactgcagcagcggatgaaccctaagcaggaagaacatgcatttgagtcgccacctccccctgatgtgggtgggaaagacggtctgatggattccacccccgcattgacgcctactgaagatctgacgccaggtagtgtggaggaggctgaggaggcagaacccgacgaggagtttaaggacgctatcgaggaagatgatgagggcgcaccatgtcccgctgaggatgaactggccctgcaagacaatggtttcctgtctaaaaatgaggttctccgctctaaagtgtcaaggctcactgagcgccttaggaagagatacccaacaaataactttggcaactgcacaggatgctcagccactttctccgtactgaagaaacgcagaagttgttccaactgtgggaattccttttgtagccgctgttgcagcttcaaggtcccgaaaagcagcatgggcgctactgcacctgaggcccaacgcgaaaccgtgttcgtatgcgcctcttgtaatcagaccttgagtaaatag

SEQ ID NO: 69379 - DNA, 2669 bp, Artificial Sequence
  derived and/or modified sequence
gcagagcgattcgcgtcccggaagcggcggtggcggccgcggcgtaggcggaggagattttcggacctgcgacttccgaacaaccctggcaggaggagcggcgttcagccgggggaggcctgaagaaacgctccggggcccagtggctctacccctgctcctgcccgaccctgccgcctccctcacggagccagcggccgggatgcagacatcagaacgtgaggggagtgggccggagctgagccccagcgtgatgcccgaggctcccctggagtctccaccttttcctaccaagtccccagcgtttgaccttttcaacttggttctctcctacaagaggctggagatctacctggaacccttgaaggatgcaggtgatggtgttcgatacttgctcaggttctatggggctcttctgggcacagtctgcatgctgtatttgctgccactctgctgggttctcacccttttaaacagcacgctctttctggggaatgtggagttcttccgagttgtgtctgagtacagggcatctctgcagcagaggatgaacccaaagcaggaagagcatgcctttgagagtcctccaccaccagatgttggggggaaggatggtctgatggacagcacgcctgccctcacacccacggaggacctcacaccgggcagcgtggaggaggctgaggaggctgagccagatgaagagtttaaagatgcgattgaggaggatgatgagggcgccccgtgcccagcagaggatgagctggccctgcaggacaacgggttcctgagcaagaatgaggtgctgcgcagcaaggtgtctcggctcacggagcggctccgcaagcgctaccccaccaacaacttcgggaactgcacgggctgctcggccaccttctcagtgctgaagaagaggcggagctgcagtaattgtggaaacagcttctgctctcgatgctgctccttcaaggtgcccaagtcctccatgggggccacagcccctgaagcccagagggagactgtgtttgtgtgtgcctcgtgtaaccagaccttgagcaagtgagaagagaggccagggtccaaccaggcacccgtccttgggaccagcagtagaccccccactctccccacccctggcccactgtggtgtgtgctgggcaaatgtggcctgaatgctaggtaggcttccccttccttcctcactctctccagctggattctggagctgttctccatccatgagagtggctggcaatggctgctctcaatcccttgagggagaagagcccctggagggcctggcatgtttgtcctgctctgcctgggactgagcgagtggacttagggctgggcaggcagtagccaccagagggcagcagcgaactaggccaggcctgactggggtctgaagatcagggtcagtgtggctgtgcctgggaattccagacctgaggttgggaaaagaggtttttctcctgcagggtactgggccaggccctcagcctcagagagcctgcagaagggcttgggagtgccacaccccatctctgctgattgaatgtccctccaggcaccaggatctcatcatttccccatcagagggtgtggccaggcctaacaagaccatgggtgcttctagaaacagggttgaagttcccagattccctgagaggagaatgtgtataggagggtttggctgagtccttcagcgttaagtggaggaaagcttggggaagccccaatagctggacagacctcggcctcccctcgaagacacctcaattcacagactctcagcccacacaatgccccagtgtccccagctccgctggagcagctgcagggcacttggatcacaacttctgcaccctctgtccagagtctagggcagtcctccactggcccagcactccagtttcctttccctgcctcttgtccaatggagtgggaggccaggtgagtggagcagaggtcctgaagcccttgacccctgggggcctgggtagtgtaggatctcgctgggctgggtcctggattccagggctattccctggaggacagtctcagttatgggataaggccccctgggggtctccatttctttccaacagtttcatgttcactactggactcttacgggctcagtatctctcccttagccatgagctggctcaggcatcccttcccttccctggagctgccctgcctttctcaagtatttatttatttattgcatggttcctgggaacatgtggcacaagtaatgggatgaggaggaattgggggtgggggtcttctacctaggactcttccctggagtcatgggctgcctgggacccaggacccatgagggggctgagaggtttctacactcgaggagcaggggtccagagaggcaggctggggaggcaagggacccatcctaggcccgctttcttgccgagccaagcagcttagctggggctgtgcagccaggggcttacccaggccagtggaggtgccacagccctggggagccagacaggctttggtatcgtatcgcctctgtgtccttttaagagaggagagttcagtaccccgtgctttctttacactggagaggaactaaaaggatctctgtgtctatggagaattgtcaataaaaaggcctcaagcttcttgtttttgtc

SEQ ID NO: 69380 - protein, 561 aa, Artificial Sequence
  derived and/or modified sequence
MVLGPEQKMSDDSVSGDHGESASLGNINPAYSNPSLSQSPGDSEEYFATYFNEKISIPEEEYSCFSFRKLWAFTGPGFLMSIAYLDPGNIESDLQSGAVAGFKLLWILLLATLVGLLLQRLAARLGVVTGLHLAEVCHRQYPKVPRVILWLMVELAIIGSDMQEVIGSAIAINLLSVGRIPLWGGVLITIADTFVFLFLDKYGLRKLEAFFGFLITIMALTFGYEYVTVKPSQSQVLKGMFVPSCSGCRTPQIEQAVGIVGAVIMPHNMYLHSALVKSRQVNRNNKQEVREANKYFFIESCIALFVSFIINVFVVSVFAEAFFGKTNEQVVEVCTNTSSPHAGLFPKDNSTLAVDIYKGGVVLGCYFGPAALYIWAVGILAAGQSSTMTGTYSGQFVMEGFLNLKWSRFARVVLTRSIAIIPTLLVAVFQDVEHLTGMNDFLNVLQSLQLPFALIPILTFTSLRPVMSDFANGLGWRIAGGILVLIICSINMYFVVVYVRDLGHVALYVVAAVVSVAYLGFVFYLGWQCLIALGMSFLDCGHTVSISKGLLTEEATRGYVK

SEQ ID NO: 69381 - protein, 590 aa, Artificial Sequence
  derived and/or modified sequence
MRKKQLKTEAAPHCELKSYSKNSATQVSTMVLGPEQKMSDDSVSGDHGESASLGNINPAYSNPSLSQSPGDSEEYFATYFNEKISIPEEEYSCFSFRKLWAFTGPGFLMSIAYLDPGNIESDLQSGAVAGFKLLWILLLATLVGLLLQRLAARLGVVTGLHLAEVCHRQYPKVPRVILWLMVELAIIGSDMQEVIGSAIAINLLSVGRIPLWGGVLITIADTFVFLFLDKYGLRKLEAFFGFLITIMALTFGYEYVTVKPSQSQVLKGMFVPSCSGCRTPQIEQAVGIVGAVIMPHNMYLHSALVKSRQVNRNNKQEVREANKYFFIESCIALFVSFIINVFVVSVFAEAFFGKTNEQVVEVCTNTSSPHAGLFPKDNSTLAVDIYKGGVVLGCYFGPAALYIWAVGILAAGQSSTMTGTYSGQFVMEGFLNLKWSRFARVVLTRSIAIIPTLLVAVFQDVEHLTGMNDFLNVLQSLQLPFALIPILTFTSLRPVMSDFANGLGWRIAGGILVLIICSINMYFVVVYVRDLGHVALYVVAAVVSVAYLGFVFYLGWQCLIALGMSFLDCGHTVSISKGLLTEEATRGYVK

SEQ ID NO: 69382 - protein, 482 aa, Artificial Sequence
  derived and/or modified sequence
MSIAYLDPGNIESDLQSGAVAGFKLLWILLLATLVGLLLQRLAARLGVVTGLHLAEVCHRQYPKVPRVILWLMVELAIIGSDMQEVIGSAIAINLLSVGRIPLWGGVLITIADTFVFLFLDKYGLRKLEAFFGFLITIMALTFGYEYVTVKPSQSQVLKGMFVPSCSGCRTPQIEQAVGIVGAVIMPHNMYLHSALVKSRQVNRNNKQEVREANKYFFIESCIALFVSFIINVFVVSVFAEAFFGKTNEQVVEVCTNTSSPHAGLFPKDNSTLAVDIYKGGVVLGCYFGPAALYIWAVGILAAGQSSTMTGTYSGQFVMEGFLNLKWSRFARVVLTRSIAIIPTLLVAVFQDVEHLTGMNDFLNVLQSLQLPFALIPILTFTSLRPVMSDFANGLGWRIAGGILVLIICSINMYFVVVYVRDLGHVALYVVAAVVSVAYLGFVFYLGWQCLIALGMSFLDCGHTVSISKGLLTEEATRGYVK

SEQ ID NO: 69383 - protein, 149 aa, Artificial Sequence
  derived and/or modified sequence
MVLGPEQKMSDDSVSGDHGESASLGNINPAYSNPSLSQSPGDSEEYFATYFNEKISIPEEEYSCFSFRKLWAFTGPGFLMSIAYLDPGNIESDLQSGAVAGFKLLWILLLATLVGLLLQRLAARLGVVTGLHLAEVCHRQYPKVPRVIL

SEQ ID NO: 69384 - DNA, 1773 bp, Artificial Sequence
  derived and/or modified sequence
atgagaaagaagcagctgaagaccgaggccgccccccactgcgagctgaagagctacagcaagaacagcgccacccaggtgagcaccatggtgctgggccccgagcagaagatgagcgacgacagcgtgagcggcgaccacggcgagagcgccagcctgggcaacatcaaccccgcctacagcaaccccagcctgagccagagccccggcgacagcgaggagtacttcgccacctacttcaacgagaagatcagcatccccgaggaggagtacagctgcttcagcttcagaaagctgtgggccttcaccggccccggcttcctgatgagcatcgcctacctggaccccggcaacatcgagagcgacctgcagagcggcgccgtggccggcttcaagctgctgtggatcctgctgctggccaccctggtgggcctgctgctgcagagactggccgccagactgggcgtggtgaccggcctgcacctggccgaggtgtgccacagacagtaccccaaggtgcccagagtgatcctgtggctgatggtggagctggccatcatcggcagcgacatgcaggaggtgatcggcagcgccatcgccatcaacctgctgagcgtgggcagaatccccctgtggggcggcgtgctgatcaccatcgccgacaccttcgtgttcctgttcctggacaagtacggcctgagaaagctggaggccttcttcggcttcctgatcaccatcatggccctgaccttcggctacgagtacgtgaccgtgaagcccagccagagccaggtgctgaagggcatgttcgtgcccagctgcagcggctgcagaaccccccagatcgagcaggccgtgggcatcgtgggcgccgtgatcatgccccacaacatgtacctgcacagcgccctggtgaagagcagacaggtgaacagaaacaacaagcaggaggtgagagaggccaacaagtacttcttcatcgagagctgcatcgccctgttcgtgagcttcatcatcaacgtgttcgtggtgagcgtgttcgccgaggccttcttcggcaagaccaacgagcaggtggtggaggtgtgcaccaacaccagcagcccccacgccggcctgttccccaaggacaacagcaccctggccgtggacatctacaagggcggcgtggtgctgggctgctacttcggccccgccgccctgtacatctgggccgtgggcatcctggccgccggccagagcagcaccatgaccggcacctacagcggccagttcgtgatggagggcttcctgaacctgaagtggagcagattcgccagagtggtgctgaccagaagcatcgccatcatccccaccctgctggtggccgtgttccaggacgtggagcacctgaccggcatgaacgacttcctgaacgtgctgcagagcctgcagctgcccttcgccctgatccccatcctgaccttcaccagcctgagacccgtgatgagcgacttcgccaacggcctgggctggagaatcgccggcggcatcctggtgctgatcatctgcagcatcaacatgtacttcgtggtggtgtacgtgagagacctgggccacgtggccctgtacgtggtggccgccgtggtgagcgtggcctacctgggcttcgtgttctacctgggctggcagtgcctgatcgccctgggcatgagcttcctggactgcggccacaccgtgagcatcagcaagggcctgctgaccgaggaggccaccagaggctacgtgaagtag

SEQ ID NO: 69385 - DNA, 1773 bp, Artificial Sequence
  derived and/or modified sequence
atgcggaaaaagcaattgaagaccgaggctgcaccacactgcgaacttaaatcgtacagcaaaaacagcgctacccaggtttccactatggtgctcgggcctgagcagaagatgtcagacgatagtgtttctggggatcacggggagtccgccagcctcggtaatatcaacccagcatatagcaatcccagcctctcacagtctccaggcgacagtgaagaatacttcgccacttatttcaacgaaaagataagtatccctgaagaagaatacagctgtttctcctttagaaagttatgggctttcacagggcccggctttctaatgagcattgcttacctggatccgggaaatatcgaatctgatcttcagtccggggccgtggccgggtttaagctgctctggattcttctgctcgccacactggtaggtcttcttttacagcggctcgcagcccgacttggcgtggttaccgggctgcatcttgccgaagtttgtcatagacaatacccaaaggtcccacgcgtgattctctggctaatggtagaacttgccatcattggcagcgacatgcaggaggttataggctcagccatagctattaatctactttccgttggcagaatcccgctgtggggtggggtgcttattaccattgcagatacttttgtgttcttatttttggacaagtacgggttgcgaaagctggaggctttttttggttttctgattactatcatggccttaacgttcggatatgaatatgtgactgtaaagccgtcacagagccaggtcctcaaggggatgttcgttccaagctgttctgggtgtagaaccccccagatcgaacaggccgtaggaattgtgggggccgtgatcatgcctcacaatatgtatctccatagtgctcttgtaaaaagccgtcaggtgaacagaaacaacaagcaagaagttcgcgaggccaacaaatacttttttatagagagctgcattgccctcttcgtgtcctttattatcaacgtcttcgtggtgtcagtgttcgccgaagcattcttcgggaaaaccaacgaacaagtcgtggaagtctgcaccaacaccagtagtcctcatgcaggcctcttccccaaagacaattccacgctagcggtcgacatctacaagggaggcgtggtcctcggctgttacttcgggcccgcagccctttacatttgggctgttggaatactggctgctggccagagctcaactatgacggggacctacagcggacagttcgtgatggagggctttttgaaccttaagtggagtcggtttgctagagtggttctgactcgcagcatcgccattatcccaaccctgctggtcgcagtctttcaggacgtcgaacatctgactgggatgaatgatttcttgaatgtgctgcagtccctgcagctgcccttcgccctcattcctatcctcacctttacgtctctacgacccgtcatgtccgatttcgctaacgggttaggctggaggatagcaggaggaatactggtcctcataatttgttctataaatatgtattttgtggtggtgtatgtacgtgatctcggccacgttgccctgtacgtcgtcgctgctgtcgtaagtgtggcctacctggggtttgttttttacctgggctggcagtgtctcatcgccctgggtatgtcctttctagactgcggtcacaccgtttccatttccaagggcctgctcaccgaggaggcaaccagaggctacgtgaagtag

SEQ ID NO: 69386 - DNA, 1773 bp, Artificial Sequence
  derived and/or modified sequence
atgcggaagaagcaattgaagacagaggccgctccccactgcgagctaaagagctattccaaaaacagcgctacccaagttagcactatggtgctggggcccgaacagaaaatgtcagatgactccgtgagcggagaccacggcgagtccgcctccttaggcaacatcaacccagcttatagtaacccatccctgagccaatcccctggcgatagcgaagaatacttcgcaacgtactttaatgagaagatctcaatccccgaggaagagtatagctgctttagcttccggaaactctgggcgttcaccgggccaggcttcctgatgtccatcgcgtatctagacccaggcaatatcgaatcagatcttcaatcgggcgctgttgctgggttcaagctgctgtggatcttactgctcgctacactagtcggcctgctactgcagagattagcagccagattgggagtcgtgactggacttcacttagctgaagtgtgtcatcgacagtaccccaaggtgcctagggtgatcttgtggctcatggtggaactggccattataggaagtgatatgcaggaggtgataggcagcgcaatagccattaatttattgagtgtgggacggataccattatgggggggagtgcttatcaccatcgccgataccttcgtattcctgttccttgacaaatacggtctgagaaagctggaggccttctttgggttcctgatcacaataatggcactgactttcggctacgaatacgtaacagtaaagcctagtcagtcccaggtgttaaagggcatgttcgtaccatcgtgcagcggatgtaggacaccgcagattgagcaagctgtgggaatcgttggagctgtgatcatgccacacaatatgtatctccatagtgccctagtgaaaagtcgacaggtgaataggaacaataagcaggaggtgcgcgaagccaataagtactttttcatcgagtcctgcattgccctgtttgtctcgttcatcatcaacgtcttcgtcgttagcgtgtttgcagaagcatttttcgggaagacaaatgagcaggtggtggaggtatgcactaatacgagtagtccacacgccgggctgtttccaaaggacaattctactctggccgtagacatctacaaaggtggcgtagtccttgggtgttacttcggaccagctgccctgtatatttgggcagtggggattctggctgcaggacagtcttctaccatgaccgggacctattcgggccagttcgtgatggagggcttcctgaatctaaagtggtcaaggttcgcccgcgtcgttctgactcgttccatagcaataatccccaccctgctcgtggccgtctttcaggacgttgagcacctgacaggaatgaacgattttcttaacgtcctgcagtccctccaactcccctttgcccttatccccattttaactttcacgtcactccgccccgtgatgagcgattttgcaaacggcctcggctggcggatagctggaggcattctcgtgctgataatatgctcaattaatatgtatttcgtagtggtctacgtgagagacctgggccatgtggcgctttacgtcgtcgccgccgtcgtgtctgtggcctatcttggtttcgtgttctacttgggctggcaatgcctgatcgccctgggtatgagcttcctggattgcgggcacactgtgtccatcagcaaagggctattaacggaggaggcaactcgaggctatgttaaatag

SEQ ID NO: 69387 - DNA, 1773 bp, Artificial Sequence
  derived and/or modified sequence
atgaggaagaagcagctgaagacagaggccgccccccactgtgagctgaagagctacagcaagaacagcgccacccaggtgtccaccatggtgctgggccctgagcagaagatgtctgatgacagcgtgtctggggaccatggagagagcgccagcctgggcaacatcaacccagcctacagcaaccccagcctgagccagagccctggggacagcgaggagtactttgccacctacttcaatgagaagatcagcatccctgaggaggagtacagctgcttctccttcaggaagctgtgggccttcaccggccctggcttcctgatgagcatcgcctacctggaccccggcaacattgaaagtgacctgcagagcggggctgtggccggcttcaagctgctgtggatcctgctgctggccaccctggtgggcctgctgctgcagaggctggccgcccggctgggcgtggtgacaggcctgcacctggccgaggtgtgccaccggcagtaccccaaggtgcccagggtcatcctgtggctgatggtggagctggccatcattggaagtgacatgcaggaggtgattggcagcgccatcgccatcaacctgctgtctgtgggccgcatccccctgtggggcggcgtgctgatcaccatcgctgacacctttgtgttcctgttcctggacaagtatggcctgaggaagctggaggccttcttcggcttcctgatcaccatcatggccctgaccttcggctatgaatatgtgacagtgaagcccagccagagccaggtgctgaagggcatgtttgtgcccagctgcagcggctgcaggaccccccagatcgagcaggccgtgggcatcgtgggcgctgtgatcatgccccacaacatgtacctgcacagcgccctggtgaagagccggcaggtgaacagaaacaacaagcaggaggtgcgggaggccaacaagtacttcttcatcgagagctgcatcgccctgtttgtgtccttcatcatcaacgtgtttgtggtgtctgtgtttgctgaggccttcttcggcaagaccaatgagcaggtggtggaggtgtgcaccaacaccagcagcccccatgctggcctcttccccaaggacaacagcaccctggccgtggacatctacaagggcggcgtggtgctgggctgctacttcggccctgctgccctgtacatctgggccgtgggcatcctggccgccggccagagcagcaccatgacaggcacctacagcggccagtttgtgatggagggcttcctgaacctgaagtggagcagatttgcccgggtggtgctgaccaggagcatcgccatcatccccaccctgctggtggccgtgttccaggatgtggagcacctgaccggcatgaatgacttcctgaatgtgctgcagagcctgcagctgccctttgccctgatccccatcctgaccttcaccagcctgcggcctgtgatgtctgactttgccaacggcctgggctggagaattgctgggggcatcctggtgctgatcatctgcagcatcaacatgtactttgtggtggtgtatgtgcgggacctgggccacgtggccctgtatgtggtggccgctgtggtgtctgtggcctacctgggctttgtgttctacctgggctggcagtgcctgattgccctgggcatgtccttcctggactgtggccacacagtgtccatcagcaagggcctgctgacagaggaggccacccggggctacgtgaagtag

SEQ ID NO: 69388 - DNA, 1773 bp, Artificial Sequence
  derived and/or modified sequence
atgcggaagaagcagctgaagaccgaggccgccccccactgcgagctgaagtcttactctaagaacagtgctactcaagtcagcaccatggtgttagggcctgagcaaaaaatgtctgacgactccgtttccggagaccatggcgaaagcgccagcctggggaacattaaccccgcatatagcaacccttccttgtcacaaagtcctggagatagtgaagagtatttcgccacgtacttcaacgaaaagatttccatacccgaggaagaatacagctgtttcagttttaggaagttgtgggccttcaccggacccggcttccttatgtccatcgcgtacttggaccccgggaacattgagagtgatctgcagtcgggtgctgtggccggttttaagcttctgtggattctgctgttagctaccctggtaggattactgcttcagcgactggccgcccgtctgggagtagtgaccggtctgcacctggccgaggtgtgccaccggcaatacccaaaggtcccaagagtgatcctgtggcttatggtggaactggccattatcggaagcgacatgcaggaggtgattgggagcgctattgccattaatctgttgtcagtgggaaggattcccctgtggggcggcgtgttaatcacaattgctgacactttcgtattcctattcctggacaaatatgggctccgcaaacttgaagcattctttggattcttgatcaccataatggccctgacgtttgggtacgagtacgttacggttaagccatctcagtcgcaggtcctgaagggcatgttcgtgccctcgtgttcaggatgccgtactcctcaaatcgagcaggctgtgggaatcgtgggggccgtgatcatgccccacaatatgtatttgcacagcgccttggtgaagagtcggcaagtgaatcgaaacaataagcaggaggttagagaggccaataaatacttctttattgagtcttgtattgcactgtttgtctccttcatcattaacgtgtttgtcgtctcagtctttgcagaggctttttttggtaaaacaaacgagcaagttgtggaagtgtgcacaaatacaagcagcccacatgctgggctgttccctaaggataacagtactcttgccgttgacatttataagggtggggtggtgctcggatgttatttcggtcctgcagctctgtacatctgggccgtgggcatccttgcggccgggcagtcatccaccatgaccggcacctattcgggacagttcgttatggagggatttctgaatctgaagtggagtagattcgctcgagtagtactcacgagatcgattgccatcatacctactctcctggtcgccgtcttccaggacgtggagcacctgaccggcatgaacgattttctcaatgtgctgcagtccctccagttgccattcgccttgatccctattctgaccttcacctccctgcgccccgtcatgtctgatttcgcaaacggcctggggtggcggatcgctggagggattctggtcctcatcatctgttctattaatatgtacttcgtggtggtgtatgtgcgagatttaggccacgtggcactgtacgtagtggccgccgttgtttcagtggcatacttggggtttgtcttttacctgggttggcagtgtctgatagctctgggcatgtcatttctagactgcgggcacacagtttccataagcaaaggtctgctaaccgaggaagccaccagaggctatgtgaagtag

SEQ ID NO: 69389 - DNA, 1773 bp, Artificial Sequence
  derived and/or modified sequence
atgcggaagaagcagctgaagaccgaggccgccccccactgcgagctcaaatcttattccaagaactcagctacccaggtctctaccatggttctaggtcctgagcagaagatgagcgacgacagcgtctctggggatcacggcgaaagcgcctcactgggcaacattaatcctgcctattccaatccttctctttctcagtcacctggcgacagcgaggaatacttcgctacttatttcaacgagaaaattagcatcccagaggaggagtactcttgcttttcatttcgcaagttgtgggccttcacaggcccagggttccttatgagcatcgcctaccttgaccctggtaacatcgagtcagatttacagagcggagctgtcgctggatttaagctcctctggatactgcttctggcaaccctcgtgggactgctgctgcagcgcttagcagctcgtcttggtgtggtcaccggcctccacttggcagaagtatgtcacaggcagtaccctaaggttccgagagttatcctctggctgatggtcgaactggctatcattggttccgacatgcaagaggtcataggcagcgcgatcgcaattaatcttcttagcgttggaagaattcccctgtggggaggcgttttaatcaccatcgctgacactttcgtgttcctgtttctagacaaatatgggcttcgtaaactagaggccttttttggctttctgattactattatggccctgacgtttgggtatgagtatgtcacagttaagccgagtcagtctcaggtgctgaaaggtatgttcgtgccatcctgctccggatgtagaacgcctcagattgagcaagctgtcggcatcgttggagcggtaatcatgccccataatatgtacctccactccgcgctggttaaaagccgacaggtgaatagaaacaacaagcaggaggtaagggaagctaataagtatttcttcattgaatcctgcatcgcactgttcgtcagctttatcatcaacgtcttcgtcgtctccgtgtttgcagaggccttctttgggaaaactaatgagcaagttgtcgaggtgtgcacaaacacctcctcccctcatgccgggttatttccaaaagataacagcacactcgcagtcgacatttacaaaggcggtgtcgtgctcgggtgttattttggcccagcagctttatacatatgggctgtgggtatattggctgccggtcagtcatccactatgaccgggacatattctggccagtttgttatggaggggtttcttaatctcaagtggagcaggtttgcccgagtggtcctgactagatcaattgctataataccgaccctgctcgtggctgtgtttcaggatgtggagcacctcaccggaatgaatgatttcttaaacgtgttacagagtctccagctgcccttcgcactcattcctatccttacatttacatcactccgccccgtgatgagcgacttcgccaatggcctggggtggcgaatcgcagggggcatcctcgttttaatcatctgcagtatcaatatgtacttcgttgtcgtttatgttcgggacttgggacatgtggcgctgtatgtcgtggcagcggtcgtgtctgtcgcctatttaggttttgtattctatctggggtggcagtgcttgattgccctgggcatgtctttcctggactgcggccacacagtgagcataagcaagggcctgttaaccgaggaagccaccagagggtacgtgaagtag

SEQ ID NO: 69390 - DNA, 1773 bp, Artificial Sequence
  derived and/or modified sequence
atgaggaagaaacagttgaaaacagaagccgctcctcactgcgagcttaagtcatattcaaaaaactccgctacacaggtcagcaccatggtgctagggccagagcagaagatgtcggatgacagtgtgtcaggtgatcacggcgagtccgcctccctggggaatatcaatccagcttactcaaacccgagtctgtcccagtctcctggggactccgaggagtacttcgctacatatttcaacgagaaaatatcgattccggaggaggagtatagctgtttcagcttccggaagctctgggcttttaccggcccagggttccttatgagcatcgcttacttagaccccggtaatattgagtcagatcttcagtctggcgctgtggctggatttaagcttctctggatacttctcttggccaccctggtgggcctgctcctgcagagattggccgcaagattgggcgtggtgacaggactgcacctagctgaagtctgtcaccgccagtatcccaaggtgccccgtgtaatcctgtggctgatggtcgagctggccattatcggttctgacatgcaggaagtgattggaagtgctattgcaatcaatctactgagcgtgggacgcattccactgtggggcggtgtcctgatcaccatcgcggatacctttgtgttcctattcctggataagtatggcctgagaaaattagaagcgttcttcggtttcttgattaccattatggcacttacctttggttacgaatacgtgaccgtgaagccctctcaatctcaggttctgaaagggatgtttgtgccctcctgtagcggatgtcgcactccacagattgaacaagcagttggcattgttggggcagtgatcatgccccataacatgtacctacactccgctctggtgaaatcaaggcaggtaaatagaaataacaagcaggaggttagagaggcaaataagtacttcttcattgagtcatgtatcgccctttttgtgagtttcataataaatgtgttcgtggtgagcgtctttgcagaggcattcttcggtaaaacgaatgaacaggttgtcgaggtctgcaccaacacttccagtccccacgccggactattccctaaagataactccaccctggcagtcgatatctacaagggtggcgtcgttttgggttgctactttggtcccgctgccctgtacatctgggctgttggaattctcgccgcagggcagtcgtccactatgactggtacctacagcggtcaatttgtgatggagggcttcctgaacctgaaatggagccggtttgcgagagtcgtgctgacaaggtccattgctatcatcccgacattgctcgttgccgtgtttcaggatgtggagcatcttacaggcatgaacgatttcttgaacgtgctgcaatctctgcagctccctttcgccttgataccaatcttgaccttcacctcattacggcctgtcatgtccgatttcgcgaatggacttggttggaggattgccggaggcatcttggtgttaatcatttgctctattaacatgtactttgtggtggtgtacgttagagatctagggcatgtggccctgtatgttgtggccgcagtagtcagcgtcgcctacctgggtttcgtcttctatctggggtggcagtgtctcattgcacttggaatgtcattcctggattgcggccacaccgtctcaatctctaagggtttgttgactgaagaggcaactcgcggttacgtcaagtag

SEQ ID NO: 69391 - DNA, 1773 bp, Artificial Sequence
  derived and/or modified sequence
atgcggaagaaacagctgaagacagaagccgcaccgcactgcgaactgaagagttatagcaaaaactcagctactcaagtttccacgatggtgttgggcccagagcaaaaaatgtcagatgactccgtgagcggcgaccatggagaaagcgcatccctcggaaacattaaccctgcgtattcaaatccctccctgagccagtcccccggagatagcgaggaatactttgcaacatattttaatgagaaaatttccattcccgaggaagaatatagttgcttcagctttcggaagctctgggcattcactggaccgggttttctgatgtctattgcctacttagaccccggaaatatcgaatctgacctgcaaagcggcgcagtagccggtttcaagctgctttggatcctgttgctcgccaccctcgtggggctacttctccagcggctggctgctcggctgggggttgttactgggctccaccttgcggaagtgtgccaccgacagtatccaaaagtccctcgggtcattctgtggcttatggtggagcttgccataattggcagcgacatgcaggaggtcatcggtagtgctatagctatcaatttgctttcagttggcagaatccctctttggggtggagtacttatcacgatcgctgatacattcgtgtttttattcttggacaagtatggactgaggaaactggaggccttctttggatttctcattacaatcatggccttaaccttcggttatgagtatgtgacagtgaagccaagccagtcccaggttctcaaaggcatgttcgtgccatcttgtagcggctgccggacaccacagatcgagcaggccgtgggaattgttggcgctgtaatcatgccccataacatgtacctccacagcgccctggttaagtcccgacaagtcaatagaaacaacaagcaggaagtccgggaagccaataagtacttttttatcgaatcctgcattgccttgttcgtgtcttttatcatcaatgtgttcgtcgtgtcagtctttgctgaggcgtttttcggcaaaactaacgaacaggtcgtcgaagtgtgcactaatacatcctcaccacacgctggcctgttccccaaggacaactccaccctagctgtggacatctacaagggcggtgtggtgctagggtgctatttcggacccgcagctctctatatctgggctgtgggaattctggcagcgggtcagtcaagtacaatgacgggcacttattccgggcagttcgtcatggaaggcttcctcaacttgaaatggtctcggttcgctcgcgtggtcctgaccagaagcatcgctataatcccgacactgcttgtcgctgtgtttcaggacgtagagcacttgaccggcatgaatgactttctgaacgttctgcagagcctccaactgccatttgccttgattccgattttgaccttcacttctctccgcccagtgatgtcagattttgccaatgggctgggatggcgcatcgccggtggcatcctcgtattgatcatttgcagcatcaacatgtatttcgtcgtggtatacgtccgggacctgggtcatgtagccttgtacgtcgtggccgcagtcgtgagtgtggcgtacctgggtttcgttttttatcttggttggcagtgcctgattgccttgggaatgagctttctggattgtggccacactgttagcattagcaaggggctgctaactgaagaagccacccgtggctacgtcaagtag

SEQ ID NO: 69392 - DNA, 4132 bp, Artificial Sequence
  derived and/or modified sequence
agcgtggcgctggctcccggaatatggagccctgggcgcgggggcggcgtgtcaggtggttgcggagctggtaagaatcatattctaagaactcagccactcaggtatccaccatggtgctgggtcctgaacagaagatgtcagatgacagtgtttctggagatcatggggagtctgccagtcttggtaacatcaaccctgcctatagtaatccctctctttcacagtcccctggggactcagaggagtacttcgccacttactttaatgagaagatctccattcctgaggaggagtactcttgttttagctttcgtaaactctgggctttcaccggaccaggttttcttatgagcattgcctacctggatccaggaaatattgaatccgatttgcagtctggagcagtggctggatttaagttgctctggatccttctgttggccacccttgtggggctgctgctccagcggcttgcagctagactgggagtggttactgggctgcatcttgctgaagtatgtcaccgtcagtatcccaaggtcccacgagtcatcctgtggctgatggtggagttggctatcatcggctcagacatgcaagaagtcattggctcagccattgctatcaatcttctgtctgtaggaagaattcctctgtggggtggcgttctcatcaccattgcagatacttttgtatttctcttcttggacaaatatggcttgcggaagctagaagcattttttggctttctcatcactattatggccctcacatttggatatgagtatgttacagtgaaacccagccagagccaggtactcaagggcatgttcgtaccatcctgttcaggctgtcgcactccacagattgaacaggctgtgggcatcgtgggagctgtcatcatgccacacaacatgtacctgcattctgccttagtcaagtctagacaggtaaaccggaacaataagcaggaagttcgagaagccaataagtactttttcattgaatcctgcattgcactctttgtttccttcatcatcaatgtctttgttgtctcagtctttgctgaagcattttttgggaaaaccaacgagcaggtggttgaagtctgtacaaataccagcagtcctcatgctggcctctttcctaaagataactcgacactggctgtggacatctacaaagggggtgttgtgctgggatgttactttgggcctgctgcactctacatttgggcagtggggatcctggctgcaggacagagctccaccatgacaggaacctattctggccagtttgtcatggagggattcctgaacctaaagtggtcacgctttgcccgagtggttctgactcgctctattgccatcatccccactctgcttgttgctgtcttccaagatgtagagcatctaacagggatgaatgactttctgaatgttctacagagcttacagcttccctttgctctcatacccatcctcacatttacgagcttgcggccagtaatgagtgactttgccaatggactaggctggcggattgcaggaggaatcttggtccttatcatctgttccatcaatatgtactttgtagtggtttatgtccgggacctagggcatgtggcattatatgtggtggctgctgtggtcagcgtggcttatctgggctttgtgttctacttgggttggcaatgtttgattgcactgggcatgtccttcctggactgtgggcatacggtaagcatctctaaaggcctgctgacagaagaagccacccgtggctacgttaaataacactggattagtctgtcttctgcaggtagccatcagagccagtgtgtttctatggtttactgtgtgaacatagccaaaagtatgtgccgttgcacagactgtgtttatgactcaaccgttggttggaaaagactttgtttcatgtgtatttgaaagatggaattattttttccttcctgacctaaccttagaactggattagggtgggatctttgaaaagctgacatttgctgctatcattccaacactaaattcttaagtagttgcccaagggccagctcagtttatccttcggagagacaaggatatgcatgattcttaaccaggctatatgttaaaaaaaaattggaaaatgcaatacattttttattatacaaactacagaatgagtatgcaagttttatttatcaaaatgtaatggatttttaaaggctgagaaattttccttatacctaccttttcagttattttaattataccaaattatcaactagaatagcttcatccatatgaaatataaaatgaagagacacctagctctatcaggcttaggattctttgaacttatttccactttaatttctcagtggaagttaagaggggtgagaaaacaaagaaggggaaaaactgacaactaacaaaaccagcaccacatcgctaggtggtgcttactaattaccttctcaggattttcctcagattgaaaagcttatgaggatttcttgggagtcttaataacctgcctgttagtacagagctttcctgatgatatttactcttgagcacatgtggttgtaaaaccttaactttctttctccaggagggtggtgatagaaacagatggtagtatttatgaactgatgttctcgtgaaatgttgagggtggggagaaaagactttaagggaggagagccatctattttgttcctaaagccacctctcagcagaatcgtcatgtttttctgatgcaccgctctgcttcatgcccaagatgacttgcgaggcaatctcaggagctgtggacttaaccgttgcaaagcacactgtctttctcagcgttctctgcaagtcagtaggtgttagtatggttgcaaagttcactgtctcagcaaagttgaactgggctacctctctacagctgtttcctcagagggaaaaatcttgagaccagatggtggagctctggagtcagaggaaatgggtgtcttcagcacaaagctgctgcttttacttcagccacttctgacatttttacataccgagcctgagattgtgtgattatctcaaatcaaatcactttgatggagataaataatcaaaactgttttatagtcattgatttggtgagaacagtaatggaaaatggtgttgaaggacttctcatttttggagctttccttccagagtcctggctgattggtgttcgctgttcatctgagcccccaaaagcattattactgatacttgcacacagtcaaaagcgcagactggatggatggtcttttataaggcatttaagggtacactactgtgtttcactgaccatacatttttcttagcccctcaagtaatatagcacagagttatgaatgacaattcccctaaccattcctcttcatatctgcctcttccccttaccatcgtaattctccaaactggtcataaaggcactctgtgaagatattggggactgacatcttaagctctcacctggctgcagtaggaaaggccaaactgacgacaaaaaaaaaattctttataaagatgatatggtaacatgtatctttgccctgggtctgggtgggtccagtcagtctcagatttacaagcatttaggagcctaggtaaaagctgctagtattcttttaaaagttatatttatgacttgcaatgatagaaaactccttccaattaaatggcattttataatattatgtgtgtacttcacagtgttaaaaataccctcatacgttattgcatttgatcttcacagaaagtgcattttaaccagtactctgggtgcaataaataatatgtagaaatttaagtcctccaattccagcatatccagtgagttttgacagtgtgtttatgtggaatgtttaaggatatacaattgtactttatataaattggttcttgttcttcttaaatgtgacatgaaataattgtgctgctacattatactggaaattaacaggggaaaagggaagagctcttggctcccttgaggttctgctagtggtgttaggagtggttacaactgagcttttagtaaccatttaaccgtatgtaaacttggtttctaattaaaaaaaaatttctttttccaa

SEQ ID NO: 69393 - DNA, 4156 bp, Artificial Sequence
  derived and/or modified sequence
atatatagaggcaggagctggcattgggaaagtcaaactagttctgcaccatgaggaagaagcagctgaagacggaggcagctccacactgtgaactaaaatcatattctaagaactcagccactcaggtatccaccatggtgctgggtcctgaacagaagatgtcagatgacagtgtttctggagatcatggggagtctgccagtcttggtaacatcaaccctgcctatagtaatccctctctttcacagtcccctggggactcagaggagtacttcgccacttactttaatgagaagatctccattcctgaggaggagtactcttgttttagctttcgtaaactctgggctttcaccggaccaggttttcttatgagcattgcctacctggatccaggaaatattgaatccgatttgcagtctggagcagtggctggatttaagttgctctggatccttctgttggccacccttgtggggctgctgctccagcggcttgcagctagactgggagtggttactgggctgcatcttgctgaagtatgtcaccgtcagtatcccaaggtcccacgagtcatcctgtggctgatggtggagttggctatcatcggctcagacatgcaagaagtcattggctcagccattgctatcaatcttctgtctgtaggaagaattcctctgtggggtggcgttctcatcaccattgcagatacttttgtatttctcttcttggacaaatatggcttgcggaagctagaagcattttttggctttctcatcactattatggccctcacatttggatatgagtatgttacagtgaaacccagccagagccaggtactcaagggcatgttcgtaccatcctgttcaggctgtcgcactccacagattgaacaggctgtgggcatcgtgggagctgtcatcatgccacacaacatgtacctgcattctgccttagtcaagtctagacaggtaaaccggaacaataagcaggaagttcgagaagccaataagtactttttcattgaatcctgcattgcactctttgtttccttcatcatcaatgtctttgttgtctcagtctttgctgaagcattttttgggaaaaccaacgagcaggtggttgaagtctgtacaaataccagcagtcctcatgctggcctctttcctaaagataactcgacactggctgtggacatctacaaagggggtgttgtgctgggatgttactttgggcctgctgcactctacatttgggcagtggggatcctggctgcaggacagagctccaccatgacaggaacctattctggccagtttgtcatggagggattcctgaacctaaagtggtcacgctttgcccgagtggttctgactcgctctattgccatcatccccactctgcttgttgctgtcttccaagatgtagagcatctaacagggatgaatgactttctgaatgttctacagagcttacagcttccctttgctctcatacccatcctcacatttacgagcttgcggccagtaatgagtgactttgccaatggactaggctggcggattgcaggaggaatcttggtccttatcatctgttccatcaatatgtactttgtagtggtttatgtccgggacctagggcatgtggcattatatgtggtggctgctgtggtcagcgtggcttatctgggctttgtgttctacttgggttggcaatgtttgattgcactgggcatgtccttcctggactgtgggcatacggtaagcatctctaaaggcctgctgacagaagaagccacccgtggctacgttaaataacactggattagtctgtcttctgcaggtagccatcagagccagtgtgtttctatggtttactgtgtgaacatagccaaaagtatgtgccgttgcacagactgtgtttatgactcaaccgttggttggaaaagactttgtttcatgtgtatttgaaagatggaattattttttccttcctgacctaaccttagaactggattagggtgggatctttgaaaagctgacatttgctgctatcattccaacactaaattcttaagtagttgcccaagggccagctcagtttatccttcggagagacaaggatatgcatgattcttaaccaggctatatgttaaaaaaaaattggaaaatgcaatacattttttattatacaaactacagaatgagtatgcaagttttatttatcaaaatgtaatggatttttaaaggctgagaaattttccttatacctaccttttcagttattttaattataccaaattatcaactagaatagcttcatccatatgaaatataaaatgaagagacacctagctctatcaggcttaggattctttgaacttatttccactttaatttctcagtggaagttaagaggggtgagaaaacaaagaaggggaaaaactgacaactaacaaaaccagcaccacatcgctaggtggtgcttactaattaccttctcaggattttcctcagattgaaaagcttatgaggatttcttgggagtcttaataacctgcctgttagtacagagctttcctgatgatatttactcttgagcacatgtggttgtaaaaccttaactttctttctccaggagggtggtgatagaaacagatggtagtatttatgaactgatgttctcgtgaaatgttgagggtggggagaaaagactttaagggaggagagccatctattttgttcctaaagccacctctcagcagaatcgtcatgtttttctgatgcaccgctctgcttcatgcccaagatgacttgcgaggcaatctcaggagctgtggacttaaccgttgcaaagcacactgtctttctcagcgttctctgcaagtcagtaggtgttagtatggttgcaaagttcactgtctcagcaaagttgaactgggctacctctctacagctgtttcctcagagggaaaaatcttgagaccagatggtggagctctggagtcagaggaaatgggtgtcttcagcacaaagctgctgcttttacttcagccacttctgacatttttacataccgagcctgagattgtgtgattatctcaaatcaaatcactttgatggagataaataatcaaaactgttttatagtcattgatttggtgagaacagtaatggaaaatggtgttgaaggacttctcatttttggagctttccttccagagtcctggctgattggtgttcgctgttcatctgagcccccaaaagcattattactgatacttgcacacagtcaaaagcgcagactggatggatggtcttttataaggcatttaagggtacactactgtgtttcactgaccatacatttttcttagcccctcaagtaatatagcacagagttatgaatgacaattcccctaaccattcctcttcatatctgcctcttccccttaccatcgtaattctccaaactggtcataaaggcactctgtgaagatattggggactgacatcttaagctctcacctggctgcagtaggaaaggccaaactgacgacaaaaaaaaaattctttataaagatgatatggtaacatgtatctttgccctgggtctgggtgggtccagtcagtctcagatttacaagcatttaggagcctaggtaaaagctgctagtattcttttaaaagttatatttatgacttgcaatgatagaaaactccttccaattaaatggcattttataatattatgtgtgtacttcacagtgttaaaaataccctcatacgttattgcatttgatcttcacagaaagtgcattttaaccagtactctgggtgcaataaataatatgtagaaatttaagtcctccaattccagcatatccagtgagttttgacagtgtgtttatgtggaatgtttaaggatatacaattgtactttatataaattggttcttgttcttcttaaatgtgacatgaaataattgtgctgctacattatactggaaattaacaggggaaaagggaagagctcttggctcccttgaggttctgctagtggtgttaggagtggttacaactgagcttttagtaaccatttaaccgtatgtaaacttggtttctaattaaaaaaaaatttctttttccaa

SEQ ID NO: 69394 - DNA, 2470 bp, Artificial Sequence
  derived and/or modified sequence
agagtccaggactgatggagtcgcgccattcagagaaagacccaaagatgggggcagggagggaacgccggaggtcgcgggggtctcgccccttccccgccgcggcctaggacacatggcccagctcccagctgcaccggatggcgcgcccggcctgtgtcggggtgcgctgacctgcttcgacgcctcgaaagaggccgacgggcacagggcaaggtctttcgtggcctcttcgtcggcgccgcagggggccgggctgctctccggggcctcccgccgccccgcttcaacaaaagactcattataacctaaccgacttcagggagcgccttctgtgtgaatagcctgcatacgcggctcagtaattaatcatattctaagaactcagccactcaggtatccaccatggtgctgggtcctgaacagaagatgtcagatgacagtgtttctggagatcatggggagtctgccagtcttggtaacatcaaccctgcctatagtaatccctctctttcacagtcccctggggactcagaggagtacttcgccacttactttaatgagaagatctccattcctgaggaggagtactcttgttttagctttcgtaaactctgggctttcaccggaccaggttttcttatgagcattgcctacctggatccaggaaatattgaatccgatttgcagtctggagcagtggctggatttaagttgctctggatccttctgttggccacccttgtggggctgctgctccagcggcttgcagctagactgggagtggttactgggctgcatcttgctgaagtatgtcaccgtcagtatcccaaggtcccacgagtcatcctgtggctgatggtggagttggctatcatcggctcagacatgcaagaagtcattggctcagccattgctatcaatcttctgtctgtaggaagaattcctctgtggggtggcgttctcatcaccattgcagatacttttgtatttctcttcttggacaaatatggcttgcggaagctagaagcattttttggctttctcatcactattatggccctcacatttggatatgagtatgttacagtgaaacccagccagagccaggtactcaagggcatgttcgtaccatcctgttcaggctgtcgcactccacagattgaacaggctgtgggcatcgtgggagctgtcatcatgccacacaacatgtacctgcattctgccttagtcaagtctagacaggtaaaccggaacaataagcaggaagttcgagaagccaataagtactttttcattgaatcctgcattgcactctttgtttccttcatcatcaatgtctttgttgtctcagtctttgctgaagcattttttgggaaaaccaacgagcaggtggttgaagtctgtacaaataccagcagtcctcatgctggcctctttcctaaagataactcgacactggctgtggacatctacaaagggggtgttgtgctgggatgttactttgggcctgctgcactctacatttgggcagtggggatcctggctgcaggacagagctccaccatgacaggaacctattctggccagtttgtcatggagggattcctgaacctaaagtggtcacgctttgcccgagtggttctgactcgctctattgccatcatccccactctgcttgttgctgtcttccaagatgtagagcatctaacagggatgaatgactttctgaatgttctacagagcttacagcttccctttgctctcatacccatcctcacatttacgagcttgcggccagtaatgagtgactttgccaatggactaggctggcggattgcaggaggaatcttggtccttatcatctgttccatcaatatgtactttgtagtggtttatgtccgggacctagggcatgtggcattatatgtggtggctgctgtggtcagcgtggcttatctgggctttgtgttctacttgggttggcaatgtttgattgcactgggcatgtccttcctggactgtgggcatacggtaagcatctctaaaggcctgctgacagaagaagccacccgtggctacgttaaataacactggattagtctgtcttctgcaggtagccatcagagccagtgtgtttctatggtttactgtgtgaacatagccaaaagtatgtgccgttgcacagactgtgtttatgactcaaccgttggttggaaaagactttgtttcatgtgtatttgaaagatggaattattttttccttcctgacctaaccttagaactggattagggtgggatctttgaaaagctgacatttgctgctatcattccaacactaaattcttaagtagttgcccaagggccagctcagtttatccttcggagagacaaggatatgcatgattcttaaccaggctatatgttaaaaaaaaattggaaaatgcaatacattttttattatacaaac

SEQ ID NO: 69395 - DNA, 2401 bp, Artificial Sequence
  derived and/or modified sequence
ccctttcaaccactggcactcacaggcttgccacctactcttgctcctgccaaatggtcaaagatgaaatctgattaggctttggagggcgtggtttgcctcttgaaattccttgctcgtctttagaaagctgtgttgcttagagcacccaaaagtgccctttatctaactgagggaggcgcacttgtcttcatatatagaggcaggagctggcattgggaaagtcaaactagttctgcaccatgaggaagaagcagctgaagacggaggcagctccacactgtgaactaaaatcatattctaagaactcagccactcaggtatccaccatggtgctgggtcctgaacagaagatgtcagatgacagtgtttctggagatcatggggagtctgccagtcttggtaacatcaaccctgcctatagtaatccctctctttcacagtcccctggggactcagaggagtacttcgccacttactttaatgagaagatctccattcctgaggaggagtactcttgttttagctttcgtaaactctgggctttcaccggaccaggttttcttatgagcattgcctacctggatccaggaaatattgaatccgatttgcagtctggagcagtggctggatttaagttgctctggatccttctgttggccacccttgtggggctgctgctccagcggcttgcagctagactgggagtggttactgggctgcatcttgctgaagtatgtcaccgtcagtatcccaaggtcccacgagtcatcctgtggctgatggtggagttggctatcatcggctcagacatgcaagaagtcattggctcagccattgctatcaatcttctgtctgtaggaagaattcctctgtggggtggcgttctcatcaccattgcagatacttttgtatttctcttcttggacaaatatggcttgcggaagctagaagcattttttggctttctcatcactattatggccctcacatttggatatgagtatgttacagtgaaacccagccagagccaggtactcaagggcatgttcgtaccatcctgttcaggctgtcgcactccacagattgaacaggctgtgggcatcgtgggagctgtcatcatgccacacaacatgtacctgcattctgccttagtcaagtctagacaggtaaaccggaacaataagcaggaagttcgagaagccaataagtactttttcattgaatcctgcattgcactctttgtttccttcatcatcaatgtctttgttgtctcagtctttgctgaagcattttttgggaaaaccaacgagcaggtggttgaagtctgtacaaataccagcagtcctcatgctggcctctttcctaaagataactcgacactggctgtggacatctacaaagggggtgttgtgctgggatgttactttgggcctgctgcactctacatttgggcagtggggatcctggctgcaggacagagctccaccatgacaggaacctattctggccagtttgtcatggagggattcctgaacctaaagtggtcacgctttgcccgagtggttctgactcgctctattgccatcatccccactctgcttgttgctgtcttccaagatgtagagcatctaacagggatgaatgactttctgaatgttctacagagcttacagcttccctttgctctcatacccatcctcacatttacgagcttgcggccagtaatgagtgactttgccaatggactaggctggcggattgcaggaggaatcttggtccttatcatctgttccatcaatatgtactttgtagtggtttatgtccgggacctagggcatgtggcattatatgtggtggctgctgtggtcagcgtggcttatctgggctttgtgttctacttgggttggcaatgtttgattgcactgggcatgtccttcctggactgtgggcatacggtaagcatctctaaaggcctgctgacagaagaagccacccgtggctacgttaaataacactggattagtctgtcttctgcaggtagccatcagagccagtgtgtttctatggtttactgtgtgaacatagccaaaagtatgtgccgttgcacagactgtgtttatgactcaaccgttggttggaaaagactttgtttcatgtgtatttgaaagatggaattattttttccttcctgacctaaccttagaactggattagggtgggatctttgaaaagctgacatttgctgctatcattccaacactaaattcttaagtagttgcccaagggccagctcagtttatccttcggagagacaaggatatgcatgattcttaaccaggctatatgttaaaaaaaaattggaaaatgcaatacattttttattatacaaactacagaa

SEQ ID NO: 69396 - DNA, 576 bp, Artificial Sequence
  derived and/or modified sequence
agcgtggcgctggctcccggaatatggagccctgggcgcgggggcggcgtgtcaggtggttgcggagctggtaaggtgaggggaaggcaagaatcatattctaagaactcagccactcaggtatccaccatggtgctgggtcctgaacagaagatgtcagatgacagtgtttctggagatcatggggagtctgccagtcttggtaacatcaaccctgcctatagtaatccctctctttcacagtcccctggggactcagaggagtacttcgccacttactttaatgagaagatctccattcctgaggaggagtactcttgttttagctttcgtaaactctgggctttcaccggaccaggttttcttatgagcattgcctacctggatccaggaaatattgaatccgatttgcagtctggagcagtggctggatttaagttgctctggatccttctgttggccacccttgtggggctgctgctccagcggcttgcagctagactgggagtggttactgggctgcatcttgctgaagtatgtcaccgtcagtatcccaaggtcccacgagtcatcctg

SEQ ID NO: 69397 - protein, 557 aa, Artificial Sequence
  derived and/or modified sequence
MSTVDYLNSVSGDHGESASLGNINPAYSNPSLSQSPGDSEEYFATYFNEKISIPEEEYSCFSFRKLWAFTGPGFLMSIAYLDPGNIESDLQSGAVAGFKLLWILLLATLVGLLLQRLAARLGVVTGLHLAEVCHRQYPKVPRVILWLMVELAIIGSDMQEVIGSAIAINLLSVGRIPLWGGVLITIADTFVFLFLDKYGLRKLEAFFGFLITIMALTFGYEYVTVKPSQSQVLKGMFVPSCSGCRTPQIEQAVGIVGAVIMPHNMYLHSALVKSRQVNRNNKQEVREANKYFFIESCIALFVSFIINVFVVSVFAEAFFGKTNEQVVEVCTNTSSPHAGLFPKDNSTLAVDIYKGGVVLGCYFGPAALYIWAVGILAAGQSSTMTGTYSGQFVMEGFLNLKWSRFARVVLTRSIAIIPTLLVAVFQDVEHLTGMNDFLNVLQSLQLPFALIPILTFTSLRPVMSDFANGLGWRIAGGILVLIICSINMYFVVVYVRDLGHVALYVVAAVVSVAYLGFVFYLGWQCLIALGMSFLDCGHTVSISKGLLTEEATRGYVK

SEQ ID NO: 69398 - DNA, 1674 bp, Artificial Sequence
  derived and/or modified sequence
atgagcaccgtggactacctgaacagcgtgagcggcgaccacggcgagagcgccagcctgggcaacatcaaccccgcctacagcaaccccagcctgagccagagccccggcgacagcgaggagtacttcgccacctacttcaacgagaagatcagcatccccgaggaggagtacagctgcttcagcttcagaaagctgtgggccttcaccggccccggcttcctgatgagcatcgcctacctggaccccggcaacatcgagagcgacctgcagagcggcgccgtggccggcttcaagctgctgtggatcctgctgctggccaccctggtgggcctgctgctgcagagactggccgccagactgggcgtggtgaccggcctgcacctggccgaggtgtgccacagacagtaccccaaggtgcccagagtgatcctgtggctgatggtggagctggccatcatcggcagcgacatgcaggaggtgatcggcagcgccatcgccatcaacctgctgagcgtgggcagaatccccctgtggggcggcgtgctgatcaccatcgccgacaccttcgtgttcctgttcctggacaagtacggcctgagaaagctggaggccttcttcggcttcctgatcaccatcatggccctgaccttcggctacgagtacgtgaccgtgaagcccagccagagccaggtgctgaagggcatgttcgtgcccagctgcagcggctgcagaaccccccagatcgagcaggccgtgggcatcgtgggcgccgtgatcatgccccacaacatgtacctgcacagcgccctggtgaagagcagacaggtgaacagaaacaacaagcaggaggtgagagaggccaacaagtacttcttcatcgagagctgcatcgccctgttcgtgagcttcatcatcaacgtgttcgtggtgagcgtgttcgccgaggccttcttcggcaagaccaacgagcaggtggtggaggtgtgcaccaacaccagcagcccccacgccggcctgttccccaaggacaacagcaccctggccgtggacatctacaagggcggcgtggtgctgggctgctacttcggccccgccgccctgtacatctgggccgtgggcatcctggccgccggccagagcagcaccatgaccggcacctacagcggccagttcgtgatggagggcttcctgaacctgaagtggagcagattcgccagagtggtgctgaccagaagcatcgccatcatccccaccctgctggtggccgtgttccaggacgtggagcacctgaccggcatgaacgacttcctgaacgtgctgcagagcctgcagctgcccttcgccctgatccccatcctgaccttcaccagcctgagacccgtgatgagcgacttcgccaacggcctgggctggagaatcgccggcggcatcctggtgctgatcatctgcagcatcaacatgtacttcgtggtggtgtacgtgagagacctgggccacgtggccctgtacgtggtggccgccgtggtgagcgtggcctacctgggcttcgtgttctacctgggctggcagtgcctgatcgccctgggcatgagcttcctggactgcggccacaccgtgagcatcagcaagggcctgctgaccgaggaggccaccagaggctacgtgaagtag

SEQ ID NO: 69399 - DNA, 1449 bp, Artificial Sequence
  derived and/or modified sequence
atgagcatcgcctacctggaccccggcaacatcgagagcgacctgcagagcggcgccgtggccggcttcaagctgctgtggatcctgctgctggccaccctggtgggcctgctgctgcagagactggccgccagactgggcgtggtgaccggcctgcacctggccgaggtgtgccacagacagtaccccaaggtgcccagagtgatcctgtggctgatggtggagctggccatcatcggcagcgacatgcaggaggtgatcggcagcgccatcgccatcaacctgctgagcgtgggcagaatccccctgtggggcggcgtgctgatcaccatcgccgacaccttcgtgttcctgttcctggacaagtacggcctgagaaagctggaggccttcttcggcttcctgatcaccatcatggccctgaccttcggctacgagtacgtgaccgtgaagcccagccagagccaggtgctgaagggcatgttcgtgcccagctgcagcggctgcagaaccccccagatcgagcaggccgtgggcatcgtgggcgccgtgatcatgccccacaacatgtacctgcacagcgccctggtgaagagcagacaggtgaacagaaacaacaagcaggaggtgagagaggccaacaagtacttcttcatcgagagctgcatcgccctgttcgtgagcttcatcatcaacgtgttcgtggtgagcgtgttcgccgaggccttcttcggcaagaccaacgagcaggtggtggaggtgtgcaccaacaccagcagcccccacgccggcctgttccccaaggacaacagcaccctggccgtggacatctacaagggcggcgtggtgctgggctgctacttcggccccgccgccctgtacatctgggccgtgggcatcctggccgccggccagagcagcaccatgaccggcacctacagcggccagttcgtgatggagggcttcctgaacctgaagtggagcagattcgccagagtggtgctgaccagaagcatcgccatcatccccaccctgctggtggccgtgttccaggacgtggagcacctgaccggcatgaacgacttcctgaacgtgctgcagagcctgcagctgcccttcgccctgatccccatcctgaccttcaccagcctgagacccgtgatgagcgacttcgccaacggcctgggctggagaatcgccggcggcatcctggtgctgatcatctgcagcatcaacatgtacttcgtggtggtgtacgtgagagacctgggccacgtggccctgtacgtggtggccgccgtggtgagcgtggcctacctgggcttcgtgttctacctgggctggcagtgcctgatcgccctgggcatgagcttcctggactgcggccacaccgtgagcatcagcaagggcctgctgaccgaggaggccaccagaggctacgtgaagtag

SEQ ID NO: 69400 - DNA, 1674 bp, Artificial Sequence
  derived and/or modified sequence
atgtcaacggtagattacctcaacagcgtttccggggatcacggagagtcagcatccctcggtaatatcaacccagcttactctaaccctagcctgtctcagagccctggcgatagtgaggagtactttgccacatacttcaacgagaaaattagtatccctgaggaggaatattcatgtttttcttttcgaaagctgtgggccttcactggccctggattcctgatgtccatcgcttacctcgaccccggaaatattgaatcagatctgcagtccggggccgtggccggattcaaactcttatggattctgctactcgcaacgctggtgggcctcctgttgcaacgcttggcggcccgcctgggcgtagtgacaggcttgcacctggccgaggtctgccaccggcagtacccaaaagtaccccgagttatcctctggctcatggtggaactagccatcattgggtccgatatgcaggaggtaatcggaagtgcgatcgccatcaatcttctctccgtcgggcgcatcccactgtggggcggtgttctaattacaattgcggatacattcgtgttcctcttcctggacaagtacggactacgaaaattggaagcattttttggttttctgatcacaatcatggctctgacatttggctacgagtacgtgactgtgaaaccctcccagtctcaggttctaaagggaatgtttgttccatcatgcagcggatgcaggactccccaaatcgaacaggccgtggggatagtgggtgcggtgatcatgccccataacatgtacttacattcagctttagtgaagagccgccaggttaataggaacaataaacaggaagttagagaagccaataagtatttctttattgagagctgtatagcactgttcgtctcattcattattaacgtcttcgtagtgagcgtcttcgctgaagcgttcttcggcaaaactaatgagcaggtagtggaagtgtgtacaaataccagctcgccacacgctggactgtttccaaaggataacagcaccctggctgttgacatctataaggggggcgtagtcctaggatgctattttggaccagccgctctttacatttgggccgtagggattctggcagcagggcaatctagtacaatgacaggaacatacagcgggcagttcgtaatggaaggattcctaaatctgaagtggtcccgcttcgctcgggtggtgctgacaagatccattgcaattatccctaccctgctggtcgcagtgtttcaggacgtcgagcacctgacaggaatgaatgatttcctcaacgtgctgcagagtctccaactgccgttcgctttgatccccattctgactttcactagtcttcgtccagtgatgagcgactttgcgaacggcctggggtggaggattgccggcggtatcctggtattaatcatctgtagtataaacatgtacttcgtggtggtctacgtcagggacctgggacacgtcgcactctatgtggttgccgctgtagtgtcggtagcctatttggggtttgtcttctacctcggatggcagtgtttaatagctttggggatgtccttcttagattgtggccataccgtgtcaatcagcaagggcctattaactgaggaggctacacgtgggtatgtcaagtag

SEQ ID NO: 69401 - DNA, 1449 bp, Artificial Sequence
  derived and/or modified sequence
atgtcgatagcttatttggatccgggaaatatcgaaagcgacctgcagtccggcgccgtggctggttttaaactcctttggatactcctcctggccacactagtcgggctgctgctacagagactggcagcaaggcttggggtggtcactggccttcatctcgcagaggtgtgccaccgacagtacccaaaggtgccacgcgtgatcctttggctgatggtcgagctcgccataatcgggtcagatatgcaggaggtcattggcagcgccattgcaatcaatctgctgtccgtggggcgaattcccctctggggaggtgtgctcatcacaatcgctgatacttttgtatttctctttctggataagtacggcctgcgcaagctggaggcattcttcggattcctcatcactattatggccctcacttttgggtatgaatatgtgacagtcaagccctcccagagccaggtgttgaagggcatgttcgtaccgtcctgctctggctgtcgcactccccagattgagcaggctgtaggcatcgtgggcgcggtaataatgccgcataacatgtatctgcacagcgctcttgtgaagagtcgacaagtcaaccgcaataacaagcaagaggtgcgtgaggctaacaaatattttttcatcgaatcctgtatcgctctcttcgtgtctttcatcatcaatgtctttgtggtgtcagtcttcgcagaggcttttttcggtaagactaacgaacaggttgtcgaggtctgtactaacacaagctctccccatgcggggctgttccccaaggataatagtaccctggctgtggatatatacaaaggtggagtcgtactcggctgttacttcggcccagccgctctgtatatttgggctgtggggatattagctgccggccagtcttccacaatgaccgggacctactccggacaatttgttatggaggggttcctcaatctgaaatggtctcggttcgccagggtcgtcctgacccggtccatcgccatcattcctacactgctggtcgccgtctttcaggatgtggaacatttaaccgggatgaacgatttcctgaacgtgttgcaaagcctgcagttgccctttgcattgataccgattctgacgtttacgagtctcaggccagtaatgtctgatttcgccaatgggttaggctggcgaatcgctggtggaatactagtgcttatcatttgctctatcaacatgtactttgtggtcgtgtacgtccgggacctgggccatgttgcgttgtacgttgtggcagccgtagtttcagtggcatacctgggattcgtgttttatctggggtggcagtgccttattgccctcggcatgagctttctcgactgtggtcacacagtaagcatttctaaggggctgctgacagaggaagccactaggggatacgtgaagtag

SEQ ID NO: 69402 - DNA, 1674 bp, Artificial Sequence
  derived and/or modified sequence
atgagcacagtggactacctgaacagcgtgtctggggaccacggggagagcgccagcctgggcaacatcaacccagcctacagcaaccccagcctgagccagagccctggggacagcgaggagtactttgccacctacttcaatgagaagatcagcatccctgaggaggagtacagctgcttctccttcaggaagctgtgggccttcaccggccctggcttcctgatgagcatcgcctacctggaccccggcaacatcgagagtgacctgcagagcggggctgtggccggcttcaagctgctgtggatcctgctgctggccaccctggtgggcctgctgctgcagaggctggccgcccggctgggcgtggtgacaggcctgcacctggccgaggtgtgccaccggcagtaccccaaggtgcccagggtcatcctgtggctgatggtggagctggccatcatcggcagtgacatgcaggaggtgattggcagcgccatcgccatcaacctgctgtctgtgggccgcatccccctgtggggcggcgtgctgatcaccatcgctgacacctttgtgttcctgttcctggacaagtatggcctgaggaagctggaggccttcttcggcttcctgatcaccatcatggccctgaccttcggctatgaatatgtgacagtgaagcccagccagagccaggtgctgaagggcatgtttgtgcccagctgcagcggctgcaggaccccccagatcgagcaggccgtgggcatcgtgggcgccgtcatcatgccccacaacatgtacctgcacagcgccctggtgaagagccggcaggtgaacagaaacaacaagcaggaggtgcgggaggccaacaagtacttcttcatcgagagctgcatcgccctgtttgtgtccttcatcatcaacgtgtttgtggtgtctgtgtttgctgaggccttcttcggcaagaccaatgagcaggtggtggaggtgtgcaccaacaccagcagcccccacgccggcctcttccccaaggacaacagcaccctggccgtggacatctacaagggcggcgtggtgctgggctgctactttggacctgctgccctgtacatctgggccgtgggcatcctggccgccggccagagcagcaccatgacaggcacctacagcggccagtttgtgatggagggcttcctgaacctgaagtggagcagatttgcccgggtggtgctgaccaggagcatcgccatcatccccaccctgctggtggccgtgttccaggatgtggagcacctgaccggcatgaatgacttcctgaatgtgctgcagagcctgcagctgccctttgccctgatccccatcctgaccttcaccagcctgcggcctgtgatgtctgactttgccaacggcctgggctggagaattgctgggggcatcctggtgctgatcatctgcagcatcaacatgtactttgtggtggtgtatgtgcgggacctgggccacgtggccctgtatgtggtggccgctgtggtgtctgtggcctacctgggctttgtgttctacctgggctggcagtgcctgattgccctgggcatgtccttcctggactgtggccacacagtgtccatcagcaagggcctgctgacagaggaggccacccggggctacgtgaagtag

SEQ ID NO: 69403 - DNA, 1449 bp, Artificial Sequence
  derived and/or modified sequence
atgagcatcgcctacctggaccccggcaacattgaaagtgacctgcagagcggggctgtggccggcttcaagctgctgtggatcctgctgctggccaccctggtgggcctgctgctgcagaggctggccgcccggctgggcgtggtgacaggcctgcacctggccgaggtgtgccaccggcagtaccccaaggtgcccagggtcatcctgtggctgatggtggagctggccatcattggaagtgacatgcaggaggtgattggcagcgccatcgccatcaacctgctgtctgtgggccgcatccccctgtggggcggcgtgctgatcaccatcgctgacacctttgtgttcctgttcctggacaagtatggcctgaggaagctggaggccttcttcggcttcctgatcaccatcatggccctgaccttcggctatgaatatgtgacagtgaagcccagccagagccaggtgctgaagggcatgtttgtgcccagctgcagcggctgcaggaccccccagatcgagcaggccgtgggcatcgtgggcgctgtgatcatgccccacaacatgtacctgcacagcgccctggtgaagagccggcaggtgaacagaaacaacaagcaggaggtgcgggaggccaacaagtacttcttcatcgagagctgcatcgccctgtttgtgtccttcatcatcaacgtgtttgtggtgtctgtgtttgctgaggccttcttcggcaagaccaatgagcaggtggtggaggtgtgcaccaacaccagcagcccccatgctggcctcttccccaaggacaacagcaccctggccgtggacatctacaagggcggcgtggtgctgggctgctacttcggccctgctgccctgtacatctgggccgtgggcatcctggccgccggccagagcagcaccatgacaggcacctacagcggccagtttgtgatggagggcttcctgaacctgaagtggagcagatttgcccgggtggtgctgaccaggagcatcgccatcatccccaccctgctggtggccgtgttccaggatgtggagcacctgaccggcatgaatgacttcctgaatgtgctgcagagcctgcagctgccctttgccctgatccccatcctgaccttcaccagcctgcggcctgtgatgtctgactttgccaacggcctgggctggagaattgctgggggcatcctggtgctgatcatctgcagcatcaacatgtactttgtggtggtgtatgtgcgggacctgggccacgtggccctgtatgtggtggccgctgtggtgtctgtggcctacctgggctttgtgttctacctgggctggcagtgcctgattgccctgggcatgtccttcctggactgtggccacacagtgtccatcagcaagggcctgctgacagaggaggccacccggggctacgtgaagtag

SEQ ID NO: 69404 - DNA, 1674 bp, Artificial Sequence
  derived and/or modified sequence
atgagcaccgtggactacctgaacagcgtgagcggcgaccacggcgagtctgcctcattgggaaacattaacccggcatactctaacccaagtttgtcccagagtcccggagactctgaggagtattttgcgacatatttcaatgaaaagattagcataccagaggaagagtactcatgcttttcatttagaaaattatgggcatttactggccctggttttctcatgagcatcgcgtacctggaccctgggaacatcgaatctgatctacagtccggggcggtagccggcttcaagctgctctggatccttctcctcgccacactcgtgggcctcctcctgcagcgcctggcagcacggctgggggttgtgacagggttgcatttggcagaggtgtgccatcgccagtaccccaaggtgcctcgtgtcatcttatggctcatggtcgagcttgccatcatcggtagtgacatgcaagaagtgataggctccgccatagctatcaatttgctttcagtggggcgaatacccttatgggggggtgtcttaattacaatcgcagacacctttgtattccttttcctggacaagtatggcctgagaaaattagaagccttctttggcttcctcattacaattatggctttaacctttggctacgaatacgtgaccgtgaagccaagccaaagccaggtgctaaagggtatgtttgtaccctcttgcagcggctgccgcaccccccagatagagcaggcagtgggaatagtaggagccgtgatcatgccgcacaacatgtacttgcattctgcattagttaaatcacgtcaggtcaaccggaataacaagcaagaggtccgcgaagctaataagtatttttttattgagagctgcatagccctatttgtttctttcatcatcaatgtatttgttgtgtccgtgttcgccgaagccttcttcggcaagacaaatgagcaggttgtcgaagtctgcactaacacatcctcaccccatgccggcctgtttcctaaggacaactcgacactcgcagtggatatctataaaggaggagtagttcttggctgctactttggcccagctgccctgtacatctgggccgttggcatactggcagctgggcagagcagcactatgactgggacttactctggccagttcgtgatggagggtttcctgaacctcaaatggtctcgctttgccagagtcgttcttaccagatcaattgccataatcccgacattgctcgtcgcagtgtttcaggatgtggaacacctaacagggatgaacgattttctgaatgtgctgcagagcctccagctgccattcgcactgatacccatccttacattcacttctctgagacctgttatgtcagactttgctaatggcctagggtggcgcattgctggagggatactggtgctgattatatgtagcataaacatgtattttgtggttgtctacgtgcgagacttgggccatgtggctctatatgtcgtggcggctgttgtgtctgtggcttatctggggttcgtcttctatctgggatggcagtgtctgattgccctaggcatgtctttcttggattgcggccatacagtgagcatctctaaagggctgctgaccgaggaggccacacgtggatacgtgaagtag

SEQ ID NO: 69405 - DNA, 1449 bp, Artificial Sequence
  derived and/or modified sequence
atgagcatcgcctacctggaccccggcaacatcgagagcgacctgcaatcgggggctgtggccggcttcaagttgttatggattctactgttagcgacgcttgtggggctcctcctgcagcggttggcagccagactcggcgttgtgactgggttacacctggctgaagtgtgtcacagacagtaccctaaggtgcccagagtaatactgtggctcatggttgagctggctatcattggatctgacatgcaagaagttattggatcagctattgcaataaatttgctgagcgtgggccggatccctctgtgggggggggttttgatcacgattgctgacacattcgtctttctcttcttagacaaatacggcctgcgcaaactggaagccttttttggctttctgataacaataatggctcttacatttggctacgaatacgtcactgtaaagccttctcagtctcaagttctaaagggcatgtttgtgccatcatgctctgggtgcagaacgcctcaaatagagcaggcagtgggcatcgtcggagccgtcatcatgccccataacatgtacctccactccgctctcgtgaaatcgcgccaggtgaaccgtaacaataagcaagaggtgagggaggccaataaatacttcttcattgaatcgtgtatcgcattgtttgtgtcgtttattatcaatgtctttgtggtaagcgtcttcgccgaggccttctttggtaagactaatgagcaggtcgtagaggtttgcacaaataccagttccccccatgccggtctgtttcccaaggacaactccaccctggccgtggatatctacaagggtggagtggtcttgggatgctacttcggccctgccgctctctatatctgggcggtgggaatcctggctgccggacagagctccactatgacagggacatattctggacaatttgtgatggagggttttttaaacctgaaatggtctaggtttgccagggtagtactgacgagaagcattgccatcatacccaccttactggtggccgtatttcaggatgtggaacatctaactgggatgaatgacttcttaaatgtgctgcagtcccttcagctgcccttcgcgctaattcctattcttactttcacgagtctccgaccagtcatgtccgattttgccaacggcttgggatggagaatagccggaggcatccttgttttgattatctgcagcattaacatgtatttcgtcgtggtgtatgttagggacctggggcatgtggccctatatgtggtggctgctgttgtaagtgtggcctatctgggctttgtattctacctcggatggcaatgcctgatcgccctgggaatgagcttcctggactgtggccacaccgtgagtatatccaaggggctactgacagaggaggccacacgaggatacgtgaaatag

SEQ ID NO: 69406 - DNA, 1674 bp, Artificial Sequence
  derived and/or modified sequence
atgagtacagtggactatctgaatagcgtgagcggcgaccatggcgagtctgcatctcttggcaatataaatcctgcctattctaacccttccctgtcgcagtcaccaggagatagtgaggagtatttcgcaacttacttcaacgagaaaatttccattcctgaggaagagtactcctgcttctcttttcggaaactgtgggcatttaccgggccaggattcctgatgagcattgcgtatctcgatccagggaacattgagtctgaccttcagagtggcgcagttgcagggttcaaactgctgtggatacttctgctggcgactctcgtaggacttctgctccagcgactggcagcccgactgggggttgtaactggattacacttggccgaggtctgtcatcggcagtacccgaaagtgccaagagtgatactctggctcatggtcgagctggcaatcatcggaagcgatatgcaggaggttattggctcagcaatcgccattaacctcctgtccgtgggaagaatcccgttatggggtggggtcctgataaccatagctgatacgttcgttttcttgttcctagacaaatatggtctccggaaactcgaggcgttcttcggattcctgattaccataatggccctgacatttggctacgagtatgtgactgtgaagccctctcaaagccaggtgttgaaaggcatgttcgtcccaagctgtagcggttgtagaacaccacagattgagcaggcggtgggtattgtcggcgctgtgatcatgcctcacaacatgtatctgcattcggccttggtgaaatcaagacaagtgaaccggaacaataagcaggaggttcgcgaagccaacaagtactttttcatcgagtcctgtatcgccctgttcgtgtcctttattataaatgtttttgtggtttctgtttttgcagaggccttctttgggaagaccaacgaacaggttgtcgaggtctgcactaacaccagttcaccacacgctgggttatttccgaaagacaactccacgctcgctgtggatatttacaaggggggtgttgtgctcggctgttacttcgggcctgctgcgttgtatatctgggctgtgggcatcctggccgcaggccagtcctccacgatgaccgggacttatagcggccagtttgtcatggaaggttttttaaatctaaaatggtctcgctttgccagggtggtgctaacccgctcaatcgcgattatccctacactgctagtagccgtgttccaggacgtggagcacctcacaggtatgaacgattttcttaatgtcttgcagtccctccagctcccattcgcactcattcccattcttacatttactagcctacgccctgtgatgagtgacttcgcaaacggcctgggctggcggattgctggaggaatcctggttttaattatttgttcgatcaacatgtactttgtggttgtgtacgtgcgggaccttgggcatgtagccctatatgtagtagctgccgtggtgtccgtggcttacctcggcttcgtattttatctcggatggcaatgcctgattgcgcttggcatgagtttcttggactgtggtcacacagtgtctatttcaaagggtctgctcacagaagaagccacgcgcggatatgtcaagtag

SEQ ID NO: 69407 - DNA, 1449 bp, Artificial Sequence
  derived and/or modified sequence
atgagcatcgcttacctagatcccggtaacatcgaatctgatttacagtcgggcgcagtggctggattcaaattactctggatactgcttctggcaaccctggttggactgctcttacagcggttagcagccaggctcggtgtcgtcactggcctgcacctggctgaagtgtgccatagacaatacccaaaggtacctagggtgattctgtggcttatggtggaattagccattattggcagtgatatgcaagaggtcatcggatcggccatcgccataaacctactttccgtgggtcgtatccctttgtggggtggagtgctaatcactatcgctgataccttcgtgttcctgttcctcgacaaatacggcctcagaaagctggaagccttctttggttttctgattacaattatggccctgacttttggttatgaatatgtcacagtcaaacccagtcagagccaggtgctgaaaggaatgtttgtacctagttgttctgggtgccgcacacctcagattgagcaggcagtcgggatcgtcggggctgtgataatgccgcataacatgtatttgcactctgcactcgttaagagccgtcaggtgaaccgaaataacaaacaagaggtgcgggaggccaataagtattttttcattgaaagctgtattgccctattcgtttccttcattattaacgttttcgtggtgtctgtgttcgctgaagcgtttttcggcaaaactaatgagcaggtggtggaggtgtgcacaaacactagtagccctcacgccggactattcccaaaggacaatagcaccctggctgtggatatctacaagggaggggtagtgctcggatgttactttggccctgccgctttatatatatgggccgttggcatccttgctgccggacagtctagcacgatgactggcacttatagtggacagtttgtgatggaagggtttttgaacctgaaatggagcaggtttgccagggtcgttcttactaggagcatcgccataattcctacactcctagttgcggtgtttcaggatgtcgagcacttaacgggcatgaacgatttcctcaacgtcctgcagtccctgcagctgccctttgctcttattccaattttgacattcacatccttgcgccctgtgatgagtgattttgccaacgggcttgggtggagaattgccggaggcatcttggtgttgatcatatgctctatcaatatgtacttcgtggtggtgtacgtgagggacctcggccacgtcgccctttacgtcgtggcagccgtggtgtcagtggcatacttgggcttcgttttctacctggggtggcagtgtctcattgccctaggtatgtctttcctggactgcggccatacagtaagtatatccaagggcctgttgacagaggaggcaacgagaggctatgttaagtag

SEQ ID NO: 69408 - DNA, 1937 bp, Artificial Sequence
  derived and/or modified sequence
agagtacaaagggttcctgcttggtggttttgctgcagcttcagagtttagcctgaactgtggcaggattttgtaacttgcacattttttgagaagtctgatggaggtataatgtccacggtcgattatttgaacagtgtttctggagatcatggggagtctgccagtcttggtaacatcaaccctgcctatagtaatccctctctttcacagtcccctggggactcagaggagtacttcgccacttactttaatgagaagatctccattcctgaggaggagtactcttgttttagctttcgtaaactctgggctttcaccggaccaggttttcttatgagcattgcctacctggatccaggaaatattgaatccgatttgcagtctggagcagtggctggatttaagttgctctggatccttctgttggccacccttgtggggctgctgctccagcggcttgcagctagactgggagtggttactgggctgcatcttgctgaagtatgtcaccgtcagtatcccaaggtcccacgagtcatcctgtggctgatggtggagttggctatcatcggctcagacatgcaagaagtcattggctcagccattgctatcaatcttctgtctgtaggaagaattcctctgtggggtggcgttctcatcaccattgcagatacttttgtatttctcttcttggacaaatatggcttgcggaagctagaagcattttttggctttctcatcactattatggccctcacatttggatatgagtatgttacagtgaaacccagccagagccaggtactcaagggcatgttcgtaccatcctgttcaggctgtcgcactccacagattgaacaggctgtgggcatcgtgggagctgtcatcatgccacacaacatgtacctgcattctgccttagtcaagtctagacaggtaaaccggaacaataagcaggaagttcgagaagccaataagtactttttcattgaatcctgcattgcactctttgtttccttcatcatcaatgtctttgttgtctcagtctttgctgaagcattttttgggaaaaccaacgagcaggtggttgaagtctgtacaaataccagcagtcctcatgctggcctctttcctaaagataactcgacactggctgtggacatctacaaagggggtgttgtgctgggatgttactttgggcctgctgcactctacatttgggcagtggggatcctggctgcaggacagagctccaccatgacaggaacctattctggccagtttgtcatggagggattcctgaacctaaagtggtcacgctttgcccgagtggttctgactcgctctattgccatcatccccactctgcttgttgctgtcttccaagatgtagagcatctaacagggatgaatgactttctgaatgttctacagagcttacagcttccctttgctctcatacccatcctcacatttacgagcttgcggccagtaatgagtgactttgccaatggactaggctggcggattgcaggaggaatcttggtccttatcatctgttccatcaatatgtactttgtagtggtttatgtccgggacctagggcatgtggcattatatgtggtggctgctgtggtcagcgtggcttatctgggctttgtgttctacttgggttggcaatgtttgattgcactgggcatgtccttcctggactgtgggcatacggtaagcatctctaaaggcctgctgacagaagaagccacccgtggctacgttaaataacactggattagtctgtcttctgcaggtagccatcagagccagtgtgtttctatggtttactgtgtgaacatagccaaaagtatgtgccgttgcacagactgtgtttatgactcaaccgttggttggaaaagactttgtttcatgtgtatttg

SEQ ID NO: 69409 - DNA, 519 bp, Artificial Sequence
  derived and/or modified sequence
atggccatcagcaaggtgttcgagctgggcctggtggccggcctgggccaccaggagttcgccagacccagcagaggctacctggccttcagagacgacagcatctggccccaggaggagcccgccatcagacccagaagcagccagagagtgccccccatgggcatccagcacagcaaggagctgaacagaacctgctgcctgaacggcggcacctgcatgctgggcagcttctgcgcctgcccccccagcttctacggcagaaactgcgagcacgacgtgagaaaggagaactgcggcagcgtgccccacgacacctggctgcccaagaagtgcagcctgtgcaagtgctggcacggccagctgagatgcttcccccaggccttcctgcccggctgcgacggcctggtgatggacgagcacctggtggccagcagaacccccgagctgccccccagcgccagaaccaccaccttcatgctggtgggcatctgcctgagcatccagagctactactag

SEQ ID NO: 69410 - DNA, 519 bp, Artificial Sequence
  derived and/or modified sequence
atggccatctctaaggtattcgaacttggcctggtggccggactgggccatcaagagttcgccaggccatccagaggctatctggctttcagagacgacagcatctggccacaggaggagccagcgatccgtccacggagttcacaaagggtgcctcccatgggcatacagcacagtaaggaactcaatcgcacctgttgcctcaacggaggcacctgcatgttgggaagcttctgtgcatgtcccccatctttttatgggaggaattgcgagcacgatgttcggaaggaaaattgtggctcagttcctcacgatacgtggctgccaaagaagtgcagcctgtgcaagtgttggcacggtcagctgaggtgctttccccaggctttccttcctggttgcgacggcctggtgatggacgagcatctggtggccagccgcacacccgaactgccccctagtgctagaactactacgttcatgttagtaggaatctgcctgagcattcagtcttactattag

SEQ ID NO: 69411 - DNA, 519 bp, Artificial Sequence
  derived and/or modified sequence
atggccatcagcaaggtgtttgagctgggcctggtggccggcctgggccaccaggagtttgcccggcccagccggggctacctggccttcagagatgacagcatctggccccaggaggagcccgccatccggcccaggagcagccagagggtgccccccatgggcatccagcacagcaaggagctgaacagaacctgctgcctgaatggaggcacctgcatgctgggcagcttctgtgcctgcccccccagcttctacggcaggaactgtgaacatgatgtgaggaaagaaaactgtggctctgtgccccatgacacctggctgcccaagaagtgcagcctgtgcaagtgctggcacggccagctgcgctgcttcccccaggccttcctgcccggctgtgatggcctggtgatggatgagcacctggtggccagcaggaccccagagctgcccccatctgcccggaccaccaccttcatgctggtgggcatctgcctgagcatccagagctactactag

SEQ ID NO: 69412 - DNA, 519 bp, Artificial Sequence
  derived and/or modified sequence
atggccatcagcaaggtgttcgagctgggcctggtggccggcctggggcaccaggagttcgcgaggcctagccggggttacctggccttccgggatgattcgatatggcctcaagaggagccagctatacgccctagatcctcccaaagagtgcctcccatgggcatccagcacagcaaggaattgaaccggacatgttgcctcaatggcggcacttgtatgctggggtctttctgtgcctgccccccaagtttctacgggcggaattgcgagcatgacgtcagaaaggagaactgtgggtcagttccacacgacacttggttgccaaagaagtgctctctgtgcaaatgctggcatggacaactgcgctgttttccacaggccttcctacccggctgtgatgggctggtcatggatgagcaccttgtggcctctagaacaccagaactccccccctctgccaggaccaccacgtttatgctagtcggcatctgcctcagcatccagtcttattactag

SEQ ID NO: 69413 - DNA, 519 bp, Artificial Sequence
  derived and/or modified sequence
atggctatctcgaaggtgtttgagctgggtctcgtcgcaggcttagggcatcaggagttcgctcggcctagtcgcggatatttagcctttcgcgacgactctatatggcctcaggaggaacctgccattcgccctaggtcatctcagagagtgccgcctatgggtatccagcattctaaggaactgaacaggacatgctgtctcaacggcggaacttgcatgctagggagcttctgtgcgtgcccgccttcattttacggtcggaattgcgaacacgacgtgcgcaaagaaaattgcggatctgttccacatgacacttggctgccgaagaagtgctctctctgtaagtgttggcatggccagttgaggtgcttcccccaagccttccttcctggctgcgatggtctggtcatggacgagcacctagtggcctcccgcacccccgagcttccaccttccgctagaactacaacctttatgttagtgggcatctgcctctcgattcagtcttactactag

SEQ ID NO: 69414 - protein, 406 aa, Artificial Sequence
  derived and/or modified sequence
MDIATGPESLERCFPRGQTDCAKMLDGIKMEEHALRPGPATLGVLLGSDCPHPAVCEGCQRPISDRFLMRVNESSWHEECLQCAACQQALTTSCYFRDRKLYCKQDYQQLFAAKCSGCMEKIAPTEFVMRALECVYHLGCFCCCVCERQLRKGDEFVLKEGQLLCKGDYEKEKDLLSSVSPDESDSVKSEDEDGDMKPAKGQGSQSKGSGDDGKDPRRPKRPRTILTTQQRRAFKASFEVSSKPCRKVRETLAAETGLSVRVVQVWFQNQRAKMKKLARRHQQQQEQQNSQRLGQGEPGPGQGLGQEVLSSRMEGMMASYTPLAPPQQQIVAMEQSPYGSSDPFQQGLTPPQMPGNDSIFHDIDSDTSLTSLSDCFLGSSDVGSLQARVGNPIDRLYSMQSSYFAS

SEQ ID NO: 69415 - DNA, 1221 bp, Artificial Sequence
  derived and/or modified sequence
atggacatcgccactgggccagagtccttggaacggtgctttccaagaggccagacagattgcgctaaaatgttggatggcatcaagatggaagaacatgccctgcgacctggccccgctacactcggggtgttgcttggcagcgattgtccacatccagcagtgtgcgaggggtgtcagagacccatatctgaccgctttcttatgcgcgtcaacgaatctagttggcacgaagaatgcctacagtgcgcggcatgccagcaagctctgacaacttcttgctacttccgcgatagaaaactttactgcaaacaggactaccagcaactgttcgcagccaagtgctccggctgcatggagaagatcgcccccacagagtttgtgatgcgggctctagagtgtgtttatcacctcggctgtttttgctgttgcgtctgtgagcgccagctgcggaaaggcgatgagtttgttctgaaggagggacaacttctgtgcaaaggtgattatgagaaagaaaaggatcttctttcgtcggtgtcccccgatgagagtgactctgtgaagtctgaggatgaagacggtgacatgaagcctgccaaagggcaaggatcccaatccaaggggagcggtgacgacggtaaagatcctaggaggcccaaaagacccaggaccatactgacgactcagcagaggcgcgcttttaaagcatccttcgaagtctcttcaaagccttgccggaaggtgcgtgaaactctagctgcagaaaccgggctgtctgtaagagtggttcaagtgtggttccaaaaccagagagccaagatgaaaaagctggcacggaggcaccaacagcagcaagaacaacaaaattcacagcggctgggtcagggcgaaccgggccctgggcagggattgggacaggaggtgctatcatcgcgaatggaaggtatgatggcttcgtatacaccattagctcctccccagcagcagatagttgccatggaacagtccccttacggctcttcagacccgtttcagcagggcttaacaccacctcagatgcctggcaacgattctatttttcacgatattgacagcgacacctccttgaccagcctgtccgactgctttctcggaagctccgatgtcggttctttgcaggcaagggtcggtaatcctattgacaggctgtatagtatgcagtcgtcctacttcgcctcatag

SEQ ID NO: 69416 - DNA, 1221 bp, Artificial Sequence
  derived and/or modified sequence
atggacatcgccactggacctgagagcctggagcgctgcttcccccggggccagacagactgtgccaagatgctggatggcatcaagatggaggagcacgccctgcggcccggccctgccaccctgggcgtgctgctgggcagtgactgcccccaccctgctgtgtgtgagggctgccagaggcccatcagtgaccgcttcctgatgagggtgaatgaaagctcctggcatgaagaatgtctgcagtgtgccgcctgccagcaggccctgaccaccagctgctacttccgggacaggaagctgtactgcaagcaggactaccagcagctgtttgctgccaagtgcagcggctgcatggagaagatcgcccccacagaatttgtgatgagggccctggagtgtgtgtaccacctgggctgcttctgctgctgcgtgtgtgagcggcagctgaggaaaggagatgaatttgtgctgaaggagggccagctgctgtgcaagggggactatgagaaggagaaggacctgctgagctctgtgtccccagatgaaagtgacagcgtgaagtcagaagatgaagatggagacatgaagccagccaagggccagggcagccagagcaaaggaagtggagatgatggcaaggacccccggcggcccaagaggcccaggaccatcctgaccacccagcagaggcgggccttcaaggccagctttgaggtgagcagcaagccctgcaggaaggtgcgggagaccctggccgctgagaccggcctgtctgtgcgggtggtgcaggtgtggttccagaaccagagggccaagatgaagaagctggcccggcggcaccagcagcagcaggagcagcagaacagccagaggctgggccagggcgagcccggccctggccagggcctgggccaggaggtgctgagcagcaggatggagggcatgatggccagctacacccccctggccccaccccagcagcagatcgtggccatggagcagagcccctacggcagcagtgaccccttccagcagggcctgaccccaccccagatgcctggaaatgacagcatcttccatgacatcgacagcgacaccagcctgaccagcctgagtgactgcttcctgggcagcagtgatgtgggcagcctgcaggcccgggtgggcaaccccatcgaccggctgtacagcatgcagagcagctactttgccagctag

SEQ ID NO: 69417 - DNA, 5809 bp, Artificial Sequence
  derived and/or modified sequence
gcgtcccatggatatagcaacaggtcccgagtcgctggagaggtgcttccctcgcgggcagacggactgcgccaagatgttggacggcatcaagatggaggagcacgccctgcgccccgggcccgccactctgggggtgctgctgggctccgactgcccgcatcccgccgtctgcgagggctgccagcggcccatctccgaccgcttcctgatgcgagtcaacgagtcgtcctggcacgaggagtgtttgcagtgcgcggcgtgtcagcaagccctcaccaccagctgctacttccgggatcggaaactgtactgcaaacaagactaccaacagctcttcgcggccaagtgcagcggctgcatggagaagatcgcccccaccgagttcgtgatgcgggcgctggagtgcgtgtaccacctgggctgcttctgctgctgcgtgtgtgaacggcagctacgcaagggcgacgaattcgtgctcaaggagggccagctgctgtgcaagggtgactacgagaaggagaaggacctgctcagctccgtgagccccgacgagtccgactccgtgaagagcgaggatgaagatggggacatgaagccggccaaggggcagggcagtcagagcaagggcagcggggatgacgggaaggacccgcggaggcccaagcgaccccggaccatcctcaccacgcagcagcgaagagccttcaaggcctccttcgaggtctcgtcgaagccttgccgaaaggtccgagagacactggcagctgagacgggcctcagtgtgcgcgtggtccaggtctggtttcagaaccaaagagcaaagatgaagaagctggcgcggcggcaccagcagcagcaggagcagcagaactcccagcggctgggccagggtgagccggggccggggcagggcctgggccaggaggtcctgtccagccgcatggagggcatgatggcttcctacacgccgctggccccaccacagcagcagatcgtggccatggaacagagcccctacggcagcagcgaccccttccagcagggcctcacgccgccccaaatgccagggaacgactccatcttccatgacatcgacagcgatacctccttaaccagcctcagcgactgcttcctcggctcctcagacgtgggctccctgcaggcccgcgtggggaaccccatcgaccggctctactccatgcagagttcctacttcgcctcctgagagccagccaggcgcacggacgcttgggcaggggcctgggggggactgccagcctctgcggccagcctggccacccccgccctgctctccgcacagactacagacagccatacggtgccctcccctcggccagctgggcctgaccactgtgcccgttgggtacagccagaccggtagatgggcacagcctgggcaggggctgtgtcctgcccacagagaccttgtcatccccagggacccagagctctcggacggccactcgcctcccagccccacctcggcctccatcgcctcctccccatctcttttttgggaagcttaaattctctctatttttttaaatgtcctctctgtgtccatggccctccatgcaagccccaggacaatggtgtcatgaggcggtgacctgagaagcgtgtgtacctgtgccccagcaagggcaggggtggcctctgggggcaggcccactgcctggaaccgcacacccctcagcctgagtctggagcagcagtggagaggggcctgaggggaggcactgtcaggaggcgggctcggagcctgagcctgggcaggcgcaaagggacagagaggcacgtgcagacacatgcacacttgcagacaaacccacgcaaacacacacacagctgtatggggacaccagaagggacagggatgctcagcgggtctgtcctgccttgtcagaaagagaaaaggaggccaggcaggggaccccccagttcttaagagcgattggaaagggaggaaggggagaggaagaggcgaacttgaagcatcggacccagttgtatcccagcctgggcccaaatgggggcagcctgggcagggagggcagccccaggccccaccaactctagaggcagatggagcccccagaaccaggtagcatcagaccagacaacagagcctccaggggtcagggacttcagaagcacctgctgggcaccccatctgcaatgtggtcctctccccagccacctctgcctcccctcacatacctccagtgacaaggagctcactaggtcagcgagcccacagcagctgtgctgtcctgcatcccagagccaggcttccccagctctccctcttaacactgtcccccagcaggcctccggctgtccctctaaaggtgtggggcaggtatcacttcaccttcccactgatgtcagccggccagaagtgagcaggcacatcacctctcctgctgtggcacccttcctctgttaatttggcccaaaagacaatgatttggccacatgaccttagagattcaccctgccctgctgtagctaaatccctgggccccacacgcaagtgacagctaagccacatctgttttctgtgtatatgcaggatgggggcacctactgttttgttttgttttgttttgttttgttttgttttgttttgttttgttttgtttgagacggagtttcgctcttgttgcccaggctggagtgcaatggcgcgatctcggctcaccacaacctccgcctcccaggttcaagtgattctgatgcctcagcctccctagtagctgagattacaggcatgcgccaccacacccagctaattttgtatttttagtagcaacggggtttctccatgttggtcaggctggtctccaacccccgacctcaggtgatccgcctgcctcggcctcccaaagtgctgggattacaggcgtgagccaccgcacccagtctgcacttactgtttagactgaatgagggaccgtgacctctttccttttccattccttcttactcgattcattccagcctgtggaatttctctgcaccctgattcagtgaccactgctctcctctctcccagcacatctgcccagtgaggagttggccctgggtctcacctgaggtgtgtggaccgggctggcctctccctgtttgacattggcccattaatgcatcctctttgggggacacattccaattgcatttcctgcccccttctcccagggcaattgcagaagattgtgtcaggcgccctgctggaagtcaggtgcactagatccatccccagccccagtctgctcaactctatccctgtcagagcaaggaggctgggctgctggggcctgactggtgagcccaccctgtcccctggtgatcactgtgtccccttgttcaggtgctcacaaccctacctttaactctgaggtcaagccctaggccaccaccctaaagtctgcctggtccaacctttgagcaagtaaggataatgaatgtcccttttccacctttggggccctctgcctggatctctggaatcctctaagttcaacctgttctgtggttttgctcccgtttgctgggaaattcagtccccccagaatgtcctgggccaacctccttgcctgacatgtggcctcgtgtcacccattgggccccagcagccagctagcccttctgcagctcttcttacaaacagagcctctccaaggacctcagttgatgttctggtccttctgccgcctcagcccaccagggtccgtgccaccatgggtctcttgagcagcagctgcactggcttctggagagacacccctctttctccttttgcacatgcaccatctgaatcgtgccagggacatcctgggcagattcaggggcagatgccctatcccccaggagacctggcccttctctctcagacccaataagttggaagggacgtcagaagcggtcatctcatctgccccttattttatagttggaaaccctgaggcaagagagggaaagaggcctgtccaaggtccgggttagtgacagagctgagctgagaacagggacgttgtgccccactgtcccctgtggtttgtgaatgacctccaggtcagggggtcacaacttgttcttagtaaacttgccagctgttggggtcacatattcccattctggggcctcacaaacccccgaatccagccgggaccccatgccaggagctggtctagggacagcatgcttgtgacccacagactgttaaagccagaagggacctcagagagtcccttatgctggaggcgccctgtcagccgtggctaggggccccttgctctatgctgtgccttgctgcccacaggctcccagacaccagtgcccactctgcccagccccggactgggtgtggctcgcagatgaacaagatgcagggcctgccttgaggggtgtctcctagaaggaaagccagactctccggcccagccagagagtccagacatggcagggacccgtttctcagatgaggagcctgaggctcagagaagggaggcgatgtgttcagggccacccagcagaagcctgtggggctgggcaaccttctcccactttatgggaggagctgcagccttggctgggagctgggcggggagtagccaggaccaccccttgcccgtgccgtgacatggaaccttcatcactaagggggctggagtgggaagagggagataactgtgtggtctccagagcaaaagagaatgagaggtgggcagggggagtcttggcaaaagaccaagttccacttccctgctggggaagtcaaggctcagaaagaggaaataattgccccaggtaacacagggcagaggagggacaaaaagctgggcatggccccagccagagcctcatctgcctactccgtgaagcctcccaggtactctgctatcctgggaaacgcacagggaggccacacagagacactgctcacaagagtcagaccaaggtgccagcacagcctggaaagagctcagaaagggggttggtgcacgtggctgggcatcttaggaggcttcctgagggtgggtaaaggtgggaaggccctggcgctgcatcagatgagcagggcctggcagggacaagcctcttctcctttgggaagccctgcagcctcctagcaagaggctgattccccactctgcccccatctgaatgtccttttcatgttgcacgcagggaacctcaggaaggaggattgcctgatgcctgcctggctccatccttgagctctgggcaccacctagggtgagggagagcctgcagctctggggctaagtctgccctggggggaaagggctccacgctcacacgcacgcgctcgcacacacacactcacacctggacgcacacggaggcttgcggacccatactcacaggcacatgtggcctggggactgggggagcaggaaagacccctccaacatttggcccttggaaggcaccattgccaatgagcctctttgctggttcccccgaccccacctgggggtcccatgggagcccagcccagccaggtgtggggatgggccaccggccattcctgttttccttgtacagacagattctcactacccacccgccatccccagacacattttatttaataacttgtcattgttaaattatttattagcgtttaccacaccaccacccccaccctgccctccactctcaccttccacctcttcccacaacagcagaaaatggaaacaacaacaaaaaaagatgagacatcagtatatttgtaaataaaccgacctgtacactc

SEQ ID NO: 69418 - DNA, 1221 bp, Artificial Sequence
  derived and/or modified sequence
atggacatcgccaccggccccgagagcctggagcggtgcttccccagaggccagactgactgcgccaaaatgctcgacgggatcaagatggaagagcatgccctccgccccggccctgcaactctcggagtcctccttggatcggactgcccccaccctgctgtttgcgagggatgtcaaaggcctatttcggatcgattcctaatgagagtcaatgaaagctcctggcacgaggaatgcttacagtgtgcggcttgccaacaggcccttacaacgtcttgctacttcagagaccggaagctttattgtaaacaggattaccagcagctctttgcagccaaatgttcaggatgtatggaaaagatcgctcccacggagttcgtaatgagagccctggaatgcgtgtaccacctgggctgtttctgttgttgcgtctgtgagcgccagctgagaaaaggtgatgagttcgtgctcaaggagggtcagctactttgcaagggagattatgagaaagagaaagatctcctgagttcggtgagcccagacgaatcagatagcgtaaagagcgaggacgaagatggagacatgaaacctgcaaaaggacagggttcccagagtaagggatcaggtgacgacggcaaagatcctcgcaggcccaagcggcctcgcacaatattgaccacacagcagcgccgtgccttcaaggcttcattcgaggtatcctcaaagccttgtaggaaggtacgcgagaccctcgctgcagagaccgggctgtcagtacgggtggtacaggtgtggtttcagaatcaacgcgccaaaatgaagaagctcgcccgtcggcaccaacagcagcaagagcagcagaatagtcagagacttggccagggggaaccaggccctggccagggcctcgggcaggaggtcctcagttcacgcatggaaggaatgatggcgtcttatacccctctcgcccctcctcagcaacaaatcgtggcaatggagcagagcccctacggaagctctgacccttttcagcaagggctgaccccaccccagatgcccggaaatgactcaatcttccacgacattgactccgatacttctctcacttccctgtcagattgcttcctgggttctagcgacgttggatctctgcaggcccgcgtcggaaacccgatcgaccgtctttacagtatgcagtctagctatttcgccagttag

SEQ ID NO: 69419 - DNA, 1221 bp, Artificial Sequence
  derived and/or modified sequence
atggacatagccaccggcccagaaagtttggaaagatgttttcctaggggacagacagactgcgcaaagatgttggatggcataaaaatggaagaacatgcactgagaccaggcccagcgacactaggggtactcttagggtcagattgtccccatcccgctgtgtgtgagggttgccagcgaccaatttctgacagattcctcatgagagtcaacgaatcttcctggcacgaagaatgtctgcagtgcgccgcatgtcagcaggccctcacaacatcctgctattttcgtgatagaaaactgtattgtaagcaagattaccagcagctattcgccgcaaaatgctctggatgtatggagaagattgcgccaacggagtttgtcatgcgggctctggaatgcgtgtatcatcttggttgtttttgttgctgtgtgtgcgaacggcagctgaggaaaggcgacgaattcgtgctcaaggaggggcagcttctgtgcaaaggcgactacgaaaaagaaaaggatctgctctcatctgtatcaccagacgagagcgattctgtaaagtctgaagacgaggatggtgacatgaaaccagccaagggacagggctctcaaagtaagggatctggtgatgacggaaaagatccgaggcggcctaagcgcccacgcaccatacttaccacccagcagcgacgtgccttcaaggcgtcgttcgaggtcagttccaaaccgtgccgaaaagtccgggagacccttgccgctgagacaggcctgagcgtgagggtggtgcaagtatggttccagaatcaaagagcaaaaatgaagaaactcgctagaaggcaccagcaacagcaggagcaacagaacagccagaggctgggacaaggagagcccggacctggccagggacttggccaagaagtgctgagttctagaatggaagggatgatggcctcctacactccactcgctccccctcaacagcagattgtcgcaatggagcagagcccgtacggatcctcggaccctttccagcaagggctgactccaccccagatgcctggtaacgatagcatattccatgacatagattctgatacaagcctgacttcgctgtctgactgctttctgggctcgagcgatgtgggttccttgcaagccagggtgggaaaccccatagataggctgtatagcatgcaatcgtcttactttgcgagttag

SEQ ID NO: 69420 - DNA, 1221 bp, Artificial Sequence
  derived and/or modified sequence
atggacatcgccaccggccccgagagcctggagagatgcttccccagaggccagaccgactgcgccaagatgctggacggcatcaagatggaggagcacgccctgagacccggccccgccaccctgggcgtgctgctgggcagcgactgcccccaccccgccgtgtgcgagggctgccagagacccatcagcgacagattcctgatgagagtgaacgagagcagctggcacgaggagtgcctgcagtgcgccgcctgccagcaggccctgaccaccagctgctacttcagagacagaaagctgtactgcaagcaggactaccagcagctgttcgccgccaagtgcagcggctgcatggagaagatcgcccccaccgagttcgtgatgagagccctggagtgcgtgtaccacctgggctgcttctgctgctgcgtgtgcgagagacagctgagaaagggcgacgagttcgtgctgaaggagggccagctgctgtgcaagggcgactacgagaaggagaaggacctgctgagcagcgtgagccccgacgagagcgacagcgtgaagagcgaggacgaggacggcgacatgaagcccgccaagggccagggcagccagagcaagggcagcggcgacgacggcaaggaccccagaagacccaagagacccagaaccatcctgaccacccagcagagaagagccttcaaggccagcttcgaggtgagcagcaagccctgcagaaaggtgagagagaccctggccgccgagaccggcctgagcgtgagagtggtgcaggtgtggttccagaaccagagagccaagatgaagaagctggccagaagacaccagcagcagcaggagcagcagaacagccagagactgggccagggcgagcccggccccggccagggcctgggccaggaggtgctgagcagcagaatggagggcatgatggccagctacacccccctggcccccccccagcagcagatcgtggccatggagcagagcccctacggcagcagcgaccccttccagcagggcctgacccccccccagatgcccggcaacgacagcatcttccacgacatcgacagcgacaccagcctgaccagcctgagcgactgcttcctgggcagcagcgacgtgggcagcctgcaggccagagtgggcaaccccatcgacagactgtacagcatgcagagcagctacttcgccagctag

SEQ ID NO: 69421 - protein, 402 aa, Artificial Sequence
  derived and/or modified sequence
MDIATGPESLERCFPRGQTDCAKMLDGIKMEEHALRPGPATLGVLLGSDCPHPAVCEGCQRPISDRFLMRVNESSWHEECLQCAACQQALTTSCYFRDRKLYCKQDYQQLFAAKCSGCMEKIAPTEFVMRALECVYHLGCFCCCVCERQLRKGDEFVLKEGQLLCKGDYEKEKDLLSSVSPDESDSVKSEDEDGDMKPAKGQGSQSKGSGDDGKDPRRPKRPRTILTTQQRRAFKASFEVSSKPCRKVRETLAAETGLSVRVVQVWFQNQRAKMKKLARRHQQQQEQQNSQRLGQEVLSSRMEGMMASYTPLAPPQQQIVAMEQSPYGSSDPFQQGLTPPQMPGDHMNPYGNDSIFHDIDSDTSLTSLSDCFLGSSDVGSLQARVGNPIDRLYSMQSSYFAS

SEQ ID NO: 69422 - DNA, 1209 bp, Artificial Sequence
  derived and/or modified sequence
atggatatcgcaacaggacccgaaagcctcgaaagatgcttcccaagaggccagaccgattgcgctaagatgctggacggcataaagatggaagagcatgccctgcgtcctggaccagcaacattaggcgttctgctgggcagcgactgtccccacccagcagtctgcgaaggctgtcagcggcccatctcagaccgctttctgatgagggtgaacgagtcaagctggcatgaagaatgtcttcaatgcgcggcctgccagcaggctctgaccacctcctgctatttcagagaccggaaactttactgcaagcaggattaccagcagctattcgcagccaagtgtagcggctgcatggagaaaatagctccaacagaattcgtcatgagagcactcgagtgcgtctatcacttgggatgtttctgttgctgtgtgtgtgagcgacagcttcgcaagggcgacgagttcgttctgaaggagggtcagctcctttgcaaaggcgactatgaaaaggagaaggatcttctgtccagtgtgtcccctgatgagagcgacagtgtaaagtccgaggatgaagacggcgatatgaaaccagcaaagggccagggaagccagtcaaaagggtctggagacgatggaaaggatccaagaaggcccaaaagaccaagaaccattctgactacccagcagaggcgcgcattcaaggctagtttcgaggttagcagcaagccttgccggaaagtgcgtgaaacgctggctgcagaaactggtctgtcagtccgggtagtccaggtgtggttccagaaccagcgggctaaaatgaagaaactagctcgacgccaccagcagcagcaggaacagcagaactcccagcggcttggacaggaggttctctcatcacgcatggagggaatgatggcaagttataccccgcttgctcctccgcagcagcaaatcgtcgcaatggaacagagtccttacggatcgtccgacccatttcaacaaggcctgacccccccccagatgcctggggaccacatgaatccgtatgggaacgactcaatctttcatgacattgattccgataccagtttaaccagcttatccgattgctttttgggaagctcagatgtcggctcactgcaggccagagtgggcaaccctatcgacaggctatacagcatgcagtcatcgtatttcgcgagctag

SEQ ID NO: 69423 - DNA, 1209 bp, Artificial Sequence
  derived and/or modified sequence
atggacatcgccactggacctgagagcctggagcgctgcttcccccggggccagacagactgtgccaagatgctggatggcatcaagatggaggagcacgccctgcggcccggccctgccaccctgggcgtgctgctgggcagtgactgcccccaccctgctgtgtgtgagggctgccagaggcccatcagtgaccgcttcctgatgagggtgaatgaaagctcctggcatgaagaatgtctgcagtgtgccgcctgccagcaggccctgaccaccagctgctacttccgggacaggaagctgtactgcaagcaggactaccagcagctgtttgctgccaagtgcagcggctgcatggagaagatcgcccccacagaatttgtgatgagggccctggagtgtgtgtaccacctgggctgcttctgctgctgcgtgtgtgagcggcagctgaggaaaggagatgaatttgtgctgaaggagggccagctgctgtgcaagggggactatgagaaggagaaggacctgctgagctctgtgtccccagatgaaagtgacagcgtgaagtcagaagatgaagatggagacatgaagccagccaagggccagggcagccagagcaaaggaagtggagatgatggcaaggacccccggcggcccaagaggcccaggaccatcctgaccacccagcagaggcgggccttcaaggccagctttgaggtgagcagcaagccctgcaggaaggtgcgggagaccctggccgctgagaccggcctgtctgtgcgggtggtgcaggtgtggttccagaaccagagggccaagatgaagaagctggcccggcggcaccagcagcagcaggagcagcagaacagccagaggctgggccaggaggtgctgagcagcaggatggagggcatgatggccagctacacccccctggccccaccccagcagcagatcgtggccatggagcagagcccctacggcagcagtgaccccttccagcagggcctgaccccaccccagatgcctggggaccacatgaacccctatggaaatgacagcatcttccatgacatcgacagcgacaccagcctgaccagcctgagtgactgcttcctgggcagcagtgatgtgggcagcctgcaggcccgggtgggcaaccccatcgaccggctgtacagcatgcagagcagctactttgccagctag

SEQ ID NO: 69424 - DNA, 1522 bp, Artificial Sequence
  derived and/or modified sequence
gcgtcccatggatatagcaacaggtcccgagtcgctggagaggtgcttccctcgcgggcagacggactgcgccaagatgttggacggcatcaagatggaggagcacgccctgcgccccgggcccgccactctgggggtgctgctgggctccgactgcccgcatcccgccgtctgcgagggctgccagcggcccatctccgaccgcttcctgatgcgagtcaacgagtcgtcctggcacgaggagtgtttgcagtgcgcggcgtgtcagcaagccctcaccaccagctgctacttccgggatcggaaactgtactgcaaacaagactaccaacagctcttcgcggccaagtgcagcggctgcatggagaagatcgcccccaccgagttcgtgatgcgggcgctggagtgcgtgtaccacctgggctgcttctgctgctgcgtgtgtgaacggcagctacgcaagggcgacgaattcgtgctcaaggagggccagctgctgtgcaagggtgactacgagaaggagaaggacctgctcagctccgtgagccccgacgagtccgactccgtgaagagcgaggatgaagatggggacatgaagccggccaaggggcagggcagtcagagcaagggcagcggggatgacgggaaggacccgcggaggcccaagcgaccccggaccatcctcaccacgcagcagcgaagagccttcaaggcctccttcgaggtctcgtcgaagccttgccgaaaggtccgagagacactggcagctgagacgggcctcagtgtgcgcgtggtccaggtctggtttcagaaccaaagagcaaagatgaagaagctggcgcggcggcaccagcagcagcaggagcagcagaactcccagcggctgggccaggaggtcctgtccagccgcatggagggcatgatggcttcctacacgccgctggccccaccacagcagcagatcgtggccatggaacagagcccctacggcagcagcgaccccttccagcagggcctcacgccgccccaaatgccaggtgaccacatgaacccctatgggaacgactccatcttccatgacatcgacagcgatacctccttaaccagcctcagcgactgcttcctcggctcctcagacgtgggctccctgcaggcccgcgtggggaaccccatcgaccggctctactccatgcagagttcctacttcgcctcctgagagccagccaggcgcacggacgcttgggcaggggcctgggggggactgccagcctctgcggccagcctggccacccccgccctgctctccgcacagactacagacagccatacggtgccctcccctcggccagctgggcctgaccactgtgcccgttgggtacagccagaccggtagatgggcacagcctgggcaggggctgtgtcctgcccacagagaccttgtcatccccagggacccagagctctcggacggccactcgcctcccagccccacctcggcctccatcgcctcctccccatctct

SEQ ID NO: 69425 - DNA, 1209 bp, Artificial Sequence
  derived and/or modified sequence
atggacatcgccaccggccccgagagcctggagcggtgcttcccccgcggacagactgactgcgccaaaatgctagacggaatcaagatggaggagcacgcgctgaggccaggccccgcaacgttgggggtgctgttagggtccgactgcccgcaccctgcggtctgtgagggctgtcagcgcccaatctcagaccgctttcttatgcgtgtgaatgaaagttcttggcacgaggagtgcctgcagtgtgctgcttgtcaacaagctcttacaacaagttgttacttcagagatcggaagctgtattgcaagcaggactaccagcagttgttcgccgccaagtgcagtggttgtatggaaaagatcgcccctactgaatttgtcatgcgcgccctagaatgcgtgtatcatctgggctgcttctgctgttgcgtctgtgagaggcagctgcggaagggcgatgagttcgtgttgaaagaagggcagctcctgtgtaagggggactatgaaaaagagaaggacctgctgtcttccgtgtcccctgacgaatctgatagtgttaagagcgaagatgaggacggggacatgaaaccggctaaaggccaggggtcccagagtaaggggtctggggatgacggtaaagacccccgtagacctaagaggcctcgcacaatcctgactactcagcagagaagggccttcaaggccagttttgaggtgagttctaagccatgcaggaaggtacgggagaccctagcagcagaaacaggattgagcgttcgagtggtgcaggtgtggtttcaaaaccagcgggcaaagatgaagaagttggctaggcgacaccagcagcaacaggaacagcaaaatagtcagcggctggggcaagaagtgctgagctctagaatggagggtatgatggcgagctatacacccctcgcaccgccgcagcagcagatcgttgctatggaacaatcgccctacggatccagtgacccttttcagcagggtctcacaccaccccagatgcctggcgaccacatgaatccttacgggaacgattccattttccatgacattgatagcgacaccagtctgacaagtctgagtgattgcttcctgggttccagcgacgtgggatctctgcaagctagagtgggaaatcctatcgaccgcctgtactctatgcagtcatcctatttcgcatcctag

SEQ ID NO: 69426 - DNA, 1209 bp, Artificial Sequence
  derived and/or modified sequence
atggatatagcgacagggccagaaagtctcgagcgctgcttcccccgtggccagaccgattgcgctaaaatgctggatgggatcaaaatggaagagcacgccctgaggccaggacctgcgactttgggtgtcctccttggctcagactgtccgcatccggcagtctgtgagggatgccaacgaccaatctcagaccggttcctcatgcgagtcaatgagtcatcttggcacgaggagtgccttcagtgcgcagcgtgtcagcaagctctcacaacatcatgctatttccgggatcgcaagttatactgtaagcaagactaccagcagctgttcgccgctaaatgctcgggctgtatggagaagattgcgccaacggaatttgttatgcgtgcactggaatgcgtttatcatctgggatgcttctgttgttgcgtttgcgagcggcagctgcggaaaggagacgagttcgtattgaaggaaggacagttgctctgtaaaggcgattacgagaaggagaaggatctcctgagctccgtgagtccagatgagagcgactccgtcaaaagcgaagatgaggatggtgatatgaagcctgccaagggacagggatctcagagcaagggcagcggagatgacggaaaggacccccgtcgaccaaaaagaccccgtactatcctgaccacccagcaacgcagagcctttaaggcttcatttgaggtctcttctaagccttgtcgcaaggtccgagaaaccctcgctgccgagactgggcttagcgtgcgtgtggtacaggtctggttccagaaccagcgcgcaaaaatgaaaaagctcgccagaagacatcagcagcagcaggaacagcaaaatagccagaggctgggtcaggaagttctgtctagccggatggaaggaatgatggccagttatactcccctagctccaccacagcaacagatcgtcgctatggagcagagcccttacgggagcagtgaccccttccagcagggtctgaccccacctcaaatgccaggcgatcatatgaatccttacggcaatgacagcatttttcacgatattgactcagacacgtccctcacaagcctgagcgactgctttcttgggagttcagacgtgggatccctgcaggcacgtgtgggtaatccgatcgaccgcctctacagcatgcagtccagttacttcgccagttag

SEQ ID NO: 69427 - DNA, 1209 bp, Artificial Sequence
  derived and/or modified sequence
atggacatcgccaccggccccgagagcctggagagatgcttccccagaggccagaccgactgcgccaagatgctggacggcatcaagatggaggagcacgccctgagacccggccccgccaccctgggcgtgctgctgggcagcgactgcccccaccccgccgtgtgcgagggctgccagagacccatcagcgacagattcctgatgagagtgaacgagagcagctggcacgaggagtgcctgcagtgcgccgcctgccagcaggccctgaccaccagctgctacttcagagacagaaagctgtactgcaagcaggactaccagcagctgttcgccgccaagtgcagcggctgcatggagaagatcgcccccaccgagttcgtgatgagagccctggagtgcgtgtaccacctgggctgcttctgctgctgcgtgtgcgagagacagctgagaaagggcgacgagttcgtgctgaaggagggccagctgctgtgcaagggcgactacgagaaggagaaggacctgctgagcagcgtgagccccgacgagagcgacagcgtgaagagcgaggacgaggacggcgacatgaagcccgccaagggccagggcagccagagcaagggcagcggcgacgacggcaaggaccccagaagacccaagagacccagaaccatcctgaccacccagcagagaagagccttcaaggccagcttcgaggtgagcagcaagccctgcagaaaggtgagagagaccctggccgccgagaccggcctgagcgtgagagtggtgcaggtgtggttccagaaccagagagccaagatgaagaagctggccagaagacaccagcagcagcaggagcagcagaacagccagagactgggccaggaggtgctgagcagcagaatggagggcatgatggccagctacacccccctggcccccccccagcagcagatcgtggccatggagcagagcccctacggcagcagcgaccccttccagcagggcctgacccccccccagatgcccggcgaccacatgaacccctacggcaacgacagcatcttccacgacatcgacagcgacaccagcctgaccagcctgagcgactgcttcctgggcagcagcgacgtgggcagcctgcaggccagagtgggcaaccccatcgacagactgtacagcatgcagagcagctacttcgccagctag

SEQ ID NO: 69428 - protein, 428 aa, Artificial Sequence
  derived and/or modified sequence
MFSLMASCCGWFKRWREPVRKVTLLMVGLDNAGKTATAKGIQGEYPEDVAPTVGFSKINLRQGKFEVTIFDLGGGIRIRGIWKNYYAESYGVIFVVDSSDEERMEETKEAMSEMLRHPRISGKPILVLANKQDKEGALGEADVIECLSLEKLVNEHKCLCQIEPCSAISGYGKKIDKSIKKGLYWLLHVIARDFDALNERIQKETTEQRALEEQEKQERAERVRKLREERKQNEQEQAELDGTSGLAELDPEPTNPFQPIASVIIENEGKLEREKKNQKMEKDSDGCHLKHKMEHEQIETQGQVNHNGQKNNEFGLVENYKEALTQQLKNEDETDRPSLESANGKKKTKKLRMKRNHRVEPLNIDDCAPESPTPPPPPPPVGWGTPKVTRLPKLEPLGETHHNDFYRKPLPPLAVPQRPNSDAHDVIS

SEQ ID NO: 69429 - DNA, 1287 bp, Artificial Sequence
  derived and/or modified sequence
atgttctcactcatggctagctgttgtggctggttcaaacgatggcgcgagcctgttcgtaaagtcactttactgatggtaggcctcgataacgcaggcaagacagccacagctaaagggatacaaggagaataccccgaagatgtggcacccacggtgggattttcaaaaataaatcttaggcagggaaaattcgaggtgacgattttcgatttaggtgggggcattagaatccgaggaatctggaaaaattactacgctgagagctacggcgtgattttcgtagtcgactccagtgatgaagagaggatggaggagacaaaagaagcaatgtctgagatgctgaggcaccccaggataagcgggaaacctatcttggtgctcgccaataagcaggacaaagagggggctctcggcgaggcagatgttatcgagtgcctgagtctagaaaagctcgtgaacgagcacaaatgcctgtgccagatcgaaccttgttccgctatttctgggtacggcaagaagattgacaagtcgatcaaaaagggcttgtactggcttttgcatgtgatcgctagagactttgacgctcttaacgaaaggattcaaaaggagaccacagagcaaagggccctggaggaacaagagaaacaggagcgagcagagcgggtgaggaaattgagagaagagaggaaacaaaacgaacaggagcaagccgaacttgatggtacatccgggctcgcagaactcgatcccgagccgacgaacccatttcagccgattgctagtgtgattatcgaaaatgaaggcaagctcgagcgcgaaaaaaagaaccagaaaatggagaaagactcagacggctgccacctcaagcataagatggaacatgaacagatcgaaacacagggtcaggtcaaccacaacgggcaaaaaaacaacgagtttggtttagtagaaaattacaaggaggccttgacccagcagcttaagaatgaggacgaaacagaccggccctcgctggaatctgccaatggtaagaaaaagacaaagaaacttaggatgaaacgcaaccatagggtagaaccacttaatattgatgactgtgccccagaaagccctacaccaccaccgcctccacccccagtcggctgggggacccctaaggtaactcgcctgcctaagctcgagcccttgggcgagacccaccataatgacttttacaggaagcctcttccccccctggcagtcccacagcggcctaacagcgacgcacatgatgtgatatcatag

SEQ ID NO: 69430 - DNA, 1287 bp, Artificial Sequence
  derived and/or modified sequence
atgttctcattgatggcgagctgctgtggatggtttaagcgatggcgcgaaccagtgaggaaggtgaccctattaatggtgggactcgacaatgccggcaaaaccgcgaccgcaaaaggcattcaaggagaataccctgaggatgtggcacctactgttggattttccaagatcaatctccggcaggggaaatttgaagtcacgatttttgatctcggcggcggtatcaggatcagaggtatctggaagaactattacgcagagtcatatggtgtcatatttgtggtcgatagctcagacgaagagcgtatggaagagaccaaggaagccatgtcagaaatgctgaggcacccaaggatttcaggtaaacctatcttagttctggccaacaagcaggataaagagggagccctcggagaggcggacgtcatcgaatgtctgtcacttgagaagctagtgaatgagcacaagtgtctctgccagattgaaccttgtagcgctatttctggctatggaaagaaaatcgacaaaagcatcaagaaagggctctactggctgctgcacgtgatcgcccgtgattttgacgccctaaacgaacgaatacagaaagagacgaccgagcagcgagcattggaggaacaggagaagcaggagagagccgagagagtgcgtaagctcagagaagaacgaaagcagaacgaacaagaacaggcagagctcgacgggacctccgggttggccgagctggaccctgagcctaccaacccatttcagccaatcgcatcagtgatcatcgagaatgagggaaagcttgagcgggaaaaaaagaatcagaagatggaaaaagatagtgacggctgccatcttaaacataaaatggagcatgaacagatagagacacagggacaggtgaatcataacggccagaagaacaatgagtttgggcttgttgaaaactataaggaagccctcacccagcagttgaagaatgaggacgagacagaccgtccgtctctagagtctgccaacggcaaaaagaaaactaaaaagttgcgaatgaaaagaaaccatagggtggaaccactcaatattgacgactgcgccccagagagccctacccctcccccccctccccctccagtggggtggggaacaccaaaagtaacgaggcttcctaagcttgagcccctaggcgagacacatcataatgacttttacagaaagccgctgcccccgctggccgtgccccagcgcccaaacagcgatgctcacgatgtaatcagttag

SEQ ID NO: 69431 - DNA, 2453 bp, Artificial Sequence
  derived and/or modified sequence
cgcggggcttttctttagccgggtcccgctaactcggctacggtgtatctgcgtctttggtcaggttgttccttggctaagagggcagtcgtcgcggacccacgcggttagcaaggcttagtgctcgggccggccgccttcacttccctcccggcttttcctcccgacttatccactttaggggcgtctcggagtgccggaggcccccggggaagagcggggtgccggtgtccgctccgggctcggatgggaagtggtgggaggagcgacccgggatgttcagtctgatggccagttgctgcggctggttcaagcggtggcgggagcctgtcagaaaggtgactcttttgatggtgggacttgataatgctggtaaaaccgcaacagcaaagggaatccaaggagaataccctgaagatgtagctcctactgttggattttcaaaaattaaccttagacaaggaaagtttgaagtcaccatctttgacttgggaggtggaataagaattcggggaatctggaagaattactatgctgaatcctatggggtaatatttgttgtggattccagtgatgaagagagaatggaagagacaaaagaggctatgtcagaaatgctaagacatcctaggatatcgggaaagcctatattggtgttggcaaataaacaagataaagaaggagctttaggagaagctgatgtcattgaatgtctatctctggaaaaattggtcaatgagcacaagtgcctgtgtcagatagaaccatgttcagcaatctcggggtatggaaagaaaattgacaagtccattaaaaaaggcctttattggctgctacatgttattgcaagagactttgatgccttaaatgaacgcatccaaaaagagacaacagagcagcgtgctcttgaggaacaagagaaacaagaaagagctgaacgagtgcgaaaattacgagaagaaagaaaacaaaatgaacaggagcaggctgaactcgatggaaccagtggtctggctgagttggacccagaaccaacgaatcctttccagccaatagcatctgtaatcattgagaatgaaggaaaacttgaaagagagaaaaaaaaccaaaaaatggagaaagacagtgatggctgccacctgaaacataaaatggagcatgagcaaatagagacacaaggccaggttaatcacaatggccaaaaaaataatgaatttggactagtagaaaattataaggaggcattaacacagcagttaaagaatgaagatgagacagaccggccatcattggaatcagctaatggtaaaaagaaaactaagaaactaagaatgaaaaggaaccaccgggtagaaccacttaatatagatgactgtgctcctgagagtccaacgccacccccaccccctcctcctgttggctggggaacccctaaagtcactagacttccaaaacttgagcctcttggtgaaacacatcataatgatttctataggaagccactgcctcccctggctgtgccacagcgacctaacagtgatgctcatgatgtgatctcataaacaagacgtatggaggagttctcttaatatcagcaaggtgaactgggacattcttctttctcagaagaagaaacatcttgtaaattgatgactggggcaagataaccataataattttagtgagaagattaatactcaaggacctgacttgataattacttatttgtgtttttcatggttaaaaaaataaaagaagcacaatgaccagtacatgaaatcagcatttggaccaaattagcaagatttactgttgactctggtttatacatccccactcatgagcatacttctgaaggaaaactttacaaaaagagccaatggactcagcactttctttactatttgttcaatagcctatatttctagatattaaatattttttgtaagatatatgcacatagaagggggacttctaggaatttataaccaaaattttaaaactatttttatatttttttaaatctttaaaaattttaattactgtgatattgattatacaccttttttatagatgatttgtttaaattatatctggaaaatagagttgatttactttcagacatgaactatacaaacaggatatatttatatggcttgaggtatgttttgtaatagcgttgttctttaagtgtacatcgtaatttgacctaatttaaaaataatatattttcgaagtagtagattctcagatctttattctaacaattacatgatttgaaaacagtactcaatgagactggaaataccttttgtacctaaatgttttttaaattaatcaaaatacattctgtgagatactattaaaagtctcagtaaagtcctattttaaaggttagacactttcagagatcaaggtgctccctatactcccttgttccatcagaagctgca

SEQ ID NO: 69432 - DNA, 2206 bp, Artificial Sequence
  derived and/or modified sequence
gcttttctttagccgggtcccgctaactcggctacggtgtatctgcgtctttggtcaggttgttccttggctaagagggcagtcgtcgcggacccacgcggttagcaaggcttagtgctcgggccggccgccttcacttccctcccggcttttcctcccgacttatccactttaggggcgtctcggagtgccggaggcccccggggaagagcggggtgccggtgtccgctccgggctcggatgggaagtggtgggaggagcgacccgggatgttcagtctgatggccagttgctgcggctggttcaagcggtggcgggagcctgtcagaaaggtgactcttttgatggtgggacttgataatgctggtaaaaccgcaacagcaaagggaatccaaggagaataccctgaagatgtagctcctactgttggattttcaaaaattaaccttagacaaggaaagtttgaagtcaccatctttgacttgggaggtggaataagaattcggggaatctggaagaattactatgctgaatcctatggggtaatatttgttgtggattccagtgatgaagagagaatggaagagacaaaagaggctatgtcagaaatgctaagacatcctaggatatcgggaaagcctatattggtgttggcaaataaacaagataaagaaggagctttaggagaagctgatgtcattgaatgtctatctctggaaaaattggtcaatgagcacaagtgcctgtgtcagatagaaccatgttcagcaatctcggggtatggaaagaaaattgacaagtccattaaaaaaggcctttattggctgctacatgttattgcaagagactttgatgccttaaatgaacgcatccaaaaagagacaacagagcagcgtgctcttgaggaacaagagaaacaagaaagagctgaacgagtgcgaaaattacgagaagaaagaaaacaaaatgaacaggagcaggctgaactcgatggaaccagtggtctggctgagttggacccagaaccaacgaatcctttccagccaatagcatctgtaatcattgagaatgaaggaaaacttgaaagagagaaaaaaaaccaaaaaatggagaaagacagtgatggctgccacctgaaacataaaatggagcatgagcaaatagagacacaaggccaggttaatcacaatggccaaaaaaataatgaatttggactagtagaaaattataaggaggcattaacacagcagttaaagaatgaagatgagacagaccggccatcattggaatcagctaatggtaaaaagaaaactaagaaactaagaatgaaaaggaaccaccgggtagaaccacttaatatagatgactgtgctcctgagagtccaacgccacccccaccccctcctcctgttggctggggaacccctaaagtcactagacttccaaaacttgagcctcttggtgaaacacatcataatgatttctataggaagccactgcctcccctggctgtgccacagcgacctaacagtgatgctcatgatgtgatctcataaacaagacgtatggaggagttctcttaatatcagcaagaagcacaatgaccagtacatgaaatcagcatttggaccaaattagcaagatttactgttgactctggtttatacatccccactcatgagcatacttctgaaggaaaactttacaaaaagagccaatggactcagcactttctttactatttgttcaatagcctatatttctagatattaaatattttttgtaagatatatgcacatagaagggggacttctaggaatttataaccaaaattttaaaactatttttatatttttttaaatctttaaaaattttaattactgtgatattgattatacaccttttttatagatgatttgtttaaattatatctggaaaatagagttgatttactttcagacatgaactatacaaacaggatatatttatatggcttgaggtatgttttgtaatagcgttgttctttaagtgtacatcgtaatttgacctaatttaaaaataatatattttcgaagtagtagattctcagatctttattctaacaattacatgatttgaaaacagtactcaatgagactggaaataccttttgtacctaaatgttttttaaattaatcaaaatacattctgtgagatactattaaaa

SEQ ID NO: 69433 - DNA, 1287 bp, Artificial Sequence
  derived and/or modified sequence
atgttcagcctgatggccagctgctgcggctggttcaagcgctggagggagcctgtgaggaaggtgaccctgctgatggtgggcctggacaatgctgggaagacagccacagccaagggcatccagggcgagtacccagaagatgtggcccccaccgtgggcttcagcaagatcaacctgcggcagggcaagtttgaggtgaccatctttgacctgggcggcggcatccgcatccggggcatctggaagaactactatgcagagagctatggagtcatctttgtggtggacagcagtgatgaggagaggatggaggagaccaaggaggccatgtctgagatgctgcggcacccccgcatcagcggcaagcccatcctggtgctggccaacaagcaggacaaggagggcgccctgggggaggctgatgtgattgaatgtctgagcctggagaagctggtgaatgagcacaagtgcctgtgccagatcgagccctgcagcgccatcagcggctacggcaagaagattgacaagagcatcaagaagggcctgtactggctgctgcacgtgattgcccgggactttgatgccctgaatgaaagaatccagaaggagaccacagagcagagggccctggaggagcaggagaagcaggagcgggcagagcgggtgaggaagctgcgggaggagaggaagcagaatgagcaggagcaggccgagctggatggcaccagcggcctggccgagctggaccctgagcccaccaaccccttccagcccatcgccagcgtcatcattgaaaatgaaggcaagctggagcgggagaagaagaaccagaagatggagaaggacagtgatggctgccacctgaagcacaagatggagcacgagcagatcgagacccagggccaggtgaaccacaacggccagaagaacaatgaatttggcctggtggagaactacaaggaggccctgacccagcagctgaagaatgaagatgaaacagaccggcccagcctggagagcgccaacgggaagaagaagaccaagaagctgaggatgaagaggaaccaccgggtggagcccctgaacattgatgactgtgcccctgagagccccaccccacctcctcctcctcctcctgtgggctggggcacccccaaggtgacccggctgcccaagctggagcccctgggggagacccaccacaatgacttctacaggaagcccctgccccccctggccgtgccccagaggcccaacagtgatgcccatgatgtgatctcctag

SEQ ID NO: 69434 - DNA, 1287 bp, Artificial Sequence
  derived and/or modified sequence
atgttcagcctgatggccagctgctgcggctggttcaagcggtggcgggaaccagttcggaaggtaactctcctgatggtgggtcttgacaacgccgggaaaaccgccaccgccaaagggattcagggggaatatccagaggacgtggcgcctacagtcggcttttctaagattaatctcaggcaaggcaaatttgaggtcaccatcttcgacctcggcgggggcatccgaattagaggcatctggaaaaattactatgctgagtcgtatggagtgatattcgtggtagatagttccgacgaggaaaggatggaggaaaccaaggaagcgatgtccgagatgctgcgccatccccgcataagtggcaagcctattctggtgttagctaataaacaggataaagaaggggctctgggggaggctgatgtgatcgagtgccttagccttgaaaagctagtgaacgaacataaatgtctgtgtcagatcgaaccttgcagcgctatttcagggtatggaaagaaaattgataagtctatcaaaaagggattatattggctgctacacgtcattgccagagatttcgatgccctaaacgagcgaatccagaaggagactactgagcagcgggccctggaagagcaggagaaacaggagagggcagagagagttaggaaattacgcgaggagagaaaacagaatgaacaagaacaagccgagctagatggtacatctggtttggctgagctcgatcccgagcctactaacccatttcaacctatcgctagtgtgataattgagaatgagggaaagcttgagcgtgaaaaaaagaaccagaagatggagaaggatagcgatgggtgccacttgaaacataagatggagcacgagcagatcgagacccagggacaggtgaaccataacggccaaaagaataacgaattcggccttgttgagaattataaagaggcactcacacagcagcttaagaatgaggacgagacagaccgcccgtcgttggagtctgcgaacggcaagaaaaagaccaagaagctgcggatgaagaggaaccaccgagtcgagccccttaacatcgacgattgtgctcccgaaagtcctacaccacctcccccacctccccccgtgggctggggcactcccaaagttaccagattgcccaagctggagccactcggcgagacgcaccacaatgatttttatcgcaaacccctgccacccctggccgtcccccagcgcccaaattccgatgcacacgatgtaatctcctag

SEQ ID NO: 69435 - DNA, 1287 bp, Artificial Sequence
  derived and/or modified sequence
atgttcagcctgatggccagctgctgcggctggttcaagcggtggcgcgaaccagttcgcaaggtgaccctgctcatggtcggcctcgacaacgctggaaaaactgccactgccaaaggcatacaaggcgagtaccccgaagacgtcgcccctacagtgggtttcagcaagatcaatcttagacagggcaaatttgaagttactattttcgatctgggaggtggaatccgcatacgcggaatatggaaaaattactacgccgaatcttatggcgtcatcttcgtcgtggattcatctgacgaggagaggatggaggagacgaaggaagccatgtccgaaatgctgcggcaccccaggatttctggaaagccgattcttgtcctggccaataaacaggataaagagggtgcgctaggtgaagctgatgttatcgagtgcctgagtctggagaaactggtcaatgagcataagtgcctctgtcagatagaaccttgtagcgccatctctggctacgggaagaaaatcgataagagtatcaagaagggtttgtattggcttctccatgttatagcaagagattttgacgccctaaacgagaggatccagaaggagacaaccgagcagcgcgctcttgaggagcaggagaagcaagagagggcagagcgcgtgcgtaagctgcgggaggagcgcaagcagaatgagcaggagcaggctgagctcgatggcactagtgggctcgccgagctggatccagaacccacaaatccattccagcctattgcctccgtgataatcgaaaacgagggaaagctcgagcgcgagaaaaaaaaccagaaaatggagaaggattccgacgggtgccatttgaagcataagatggagcatgagcagatcgagactcagggacaggttaatcacaacggccagaaaaacaacgaattcgggttggtggagaattacaaagaagccttgacccagcagttgaagaacgaggacgagaccgatcgtccaagcctcgaatctgctaatggtaaaaaaaagactaagaagctgcgaatgaaacgcaatcaccgcgtggagccattgaacatcgacgattgcgctcctgaatcaccgacaccccccccacctccccccccggtcggatggggaacccctaaggtgacgcggctccctaagctagaaccacttggggagactcaccataacgacttttacagaaagcccctgccgcctctggcagttcctcaacgccccaactcagacgcccatgatgttatatcttag

SEQ ID NO: 69436 - DNA, 1287 bp, Artificial Sequence
  derived and/or modified sequence
atgttttcactcatggcatcatgctgcggatggttcaagagatggcgggagccagtgcggaaagttacgttgctcatggtgggccttgacaacgcaggaaaaacagcaaccgccaaagggatccagggggagtacccggaagacgtcgcccctaccgttggattcagcaaaataaaccttcgccaaggtaagtttgaggttaccatcttcgacttaggcggtggtatccggatccgcggtatttggaaaaattattacgccgaatcctacggtgttatttttgtggtagactcctctgacgaagagcgcatggaagagactaaggaggccatgagcgagatgctgagacatcctcggatttccggcaagcccatactcgttttggccaataagcaggataaggaaggtgcgctgggagaggcagacgtcatcgaatgcttgtcattggagaaattagtgaacgagcacaaatgtctgtgtcagattgaaccctgctctgccataagcggctatggcaaaaaaatcgacaagtcaattaaaaaagggctgtattggctgttgcacgttatcgctagagacttcgatgcactcaacgagagaattcagaaggagaccaccgaacagcgagcgctggaagaacaggagaagcaggagagggccgaacgcgtgcggaaactgcgggaagagaggaagcaaaacgaacaggaacaggcagagctggatggcacaagcggcctggccgaactagaccccgaacctacaaatccgtttcagcctattgcgtcggtcataattgagaatgagggcaaactggagagggagaaaaaaaaccagaagatggaaaaggacagtgacggttgccacctgaagcacaagatggagcacgaacagattgagacacaggggcaggtcaaccacaacgggcaaaaaaacaatgagttcgggctcgtggagaattataaggaggctctgacccagcagctgaaaaacgaggacgagacagatagaccatccttggagtccgcgaatggcaagaagaagaccaagaaattaagaatgaagcgaaaccatcgagtcgaacccttgaacatcgacgattgtgcccctgaatcgccaaccccgcctcctccacccccacctgtgggatggggcactcccaaagtgacacgcttgcctaaactggaacccctaggcgagacccaccacaacgacttctacagaaaacccctgccacctttagccgtgccgcagaggcccaactccgatgcccacgacgtgatctcttag

SEQ ID NO: 69437 - DNA, 1287 bp, Artificial Sequence
  derived and/or modified sequence
atgttcagtctgatggcatcgtgctgcggctggtttaaaaggtggagggagcctgtgagaaaagtgactcttctgatggtcggcctcgataatgcaggtaaaacagccaccgccaaaggtatccagggggagtatcccgaggacgtggcccctaccgtcggcttcagtaagattaacttgcggcagggaaaattcgaggtgaccatcttcgatctcggtgggggaattagaattagaggcatttggaagaattattacgccgaaagctacggggtcatcttcgtagttgactctagcgatgaagaaagaatggaagagaccaaagaagcaatgtcagagatgctaagacatccccgaatttctggcaagccaatactggtgctcgcaaacaagcaggacaaagaaggggcacttggggaggccgacgttattgagtgcctgtcactagaaaagctggtcaacgaacataaatgtctctgtcagattgagccatgctctgcaatctctggctatggcaagaagatcgataaatccattaagaagggcctctattggctcttgcacgtcatcgctcgagatttcgatgccttgaacgagagaattcagaaagaaacgacagaacaaagagcactggaggaacaggaaaaacaggagcgggcagaacgagtgcggaaactccgggaggaacgcaagcagaatgaacaagaacaggccgaactggacggtacgagcgggcttgccgagttggaccccgagcccactaacccctttcagcctattgcttcagtgattattgagaacgaaggcaagctggagcgagaaaaaaagaaccagaagatggaaaaagacagcgacggttgccatctcaaacacaagatggagcacgaacagatcgaaacacagggacaggttaatcataacggacagaagaataatgagttcggcctggtcgagaattataaagaagctctgacacaacaattaaagaacgaggacgagaccgatagaccttcgttggaatctgcaaatggtaaaaaaaaaaccaagaaactcagaatgaaacggaatcatcgagtggagcccctcaacattgacgattgtgccccagagtcgccaacccccccacctcccccaccgcctgtagggtggggcacccccaaggtgacgcgcctcccaaagctggagccgttgggcgagactcatcacaatgatttttaccgcaaacctctgccgccactcgcagtgcctcagcggcctaattccgacgcccatgatgtgatctcatag

SEQ ID NO: 69438 - DNA, 1287 bp, Artificial Sequence
  derived and/or modified sequence
atgttcagcctgatggccagctgctgcggctggttcaagagatggagagagcccgtgagaaaggtgaccctgctgatggtgggcctggacaacgccggcaagaccgccaccgccaagggcatccagggcgagtaccccgaggacgtggcccccaccgtgggcttcagcaagatcaacctgagacagggcaagttcgaggtgaccatcttcgacctgggcggcggcatcagaatcagaggcatctggaagaactactacgccgagagctacggcgtgatcttcgtggtggacagcagcgacgaggagagaatggaggagaccaaggaggccatgagcgagatgctgagacaccccagaatcagcggcaagcccatcctggtgctggccaacaagcaggacaaggagggcgccctgggcgaggccgacgtgatcgagtgcctgagcctggagaagctggtgaacgagcacaagtgcctgtgccagatcgagccctgcagcgccatcagcggctacggcaagaagatcgacaagagcatcaagaagggcctgtactggctgctgcacgtgatcgccagagacttcgacgccctgaacgagagaatccagaaggagaccaccgagcagagagccctggaggagcaggagaagcaggagagagccgagagagtgagaaagctgagagaggagagaaagcagaacgagcaggagcaggccgagctggacggcaccagcggcctggccgagctggaccccgagcccaccaaccccttccagcccatcgccagcgtgatcatcgagaacgagggcaagctggagagagagaagaagaaccagaagatggagaaggacagcgacggctgccacctgaagcacaagatggagcacgagcagatcgagacccagggccaggtgaaccacaacggccagaagaacaacgagttcggcctggtggagaactacaaggaggccctgacccagcagctgaagaacgaggacgagaccgacagacccagcctggagagcgccaacggcaagaagaagaccaagaagctgagaatgaagagaaaccacagagtggagcccctgaacatcgacgactgcgcccccgagagccccacccccccccccccccccccccccgtgggctggggcacccccaaggtgaccagactgcccaagctggagcccctgggcgagacccaccacaacgacttctacagaaagcccctgccccccctggccgtgccccagagacccaacagcgacgcccacgacgtgatcagctag

SEQ ID NO: 69439 - DNA, 978 bp, Artificial Sequence
  derived and/or modified sequence
atggaagagaccaaggaggcgatgtccgaaatgctcagacacccacgcattagcggaaagcctattctcgttctcgccaataaacaagataaggagggagcgctcggtgaagctgatgttattgaatgtctgagccttgaaaaactggtgaatgagcacaagtgcctgtgccagattgaaccctgctccgccatttctgggtacgggaagaaaattgacaagtcaatcaaaaagggactgtactggctgttgcatgttatcgcccgggatttcgacgcactgaatgaacggattcaaaaagagacaacagaacagagggctctggaggagcaggaaaaacaagaacgcgccgagagggtaagaaaacttcgggaggaacgcaaacagaatgagcaggaacaggcagagctggatggtacaagtggcctggctgagttagacccggagccaaccaaccccttccagcccatcgcatctgtgatcattgagaatgagggtaaattggagagggaaaagaagaaccagaaaatggaaaaggattcagacggctgtcacctgaagcacaagatggaacacgagcaaattgagacccagggacaagtgaatcacaatggccagaaaaacaacgagtttggtctagtcgagaactacaaagaagcattgacgcagcagctgaagaacgaggatgagacagacagaccgtcgctggagtctgccaacgggaagaaaaagaccaagaagctgcgcatgaagcgtaaccacagggtagaaccgcttaatatcgatgactgtgccccagagagcccaacgcctccaccccctcctccccctgtcggatgggggacccccaaagtcacccgcctgcccaaactcgagcccctgggtgagactcaccacaatgatttttataggaagccactgccccccctggccgtgcctcagcggcccaactcagacgcccatgatgttatctcatag

SEQ ID NO: 69440 - DNA, 978 bp, Artificial Sequence
  derived and/or modified sequence
atggaggagaccaaggaggccatgtctgagatgctgcggcacccccgcatcagcggcaagcccatcctggtgctggccaacaagcaggacaaggagggcgccctgggggaggctgatgtgattgagtgcctgagcctggagaagctggtgaatgagcacaagtgcctgtgccagatcgagccctgcagcgccatcagcggctacggcaagaagattgacaagagcatcaagaagggcctgtactggctgctgcacgtgattgcccgggactttgatgccctgaatgaaagaatccagaaggagaccacagagcagagggccctggaggagcaggagaagcaggagagagctgagcgggtgaggaagctgcgggaggagaggaagcagaatgagcaggagcaggccgagctggatggcaccagcggcctggccgagctggaccctgagcccaccaaccccttccagcccatcgccagcgtcatcattgaaaatgaaggcaagctggagcgggagaagaagaaccagaagatggagaaggacagtgatggctgccacctgaagcacaagatggagcacgagcagatcgagacccagggccaggtgaaccacaacggccagaagaacaatgaatttggcctggtggagaactacaaggaggccctgacccagcagctgaagaatgaagatgaaacagaccggcccagcctggagagcgccaacgggaagaagaagaccaagaagctgaggatgaagaggaaccaccgggtggagcccctgaacattgatgactgtgcccctgagagccccaccccacctcctcctcctcctcctgtgggctggggcacccccaaggtgacccggctgcccaagctggagcccctgggggagacccaccacaatgacttctacaggaagcccctgccccccctggccgtgccccagaggcccaacagtgatgcccatgatgtgatctcctag

SEQ ID NO: 69441 - DNA, 978 bp, Artificial Sequence
  derived and/or modified sequence
atggaggagaccaaggaggccatgagcgagatgctgcggcacccccgtataagcggcaaacctatcctggtattagctaacaagcaggataaggagggtgccttgggtgaggctgacgtgatcgagtgcctcagtcttgagaaactagttaacgaacacaaatgtctctgccagatagaaccatgtagcgctatttcagggtatggcaagaaaattgataagagtattaagaaaggcctctattggctcctacatgtaatcgcccgcgacttcgacgctttgaacgagaggatccaaaaggaaaccacggagcaaagggcactagaggagcaggaaaagcaggagagagcagaaagagttcgcaagcttcgcgaggaaaggaagcaaaatgagcaggaacaagccgagctcgatgggacctccggccttgcagaactggatcccgaacccaccaacccattccaacctatcgcgtccgtcataatcgagaacgaggggaaactcgaacgcgagaagaaaaaccaaaaaatggagaaggactctgacggctgtcacctaaaacataaaatggaacatgaacaaattgagacccagggccaggtcaatcacaacggccagaagaataacgaatttggactggtcgagaactacaaagaggctttaacccagcaactgaaaaacgaggacgaaactgatagaccatctctcgagtcggcgaatggtaagaaaaagacgaagaaactgagaatgaagcgaaatcacagagtcgagccactcaatatcgacgattgtgctcccgaaagtcccacaccacctccacccccacctccagttggatgggggactccaaaggtgaccaggctgccgaagctggaaccgttgggagagacccaccacaacgatttctacagaaaaccgctgcctccactcgcagtgccacagaggcccaatagtgacgcccacgatgtgatctcttag

SEQ ID NO: 69442 - DNA, 978 bp, Artificial Sequence
  derived and/or modified sequence
atggaagagaccaaggaagccatgtctgaaatgctgaggcatcccaggatctccggcaaaccaattttggtactggccaacaagcaggataaggagggcgctctaggggaggctgacgtgatcgagtgtttatcattagagaagctggttaacgaacacaaatgcctgtgtcagatcgaaccatgcagcgctataagtggttatggcaagaaaattgacaaatccatcaaaaaaggcctgtattggctgctccacgtcatagcacgcgatttcgacgctctgaatgagcggatacagaaggaaacaactgagcaacgtgctttggaagagcaagagaaacaagagagagccgagcgagtgcggaagctccgagaagagcggaagcagaacgaacaggaacaggctgagctcgacggaacaagcgggttagcggaactggatccagaacccaccaatccattccagccaatcgcttctgtgatcatagagaatgaaggcaagctggaacgggagaagaaaaatcagaaaatggaaaaggacagtgacggctgtcacctgaaacacaaaatggagcacgagcagattgagacccaagggcaggtcaaccataatggtcaaaaaaataacgagttcggactcgtggagaattacaaggaggcactgactcagcagctgaagaatgaggatgagaccgatagaccctccctggaatcagctaatggcaagaagaaaaccaaaaaactgcgtatgaagagaaatcaccgcgtggagcccctgaacattgacgactgtgcaccagagagtcccactcctccgccaccaccccctccagtgggctgggggaccccaaaggtgaccaggttgccgaaattggagcctctgggcgagacgcaccataacgatttttacagaaagcctcttccaccactggcagtacctcagagacctaactcagacgcacatgacgtgattagctag

SEQ ID NO: 69443 - DNA, 978 bp, Artificial Sequence
  derived and/or modified sequence
atggaggagaccaaggaggccatgagcgagatgctgagacaccccagaatcagcggcaagcccatcctggtgctggccaacaagcaggacaaggagggcgccctgggcgaggccgacgtgatcgagtgcctgagcctggagaagctggtgaacgagcacaagtgcctgtgccagatcgagccctgcagcgccatcagcggctacggcaagaagatcgacaagagcatcaagaagggcctgtactggctgctgcacgtgatcgccagagacttcgacgccctgaacgagagaatccagaaggagaccaccgagcagagagccctggaggagcaggagaagcaggagagagccgagagagtgagaaagctgagagaggagagaaagcagaacgagcaggagcaggccgagctggacggcaccagcggcctggccgagctggaccccgagcccaccaaccccttccagcccatcgccagcgtgatcatcgagaacgagggcaagctggagagagagaagaagaaccagaagatggagaaggacagcgacggctgccacctgaagcacaagatggagcacgagcagatcgagacccagggccaggtgaaccacaacggccagaagaacaacgagttcggcctggtggagaactacaaggaggccctgacccagcagctgaagaacgaggacgagaccgacagacccagcctggagagcgccaacggcaagaagaagaccaagaagctgagaatgaagagaaaccacagagtggagcccctgaacatcgacgactgcgcccccgagagccccacccccccccccccccccccccccgtgggctggggcacccccaaggtgaccagactgcccaagctggagcccctgggcgagacccaccacaacgacttctacagaaagcccctgccccccctggccgtgccccagagacccaacagcgacgcccacgacgtgatcagctag

SEQ ID NO: 69444 - DNA, 1119 bp, Artificial Sequence
  derived and/or modified sequence
atgaagcagctgcccgtgctggagcccggcgacaagcccagaaaggccacctggtacaccctgaccgtgcccggcgacagcccctgcgccagagtgggccacagctgcagctacctgccccccgtgggcaacgccaagagaggcaaggtgttcatcgtgggcggcgccaaccccaacagaagcttcagcgacgtgcacaccatggacctgggcaagcaccagtgggacctggacacctgcaagggcctgctgcccagatacgagcacgccagcttcatccccagctgcacccccgacagaatctgggtgttcggcggcgccaaccagagcggcaacagaaactgcctgcaggtgctgaaccccgagaccagaacctggaccacccccgaggtgaccagccccccccccagccccagaaccttccacaccagcagcgccgccatcggcaaccagctgtacgtgttcggcggcggcgagagaggcgcccagcccgtgcaggacaccaagctgcacgtgttcgacgccaacaccctgacctggagccagcccgagaccctgggcaacccccccagccccagacacggccacgtgatggtggccgccggcaccaagctgttcatccacggcggcctggccggcgacagattctacgacgacctgcactgcatcgacatcagcgacatgaagtggcagaagctgaaccccaccggcgccgcccccgccggctgcgccgcccacagcgccgtggccatgggcaagcacgtgtacatcttcggcggcatgacccccgccggcgccctggacaccatgtaccagtaccacaccgaggagcagcactggaccctgctgaagttcgacaccctgctgccccccggcagactggaccacagcatgtgcatcatcccctggcccgtgacctgcgccagcgagaaggaggacagcaacagcctgaccctgaaccacgaggccgagaaggaggacagcgccgacaaggtgatgagccacagcggcgacagccacgaggagagccagaccgccaccctgctgtgcctggtgttcggcggcatgaacaccgagggcgagatctacgacgactgcatcgtgaccgtggtggactag

SEQ ID NO: 69445 - DNA, 1119 bp, Artificial Sequence
  derived and/or modified sequence
atgaaacagttaccggtactagagccaggggacaagccccggaaggcaacctggtacacactcaccgtgcccggtgacagtccttgcgcccgcgttgggcactcctgctcctatctaccacctgtgggtaatgccaaaagggggaaagtgtttatcgttggcggggccaacccaaatcgcagcttttccgacgtgcataccatggacctgggaaaacaccagtgggatctggatacctgcaaggggctgcttccccggtatgagcacgcaagtttcatcccttcctgcacgcccgacaggatttgggtgttcggcggagctaatcagtcagggaatcggaattgcctgcaagttctcaatcctgagaccagaacgtggacaactcctgaggttacctcgccacccccttctccccgaacttttcatacaagttcagccgcaatcggaaaccagttatacgtgttcggcggaggggaacggggcgcccagcccgttcaagatactaagctgcatgttttcgatgcaaataccctgacctggtcacagccggaaacgctgggaaatccaccgtcccccaggcacggacatgtgatggtggccgctggcacaaagctgtttatccacggcggtctggccggagatcgtttttatgacgacctccactgcatcgacatttccgatatgaaatggcagaagctgaatcccacgggggcagctcccgcagggtgcgccgcccactccgctgtcgcaatgggaaaacatgtctatatttttggtgggatgactcctgcgggcgccctggacaccatgtatcagtatcacaccgaggaacagcattggacactcttgaaatttgatacactgcttcctccgggcaggctcgatcactcgatgtgcatcatcccctggcccgtcacctgtgcatccgagaaggaggattctaattcattgaccctgaaccacgaggcagaaaaagaggacagcgctgacaaggtcatgtcccactcaggagactctcatgaagaaagccagacagcgactttactatgtctggtttttggggggatgaacaccgaaggcgagatttacgacgactgcatagtgacagtggtggactag

SEQ ID NO: 69446 - DNA, 1119 bp, Artificial Sequence
  derived and/or modified sequence
atgaagcaattgcccgtgctggaaccgggagacaaaccccggaaggcaacatggtacactctaaccgtccctggtgacagtccttgtgcaagagtgggacatagttgcagctatctccctcctgtgggcaacgccaagcgtgggaaagtattcatcgtgggcggtgccaacccaaaccgcagctttagcgatgtccataccatggacctggggaagcaccaatgggacctagacacctgcaaggggctactgccgagatatgagcacgccagctttattcccagctgcacaccggatcgcatatgggtgttcggtggggcaaatcaaagcggaaatagaaattgcctgcaagtactcaatccagaaacaagaacatggactacccccgaggttacatcccctcctccatctcctcggacctttcatacatcgtctgctgcaatcggtaatcagttatacgtgtttggtggcggagagcggggcgcccagcctgtgcaggatacgaagctgcacgttttcgacgcaaacacactgacatggagtcagcctgagaccttaggaaatccccctagtcctcggcacggtcacgtcatggtcgcagccgggacgaagttatttatccatggtggtctggctggcgatagattctatgatgatctgcactgtattgatatcagcgacatgaaatggcagaaactgaacccgactggtgccgctcccgccggatgtgccgcccactcagctgtggctatgggcaagcatgtgtacatttttggagggatgacaccggccggtgcgctggacacgatgtaccagtatcataccgaagagcagcactggactcttctgaaatttgatacactgttgcctcccggcaggttagatcactctatgtgtattatcccctggcctgtgacatgcgcatctgagaaggaagatagcaacagtcttacacttaaccacgaagctgaaaaggaggatagcgccgacaaggtaatgtcacacagtggcgacagccatgaggaatcccagacagcaacattgctctgtctagtatttggagggatgaacaccgaaggtgaaatctacgacgactgtatcgtgactgttgtagactag

SEQ ID NO: 69447 - DNA, 1119 bp, Artificial Sequence
  derived and/or modified sequence
atgaagcagctgcctgtgctggagcccggggacaagcccaggaaggccacctggtacaccctgactgtgcctggggacagcccctgtgcccgggtgggccacagctgcagctacctgccccctgtgggcaatgccaagaggggcaaggtgttcatcgtgggcggggccaaccccaacagaagcttcagtgatgtgcacaccatggacctgggcaagcaccagtgggacctggacacctgcaagggcctgctgcccaggtatgaacatgccagcttcatccccagctgcaccccagaccgcatctgggtgtttggaggagccaaccagagcggcaacagaaactgcctgcaggtgctgaaccctgagaccaggacctggaccaccccagaggtgaccagccccccacccagccccaggaccttccacaccagcagcgctgccatcggcaaccagctgtatgtgtttggaggaggagagcggggggcccagcctgtgcaggacaccaagctgcacgtgtttgatgccaacaccctgacctggagccagcctgagaccctgggcaacccccccagccccaggcatggccacgtgatggtggccgccggcaccaagctgttcatccacggcggcctggccggggaccgcttctatgatgacctgcactgcatcgacatcagtgacatgaagtggcagaagctgaaccccaccggggccgccccagctggctgtgccgcccacagcgctgtggccatgggcaagcacgtgtacatctttggaggcatgaccccagctggggccctggacaccatgtaccagtaccacacagaggagcagcactggaccctgctgaagtttgacaccctgctgcccccaggccgcctggaccacagcatgtgcatcatcccctggcctgtgacctgtgccagcgagaaggaggacagcaacagcctgaccctgaaccatgaagctgagaaggaggacagcgctgacaaggtgatgagccacagcggggacagccatgaggagagccagacagccaccctgctgtgcctggtgtttggaggcatgaacacagaaggagagatctatgatgactgcatcgtgacagtggtggactag

SEQ ID NO: 69448 - DNA, 1119 bp, Artificial Sequence
  derived and/or modified sequence
atgaagcagctgcccgtgctggagcccggcgacaagccccggaaggccacctggtatacccttactgtacctggtgattccccatgtgctcgggtgggccactcatgttcctacctgcctcctgtcgggaacgcgaaacgcggcaaagtgtttattgtgggcggggccaatcctaatcgttcgttttcggacgttcatactatggatctcggcaagcatcagtgggacctggacacctgtaagggcctccttccccggtatgaacacgcatcgttcattccatcctgtacacccgataggatttgggtcttcggcggcgccaatcaatcaggaaaccgtaactgtctccaggtgttgaatccagagacgcggacatggacaacgccggaggtaacctcaccacccccaagcccacgcacttttcacacttcctctgcagccattggcaaccagctgtacgtgttcggtggtggggagagaggcgcgcagcctgtccaggatactaagttgcatgtgttcgacgctaatacactgacttggtctcagccagagacactggggaatccacccagcccccgtcacggccatgttatggttgccgcgggaactaagctcttcattcacgggggcctggcaggggacagattttatgacgacttgcactgtatcgacatctctgatatgaaatggcagaagttgaaccccaccggggccgcaccggccgggtgcgctgcgcacagtgccgtcgcaatgggcaaacacgtgtatattttcgggggtatgacacccgccggcgctctggataccatgtaccaataccacactgaagagcagcactggacccttctgaagttcgatactcttctgcctcccggccgcctggaccattcgatgtgcattattccgtggcccgtcacctgtgcctccgagaaggaggactcgaacagcttgaccttgaaccacgaagctgagaaagaagacagcgcggataaggtcatgtcccactccggggacagccatgaggaaagccaaacagctaccctgctgtgcctggtgtttggcggaatgaatacagagggagagatttatgacgattgtatcgtgacagtagtggactag

SEQ ID NO: 69449 - DNA, 1119 bp, Artificial Sequence
  derived and/or modified sequence
atgaagcagctgcccgtgctggagcccggcgacaagccccggaaggccacatggtacaccttgaccgtgcctggggactcgccctgtgcccgagtcgggcattcttgttcctatttacctccagtcggaaatgctaaacggggaaaggtgtttatagtgggtggagccaaccctaatagatctttttctgacgtccatacgatggacctgggcaaacaccagtgggatcttgacacctgcaaggggctgctcccccgctacgaacatgcctctttcattccctcctgcaccccagacagaatctgggtgtttggcggtgccaaccaatcagggaatcgcaactgcctacaggttttaaatccagagaccaggacatggaccacccctgaggtgacttctcctcccccctccccgagaacgtttcatacctcgagtgcagcgatcgggaaccaattatatgtgttcgggggcggtgagagaggtgcccagcctgtccaagatacaaagctgcacgtgttcgatgccaataccctcacctggtcacagcctgagaccctgggcaaccccccaagtccacgacatggccatgtgatggtggccgctgggactaagttgttcatccacggaggcctcgccggcgacagattttatgatgacctacattgtatcgacatttctgatatgaagtggcagaaactgaaccctaccggcgcagccccagccgggtgtgccgcccacagcgccgtggctatgggaaagcatgtgtacattttcggtggcatgacgccagctggagctttggatacaatgtaccagtaccacaccgaggagcaacactggaccctgctgaagttcgacactctcctgccccctggcaggttggaccactccatgtgcatcatcccttggcccgtgacctgtgcctctgaaaaggaggattccaactcactgacacttaaccacgaagcggaaaaagaggactcggctgataaggtcatgtcacactcaggcgactcccatgaggaaagccagaccgccactctactttgtttagttttcggcggaatgaatacagaaggggaaatctatgatgactgtatcgtgacagtggtggactag

SEQ ID NO: 69450 - DNA, 1119 bp, Artificial Sequence
  derived and/or modified sequence
atgaaacagcttcctgtgctggagcccggtgataagcccagaaaagctacatggtacacattgacagtgcccggagacagtccatgcgcaagggtggggcacagctgtagctacctccccccagtgggtaacgctaagcgcggtaaggtgtttatcgtgggcggagcaaaccccaaccgttcctttagcgacgttcatacgatggatctcgggaaacaccaatgggaccttgacacatgcaagggactgctgcccaggtatgagcatgcatcttttatcccgtcctgcactccagatagaatttgggtatttgggggtgctaaccagtcgggcaatagaaactgtctgcaggttctgaatcccgaaacacgcacctggaccacccccgaagtgacctctccgcctccttcacccagaacctttcacacatcatccgccgctatcggaaatcagctatacgtgtttggtggaggcgagcggggagctcagcctgtccaggatactaagttgcacgttttcgacgcgaatacccttacttggtctcagcctgaaaccctgggaaaccctcccagcccccgacatgggcatgtcatggttgcggctggcaccaagcttttcatccatggaggcctggctggcgatcgtttctacgatgacttacattgcatcgacatttctgatatgaagtggcagaaacttaatcccacgggagcggctcctgccggttgtgccgcacactctgcagtcgctatgggtaagcacgtatatatcttcggcggtatgacccccgctggggctctcgacacaatgtatcaatatcataccgaggagcaacattggacactcctgaaatttgatacactccttcctcccggacgcctagaccactccatgtgcattatcccttggccggtaacctgtgcgagtgagaaggaggattctaactccctgacactcaatcatgaggcagaaaaagaagacagcgcagacaaagtaatgtctcacagtggcgattcacacgaagaaagccaaacggctaccttactgtgtctggtgttcgggggaatgaatacagagggcgaaatctatgatgactgcattgtgacagtagtggactag

SEQ ID NO: 69451 - DNA, 1119 bp, Artificial Sequence
  derived and/or modified sequence
atgaagcaattacccgtcctcgagccgggtgacaagcctcgcaaagccacgtggtacactttgacggttccgggagactctccctgcgctagagtcggccattcctgtagttatctaccgcctgtggggaacgccaagaggggcaaggtgtttattgtcggaggggcaaaccctaacagatcattctcagatgtgcacacgatggaccttggaaaacaccaatgggacctcgacacttgtaaggggctgttaccccgatatgagcacgcttccttcatcccctcctgtacccctgacaggatttgggtgtttgggggagccaatcagtctgggaatcgaaactgccttcaggtcttaaaccccgaaacccggacatggaccaccccagaggtgacgtctcctcccccttcccctaggacttttcatacctcatccgcagctatcgggaatcaactatatgtgtttggcggtggggagcggggagcccagcccgtccaggatacgaagctacacgtgttcgacgccaatacactcacctggagtcagcctgagaccttgggcaaccctccttccccaagacatggacacgtgatggtggctgcaggcaccaagctctttattcatgggggacttgccggtgataggttctacgatgacctccactgtatagatattagcgatatgaaatggcagaagctgaacccaaccggggctgccccagctggatgcgccgctcattccgcagtggctatgggaaagcatgtatacatcttcgggggaatgactcctgccggtgcactggatactatgtatcagtaccacactgaggaacagcactggacactgctgaaattcgacactctactgcccccaggcagactggaccattcaatgtgcattattccatggccagtgacctgcgcctctgagaaagaagactccaacagtttgacgctgaatcatgaggcggagaaggaggatagcgccgataaggtgatgtcccacagcggtgacagtcacgaagaatctcaaaccgcaactctgctctgtttggtatttggtgggatgaacaccgaaggagagatttacgacgactgtatcgtcactgttgtggattag

SEQ ID NO: 69452 - DNA, 966 bp, Artificial Sequence
  derived and/or modified sequence
atgaagcagctgcccgtgctggagcccggcgacaagcccagaaaggccacctggtacaccctgaccgtgcccggcgacagcccctgcgccagagtgggccacagctgcagctacctgccccccgtgggcaacgccaagagaggcaaggtgttcatcgtgggcggcgccaaccccaacagaagcttcagcgacgtgcacaccatggacctggagaccagaacctggaccacccccgaggtgaccagccccccccccagccccagaaccttccacaccagcagcgccgccatcggcaaccagctgtacgtgttcggcggcggcgagagaggcgcccagcccgtgcaggacaccaagctgcacgtgttcgacgccaacaccctgacctggagccagcccgagaccctgggcaacccccccagccccagacacggccacgtgatggtggccgccggcaccaagctgttcatccacggcggcctggccggcgacagattctacgacgacctgcactgcatcgacatcagcgacatgaagtggcagaagctgaaccccaccggcgccgcccccgccggctgcgccgcccacagcgccgtggccatgggcaagcacgtgtacatcttcggcggcatgacccccgccggcgccctggacaccatgtaccagtaccacaccgaggagcagcactggaccctgctgaagttcgacaccctgctgccccccggcagactggaccacagcatgtgcatcatcccctggcccgtgacctgcgccagcgagaaggaggacagcaacagcctgaccctgaaccacgaggccgagaaggaggacagcgccgacaaggtgatgagccacagcggcgacagccacgaggagagccagaccgccaccctgctgtgcctggtgttcggcggcatgaacaccgagggcgagatctacgacgactgcatcgtgaccgtggtggactag

SEQ ID NO: 69453 - DNA, 966 bp, Artificial Sequence
  derived and/or modified sequence
atgaaacaactgcctgtgctggaaccgggcgacaaaccccggaaagctacgtggtacaccttgacagtccccggggacagtccttgcgccagggttggccacagttgtagctatttgccaccagtgggcaatgctaagcggggcaaggtttttatagttggcggtgccaatcctaaccggtcgttttctgacgtgcacaccatggatctggaaactagaacttggactacccctgaagtgacctcgcccccaccttctcccagaacgtttcacacaagttccgccgccatcgggaaccagctatacgtttttgggggcggtgagcgtggagcccaacccgtgcaggatactaagttgcacgtgtttgacgccaatacgctgacctggagccagccagagacccttggcaaccccccgagccccagacatgggcacgtcatggtggctgccggcacaaagctatttatccacgggggattggctggcgatcgcttctacgacgatcttcattgcatcgatatcagcgatatgaagtggcaaaagttgaacccaaccggagctgcaccagctggctgcgcggctcatagcgctgtcgcaatgggaaagcacgtgtatatttttggcgggatgacacctgctggcgccctggacacaatgtaccaatatcacactgaggaacaacattggaccctgctgaaattcgacacattgctccctccaggcagactcgatcatagtatgtgcataattccatggcccgttacatgtgcaagcgagaaagaggactctaattcactgaccttaaaccacgaagcggagaaggaggatagcgcagacaaagtgatgtctcactccggtgattcccacgaggagagtcagacagccacactgctttgcctggttttcggcggaatgaataccgaaggagagatttatgatgactgtatagtcaccgttgtggactag

SEQ ID NO: 69454 - DNA, 966 bp, Artificial Sequence
  derived and/or modified sequence
atgaagcagctgcctgtgctggagcccggggacaagcccaggaaggccacctggtacaccctgactgtgcctggggacagcccctgtgcccgggtgggccacagctgcagctacctgccccctgtgggcaatgccaagaggggcaaggtgttcatcgtgggcggggccaaccccaacagaagcttcagtgatgtgcacaccatggacctggagaccaggacctggaccaccccagaggtgaccagccccccacccagccccaggaccttccacaccagcagcgctgccatcggcaaccagctgtatgtgtttggaggaggagagcggggggcccagcctgtgcaggacaccaagctgcacgtgtttgatgccaacaccctgacctggagccagcctgagaccctgggcaacccccccagccccaggcatggccacgtgatggtggccgccggcaccaagctgttcatccatggaggcctggccggggaccgcttctatgatgacctgcactgcatcgacatcagtgacatgaagtggcagaagctgaaccccactggagctgccccagctggctgtgccgcccacagcgctgtggccatgggcaagcacgtgtacatctttggaggcatgaccccagctggggccctggacaccatgtaccagtaccacacagaggagcagcactggaccctgctgaagtttgacaccctgctgcccccaggccgcctggaccacagcatgtgcatcatcccctggcctgtgacctgtgccagcgagaaggaggacagcaacagcctgaccctgaaccacgaggccgagaaggaggacagcgctgacaaggtgatgagccacagcggggacagccatgaggagagccagacagccaccctgctgtgcctggtgtttggaggcatgaacacagaaggagagatctatgatgactgcatcgtgacagtggtggactag

SEQ ID NO: 69455 - DNA, 966 bp, Artificial Sequence
  derived and/or modified sequence
atgaagcagctgcccgtgctggagcccggcgacaagccccggaaggcaacttggtataccttaaccgtccctggcgacagcccctgcgcccgggttggtcacagttgttcatacctgccccctgttggtaacgctaagagggggaaagtcttcattgttggaggcgcaaatcccaaccgctccttcagcgacgtgcacacaatggacttggagacccgaacatggacaacgcctgaggtcacaagtccccctcccagtccccgtacgtttcatacatcatctgctgctatagggaaccagctatacgtgttcggtggaggtgagcggggagcacagcccgtccaggacacaaagctgcacgtgttcgacgccaacacacttacttggagccagccggagacactgggcaatccaccatcgcccaggcacggccacgtaatggtggcagctggtacaaagctgttcatccacggagggctcgccggcgatagattttacgacgacctgcattgtatcgacatctccgacatgaagtggcaaaaactaaatccaacaggcgccgcaccagccgggtgcgctgcacatagtgccgtggctatggggaagcacgtatacatctttgggggtatgaccccagctggggcactcgacaccatgtatcaatatcacactgaagagcaacactggaccctacttaagtttgatacactgttaccgccaggcagactggaccacagcatgtgtattatcccctggcccgtgacgtgtgcttccgaaaaagaggacagcaattctcttacgttgaaccacgaagccgagaaggaggacagtgccgataaagtgatgtcacatagcggagattcacacgaggaaagtcaaacagcgactttgctgtgcctggtgtttggtggaatgaataccgaaggcgagatctacgatgattgcatcgttaccgtcgtggactag

SEQ ID NO: 69456 - DNA, 966 bp, Artificial Sequence
  derived and/or modified sequence
atgaagcagctgccagtgctggaacctggggacaagccccgaaaagccacctggtatactcttactgtccctggcgatagtccctgtgctcgagtgggccactcctgtagctacctcccccctgttggcaacgccaaacgtggtaaggtgtttattgtgggcggagcaaatcccaatcgctccttctcagatgtgcacaccatggaccttgagactcgcacctggactaccccggaagtaacctcaccacctccctcccctagaactttccacaccagctccgccgcaatcggcaaccagctctacgtatttgggggaggagaaaggggagcacagcccgtgcaggacacgaaactgcacgtgttcgatgccaacacactcacctggtcccagcctgaaacgttgggtaaccctccgtcaccacgccacggccatgtgatggtagcggctgggactaaactgttcattcacggcggactggctggggacagattctatgacgacctgcactgtattgacatcagcgatatgaagtggcagaagttaaaccccacaggcgcagcccctgccggatgtgcagcccatagcgcagtggccatgggcaagcacgtgtatatctttggtggcatgactcccgctggggctctggatacaatgtatcagtaccatactgaagagcagcactggactcttttaaagttcgacacgctgttgcccccaggaagactcgatcacagcatgtgtatcatcccttggccagtgacctgcgcaagcgagaaggaagacagcaacagcctgacgctcaatcatgaagcggagaaagaggacagcgctgacaaggtgatgtcacacagcggagactcccatgaagagtcccaaaccgccacactgctgtgcctcgtgttcggcggaatgaacacagagggagagatctatgatgactgtattgtcaccgtggttgactag

SEQ ID NO: 69457 - protein, 1181 aa, Artificial Sequence
  derived and/or modified sequence
METRAAENTAIFMCKCCNLFSPNQSELLSHVSEKHMEEGVNVDEIIIPLRPLSTPEPPNSSKTGDEFLVMKRKRGRPKGSTKKSSTEEELAENIVSPTEDSPLAPEEGNSLPPSSLECSKCCRKFSNTRQLRKHICIIVLNLGEEEGEAGATKIVPVEAGPPETGATNSETTSADLVPRRGYQEYAIQQTPYEQPMKSSRLGPTQLKIFTCEYCNKVFKFKHSLQAHLRIHTNEKPYKCPQCSYASAIKANLNVHLRKHTGEKFACDYCSFTCLSKGHLKVHIERVHKKIKQHCRFCKKKYSDVKNLIKHIRDAHDPQDKKVKEALDELCLMTREGKRQLLYDCHICERKFKNELDRDRHMLVHGDKWPFACELCGHGATKYQALELHVRKHPFVYVCAVCRKKFVSSIRLRTHIKEVHGAAQEALVFTSSINQSFCLLEPGGDIQQEALGDQLQLVEEEFALQGVNALKEEACPGDTQLEEGRKEPEAPGEMPAPAVHLASPQAESTALPPCELETTVVSSSDLHSQEVVSDDFLLKNDTSSAEAHAAPEKPPDMQHRSSVQTQGEVITLLLSKAQSAGSDQESHGAQSPLGEGQNMAVLSAGDPDPSRCLRSNPAEASDLLPPVAGGGDTITHQPDSCKAAPEHRSGITAFMKVLNSLQKKQMNTSLCERIRKVYGDLECEYCGKLFWYQVHFDMHVRTHTREHLYYCSQCHYSSITKNCLKRHVIQKHSNILLKCPTDGCDYSTPDKYKLQAHLKVHTALDKRSYSCPVCEKSFSEDRLIKSHIKTNHPEVSMSTISEVLGRRVQLKGLIGKRAMKCPYCDFYFMKNGSDLQRHIWAHEGVKPFKCSLCEYATRSKSNLKAHMNRHSTEKTHLCDMCGKKFKSKGTLKSHKLLHTADGKQFKCTVCDYTAAQKPQLLRHMEQHVSFKPFRCAHCHYSCNISGSLKRHYNRKHPNEEYANVGTGELAAEVLIQQGGLKCPVCSFVYGTKWEFNRHLKNKHGLKVVEIDGDPKWETATEAPEEPSTQYLHITEAEEDVQGTQAAVAALQDLRYTSESGDRLDPTAVNILQQIIELGAETHDATALASVVAMAPGTVTVVKQVTEEEPSSNHTVMIQETVQQASVELAEQHHLVVSSDDVEGIETVTVYTQGGEASEFIVYVQEAMQPVEEQAVEQPAQEL

SEQ ID NO: 69458 - DNA, 3546 bp, Artificial Sequence
  derived and/or modified sequence
atggagaccagagccgccgagaacaccgccatcttcatgtgcaagtgctgcaacctgttcagccccaaccagagcgagctgctgagccacgtgagcgagaagcacatggaggagggcgtgaacgtggacgagatcatcatccccctgagacccctgagcacccccgagccccccaacagcagcaagaccggcgacgagttcctggtgatgaagagaaagagaggcagacccaagggcagcaccaagaagagcagcaccgaggaggagctggccgagaacatcgtgagccccaccgaggacagccccctggcccccgaggagggcaacagcctgccccccagcagcctggagtgcagcaagtgctgcagaaagttcagcaacaccagacagctgagaaagcacatctgcatcatcgtgctgaacctgggcgaggaggagggcgaggccggcgccaccaagatcgtgcccgtggaggccggcccccccgagaccggcgccaccaacagcgagaccaccagcgccgacctggtgcccagaagaggctaccaggagtacgccatccagcagaccccctacgagcagcccatgaagagcagcagactgggccccacccagctgaagatcttcacctgcgagtactgcaacaaggtgttcaagttcaagcacagcctgcaggcccacctgagaatccacaccaacgagaagccctacaagtgcccccagtgcagctacgccagcgccatcaaggccaacctgaacgtgcacctgagaaagcacaccggcgagaagttcgcctgcgactactgcagcttcacctgcctgagcaagggccacctgaaggtgcacatcgagagagtgcacaagaagatcaagcagcactgcagattctgcaagaagaagtacagcgacgtgaagaacctgatcaagcacatcagagacgcccacgacccccaggacaagaaggtgaaggaggccctggacgagctgtgcctgatgaccagagagggcaagagacagctgctgtacgactgccacatctgcgagagaaagttcaagaacgagctggacagagacagacacatgctggtgcacggcgacaagtggcccttcgcctgcgagctgtgcggccacggcgccaccaagtaccaggccctggagctgcacgtgagaaagcaccccttcgtgtacgtgtgcgccgtgtgcagaaagaagttcgtgagcagcatcagactgagaacccacatcaaggaggtgcacggcgccgcccaggaggccctggtgttcaccagcagcatcaaccagagcttctgcctgctggagcccggcggcgacatccagcaggaggccctgggcgaccagctgcagctggtggaggaggagttcgccctgcagggcgtgaacgccctgaaggaggaggcctgccccggcgacacccagctggaggagggcagaaaggagcccgaggcccccggcgagatgcccgcccccgccgtgcacctggccagcccccaggccgagagcaccgccctgcccccctgcgagctggagaccaccgtggtgagcagcagcgacctgcacagccaggaggtggtgagcgacgacttcctgctgaagaacgacaccagcagcgccgaggcccacgccgcccccgagaagccccccgacatgcagcacagaagcagcgtgcagacccagggcgaggtgatcaccctgctgctgagcaaggcccagagcgccggcagcgaccaggagagccacggcgcccagagccccctgggcgagggccagaacatggccgtgctgagcgccggcgaccccgaccccagcagatgcctgagaagcaaccccgccgaggccagcgacctgctgccccccgtggccggcggcggcgacaccatcacccaccagcccgacagctgcaaggccgcccccgagcacagaagcggcatcaccgccttcatgaaggtgctgaacagcctgcagaagaagcagatgaacaccagcctgtgcgagagaatcagaaaggtgtacggcgacctggagtgcgagtactgcggcaagctgttctggtaccaggtgcacttcgacatgcacgtgagaacccacaccagagagcacctgtactactgcagccagtgccactacagcagcatcaccaagaactgcctgaagagacacgtgatccagaagcacagcaacatcctgctgaagtgccccaccgacggctgcgactacagcacccccgacaagtacaagctgcaggcccacctgaaggtgcacaccgccctggacaagagaagctacagctgccccgtgtgcgagaagagcttcagcgaggacagactgatcaagagccacatcaagaccaaccaccccgaggtgagcatgagcaccatcagcgaggtgctgggcagaagagtgcagctgaagggcctgatcggcaagagagccatgaagtgcccctactgcgacttctacttcatgaagaacggcagcgacctgcagagacacatctgggcccacgagggcgtgaagcccttcaagtgcagcctgtgcgagtacgccaccagaagcaagagcaacctgaaggcccacatgaacagacacagcaccgagaagacccacctgtgcgacatgtgcggcaagaagttcaagagcaagggcaccctgaagagccacaagctgctgcacaccgccgacggcaagcagttcaagtgcaccgtgtgcgactacaccgccgcccagaagccccagctgctgagacacatggagcagcacgtgagcttcaagcccttcagatgcgcccactgccactacagctgcaacatcagcggcagcctgaagagacactacaacagaaagcaccccaacgaggagtacgccaacgtgggcaccggcgagctggccgccgaggtgctgatccagcagggcggcctgaagtgccccgtgtgcagcttcgtgtacggcaccaagtgggagttcaacagacacctgaagaacaagcacggcctgaaggtggtggagatcgacggcgaccccaagtgggagaccgccaccgaggcccccgaggagcccagcacccagtacctgcacatcaccgaggccgaggaggacgtgcagggcacccaggccgccgtggccgccctgcaggacctgagatacaccagcgagagcggcgacagactggaccccaccgccgtgaacatcctgcagcagatcatcgagctgggcgccgagacccacgacgccaccgccctggccagcgtggtggccatggcccccggcaccgtgaccgtggtgaagcaggtgaccgaggaggagcccagcagcaaccacaccgtgatgatccaggagaccgtgcagcaggccagcgtggagctggccgagcagcaccacctggtggtgagcagcgacgacgtggagggcatcgagaccgtgaccgtgtacacccagggcggcgaggccagcgagttcatcgtgtacgtgcaggaggccatgcagcccgtggaggagcaggccgtggagcagcccgcccaggagctgtag

SEQ ID NO: 69459 - DNA, 3546 bp, Artificial Sequence
  derived and/or modified sequence
atggagaccagggccgccgaaaacaccgcaattttcatgtgcaagtgctgcaacttgttctctccaaaccagagcgagctgctgagccatgtgagcgagaaacacatggaggagggggttaatgttgatgaaatcattatcccgctccggcccctaagcaccccggagccacccaactcctccaaaacgggggatgaatttctcgtcatgaagcgtaaacggggaagacccaaaggatcaaccaaaaaatccagtacggaggaggagctggctgagaatatcgtgagtcctaccgaagacagccctttagcgccggaggagggaaattcccttccgccttcttccctcgagtgcagcaaatgctgccggaaattctctaatactagacaactgcgcaagcatatctgcattatcgttcttaaccttggagaggaggaaggtgaggccggtgcaactaagattgtccctgttgaggcaggtccaccagagacgggcgccaccaattccgaaacaacaagcgccgatcttgtccccagacggggttaccaggagtacgccattcagcagaccccatacgagcagccaatgaaaagtagtagactcggtcctacccaactcaagatctttacgtgtgagtactgcaataaagtgttcaaatttaaacactctttgcaggcccacctgagaatccatacaaatgaaaaaccgtacaagtgtccgcaatgtagctatgctagtgccatcaaagctaatctgaacgtccatctccgcaagcacactggtgagaaattcgcctgcgattattgcagtttcacttgcctgagcaaagggcatcttaaggtccatatcgagagggtacataagaaaattaaacaacactgcagattttgtaagaaaaagtattctgatgtcaaaaatctgatcaagcacattagagatgcacacgaccctcaggacaagaaggtcaaggaggccctggatgaactttgcttgatgacccgggaagggaagcgacaactgttgtacgattgccatatctgcgagcgaaaattcaaaaacgagctggatagagataggcacatgctggttcacggagacaagtggccctttgcatgtgaactgtgcggtcacggcgcgactaagtaccaggcactggagctgcacgtgagaaagcacccctttgtttatgtttgtgcagtctgtagaaaaaaatttgtcagctcgatacggctgcgcacacacataaaggaagtccacggcgccgcccaggaagccctggtcttcaccagctctattaatcagagcttctgcctgctggaaccagggggcgacatacaacaggaagcacttggcgatcagctgcagttagtcgaggaggaatttgcacttcagggggtcaacgctttaaaggaggaggcctgccccggtgacacacagctggaggaagggcgcaaggaacctgaggcccccggcgaaatgcccgcgcctgcagtgcacctggcttccccccaggcggaatctacggcccttccaccctgcgaactggagacgacagttgtaagctcgagtgatttgcattcccaggaggtcgtgtcagatgatttcctgctgaagaacgacacaagttccgccgaggcccatgccgctcctgagaagcccccggatatgcagcaccggagttctgtacagactcagggcgaggtgataacgctcctgttgagcaaggctcagtcagccggcagcgatcaggagtcccacggcgcccaatccccactgggtgagggccaaaatatggccgtgttatcggcgggggaccctgatccgagtcgctgcctacgctccaatcccgccgaggcttccgatctcctgcctcctgtcgccggaggcggggacaccatcacccatcagccagactcctgtaaggccgcaccggagcatcgctctgggattaccgcctttatgaaagtgttaaactccctccagaagaaacagatgaacactagcctttgtgaacggatacgcaaggtttacggagatttggagtgtgagtactgcggcaagctgttctggtaccaagtccacttcgacatgcacgttcgtacccacacaagggaacacctctactattgtagccagtgtcactactcaagtattaccaagaattgcctgaagcgccatgtgatccagaaacactctaacatactcctgaaatgtcctactgacggttgcgattacagtacacccgacaaatataagctccaggcgcatcttaaagtccacaccgccctggataagcgatcctattcatgccctgtttgcgaaaaatcctttagcgaagatcggctcattaagtcccatatcaagaccaaccatcctgaagtgtctatgagcaccattagcgaggtgctgggaaggcgggtgcagctcaagggattaattggcaagcgcgccatgaaatgcccatactgcgatttttattttatgaagaacggcagtgacttacagagacacatttgggcacacgagggcgttaagccattcaagtgctctctttgtgagtatgcaactaggtcgaagagcaatcttaaggcccacatgaacaggcattcaacagagaaaacccatctttgtgatatgtgtggaaagaagttcaaaagcaaaggtactctgaagtcacacaaacttcttcacaccgcagacggcaagcagttcaaatgcactgtgtgtgactatactgccgctcagaagccgcagctcctgcggcacatggaacagcatgtttcctttaaaccattcagatgtgcccactgtcattattcttgtaatatttccggatcgttgaaacgacactacaaccggaagcatcctaacgaggagtatgccaacgtgggaaccggggaattggccgccgaagtgctgatccagcaaggagggctgaagtgtcctgtctgcagttttgtgtacggtaccaagtgggagttcaatcgccacttgaagaataagcacgggctgaaagtggtcgagatcgacggagacccaaaatgggagacagctactgaagcccctgaggagccctccacacagtatctccacattacggaggcagaagaggacgtgcaggggacacaggcagctgtggccgcattgcaggacttgaggtatacctccgagtccggcgacagattggatcctaccgccgtcaacattctccagcagattatcgagctgggagctgagactcatgacgccaccgcccttgccagtgttgttgccatggcgcccgggaccgtcactgtggttaaacaggtgaccgaagaggagcctagtagcaaccatacggtgatgatccaggagacagtccagcaggcctctgtggagctcgccgagcagcatcacctcgtcgtgtcttcagatgacgtcgagggcattgagacggtgaccgtgtacactcaaggcggagaagctagcgagtttattgtgtatgtgcaggaagcaatgcaacctgttgaggagcaggccgtcgagcagcccgcccaggaactctag

SEQ ID NO: 69460 - DNA, 3546 bp, Artificial Sequence
  derived and/or modified sequence
atggagaccagggctgctgaaaatacagccatcttcatgtgcaagtgctgcaacctcttcagccccaaccagagcgagctgctgagccacgtgtctgagaagcacatggaggagggcgtgaatgtggatgagatcatcatccccctgcggcccctgagcaccccagagccccccaacagcagcaagacaggagatgagttcctggtgatgaagaggaagaggggccggcccaagggcagcaccaagaagagcagcacagaggaggagctggccgagaacatcgtgagccccacagaggacagccccctggcccctgaggagggcaacagcctgccccccagcagcctggagtgcagcaagtgctgcaggaagttcagcaacacccggcagctgaggaagcacatctgcatcatcgtgctgaacctgggggaggaggagggggaggccggggccaccaagatcgtgcctgtggaggccggccccccagagaccggggccaccaacagcgagaccaccagcgctgacctggtgccccggcggggctaccaggagtatgccatccagcagaccccctatgagcagcccatgaagagcagccggctgggccccacccagctgaagatcttcacctgtgagtactgcaacaaggtgttcaagttcaagcacagcctgcaggcccacctgcgcatccacaccaatgagaagccctacaagtgcccccagtgcagctatgccagcgccatcaaggccaacctgaatgtgcacctgaggaagcacactggagagaagtttgcctgtgactactgcagcttcacctgcctgagcaagggccacctgaaggtgcacatcgagcgggtgcacaagaagatcaagcagcactgccgcttctgcaagaagaagtacagtgatgtgaagaacctgatcaagcacatcagagatgcccatgacccccaggacaagaaggtgaaggaggccctggatgagctgtgcctgatgacccgggagggcaagaggcagctgctgtatgactgccacatctgtgagaggaagttcaagaatgagctggaccgggacagacacatgctggtgcacggggacaagtggccctttgcctgtgagctgtgtggccatggagccaccaagtaccaggccctggagctgcacgtgaggaagcacccctttgtgtatgtgtgtgctgtgtgcaggaagaagtttgtgagcagcatccggctgcggacccacatcaaggaggtgcatggagctgcccaggaggccctggtgttcaccagcagcatcaaccagagcttctgcctgctggagcctggaggagacatccagcaggaggccctgggggaccagctgcagctggtggaggaggagtttgccctgcagggcgtgaatgccctgaaggaggaggcctgccctggggacacccagctggaggagggcaggaaggagcctgaggcccctggagagatgcctgccccagctgtgcacctggccagcccccaggccgagagcacagccctgcccccctgtgagctggagaccaccgtggtgagcagcagtgacctgcacagccaggaggtggtgtctgatgacttcctgctgaagaatgacaccagcagcgctgaggcccacgccgcccctgagaagcccccagacatgcagcacaggagctctgtgcagacccagggcgaggtgatcaccctgctgctgagcaaggcccagagcgctggcagtgaccaggagagccacggggcccagagccccctgggggagggccagaacatggctgtgctgtctgctggggaccctgaccccagccgctgcctgcggagcaacccagctgaggccagtgacctgctgccccctgtggccggcggcggggacaccatcacccaccagcctgacagctgcaaggccgcccctgagcacaggagcggcatcacagccttcatgaaggtgctgaacagcctgcagaagaagcagatgaacaccagcctgtgtgagcgcatcaggaaggtgtatggagacctggagtgtgagtactgcggcaagctgttctggtaccaggtgcactttgacatgcacgtgaggacccacacccgggagcacctgtactactgcagccagtgccactacagcagcatcaccaagaactgcctgaagagacatgtgatccagaagcacagcaacatcctgctgaagtgccccacagatggctgtgactacagcaccccagacaagtacaagctgcaggcccacctgaaggtgcacacagccctggacaagaggagctacagctgccctgtgtgtgagaagagcttctctgaagatagactcatcaagagccacatcaagaccaaccaccctgaggtgtccatgagcaccatcagcgaggtgctgggcagaagagtgcagctgaagggcctgattggcaagagggccatgaagtgcccctactgtgacttctacttcatgaagaatggaagtgacctgcagaggcacatctgggcccatgaaggagtgaagcccttcaagtgcagcctgtgtgaatatgccaccaggagcaagagcaacctgaaggcccacatgaacagacacagcacagagaagacccacctgtgtgacatgtgtgggaagaagttcaagagcaagggcaccctgaagagccacaagctgctgcacacagcagatggcaagcagttcaagtgcaccgtgtgtgactacacagctgcccagaagccccagctgctgcggcacatggagcagcacgtgtccttcaagcccttccgctgtgcccactgccactacagctgcaacatcagcggcagcctgaagaggcactacaacaggaagcaccccaatgaggagtatgccaacgtgggcactggagagctggccgctgaggtgctgatccagcagggcggcctgaagtgccctgtgtgcagctttgtgtatggcaccaagtgggagttcaacagacacctgaagaacaagcacggcctgaaggtggtggagattgatggagaccccaagtgggagacagccacagaggcccctgaggagcccagcacccagtacctgcacatcacagaagcagaagaagatgtgcagggcacccaggccgctgtggccgccctgcaggacctgcgctacaccagcgagagcggggaccggctggaccccacagctgtgaacatcctgcagcagatcatcgagctgggcgctgagacccatgatgccacagccctggcctctgtggtggccatggcccctggcaccgtgacagtggtgaagcaggtgacagaggaggagcccagcagcaaccacacagtgatgatccaggagaccgtgcagcaggcctctgtggagctggccgagcagcaccacctggtggtgtccagtgatgatgtggagggcattgaaacagtgacagtgtacacccagggcggggaggccagcgagttcatcgtgtatgtgcaggaggccatgcagcctgtggaggagcaggccgtggagcagcctgcccaggagctgtag

SEQ ID NO: 69461 - DNA, 3546 bp, Artificial Sequence
  derived and/or modified sequence
atggagacccgggccgccgagaacaccgccatcttcatgtgcaagtgttgtaacctattcagccctaatcagtctgaactcctctcacacgtgagtgagaagcacatggaggagggcgtgaacgttgatgagattatcatccctctgcgacccttgtccacaccagagccccctaactctagtaagaccggtgatgaatttctggtgatgaagcggaagcgcggcagacctaaagggagcacaaaaaaatcctctaccgaggaagaattggcggaaaatattgtcagtcctactgaagatagtccactcgctccggaggagggaaatagtttgccgccgagcagcttagagtgttctaaatgctgtcgcaaattttccaatacgcgacagttgaggaaacacatttgtattatcgtgcttaacctgggagaggaggagggagaagcgggcgccaccaaaattgtaccagtggaagctggtccgccagagacaggtgccactaatagcgaaacaacaagcgctgatttggtgccccggcgcggctatcaggaatacgccatccagcagaccccctatgagcagccaatgaaatcctcccgcctgggacccactcagcttaagatattcacttgcgagtattgtaataaggtgttcaaattcaaacactctctccaggcccacctgcggatacatacaaatgaaaagccatacaaatgtccccagtgttcctacgctagcgcaattaaagctaacctcaacgtccacttacggaaacacaccggcgaaaagttcgcctgcgactactgtagtttcacctgtctctcaaaggggcacctcaaggtccacatcgagcgggtgcacaagaaaatcaagcagcactgtcggttctgcaagaaaaaatattctgacgttaaaaatctgatcaagcatatccgcgatgcgcacgacccgcaggacaagaaggtaaaagaagccctagatgagctttgcctgatgactcgggaagggaaacgccagctgctctacgactgccacatctgtgagcgaaagtttaagaacgaactggatcgggatagacatatgttagtgcacggcgataagtggcctttcgcttgcgagttgtgcggtcatggagccaccaagtaccaggctttagagctgcatgttcgcaagcatccattcgtctatgtgtgtgccgtgtgtcgtaaaaagtttgtatcatccatccgcttgcgaacgcacataaaggaggtgcatggagccgcacaggaggctttggtcttcacctcgagtataaaccaatcattctgcctcctggaacccggaggtgatattcagcaagaagcattaggtgatcagttgcagctggtggaggaggaattcgcactccagggagtgaatgctctgaaggaggaggcctgcccaggtgatacccagctggaggagggaaggaaagaaccagaggcccctggagaaatgcccgctcccgcggtgcacttagcatctcctcaggctgagtctacagccctacccccatgcgagctggagacaaccgtcgtcagcagctccgatctgcactcacaggaagtggtcagtgacgacttcctcctcaagaatgatacaagtagcgccgaggctcatgctgccccagagaagccaccggatatgcaacaccgatctagtgtgcagactcagggtgaagtcattacgttactgctgtcaaaggcccagagcgccggctccgaccaggaaagccatggcgcgcagagccccctcggagaagggcagaatatggcagtcctgagcgctggcgatccagacccgagtcgatgtctgcggtctaaccccgccgaggccagtgatttgttaccgcccgtggcgggaggaggagacacaataacacatcagcctgactcatgcaaggcggcccctgagcatagatcgggcatcaccgctttcatgaaagttctaaattctctccagaagaagcaaatgaatacttctctctgcgagcggatcagaaaagtgtacggtgacctggagtgcgaatattgtggaaaacttttctggtatcaggttcatttcgacatgcacgtcaggacacacacacgcgagcacctctattattgctcccaatgccactactctagtattactaagaactgcctaaaacgccacgtgattcagaagcattcaaatatccttctaaagtgtcctacagacgggtgcgactattcaacacccgacaagtataagttgcaagcccatttaaaggttcatacagctctggataaaaggagctattcttgccccgtgtgtgagaaatccttttcggaagatagattaatcaagtcacatatcaaaacgaatcatcctgaagtctccatgagtacaatcagtgaggtgttgggaaggagggtgcagttaaaggggctgattggcaagcgggccatgaaatgcccttactgcgatttctatttcatgaaaaacgggagcgatctccaaagacatatttgggcacacgagggggtaaaaccttttaaatgcagcctgtgtgaatacgcgacaagaagtaaatctaacctgaaggcgcacatgaacaggcactcaacagaaaagacccacttatgtgatatgtgcggtaagaagtttaagtccaaaggcacattgaagtctcacaaattgctccataccgccgatggcaagcagtttaagtgtacggtatgcgattatacagccgcccaaaagccacaattactgcgtcatatggaacagcacgttagtttcaaacctttccggtgcgctcactgtcactattcatgtaacatatccggctctctcaagcgccactacaacagaaagcacccgaacgaggaatatgccaatgtagggaccggcgaactggccgccgaggtgctaatacagcaaggtgggctgaaatgtcccgtatgctcattcgtgtatggaactaagtgggagtttaatagacacctcaagaataaacacgggctcaaagtggtggaaatagatggcgacccaaagtgggaaacagccactgaggctcctgaggagccttccacccaatatcttcacatcacagaagccgaagaggacgtgcagggaacacaggccgcagtcgcagcactgcaggacctgcggtacacctcagagtcaggagacaggctcgaccccaccgccgtgaatatcctacaacagatcatcgagctcggtgccgagactcatgatgcaaccgccttggcttcagtcgtggcgatggcccccggcaccgtgacggtggttaagcaggtgacggaggaagaaccatcatctaaccatacagttatgatccaagagacggtgcagcaggccagcgtggaactggcagaacagcatcacctagtagtaagcagcgacgacgttgaagggatcgaaactgtcaccgtgtatacacagggtggcgaggcttccgagtttatcgtctacgtgcaggaggcaatgcaaccagtggaggaacaggctgttgaacagcctgcccaggagctttag

SEQ ID NO: 69462 - DNA, 3546 bp, Artificial Sequence
  derived and/or modified sequence
atggaaactagagctgctgaaaacaccgcaatattcatgtgcaaatgttgcaatctgtttagtcctaatcagagcgaactactgtcacacgtgagtgaaaaacacatggaagagggggtaaacgtagatgagatcatcatcccactccggccactgtccactcccgagccacccaacagctccaaaacaggggacgagttcttagtgatgaaaagaaaaagaggcagaccaaagggaagcaccaaaaaatctagcaccgaagaagaactcgcggagaatatagtctcgcctactgaagattccccattggcccctgaggagggcaactctctgcctccatccagcctggagtgcagtaagtgctgcaggaagttctccaatacacgccagttacgcaaacatatctgcatcattgtgctcaatctgggagaagaggagggcgaagcgggagcaaccaagatcgttccagtggaggccggtccgccagagactggcgctaccaatagcgagaccacatccgcagatcttgtcccacgcagaggataccaggaatatgcgattcagcagaccccatatgagcagcccatgaagagtagtagactgggtcctacccaactcaaaatttttacttgcgagtactgcaacaaagtcttcaagtttaagcatagtctgcaagcacatttgcggatacacactaacgagaagccgtacaaatgtcctcagtgttcctacgcctccgccataaaggccaacctgaatgtccacctgcggaaacatactggcgagaagttcgcatgtgattactgtagtttcacatgcctgtctaagggccatcttaaggtgcacatcgagcgggtccacaagaagataaaacagcactgcaggttctgtaagaagaagtactctgatgtgaaaaatttaattaagcatattcgagacgcgcatgaccctcaagacaagaaggtaaaggaggctctcgatgagttgtgtctaatgactagggaagggaaacgtcagcttctgtatgattgccatatctgcgagaggaagtttaagaatgaactggatcgggatcgtcatatgctcgtgcatggcgataagtggcccttcgcctgtgagctgtgcggacacggggctactaaatatcaggcgctggagcttcacgtgaggaagcacccattcgtgtacgtgtgcgcagtgtgccgcaagaagttcgtgtctagtattaggctgcgtacacacattaaggaggtgcacggggctgctcaggaggcgctggtgtttacatcctccatcaatcagtctttttgtttattagaaccaggaggggacatacagcaagaagccctaggtgaccaactgcagcttgtggaggaagaattcgccctgcagggtgtcaatgcgcttaaggaagaggcttgccctggtgacactcagctggaggaggggagaaaggagccagaagcccctggggaaatgcccgctccagctgttcacctcgcctctccacaggcagaaagtacagctctgccaccctgcgagctggaaactacagtggtaagctcttcagaccttcacagtcaggaggtcgtttccgacgatttcctgctgaaaaacgacactagcagcgccgaggcccatgccgctcccgagaagcctccagatatgcagcatcggtcgtccgtgcaaactcagggggaagttatcacgctgctgctgtcaaaggcccagtctgccggatccgatcaggagtcacatggagcccaatcaccactcggggaaggccagaatatggccgtgctttcggccggagatcccgaccctagccggtgcttgcgcagcaatcccgctgaagcctcagatctcctccccccagtggccggaggcggtgacaccatcactcaccagccagactcatgtaaggctgcacccgaacaccgttccggaattactgcattcatgaaggtcctgaattcactccagaagaaacaaatgaacacctctctctgcgaaagaatcagaaaagtatacggtgacctggagtgtgagtactgtggaaagctcttttggtatcaggtccattttgacatgcacgttcgcactcataccagggaacatctctactattgttcccagtgccattactcatccatcactaaaaactgtctgaagagacacgtgatccagaagcacagtaacattctccttaaatgcccaaccgacggatgtgactatagcacgcccgacaagtacaagctccaagctcacttgaaagtgcacaccgccctcgataagaggagctattcctgccccgtatgcgagaagtctttctccgaggatagactcatcaaatcacacatcaaaactaaccacccggaagtatcgatgtctaccatctcggaggtcctgggtagacgagtccaacttaaagggcttatcgggaagcgggcaatgaaatgcccctactgcgatttttatttcatgaagaatggcagtgatctgcagaggcatatctgggcacacgagggagtaaagccatttaagtgttcactttgcgaatatgccacccgctctaagtctaacctaaaggcacacatgaatcgacatagcactgaaaaaacacatctgtgcgacatgtgtgggaagaagttcaaatctaaaggaactcttaagagccacaaactcctgcacaccgcggacggtaaacagttcaagtgtaccgtgtgcgattatacagcggctcagaagccacagctcctgaggcacatggagcagcatgtctctttcaaaccttttcgttgcgcccattgccattacagctgcaatattagcggaagcctgaaacgccattataatcggaaacaccccaatgaagagtatgccaacgtggggacaggggagctggccgcagaagttctcattcagcaggggggactcaaatgtcccgtgtgtagcttcgtgtacggaactaagtgggagttcaacaggcatctgaaaaacaaacacgggctcaaagttgttgagatcgacggagatcccaaatgggaaacagctacggaggcccctgaagaaccatctacacagtacttgcatatcacagaggccgaggaggatgtgcagggcacccaagccgctgtagccgcacttcaagacttacgctacacaagcgaatcaggcgatcgcctagatcccaccgctgtgaatattctacaacagattatcgagttaggggctgagacccatgacgcgaccgccttggcctccgtggtcgctatggctccgggaaccgtgacagtcgtgaagcaggttacagaggaggaaccatctagcaaccacaccgtaatgatacaggaaacggtacagcaggcttcggtggagctggctgagcagcatcacctagttgtcagctctgatgacgtggagggcattgagacagtcacggtctacacacagggaggggaagcctccgagttcatcgtgtatgtgcaggaagcgatgcagcctgtggaggagcaggccgtcgagcagcccgcacaagagctgtag

SEQ ID NO: 69463 - DNA, 3734 bp, Artificial Sequence
  derived and/or modified sequence
aaagcgaagcgtcagcagggcgccccgccccctcggtcggcacgggagggggcccggaagagcccgaggcttttttttcctccgcggtggggcgttgccatggagacgcgggcggcagaaaacacggccatctttatgtgtaaatgttgtaacctcttctcaccaaatcagtcggaactcctctcccacgtttcagagaagcacatggaagaaggggttaatgttgatgagattattattccccttaggcctctgagtacacctgaaccccccaactcaagcaaaaccggagatgagtttttggtcatgaagaggaagagaggcaggcctaaggggtccacgaagaagtccagcacagaagaggagctggcagaaaacatcgtgagtccgactgaggacagcccgctggctccggaggaagggaacagcctgcctccaagcagcttggagtgtagcaagtgctgtcggaagttctccaacacgcgccagctgcggaagcacatctgcattatcgtgctgaatttgggtgaggaggaaggagaagcaggtgctaccaagattgtgccagtggaggctgggccccctgaaacaggagctacaaattctgagaccacttcagcagacctggtgcctcggagaggctaccaggaatacgccattcagcagacaccttatgagcaaccaatgaagtcaagcaggctaggtcccactcagctcaaaatcttcacttgtgaatactgcaacaaggtcttcaagttcaagcactcgctgcaggcccacctgaggatccacaccaatgaaaagccatacaagtgcccccagtgcagctatgccagtgccatcaaggccaacctcaatgtgcacctgcgcaagcacactggagagaagttcgcctgcgactattgctcgttcacctgcctgagcaagggccacctcaaggtgcacatcgagcgagtgcacaagaagatcaagcagcactgccgcttctgcaagaagaagtactctgacgtcaagaacctcatcaagcacatccgagacgcgcatgacccacaggacaagaaggtcaaagaggccttggacgagctctgcctgatgacgagggagggcaagcggcagctgctctatgactgccacatctgtgagcgcaagttcaagaacgagctggaccgtgaccgccatatgctggtccacggagacaagtggccttttgcctgtgagctctgtggccatggggccaccaagtaccaggcgctggaactgcatgtcaggaagcaccccttcgtgtacgtctgtgccgtctgccgcaagaagttcgtcagctccatcaggctgcgcacccacatcaaagaggtgcacggggctgcccaggaggccttggtcttcaccagttccatcaaccagagcttctgcctcctggaacctggtggggacatccagcaagaagctctgggggaccagctacagctggtggaagaggagtttgccctccagggcgtgaatgcactcaaggaagaggcctgtcctggggacactcagctggaggagggccggaaggagccggaggcccctggggaaatgcctgccccagctgtgcacctggcctccccgcaggccgaaagcacagccctgccaccctgtgagctggaaaccaccgtggtctcctcctcagacctgcattctcaagaggtggtttcagatgattttttgttgaaaaatgatacctcctccgcagaggctcatgctgctcctgagaagcccccagacatgcagcacagaagctcagtccagacgcaaggtgaagtgatcacactactgctgtccaaggcccagagtgctgggtcagatcaggaaagccatggcgcccagagccccctaggggaagggcagaacatggctgtgctttcagctggtgacccagatcccagcaggtgtctcaggtcaaacccagctgaggcctcagacctcctccctccagtagctggtggtggggacaccatcacacatcagcctgactcttgcaaagctgcccctgagcaccggtcaggcatcaccgctttcatgaaggtcctgaacagtttacagaagaagcaaatgaacaccagcttgtgtgagcggatccggaaggtttatggagacctggagtgtgaatactgtggcaaacttttttggtaccaagtgcattttgatatgcatgtccgcacccacacccgggaacatctgtattattgctctcagtgtcattattcttccatcaccaaaaactgccttaaacgccacgtaattcagaaacacagtaacatcttgctgaagtgtcccaccgatggctgtgactactcaactccagataaatataagctacaggcacatcttaaagttcacacagcactggacaaaaggagttattcttgtcctgtttgtgaaaagtctttttcagaggatcgattgataaagtcacatatcaagaccaaccatcctgaggtctccatgagcaccatttctgaggttctcgggaggagggttcagctgaaagggctaattggaaagagagccatgaaatgcccatattgtgacttttatttcatgaagaatggctcagaccttcagcgtcatatttgggctcatgaaggtgtgaagcccttcaagtgttctttgtgtgagtatgcaactcgtagcaagagtaacctcaaggctcatatgaatcgtcacagcactgagaaaacccacctatgtgacatgtgtggcaagaaattcaaatcaaaagggacactgaaaagtcacaaactccttcacactgcagatgggaagcagtttaagtgcacggtgtgtgactacacagcggcccagaagccacagctgctgcggcacatggaacagcatgtctccttcaagcctttccgctgtgcccattgccattactcctgcaacatatctggctctctgaagcggcactacaacaggaagcaccctaatgaggagtatgccaacgtgggcaccggggagctggcagcggaggtgctcatccagcaaggtggtttgaagtgtcctgtttgcagctttgtatatggcaccaaatgggagttcaataggcacttgaagaacaaacatggcttgaaggtggtggaaattgatggagaccccaagtgggagacagcaacagaagctcctgaggagccctccacccagtatctccacatcacagaggccgaagaagacgttcaagggacacaggcagcggtggccgcgctccaggacctgagatacacctctgagagtggcgaccgactggaccccacggccgtgaacatcctgcagcagatcattgagctgggcgccgagacccatgacgccactgcccttgcctcggtggttgccatggcaccagggacggtgactgtggttaagcaggtcaccgaggaggagcccagctccaaccacacggtcatgatccaggagacggtccagcaagcgtccgtggagcttgccgagcagcaccacctggtggtgtcctccgacgacgtggagggcattgagacggtgactgtctacacgcagggcggggaggcctcggagttcatcgtctacgtgcaggaggccatgcagcctgtggaggagcaggctgtggagcagccggcccaggaactctagaggacatgtggcatcggatggccacagggcggggctgccaggctctgcaggcacccagggtggggaggccacccttcctgccctacccg

SEQ ID NO: 69464 - protein, 1145 aa, Artificial Sequence
  derived and/or modified sequence
MCKCCNLFSPNQSELLSHVSEKHMEEGVNVDEIIIPLRPLSTPEPPNSSKTGDEFLVMKRKRGRPKGSTKKSSTEEELAENIVSPTEDSPLAPEEGNSLPPSSLECSKCCRKFSNTRQLRKHICIIVLNLGEEEGEAGNESDLELEKKCKEDDREKASKRPRSQKTEKVQKISGKEARQLSGAKKPIISVVLTAHEAIPGATKIVPVEAGPPETGATNSETTSADLVPRRGYQEYAIQQTPYEQPMKSSRLGPTQLKIFTCEYCNKVFKFKHSLQAHLRIHTNEKPYKCPQCSYASAIKANLNVHLRKHTGEKFACDYCSFTCLSKGHLKVHIERVHKKIKQHCRFCKKKYSDVKNLIKHIRDAHDPQDKKVKEALDELCLMTREGKRQLLYDCHICERKFKNELDRDRHMLVHGDKWPFACELCGHGATKYQALELHVRKHPFVYVCAVCRKKFVSSIRLRTHIKEVHGAAQEALVFTSSINQSFCLLEPGGDIQQEALGDQLQLVEEEFALQGVNALKEEACPGDTQLEEGRKEPEAPGEMPAPAVHLASPQAESTALPPCELETTVVSSSDLHSQEVVSDDFLLKNDTSSAEAHAAPEKPPDMQHRSSVQTQGEVITLLLSKAQSAGSDQESHGAQSPLGEGQNMAVLSAGDPDPSRCLRSNPAEASDLLPPVAGGGDTITHQPDSCKAAPEHRSGITAFMKVLNSLQKKQMNTSLCERIRKVYGDLECEYCGKLFWYQVHFDMHVRTHTREHLYYCSQCHYSSITKNCLKRHVIQKHSNILLKCPTDGCDYSTPDKYKLQAHLKVHTALDKRSYSCPVCEKSFSEDRLIKSHIKTNHPEVSMSTISEVLGRRVQLKGLIGKRAMKCPYCDFYFMKNGSDLQRHIWAHEGVKPFKCSLCEYATRSKSNLKAHMNRHSTEKTHLCDMCGKKFKSKGTLKSHKLLHTADGKQFKCTVCDYTAAQKPQLLRHMEQHVSFKPFRCAHCHYSCNISGSLKRHYNRKHPNEEYANVGTGELAAEVLIQQGGLKCPVCSFVYGTKWEFNRHLKNKHGLKVVEIDGDPKWEVTEEEPSSNHTVMIQETVQQASVELAEQHHLVVSSDDVEGIETVTVYTQGGEASEFIVYVQEAMQPVEEQAVEQPAQEL

SEQ ID NO: 69465 - DNA, 3438 bp, Artificial Sequence
  derived and/or modified sequence
atgtgcaagtgctgcaacctgttcagccccaaccagagcgagctgctgagccacgtgagcgagaagcacatggaggagggcgtgaacgtggacgagatcatcatccccctgagacccctgagcacccccgagccccccaacagcagcaagaccggcgacgagttcctggtgatgaagagaaagagaggcagacccaagggcagcaccaagaagagcagcaccgaggaggagctggccgagaacatcgtgagccccaccgaggacagccccctggcccccgaggagggcaacagcctgccccccagcagcctggagtgcagcaagtgctgcagaaagttcagcaacaccagacagctgagaaagcacatctgcatcatcgtgctgaacctgggcgaggaggagggcgaggccggcaacgagagcgacctggagctggagaagaagtgcaaggaggacgacagagagaaggccagcaagagacccagaagccagaagaccgagaaggtgcagaagatcagcggcaaggaggccagacagctgagcggcgccaagaagcccatcatcagcgtggtgctgaccgcccacgaggccatccccggcgccaccaagatcgtgcccgtggaggccggcccccccgagaccggcgccaccaacagcgagaccaccagcgccgacctggtgcccagaagaggctaccaggagtacgccatccagcagaccccctacgagcagcccatgaagagcagcagactgggccccacccagctgaagatcttcacctgcgagtactgcaacaaggtgttcaagttcaagcacagcctgcaggcccacctgagaatccacaccaacgagaagccctacaagtgcccccagtgcagctacgccagcgccatcaaggccaacctgaacgtgcacctgagaaagcacaccggcgagaagttcgcctgcgactactgcagcttcacctgcctgagcaagggccacctgaaggtgcacatcgagagagtgcacaagaagatcaagcagcactgcagattctgcaagaagaagtacagcgacgtgaagaacctgatcaagcacatcagagacgcccacgacccccaggacaagaaggtgaaggaggccctggacgagctgtgcctgatgaccagagagggcaagagacagctgctgtacgactgccacatctgcgagagaaagttcaagaacgagctggacagagacagacacatgctggtgcacggcgacaagtggcccttcgcctgcgagctgtgcggccacggcgccaccaagtaccaggccctggagctgcacgtgagaaagcaccccttcgtgtacgtgtgcgccgtgtgcagaaagaagttcgtgagcagcatcagactgagaacccacatcaaggaggtgcacggcgccgcccaggaggccctggtgttcaccagcagcatcaaccagagcttctgcctgctggagcccggcggcgacatccagcaggaggccctgggcgaccagctgcagctggtggaggaggagttcgccctgcagggcgtgaacgccctgaaggaggaggcctgccccggcgacacccagctggaggagggcagaaaggagcccgaggcccccggcgagatgcccgcccccgccgtgcacctggccagcccccaggccgagagcaccgccctgcccccctgcgagctggagaccaccgtggtgagcagcagcgacctgcacagccaggaggtggtgagcgacgacttcctgctgaagaacgacaccagcagcgccgaggcccacgccgcccccgagaagccccccgacatgcagcacagaagcagcgtgcagacccagggcgaggtgatcaccctgctgctgagcaaggcccagagcgccggcagcgaccaggagagccacggcgcccagagccccctgggcgagggccagaacatggccgtgctgagcgccggcgaccccgaccccagcagatgcctgagaagcaaccccgccgaggccagcgacctgctgccccccgtggccggcggcggcgacaccatcacccaccagcccgacagctgcaaggccgcccccgagcacagaagcggcatcaccgccttcatgaaggtgctgaacagcctgcagaagaagcagatgaacaccagcctgtgcgagagaatcagaaaggtgtacggcgacctggagtgcgagtactgcggcaagctgttctggtaccaggtgcacttcgacatgcacgtgagaacccacaccagagagcacctgtactactgcagccagtgccactacagcagcatcaccaagaactgcctgaagagacacgtgatccagaagcacagcaacatcctgctgaagtgccccaccgacggctgcgactacagcacccccgacaagtacaagctgcaggcccacctgaaggtgcacaccgccctggacaagagaagctacagctgccccgtgtgcgagaagagcttcagcgaggacagactgatcaagagccacatcaagaccaaccaccccgaggtgagcatgagcaccatcagcgaggtgctgggcagaagagtgcagctgaagggcctgatcggcaagagagccatgaagtgcccctactgcgacttctacttcatgaagaacggcagcgacctgcagagacacatctgggcccacgagggcgtgaagcccttcaagtgcagcctgtgcgagtacgccaccagaagcaagagcaacctgaaggcccacatgaacagacacagcaccgagaagacccacctgtgcgacatgtgcggcaagaagttcaagagcaagggcaccctgaagagccacaagctgctgcacaccgccgacggcaagcagttcaagtgcaccgtgtgcgactacaccgccgcccagaagccccagctgctgagacacatggagcagcacgtgagcttcaagcccttcagatgcgcccactgccactacagctgcaacatcagcggcagcctgaagagacactacaacagaaagcaccccaacgaggagtacgccaacgtgggcaccggcgagctggccgccgaggtgctgatccagcagggcggcctgaagtgccccgtgtgcagcttcgtgtacggcaccaagtgggagttcaacagacacctgaagaacaagcacggcctgaaggtggtggagatcgacggcgaccccaagtgggaggtgaccgaggaggagcccagcagcaaccacaccgtgatgatccaggagaccgtgcagcaggccagcgtggagctggccgagcagcaccacctggtggtgagcagcgacgacgtggagggcatcgagaccgtgaccgtgtacacccagggcggcgaggccagcgagttcatcgtgtacgtgcaggaggccatgcagcccgtggaggagcaggccgtggagcagcccgcccaggagctgtag

SEQ ID NO: 69466 - DNA, 3438 bp, Artificial Sequence
  derived and/or modified sequence
atgtgcaaatgctgtaacctgttctccccaaaccaatctgagctgctgtctcatgtgagcgaaaaacacatggaggaaggcgtgaacgtcgacgagatcataatcccactgagaccgttgagtactccagagccccccaattcgtctaaaactggcgacgaatttctggtgatgaagaggaagaggggacggcccaaagggtccacgaaaaaatctagcacggaggaggagcttgctgagaacatcgtctcccctaccgaagattcgcccctcgcacctgaggaggggaattcgctgccacccagtagtctggaatgtagcaaatgttgccgaaaatttagcaacacacgccaattacgaaagcatatatgcatcatagtgcttaacctcggcgaggaggagggtgaagctggcaacgagagtgatctggagctggaaaagaagtgcaaggaagatgatcgcgaaaaagcctctaaaagaccacggtcgcagaagaccgagaaggtccaaaaaatcagcgggaaagaggccaggcagctgagcggggccaagaagcccatcatctccgtggttctaactgctcatgaggcaattccgggtgccaccaaaatagttcccgtggaagcaggacccccagagactggggccacaaattccgagactaccagcgcagatctggtgccaagacggggttatcaagagtacgctattcaacagacaccttatgaacagcctatgaaatccagcaggctgggaccaactcagctgaaaattttcacatgcgaatactgcaacaaagtgtttaaattcaagcactctttgcaggcccacctgcggatccataccaacgagaaaccttacaaatgtccccaatgcagttacgccagcgctatcaaggctaacctgaatgtgcacctgcgtaaacataccggtgagaagttcgcctgtgattactgtagttttacatgtctgagcaaaggacacttaaaagtacacatcgagagagtccacaagaaaattaaacaacattgtagattttgtaaaaagaaatacagtgacgtaaaaaacttgattaaacatatccgcgatgcacacgaccctcaagataaaaaggtgaaagaagccctggatgaactctgcctgatgacccgcgaagggaagcgccaactcctctacgattgccatatatgtgagagaaaattcaaaaacgaactggaccgtgacaggcacatgctggtgcatggtgacaagtggccatttgcgtgcgaactgtgcggtcacggtgcgaccaaatatcaggccctggagcttcatgtaaggaagcacccttttgtgtacgtatgtgccgtgtgtcgaaagaaatttgtctcgtctatacgactcaggacccacatcaaggaggtgcacggcgctgcgcaggaagcactggtctttacctctagtatcaatcagagcttctgtctgcttgagcccggaggcgacattcagcaggaggcgttgggcgaccagctgcagctggtggaagaggagttcgctctgcagggggtgaatgccctcaaggaagaggcgtgccccggcgatacgcagctggaggaaggaaggaaggaacccgaagctccgggcgaaatgcctgcccctgcggtgcacctcgcatctccccaggcagagtctactgctctgcccccatgtgagttggaaacaaccgtggtgtcatcctcggacctccatagtcaggaagtcgtctcagacgacttcctgttgaagaatgatacgtcctctgcggaggctcacgctgctccagaaaagccacccgacatgcagcatcgatcctccgtgcaaacccagggcgaggtgattacactcctgctatccaaagcccagagtgcaggttccgaccaagagtcacatggagcccagtcgcctctgggcgaaggtcagaatatggcagtgctttccgccggggatccggacccaagccgctgtctgaggtccaatccagctgaggcatccgacctgctaccaccagtcgcaggagggggcgataccattacccatcaaccagatagttgtaaagcagctccggagcatcgtagtggaatcaccgcgtttatgaaggtgctcaatagtctgcagaaaaagcagatgaatacaagtttgtgtgaacgcatcaggaaggtttatggggacttggaatgcgagtattgcgggaagctgttttggtaccaggtgcacttcgatatgcatgtcagaactcacacgagagaacacctttactattgtagtcagtgtcactattcatctattacaaagaactgtctcaagcggcacgtcattcaaaaacattccaacatcctgctgaaatgccccaccgacggatgcgactatagcacgcccgacaagtataagcttcaggcccacctgaaggtgcacactgccctcgataaacgtagctacagctgtccagtgtgtgagaaaagctttagtgaggaccggctgatcaagagccatataaaaactaaccatccagaggtgtcaatgtctacaatcagtgaggtgttaggccgcagggtgcagctcaaggggctgattggcaagcgggccatgaaatgcccgtattgtgatttctattttatgaagaacgggtctgacctgcagaggcacatttgggcacatgagggggtcaagcctttcaagtgctctttgtgtgaatacgctactagatcaaagagcaatctcaaggcgcatatgaaccgacacagcacagaaaagacccacttgtgcgacatgtgtggtaaaaagtttaagtctaagggtactcttaaatcccataagctgttacacaccgccgatgggaaacagtttaagtgcacggtgtgcgattatactgctgcccagaagcctcagttgctcaggcacatggagcagcatgtctcctttaaaccgttccggtgcgcccattgtcactattcatgtaatatcagtggcagcctcaaacgccattataatcgcaagcatccaaatgaggagtacgctaatgtgggaactggtgaactcgcggcagaggtcttaatccagcagggtggacttaaatgcccggtctgcagtttcgtttatggcaccaagtgggaattcaatcgccacttgaagaataaacacggcttgaaggtagtcgaaatcgatggcgaccccaaatgggaggttaccgaagaggagccttcctccaatcacactgtcatgattcaggagactgtgcaacaggcatccgtagaactcgccgagcaacaccacttagttgtgtcctctgacgacgttgaaggcatcgagacggtcactgtgtatacccagggcggtgaagctagtgagttcatcgtgtatgtgcaggaggctatgcaacccgttgaagaacaagctgttgagcagcctgcgcaggaactctag

SEQ ID NO: 69467 - DNA, 3438 bp, Artificial Sequence
  derived and/or modified sequence
atgtgcaagtgctgcaacctcttcagccccaaccagagcgagctgctgagccacgtgtctgagaagcacatggaggagggcgtgaatgtggatgagatcatcatccccctgcggcccctgagcaccccagagccccccaacagcagcaagacaggagatgagttcctggtgatgaagaggaagaggggccggcccaagggcagcaccaagaagagcagcacagaggaggagctggccgagaacatcgtgagccccacagaggacagccccctggcccctgaggagggcaacagcctgccccccagcagcctggagtgcagcaagtgctgcaggaagttcagcaacacccggcagctgaggaagcacatctgcatcatcgtgctgaacctgggggaggaggagggggaggccggaaatgaaagtgacctggagctggagaagaagtgcaaggaggatgaccgggagaaggccagcaagaggcccaggagccagaagacagagaaggtgcagaagatcagcggcaaggaggcccggcagctgagcggggccaagaagcccatcatctctgtggtgctgacagcccacgaggccatccctggggccaccaagatcgtgcctgtggaggccggccccccagagaccggggccaccaacagcgagaccaccagcgctgacctggtgccccggcggggctaccaggagtatgccatccagcagaccccctatgagcagcccatgaagagcagccggctgggccccacccagctgaagatcttcacctgtgagtactgcaacaaggtgttcaagttcaagcacagcctgcaggcccacctgcgcatccacaccaatgagaagccctacaagtgcccccagtgcagctatgccagcgccatcaaggccaacctgaatgtgcacctgaggaagcacactggagagaagtttgcctgtgactactgcagcttcacctgcctgagcaagggccacctgaaggtgcacatcgagcgggtgcacaagaagatcaagcagcactgccgcttctgcaagaagaagtacagtgatgtgaagaacctgatcaagcacatcagagatgcccatgacccccaggacaagaaggtgaaggaggccctggatgagctgtgcctgatgacccgggagggcaagaggcagctgctgtatgactgccacatctgtgagaggaagttcaagaatgagctggaccgggacagacacatgctggtgcacggggacaagtggccctttgcctgtgagctgtgtggccatggagccaccaagtaccaggccctggagctgcacgtgaggaagcacccctttgtgtatgtgtgtgctgtgtgcaggaagaagtttgtgagcagcatccggctgcggacccacatcaaggaggtgcatggagctgcccaggaggccctggtgttcaccagcagcatcaaccagagcttctgcctgctggagcctggaggagacatccagcaggaggccctgggggaccagctgcagctggtggaggaggagtttgccctgcagggcgtgaatgccctgaaggaggaggcctgccctggggacacccagctggaggagggcaggaaggagcctgaggcccctggagagatgcctgccccagctgtgcacctggccagcccccaggccgagagcacagccctgcccccctgtgagctggagaccaccgtggtgagcagcagtgacctgcacagccaggaggtggtgtctgatgacttcctgctgaagaatgacaccagcagcgctgaggcccacgccgcccctgagaagcccccagacatgcagcacaggagctctgtgcagacccagggcgaggtgatcaccctgctgctgagcaaggcccagagcgctggcagtgaccaggagagccacggggcccagagccccctgggggagggccagaacatggctgtgctgtctgctggggaccctgaccccagccgctgcctgcggagcaacccagctgaggccagtgacctgctgccccctgtggccggcggcggggacaccatcacccaccagcctgacagctgcaaggccgcccctgagcacaggagcggcatcacagccttcatgaaggtgctgaacagcctgcagaagaagcagatgaacaccagcctgtgtgagcgcatcaggaaggtgtatggagacctggagtgtgagtactgcggcaagctgttctggtaccaggtgcactttgacatgcacgtgaggacccacacccgggagcacctgtactactgcagccagtgccactacagcagcatcaccaagaactgcctgaagagacatgtgatccagaagcacagcaacatcctgctgaagtgccccacagatggctgtgactacagcaccccagacaagtacaagctgcaggcccacctgaaggtgcacacagccctggacaagaggagctacagctgccctgtgtgtgagaagagcttctctgaagatagactcatcaagagccacatcaagaccaaccaccctgaggtgtccatgagcaccatcagcgaggtgctgggcagaagagtgcagctgaagggcctgattggcaagagggccatgaagtgcccctactgtgacttctacttcatgaagaatggaagtgacctgcagaggcacatctgggcccatgaaggagtgaagcccttcaagtgcagcctgtgtgaatatgccaccaggagcaagagcaacctgaaggcccacatgaacagacacagcacagagaagacccacctgtgtgacatgtgtgggaagaagttcaagagcaagggcaccctgaagagccacaagctgctgcacacagcagatggcaagcagttcaagtgcaccgtgtgtgactacacagctgcccagaagccccagctgctgcggcacatggagcagcacgtgtccttcaagcccttccgctgtgcccactgccactacagctgcaacatcagcggcagcctgaagaggcactacaacaggaagcaccccaatgaggagtatgccaacgtgggcactggagagctggccgctgaggtgctgatccagcagggcggcctgaagtgccctgtgtgcagctttgtgtatggcaccaagtgggagttcaacagacacctgaagaacaagcacggcctgaaggtggtggagattgatggagaccccaagtgggaggtgacagaggaggagcccagcagcaaccacacagtgatgatccaggagaccgtgcagcaggcctctgtggagctggccgagcagcaccacctggtggtgtccagtgatgatgtggagggcattgaaacagtgacagtgtacacccagggcggggaggccagcgagttcatcgtgtatgtgcaggaggccatgcagcctgtggaggagcaggccgtggagcagcctgcccaggagctgtag

SEQ ID NO: 69468 - DNA, 3438 bp, Artificial Sequence
  derived and/or modified sequence
atgtgcaagtgctgcaacctgttcagccccaaccagagcgagctgctgagtcatgtctctgaaaagcatatggaggagggggtcaacgtggatgagatcatcattcctttgcgcccgctgagtacccccgaaccaccaaatagctccaagaccggcgacgaatttttggtcatgaaaagaaagagaggcaggccaaaggggagcacaaaaaagagctctaccgaggaagaattggctgaaaacatcgtgtcaccaaccgaggatagtcccctagcgccagaggagggaaattccttacctccgagctcgctggagtgttcaaaatgctgtaggaagttctcaaacacgcgacagcttaggaaacacatttgtattattgtactcaacctcggggaggaggaaggcgaggccggaaacgagtccgacctggagctggagaagaaatgcaaagaggatgaccgggagaaggcctccaagcggccacgctctcaaaaaaccgaaaaagtccaaaaaatatccggaaaggaagcaaggcagctctccggtgctaaaaagcctattatctcagtggtactcaccgcccacgaggcaattccgggggcaactaagatagtcccggtcgaagcaggcccgcccgaaaccggcgctaccaacagcgagactacctccgccgacttggtgccgcggagaggctaccaggagtatgctatccagcagacaccctacgagcagccgatgaaaagttcaaggctggggcctactcagctcaagatctttacatgcgaatactgtaacaaagtgtttaagttcaagcattccctgcaggcacacctacgtattcataccaatgaaaagccgtataagtgcccgcagtgttcatacgcgtcggcaattaaagccaatctgaacgttcatcttcgcaaacatacaggcgagaaattcgcctgcgattattgtagcttcacctgtctctccaagggacatctaaaggtccatatcgaaagagttcataaaaagattaagcagcattgccgtttctgcaagaaaaaatacagtgatgtcaaaaatttgatcaagcatatcagggacgcacatgatccccaggataaaaaggttaaggaggcgcttgacgagctgtgccttatgacccgggaagggaagaggcaactgctttacgattgccatatatgtgagcgtaagtttaaaaatgagctggatagggacagacacatgttggtccacggggataaatggccattcgcttgcgagctctgcgggcacggagccacgaagtaccaggctctcgaactccatgtccgaaaacatccttttgtgtacgtttgtgccgtgtgccgcaaaaagtttgtttcctccatcagactgcgaacccacattaaggaagtgcatggggctgcacaggaggccttggtgttcactagctccataaaccagtcattttgcctgctggaacctgggggagatattcagcaggaagccctaggagatcagctacagctcgtagaagaggaattcgcgctgcaaggcgtgaatgccctgaaagaggaagcctgtcctggagacacacagttggaggaaggccgaaaagaacctgaagcccccggagagatgccagcaccagctgtccatctggcctcaccacaggctgagagcacggcattgccaccctgtgaacttgagacgacagtggtgtcctcttctgacctgcattcccaggaggttgttagcgacgattttttgctgaagaacgatacgtcatctgcggaagcccacgccgccccagaaaaaccaccggatatgcaacaccgatcatccgtgcagacacagggggaggtgatcacactgctcctctctaaagcgcagagcgccggctctgatcaggaatcccacggcgctcagagccccctgggtgaaggccaaaacatggcagtattgtctgccggagatcctgacccttctcgctgcctgcgttcaaatccggcggaggcctctgatctgctccctccggtcgccgggggcggcgacacaatcacacaccagcctgattcatgcaaagcggctccagagcatcggtctggcatcaccgcattcatgaaggtcctgaactcgctccagaaaaagcagatgaatacatccctgtgcgaaaggatccgcaaggtatacggggacctcgaatgcgagtactgcggcaaattattttggtatcaggttcacttcgacatgcacgttaggacacacactcgtgagcatctgtattactgctcccaatgtcactacagcagtattacaaaaaattgcctcaaaaggcacgtgattcagaagcactccaacattctgctgaaatgcccaacggacgggtgtgactattccacacccgacaaatataagttgcaggctcacttgaaggtccacacagccttggacaaacgaagctatagctgccctgtatgtgaaaagtcgttcagcgaggacaggctgattaagtctcatattaagactaatcacccggaggtttcaatgagtacgatttctgaagtgcttgggcggagggtccagctcaaggggttgattggcaaaagggctatgaagtgcccttactgcgacttttacttcatgaaaaacggcagcgatctgcaacgccatatctgggcccacgagggcgtaaagcctttcaagtgctcgctgtgcgagtacgctacacgcagcaaaagcaatctgaaagcacacatgaacagacactccaccgagaagactcatctgtgtgacatgtgcggaaagaagttcaaatcgaaagggaccttaaaatctcataaattgctgcacacggctgacggcaagcagttcaaatgtaccgtgtgtgactacacagctgcacagaaaccccaacttttgcggcacatggagcagcatgtgtctttcaaacccttccgatgcgctcattgccattactcttgtaacataagcggttccctgaaaaggcactataataggaagcaccccaatgaagagtatgctaatgtggggaccggagaactggcagccgaggtgcttatccagcagggggggcttaaatgcccagtgtgtagcttcgtctacgggacaaagtgggaatttaatagacatctcaaaaataagcatggattgaaggtcgtggagattgacggggaccccaagtgggaagtgaccgaagaggaaccttcaagtaaccatacagtgatgatccaggaaacagtgcagcaggcatcggttgagcttgccgagcaacatcacttagtggtgtctagcgacgatgtggagggtattgagacagttactgtatatactcaaggaggcgaagctagtgagtttattgtgtacgtacaggaggctatgcagcccgtcgaggagcaggccgttgaacaacctgcccaagagctttag

SEQ ID NO: 69469 - DNA, 3438 bp, Artificial Sequence
  derived and/or modified sequence
atgtgtaagtgttgcaatctgttcagtcccaatcagagtgaactgttgtcacacgtctccgaaaagcacatggaggagggagtgaatgtggatgaaatcattattccgctgcgcccactctcgacacctgagcctcccaatagctctaaaacgggggacgaatttcttgtcatgaagaggaagcggggtcgccctaagggctccacaaagaagtcgagcacggaagaggaactggccgagaatatcgtctcccccactgaggactcgccactggcgccagaagaaggcaactccctgccgccttcctcattggagtgtagcaaatgctgccgaaagttctcaaacactcgacagctccgtaagcatatatgcatcatcgttctcaacctcggagaagaagaaggcgaagcagggaacgagtctgatttggaattggagaagaagtgtaaggaggacgaccgtgagaaggctagcaaacgcccacggagccagaaaacggagaaggtgcagaagatttcaggtaaggaggctagacagcttagcggagccaagaagccgatcatcagcgttgttctcacagcccacgaagccatccccggtgcgacaaagattgtcccagtggaagccggacctcccgaaaccggcgctactaacagcgaaaccaccagtgccgacctggtgcctcgtcgcggttaccaggagtacgccattcagcagacaccgtacgaacagcccatgaaatcttcaagactaggtcccacccagcttaaaatatttacctgcgaatattgcaacaaggtctttaaatttaagcatagcctgcaggcccacttaagaattcataccaacgaaaaaccctataagtgtcctcaatgcagctacgcttcggccattaaagccaatcttaatgtgcacctcaggaagcacacaggagaaaagtttgcatgcgattactgctccttcacatgtcttagcaagggccaccttaaggtgcatatcgaaagggtgcacaaaaagattaagcagcactgcaggttctgtaagaaaaagtattctgatgtcaaaaatctgatcaagcacatcagagatgcccacgacccacaggataaaaaggtgaaagaggccctggatgagctgtgcctgatgacccgcgaaggtaagagacagctcctgtacgactgtcatatatgcgagaggaagttcaagaacgaactcgatagggaccggcacatgcttgtacatggggacaaatggccgtttgcttgcgagctttgtggacacggcgcaacaaaatatcaggccttggagctgcacgtgaggaagcatccttttgtgtacgtctgcgccgtatgcagaaagaaatttgtttcctctatcagactgagaacccacattaaagaggtgcacggtgctgctcaagaagcacttgtcttcacgtcttccattaaccagtcattctgtctcctagagccagggggtgacattcagcaggaggcacttggcgatcaattacagctagtggaagaggagtttgcgctgcaaggggtaaatgccctgaaagaagaggcctgccccggtgacacacaattagaagaaggcagaaaggagccagaagctcccggtgaaatgccggctcccgctgtgcacctggcttccccacaggccgaatccactgccttgcccccttgcgagctggagacgacagtggtctcctcatctgatttacacagccaggaggtggtgtctgacgactttctgctcaagaatgatacctcgagcgccgaagcacatgccgcacctgagaaacctccggacatgcagcaccgctcctcagtccaaacccagggagaagtcatcacgctgctgctctctaaagcccagagcgccggaagcgatcaggagtcccacggcgctcagtcacccctgggcgaaggtcaaaatatggccgtactttctgctggcgatccagatccatcccgctgtctcagaagcaatcctgccgaagcgtctgacctgttgccccctgtggccggagggggtgacaccataacccatcagccagattcatgcaaagccgctccggagcataggtcaggtataacggcctttatgaaagtgctgaattctttacagaagaagcagatgaacacaagtttgtgtgaaagaataagaaaggtgtatggtgacctggaatgtgaatactgcggaaagttgttctggtaccaagtccacttcgacatgcatgtgcgcacccacactagagagcacttgtactattgttcgcaatgtcattacagcagtatcaccaaaaattgtttaaaaaggcatgtaatccagaagcattctaacattttactcaaatgccctaccgatggttgtgactacagcacccctgataaatacaagctgcaggctcacctaaaggtgcacaccgcactggacaaaagaagctattcctgccctgtgtgcgagaaatcattcagcgaagaccggcttatcaagagccatatcaagaccaaccaccctgaagtgtccatgtccacaatatcagaggtgcttggtcgccgagttcagctgaagggactgatcggcaaaagagcaatgaaatgcccatattgtgacttctactttatgaagaacggttccgatttgcagcgccacatctgggcccatgagggggtgaaacctttcaagtgttccctctgtgagtacgcaacaagatccaaaagcaatctgaaggctcatatgaaccgccactctacggaaaaaacacacctttgcgacatgtgcggaaagaagttcaaatcaaagggtacactgaagagccacaagcttcttcatacagcggacggcaagcagttcaaatgcactgtgtgcgactacacagccgctcagaagccccagctccttcggcatatggaacagcacgttagcttcaagccctttcggtgtgcgcattgtcattactcttgcaacatctccggcagtcttaaacgccattacaatcgtaagcaccccaatgaggaatatgcaaacgtgggtaccggagagctggctgcagaggtgctgattcagcagggcggacttaaatgccccgtctgctcgttcgtctacgggacaaaatgggagttcaatcggcatttaaagaacaaacatggcttgaaagtcgtcgagatcgacggcgaccccaagtgggaagttacagaagaggaaccatcatctaatcatacggttatgatccaggagactgtacagcaggctagtgtagaactagcagagcagcatcatctggtggtgagcagtgacgacgtcgagggaattgaaactgttacagtgtatacgcaggggggagaagcgagtgagtttatagtgtacgtgcaagaggctatgcagccggtcgaagaacaggctgtcgaacagcctgcccaggagctgtag

SEQ ID NO: 69470 - DNA, 4273 bp, Artificial Sequence
  derived and/or modified sequence
gtgcaggagtctgagaagaaagggtgtagatggagaggcggtggcctcacctctgcatgctccgtgggaagcggcggaggcgcccagcatccctcctactctgcccttggtggaggtttacgagaaaacacggccatctttatgtgtaaatgttgtaacctcttctcaccaaatcagtcggaactcctctcccacgtttcagagaagcacatggaagaaggggttaatgttgatgagattattattccccttaggcctctgagtacacctgaaccccccaactcaagcaaaaccggagatgagtttttggtcatgaagaggaagagaggcaggcctaaggggtccacgaagaagtccagcacagaagaggagctggcagaaaacatcgtgagtccgactgaggacagcccgctggctccggaggaagggaacagcctgcctccaagcagcttggagtgtagcaagtgctgtcggaagttctccaacacgcgccagctgcggaagcacatctgcattatcgtgctgaatttgggtgaggaggaaggagaagcaggtaacgagtctgaccttgaactagaaaagaagtgtaaggaagatgatcgggaaaaagcctcgaaaagaccacggtcacagaaaacagagaaagtccagaagatctcaggaaaggaggccagacagctttctggggcgaagaaacccatcataagtgtggttttaactgcacacgaagcaattccaggtgctaccaagattgtgccagtggaggctgggccccctgaaacaggagctacaaattctgagaccacttcagcagacctggtgcctcggagaggctaccaggaatacgccattcagcagacaccttatgagcaaccaatgaagtcaagcaggctaggtcccactcagctcaaaatcttcacttgtgaatactgcaacaaggtcttcaagttcaagcactcgctgcaggcccacctgaggatccacaccaatgaaaagccatacaagtgcccccagtgcagctatgccagtgccatcaaggccaacctcaatgtgcacctgcgcaagcacactggagagaagttcgcctgcgactattgctcgttcacctgcctgagcaagggccacctcaaggtgcacatcgagcgagtgcacaagaagatcaagcagcactgccgcttctgcaagaagaagtactctgacgtcaagaacctcatcaagcacatccgagacgcgcatgacccacaggacaagaaggtcaaagaggccttggacgagctctgcctgatgacgagggagggcaagcggcagctgctctatgactgccacatctgtgagcgcaagttcaagaacgagctggaccgtgaccgccatatgctggtccacggagacaagtggccttttgcctgtgagctctgtggccatggggccaccaagtaccaggcgctggaactgcatgtcaggaagcaccccttcgtgtacgtctgtgccgtctgccgcaagaagttcgtcagctccatcaggctgcgcacccacatcaaagaggtgcacggggctgcccaggaggccttggtcttcaccagttccatcaaccagagcttctgcctcctggaacctggtggggacatccagcaagaagctctgggggaccagctacagctggtggaagaggagtttgccctccagggcgtgaatgcactcaaggaagaggcctgtcctggggacactcagctggaggagggccggaaggagccggaggcccctggggaaatgcctgccccagctgtgcacctggcctccccgcaggccgaaagcacagccctgccaccctgtgagctggaaaccaccgtggtctcctcctcagacctgcattctcaagaggtggtttcagatgattttttgttgaaaaatgatacctcctccgcagaggctcatgctgctcctgagaagcccccagacatgcagcacagaagctcagtccagacgcaaggtgaagtgatcacactactgctgtccaaggcccagagtgctgggtcagatcaggaaagccatggcgcccagagccccctaggggaagggcagaacatggctgtgctttcagctggtgacccagatcccagcaggtgtctcaggtcaaacccagctgaggcctcagacctcctccctccagtagctggtggtggggacaccatcacacatcagcctgactcttgcaaagctgcccctgagcaccggtcaggcatcaccgctttcatgaaggtcctgaacagtttacagaagaagcaaatgaacaccagcttgtgtgagcggatccggaaggtttatggagacctggagtgtgaatactgtggcaaacttttttggtaccaagtgcattttgatatgcatgtccgcacccacacccgggaacatctgtattattgctctcagtgtcattattcttccatcaccaaaaactgccttaaacgccacgtaattcagaaacacagtaacatcttgctgaagtgtcccaccgatggctgtgactactcaactccagataaatataagctacaggcacatcttaaagttcacacagcactggacaaaaggagttattcttgtcctgtttgtgaaaagtctttttcagaggatcgattgataaagtcacatatcaagaccaaccatcctgaggtctccatgagcaccatttctgaggttctcgggaggagggttcagctgaaagggctaattggaaagagagccatgaaatgcccatattgtgacttttatttcatgaagaatggctcagaccttcagcgtcatatttgggctcatgaaggtgtgaagcccttcaagtgttctttgtgtgagtatgcaactcgtagcaagagtaacctcaaggctcatatgaatcgtcacagcactgagaaaacccacctatgtgacatgtgtggcaagaaattcaaatcaaaagggacactgaaaagtcacaaactccttcacactgcagatgggaagcagtttaagtgcacggtgtgtgactacacagcggcccagaagccacagctgctgcggcacatggaacagcatgtctccttcaagcctttccgctgtgcccattgccattactcctgcaacatatctggctctctgaagcggcactacaacaggaagcaccctaatgaggagtatgccaacgtgggcaccggggagctggcagcggaggtgctcatccagcaaggtggtttgaagtgtcctgtttgcagctttgtatatggcaccaaatgggagttcaataggcacttgaagaacaaacatggcttgaaggtggtggaaattgatggagaccccaagtgggaggtcaccgaggaggagcccagctccaaccacacggtcatgatccaggagacggtccagcaagcgtccgtggagcttgccgagcagcaccacctggtggtgtcctccgacgacgtggagggcattgagacggtgactgtctacacgcagggcggggaggcctcggagttcatcgtctacgtgcaggaggccatgcagcctgtggaggagcaggctgtggagcagccggcccaggaactctagaggacatgtggcatcggatggccacagggcggggctgccaggctctgcaggcacccagggtggggaggccacccttcctgccctacccgcagaatggtgctctcctttgccctccctgcccagcagcctgataggactctcctagtccaacttggggtgggcaaggcagtcagcatcaccagcaataccacaggaccctcaccccagcatagacacacaccccctgacccttaccatctgcttcctgaaagacttcagtgtcagctcccctacacacaccccacaccttcaccccttgcttcaagattcaaacagagactcccagtccccctcagcatcttccctgaatcacagccccagctccttgacccccatctaggtgccaaatgttcatctgcaaccgctatgcagtctggtgagagggagacagccatcacatagaaagtgaccgtacgggtttttaatcactgctgggtggggtgggggtagggggattgtcctggctttgtcgacaaagtcccacttccccgagtattaagggcccttggtatcaagtgaggtaaattcacccatcacagggtctcgccctaccatcctggaattatttcacttttaagataaatgcactatttcactgttcgcctcccattctaaggaggtgaggtggttggaataaaaacagttcctgtctgaa

SEQ ID NO: 69471 - protein, 454 aa, Artificial Sequence
  derived and/or modified sequence
MLKQILSEMYIDPDLLAELSEEQKQILFFKMREEQIRRWKEREAAMERKESLPVKPRPKKENGKSVHWKLGADKEVWVWVMGEHHLDKPYDVLCNEIIAERARLKAEQEAEEPRKTHSEEFTNSLKTKSQYHDLQAPDNQQTKDIWKKVAEKEELEQGSRPAPTLEEEKIRSLSSSSRNIQQMLADSINRMKAYAFHQKKESMKKKQDEEINQIEEERTKQICKSWKEDSEWQASLRKSKAADEKRRSLAKQAREDYKRLSLGAQKGRGGERLQSPLRVPQKPERPPLPPKPQFLNSGAYPQKPLRNQGVVRTLSSSAQEDIIRWFKEEQLPLRAGYQKTSDTIAPWFHGILTLKKANELLLSTGMPGSFLIRVSERIKGYALSYLSEDGCKHFLIDASADAYSFLGVDQLQHATLADLVEYHKEEPITSLGKELLLYPCGQQDQLPDYLELFE

SEQ ID NO: 69472 - DNA, 1365 bp, Artificial Sequence
  derived and/or modified sequence
atgcttaaacagattctgagcgagatgtacatcgacccagaccttttggccgagctgagcgaagaacagaaacaaattctctttttcaaaatgagggaagagcagatacgccggtggaaggaaagggaagcagcaatggagcggaaagagtcacttcccgtgaagccaagaccgaagaaggaaaacggcaaaagtgtgcactggaagcttggggcagataaggaggtgtgggtctgggtcatgggtgaacaccacctcgacaagccgtatgacgttttatgtaatgagattatagcagagcgcgcccgtctgaaagctgaacaggaagccgaagaaccacgaaaaacccacagcgaagagttcactaactccctgaaaactaaatcccagtatcatgatctgcaggctccagataaccaacagacgaaagacatctggaaaaaagttgcggagaaagaagaacttgagcagggctcgcgtccagctccaaccctggaggaggagaagattcgttcactctcgagcagctctcgaaacattcagcagatgctggctgacagcattaatcgcatgaaagcgtatgccttccatcagaagaaagagagtatgaaaaagaagcaagacgaagagatcaatcagatagaggaggaacgcaccaagcagatttgtaagtcatggaaggaggactccgagtggcaggcgtccttacggaaatcaaaagccgccgacgaaaaacggcggagcctggctaagcaggctcgggaagactataagaggctttcccttggcgcgcagaagggccgagggggagaaagattgcaaagtcccctgagagtgccgcagaaaccagagcggcctccactgcctcctaaacctcagttcctaaactcaggggcctaccctcaaaaaccgctgaggaaccagggagtggtcagaactctcagctcaagcgcacaagaagatatcatcaggtggttcaaggaagagcagctacccctccgagccgggtatcaaaagacatcagatacaatagccccttggttccacgggattctcacattgaagaaagccaacgaactgctattgagtacagggatgcccggctcctttctaatccgtgtgtctgagagaataaaggggtacgcgctttcctatctctcagaggacggctgcaagcatttcctcatcgatgctagtgccgatgcatatagttttttaggcgtagaccaactgcagcacgccacgctggcagacctggttgagtaccacaaggaggagccgatcaccagtttggggaaggaactgctgctgtatccgtgtgggcagcaagatcagctcccagactacctggagttgttcgaatag

SEQ ID NO: 69473 - DNA, 1365 bp, Artificial Sequence
  derived and/or modified sequence
atgctgaagcaaatcctgtcagaaatgtacatagatcctgatctgttggcagagctgagcgaagagcagaagcagatcctgtttttcaagatgcgtgaggagcagatccggagatggaaagaaagagaggccgctatggaaagaaaggagtccttacccgtaaagccaagacctaaaaaggagaacgggaagtctgtgcattggaaactcggggccgacaaagaagtgtgggtgtgggtgatgggggagcaccacctggacaagccatacgatgtcctttgcaacgagattatcgccgagcgcgccaggctgaaagcagaacaggaagcagaggaaccacgtaagacacattccgaagagttcacaaattctcttaaaacgaagtcccagtaccatgatttacaagcaccggacaatcagcagacgaaagacatctggaagaaagtggctgaaaaggaggaacttgagcaggggtcccggcctgcgcccaccttggaggaagagaagatacgaagcttaagtagtagttctcgcaacatccaacagatgttggctgattctatcaacaggatgaaagcatacgcatttcaccagaagaaggagagcatgaaaaagaagcaagacgaggaaatcaatcagattgaagaagagcggaccaagcagatatgcaaatcgtggaaggaagatagcgaatggcaggccagtttacggaagagtaaagccgctgatgaaaaacggaggtccctagctaaacaagcgcgtgaagattataaacggctgtccctcggtgctcagaagggtcgaggtggagaaagacttcaaagccccttgcgagtgcctcaaaagcctgagcgacctccactgccccctaagccccaattcctgaatagcggtgcttacccacagaaacccctgaggaaccagggggtggttagaacactgtccagcagcgctcaggaggacattatcagatggttcaaggaggagcaacttccactgcgggccggataccaaaagacgagcgacacgatcgccccctggtttcacggcatcttaaccctgaaaaaggctaatgagttgctgctctccactggaatgcccggcagtttcctgatacgggtctcagaacgcataaaaggatatgctctctcatatttgtcagaggacgggtgcaaacactttctgattgacgcatctgcagacgcctacagcttcttgggggtagatcagttacaacatgcaacactagctgatttggtcgaatatcataaggaggagcccataacctcccttggcaaggagctgcttctttacccttgcgggcagcaggatcagcttcctgattatttggagctattcgagtag

SEQ ID NO: 69474 - DNA, 1365 bp, Artificial Sequence
  derived and/or modified sequence
atgctgaagcagatcctgtctgagatgtacattgatcctgacctgctggccgagctgtctgaggagcagaagcagatcctcttcttcaagatgagggaggagcagatccgccgctggaaggagcgggaggccgccatggagaggaaggagagcctgcctgtgaagccccggcccaagaaggaaaatggcaagtctgtgcactggaagctgggcgctgacaaggaggtgtgggtgtgggtgatgggagagcaccacctggacaagccctatgatgtgctgtgcaatgagatcatcgccgagcgggcccggctgaaggccgagcaggaggccgaggagcccaggaagacccacagcgaggagttcaccaacagcctgaagaccaagagccagtaccatgacctgcaggccccagacaaccagcagaccaaggacatctggaagaaggtggccgagaaggaggagctggagcagggcagcaggcctgcccccaccctggaggaggagaagatccgcagcctgagcagcagcagcaggaacatccagcagatgctggccgacagcatcaacaggatgaaggcctatgccttccaccagaagaaggagagcatgaagaagaagcaggatgaggagatcaaccagatcgaggaggagaggaccaagcagatctgcaagtcctggaaggaggacagcgagtggcaggccagcctgaggaagagcaaggccgcagatgagaagaggaggagcctggccaagcaggcccgggaggactacaagaggctgagcctgggcgcccagaagggccggggcggggagcggctgcagagccccctgcgggtgccccagaagccagagcggccccccctgccccccaagccccagttcctgaacagcggggcctacccccagaagcccctgaggaaccagggcgtggtgaggaccctgagcagcagcgcccaggaggacatcatccgctggttcaaggaggagcagctgcccctgcgggccggctaccagaagaccagtgacaccatcgccccctggttccacggcatcctgaccctgaagaaggccaatgagctgctgctgagcacaggcatgcctggcagcttcctgatccgggtgtctgagcgcatcaagggctacgccctgagctacctgtctgaagatggctgcaagcacttcctgattgatgccagcgcagatgcctacagcttcctgggcgtggaccagctgcagcacgccaccctggccgacctggtggagtaccacaaggaggagcccatcaccagcctgggcaaggagctgctgctgtacccctgtggccagcaggaccagctgcctgactacctggagctgtttgaatag

SEQ ID NO: 69475 - DNA, 1365 bp, Artificial Sequence
  derived and/or modified sequence
atgctgaagcagatcctgagcgagatgtacatcgaccccgacctgcttgcagaactatcagaggaacagaagcagatcttgttcttcaagatgcgggaggagcagataaggagatggaaggaaagggaagcagccatggaaagaaaagagagcttgcctgtgaagccacgtcccaaaaaggagaacggtaagtccgtccactggaagctgggagcggacaaagaagtctgggtgtgggtcatgggagaacatcatctggataagccatacgatgtgctttgcaacgagataattgcggaacgcgctcgtctgaaagctgaacaggaggccgaggaacctaggaaaacccattcggaggagttcaccaattctctgaagacaaagtcccagtaccacgacttacaagctcccgataatcagcagaccaaagacatttggaaaaaagttgccgagaaggaggaactcgagcaaggcagcagacctgccccaactctggaggaggagaaaattagatcactgagctccagttctcgtaacatccaacaaatgttggccgattccatcaaccggatgaaggcgtatgcttttcatcagaagaaggagtccatgaaaaaaaagcaggatgaagagatcaaccaaattgaggaagagagaaccaaacagatttgtaagtcttggaaggaggattctgaatggcaggcttcgctgcgaaaaagcaaagcagcagacgaaaaaagacgatccctagctaagcaggcccgcgaggactacaagcgcctgtccctcggtgcccagaagggtcgagggggagagcggctgcagtcacctctgcgggttccgcagaagccggagcgcccccccctcccacccaaaccccagttcctcaactcgggagcttatcctcagaaaccactcagaaaccagggagtggtcaggacactttcctctagcgcacaggaggacatcattcgatggttcaaggaagagcaactgcctctgcgagcaggctatcagaagacatcagacacgatcgccccatggtttcacgggattctcacattgaagaaggccaacgagctcttactctctactggaatgccgggatcctttctcatcagggtgtccgagaggattaagggatacgcactctcttacctgtccgaagacggctgcaaacacttcctgattgacgcaagtgccgacgcttattccttcctgggcgtggatcagctacagcacgcgaccctcgccgacctggtagagtaccataaggaagagcccattacctcacttggtaaagagctcctgttgtacccttgcggccagcaggaccaacttcccgattatctcgagctttttgaatag

SEQ ID NO: 69476 - DNA, 1365 bp, Artificial Sequence
  derived and/or modified sequence
atgctgaagcagatcctgagcgagatgtacatcgaccccgacctgctagcagaactgtcagaggaacaaaaacagatcctcttcttcaagatgagggaggagcagatcaggagatggaaagaaagagaagcggcaatggagcgtaaggaaagcctgcctgtgaagcctcgccctaaaaaagaaaatgggaagtccgtacattggaagttgggcgccgacaaggaagtttgggtgtgggtcatgggcgagcaccacctagataagccctatgatgtcctttgtaacgagatcatcgctgagagagcgcgcctgaaggcagaacaggaggccgaagagccacgtaaaacacactctgaagagttcacaaatagccttaagactaagagccaatatcacgacctgcaggcccctgataaccagcaaacaaaggatatttggaaaaaagtggccgagaaggaggaactcgaacagggaagtaggcctgcccctactctcgaagaggaaaagattcgcagcctgtcatcctccagcagaaacatccaacagatgttagccgattcgattaaccggatgaaagcctacgccttccatcaaaagaaggagagtatgaagaagaaacaagacgaggagattaatcagattgaagaagaacggaccaaacagatctgcaagtcgtggaaggaggactccgaatggcaagcatctttaaggaagtcaaaagcagccgacgagaagaggcggagtctggccaagcaggcccgtgaggattataagcggctgagcttgggtgcccagaagggccggggaggggaacgccttcagagcccgctgcgagtgccacagaaacctgagcgaccacctctgcccccaaagcctcagttcctgaactccggagcctaccctcagaagccactacgtaatcagggagtcgttcgaacactctctagctccgctcaggaggatatcatacgttggttcaaggaggaacaactgcccctgcgcgccgggtaccagaaaaccagcgacactatagccccctggtttcacggcatcctcacgttaaagaaggcgaatgagctgctgctgtccacggggatgccgggttcgttcctcatacgggtgtcagaacggattaaaggctacgctttgagttatttgtcagaggacgggtgcaaacactttctcattgacgcttcagcggacgcatacagctttcttggagtggaccagctccaacacgccacactggcagatctggttgaataccacaaggaggagccgattacgagtctgggtaaagagctcttgctctacccatgtggccagcaggatcagttgcctgactacttggaattattcgaatag

SEQ ID NO: 69477 - DNA, 1365 bp, Artificial Sequence
  derived and/or modified sequence
atgctgaaacaaatcctgagcgaaatgtacatcgatcctgatttactggcagagctgagtgaagaacaaaagcagattctcttcttcaaaatgcgagaggagcagatccggagatggaaggagcgcgaagcagcaatggagcgtaaggaaagtctccccgtgaaacctaggcctaagaaagaaaatggcaagtcggtgcattggaaactgggagcagacaaagaagtgtgggtgtgggtcatgggggaacatcatctcgacaagccatatgacgtattatgtaatgaaattatcgctgaaagggcacggctcaaagcagagcaggaagcagaggagcccaggaagacccatagtgaagagtttaccaattctttaaagacaaaatcccagtaccacgatctccaggctcctgacaaccaacaaacaaaggatatctggaaaaaagtcgccgaaaaagaggagttggagcaggggagccgtcctgctcctaccttagaagaagaaaagatcagatccctgtcctccagctctcgcaatattcaacagatgctggccgactctatcaaccggatgaaagcttatgcattccaccagaaaaaagaatccatgaaaaaaaaacaggacgaggaaataaaccagatagaggaagaacggacaaaacagatttgcaagtcctggaaggaggatagtgaatggcaggcaagcctgagaaaatccaaggctgccgatgagaagcgacgcagtctagccaagcaagcccgtgaagactataagcgactgtctctgggagcccaaaaaggtaggggaggtgaaagacttcagagcccacttcgggtccctcaaaagcctgagcgtcctcccctgccccctaagccccagttccttaactcaggcgcttacccacagaagcctctgcgaaaccagggggtcgtgagaaccctttcatcgagtgcccaggaggacatcatccgttggttcaaggaggaacagttgcctctgagggcgggataccagaagacgtctgataccatagctccttggtttcatggtattctcaccctaaagaaggccaatgaattgttgctgagcacgggaatgccgggatcttttttaatccgagtcagcgaacgcataaagggttacgcgctgagttacctgtctgaggacggatgtaaacacttcctcatagatgcctccgcagatgcctactcttttcttggcgtagaccagctgcagcacgcaaccctggctgacttagtggaataccataaagaagagccaatcacttcactggggaaggagcttttactatacccatgtggacaacaggaccagttaccagactatctggaactgtttgaatag

SEQ ID NO: 69478 - DNA, 1365 bp, Artificial Sequence
  derived and/or modified sequence
atgctgaagcaaattctctcagagatgtacatcgaccccgaccttttggcggaactctccgaggagcagaagcaaattcttttttttaaaatgagggaagagcagatcaggcgctggaaggaacgcgaggcagcgatggagcgcaaggagtccctacccgtcaagcctagacctaaaaaagagaatgggaaaagcgtgcactggaagctcggagcagataaagaggtgtgggtctgggtcatgggggagcaccacttggacaagccctacgacgtcctgtgcaacgagatcatcgctgagcgcgcaagactgaaagccgagcaagaagctgaagaaccgagaaagacccattctgaggagtttacaaactccctgaaaacaaaaagccagtaccacgacctccaagcaccggacaaccagcagactaaagacatatggaagaaagtcgcggagaaagaggagctggagcaaggctctaggccggcacctactctcgaggaagaaaaaattcggagcctgtcatcttccagtcgaaatattcagcagatgctggccgacagcataaaccggatgaaggcctacgcctttcatcaaaaaaaagagtcaatgaagaagaaacaggatgaagagattaaccagattgaggaggagcggaccaagcaaatctgcaagtcatggaaggaggactcggagtggcaggcatctttgagaaaatccaaagcagcggatgagaagagacgcagtttagctaagcaagctcgggaggattataagaggctgtccctgggtgcacaaaaaggaagaggtggtgaacgcctccaaagtccacttcgtgtgccacagaagcctgagaggcctcctctgcctccaaaaccacagtttctgaattccggcgcatatcctcagaagccactacgaaaccaaggtgttgtccggactttgtcctcatctgcccaggaggatattattcggtggttcaaagaggagcaactcccgctgcgagcaggataccagaaaacctccgacaccatcgcaccttggttccatggaatcttgaccttgaaaaaggcaaacgagctgctgctgtccactggtatgccgggaagctttctgataagggtgtcagaacgaataaagggatacgcactgagttacctgagtgaggatggctgcaagcattttctgatcgacgcatctgccgacgcttacagcttcctgggcgtggaccagctgcagcacgccaccttagcagatctggtcgaatatcacaaagaagagccaatcacctctctgggcaaggaacttctgctgtacccatgtggtcaacaggatcagctgccagattatctggagctgtttgagtag

SEQ ID NO: 69479 - DNA, 1984 bp, Artificial Sequence
  derived and/or modified sequence
cggcgcccggggcgggctcaggtgcggggttgggcggcgagagcggccgcggcgggtgtccggtgtccggtgtccggtgtccggtgtctggagccgctggctaggttcagtgaacagcattttggacaggacatttggtgccaggtctgagtagccagtttgctgaattattgtcccagtcagccaggattgtgagctgtttgggaagtttcgtggaaacgcccaagtgccagcacaggtggagggacacctggaggccagtttcaggaacttttgccacaagtataaaagacttcagaagtgcaaagatgctgaaacagatactgtcggagatgtacatagatcctgatctactggcagagctcagcgaagaacagaaacagatcctgttcttcaagatgagagaggaacagatccgacgatggaaagaaagagaagcagctatggaaagaaaggagtccctgccagtgaaacccagaccaaagaaagagaatggcaaatcggttcattggaaacttggagctgataaggaagtctgggtatgggtgatgggcgaacaccatctagataaaccctatgatgtgctctgtaatgaaattattgctgagagggcccggctgaaagcagaacaggaggcagaagagcccagaaaaactcactctgaagaattcaccaatagcttgaaaacaaaatcacagtaccatgatctgcaggctccggataaccagcagactaaagacatctggaagaaagtggcagaaaaggaggaactggagcaaggatcgaggccagcaccaaccctggaagaagagaaaatccgatcactctccagttcttcaagaaatattcaacaaatgttggcagattcaatcaatcgtatgaaggcatatgcatttcaccagaagaaagaatctatgaagaaaaaacaagatgaagaaataaatcaaatagaagaagagagaacgaagcagatttgtaagagctggaaagaagactcggaatggcaggcatctctgcgaaaatccaaagcagctgatgagaagagacgctccttggctaaacaagcacgagaagactacaagaggttatccctcggggcccagaaaggaagaggcggtgagaggctgcaaagccccttgcgtgttccgcagaaaccagaaagacctccccttccacccaagcctcagttcctaaactcaggggcatatcctcaaaaacctcttagaaatcagggagtggtgaggacactgtccagctctgcccaagaggacatcatccggtggtttaaagaggagcagctaccacttcgagcgggctaccagaaaacctcagacaccatagccccctggttccatggaattctcacactcaagaaagcaaatgaacttcttctgagcacaggcatgcccggcagttttctcatccgagtcagtgaaaggatcaaaggctatgccctgtcctatctgtcggaggacggctgtaaacatttcctcatcgatgcctctgcagacgcctacagcttcctgggcgtggaccagctacagcatgccaccttggcggatttggtggaatatcacaaggaggaacccatcacttccctggggaaggagctccttctctatccctgtggtcagcaggaccagctgcctgactacctggagctgtttgagtgacagcctccatcagggtcatcctacagcctccaagcgggctttcccctggacaaatgccactgcaacatttatgtgtgaagccaaaatcaccctgcagcagagccaatactgatcaactgaaagtaaagtatccatggagtcctcattgacacctcttttctgcacaaatactggaattcaatgtcaagagaaaatgacctctgctcaaaagggagaagagtctcaatttcagcaagtacctgtcatgaagggtatgaccttaatgatgtacataaaataaaacaaatgaagaaatggaaaacttttagaaa

SEQ ID NO: 69480 - DNA, 3352 bp, Artificial Sequence
  derived and/or modified sequence
agtcaccccggcatgtgggcgcggcggggcggcgcgggcgggacggctacaagagctgttttgcgtccgggccggagtatttgctcagcccgcctgcgccgcttgggacgcctctgcctttccctccctcccttccccgacggcttctggcggccaagtggatgtggcgggtgatcgagccaccctgcccaggggcgcccagcactggttcagtgaacagcattttggacaggacatttggtgccaggtctgagtagccagtttgctgaattattgtcccagtcagccaggattgtgagctgtttgggaagtttcgtggaaacgcccaagtgccagcacaggtggagggacacctggaggccagtttcaggaacttttgccacaagtataaaagacttcagaagtgcaaagatgctgaaacagatactgtcggagatgtacatagatcctgatctactggcagagctcagcgaagaacagaaacagatcctgttcttcaagatgagagaggaacagatccgacgatggaaagaaagagaagcagctatggaaagaaaggagtccctgccagtgaaacccagaccaaagaaagagaatggcaaatcggttcattggaaacttggagctgataaggaagtctgggtatgggtgatgggcgaacaccatctagataaaccctatgatgtgctctgtaatgaaattattgctgagagggcccggctgaaagcagaacaggaggcagaagagcccagaaaaactcactctgaagaattcaccaatagcttgaaaacaaaatcacagtaccatgatctgcaggctccggataaccagcagactaaagacatctggaagaaagtggcagaaaaggaggaactggagcaaggatcgaggccagcaccaaccctggaagaagagaaaatccgatcactctccagttcttcaagaaatattcaacaaatgttggcagattcaatcaatcgtatgaaggcatatgcatttcaccagaagaaagaatctatgaagaaaaaacaagatgaagaaataaatcaaatagaagaagagagaacgaagcagatttgtaagagctggaaagaagactcggaatggcaggcatctctgcgaaaatccaaagcagctgatgagaagagacgctccttggctaaacaagcacgagaagactacaagaggttatccctcggggcccagaaaggaagaggcggtgagaggctgcaaagccccttgcgtgttccgcagaaaccagaaagacctccccttccacccaagcctcagttcctaaactcaggggcatatcctcaaaaacctcttagaaatcagggagtggtgaggacactgtccagctctgcccaagaggacatcatccggtggtttaaagaggagcagctaccacttcgagcgggctaccagaaaacctcagacaccatagccccctggttccatggaattctcacactcaagaaagcaaatgaacttcttctgagcacaggcatgcccggcagttttctcatccgagtcagtgaaaggatcaaaggctatgccctgtcctatctgtcggaggacggctgtaaacatttcctcatcgatgcctctgcagacgcctacagcttcctgggcgtggaccagctacagcatgccaccttggcggatttggtggaatatcacaaggaggaacccatcacttccctggggaaggagctccttctctatccctgtggtcagcaggaccagctgcctgactacctggagctgtttgagtgacagcctccatcagggtcatcctacagcctccaagcgggctttcccctggacaaatgccactgcaacatttatgtgtgaagccaaaatcaccctgcagcagagccaatactgatcaactgaaagtaaagtatccatggagtcctcattgacacctcttttctgcacaaatactggaattcaatgtcaagagaaaatgacctctgctcaaaagggagaagagtctcaatttcagcaagtacctgtcatgaagggtatgaccttaatgatgtacataaaataaaacaaatgaagaaatggaaaacttttagaaattaaggtgtacttgaaaacgaatatctatcatatgacccctgcactccctctgtatcatctcaggaggtttcaggggcctgttgacatgaagtttcgaagtttcatgttggctttggaatggtagcaaaagcctttcctggctgagatgatgcttaaaacacacctcacttattgtacatgttggaaccaggacatgagagacatagaaaaacagaagtcatgaatgtaaattgaatgagaggcttaacatgcatgaaaatacagatggacctgcaggaaagtgagcaaacatcgctgagtttgttttcttgttcgggagaatggggccggggctggcctggcctcccctggatatactctatagtgcaccaaaaggataaagcatctgtacatgtatttttttattttttatcagaagtgcttagacaagaacagaataagcaggctgtttggatgctacttgtggttgaattgtgttcccccaaaatatatggtgaagtcttaacccccatccccgtgaatgggaccttgtttggaaatagggtctttgcagatatagtcaagatgaggtcacattggattagggtgggccccaaatccaatgactggcatccttaggagaagagagagttttggtaatagacacaaatgcagtgggaagaagaccaggggacaagaggcaagttggagtgatgcagccggaagggaagggacaccaaggatctccggccaccagcagaagccagcagagaggcatgggacaggttccccacaagccttagaaggaagcatggccctgacttcagaattccagactccagaactggaagaataaatgtctgttgttttaagctgcttagttcatgctgagttcatgctgacttgttactatagccccagaaagctaatacagtcgtttatgtaattacataacctgacacacaagatcgacccattcactgctgcccagtccaccattttcataatgaagtagaaatgggaggtaagaaaaacattccagccagttctgtttagccctggcacacatatttgtcccgtcaggaatcttatgccctcctggaacccccgcccacctcagtccagtcccagtcaggcgaacggcctctggacagggactgaggtggctctgagccactggagatcatttttcttggaggatggagattggctagtacctctggcctaactgtgtaggtcaatactcttttacattgccttctaataaaagcagaatgatacagca

SEQ ID NO: 69481 - DNA, 1365 bp, Artificial Sequence
  derived and/or modified sequence
atgctgaagcagatcctgagcgagatgtacatcgaccccgacctgctggccgagctgagcgaggagcagaagcagatcctgttcttcaagatgagagaggagcagatcagaagatggaaggagagagaggccgccatggagagaaaggagagcctgcccgtgaagcccagacccaagaaggagaacggcaagagcgtgcactggaagctgggcgccgacaaggaggtgtgggtgtgggtgatgggcgagcaccacctggacaagccctacgacgtgctgtgcaacgagatcatcgccgagagagccagactgaaggccgagcaggaggccgaggagcccagaaagacccacagcgaggagttcaccaacagcctgaagaccaagagccagtaccacgacctgcaggcccccgacaaccagcagaccaaggacatctggaagaaggtggccgagaaggaggagctggagcagggcagcagacccgcccccaccctggaggaggagaagatcagaagcctgagcagcagcagcagaaacatccagcagatgctggccgacagcatcaacagaatgaaggcctacgccttccaccagaagaaggagagcatgaagaagaagcaggacgaggagatcaaccagatcgaggaggagagaaccaagcagatctgcaagagctggaaggaggacagcgagtggcaggccagcctgagaaagagcaaggccgccgacgagaagagaagaagcctggccaagcaggccagagaggactacaagagactgagcctgggcgcccagaagggcagaggcggcgagagactgcagagccccctgagagtgccccagaagcccgagagaccccccctgccccccaagccccagttcctgaacagcggcgcctacccccagaagcccctgagaaaccagggcgtggtgagaaccctgagcagcagcgcccaggaggacatcatcagatggttcaaggaggagcagctgcccctgagagccggctaccagaagaccagcgacaccatcgccccctggttccacggcatcctgaccctgaagaaggccaacgagctgctgctgagcaccggcatgcccggcagcttcctgatcagagtgagcgagagaatcaagggctacgccctgagctacctgagcgaggacggctgcaagcacttcctgatcgacgccagcgccgacgcctacagcttcctgggcgtggaccagctgcagcacgccaccctggccgacctggtggagtaccacaaggaggagcccatcaccagcctgggcaaggagctgctgctgtacccctgcggccagcaggaccagctgcccgactacctggagctgttcgagtag

SEQ ID NO: 69482 - protein, 409 aa, Artificial Sequence
  derived and/or modified sequence
MWRVIEPPCPGAPSTENGKSVHWKLGADKEVWVWVMGEHHLDKPYDVLCNEIIAERARLKAEQEAEEPRKTHSEEFTNSLKTKSQYHDLQAPDNQQTKDIWKKVAEKEELEQGSRPAPTLEEEKIRSLSSSSRNIQQMLADSINRMKAYAFHQKKESMKKKQDEEINQIEEERTKQICKSWKEDSEWQASLRKSKAADEKRRSLAKQAREDYKRLSLGAQKGRGGERLQSPLRVPQKPERPPLPPKPQFLNSGAYPQKPLRNQGVVRTLSSSAQEDIIRWFKEEQLPLRAGYQKTSDTIAPWFHGILTLKKANELLLSTGMPGSFLIRVSERIKGYALSYLSEDGCKHFLIDASADAYSFLGVDQLQHATLADLVEYHKEEPITSLGKELLLYPCGQQDQLPDYLELFE

SEQ ID NO: 69483 - DNA, 1230 bp, Artificial Sequence
  derived and/or modified sequence
atgtggagagtgatcgagcccccctgccccggcgcccccagcaccgagaacggcaagagcgtgcactggaagctgggcgccgacaaggaggtgtgggtgtgggtgatgggcgagcaccacctggacaagccctacgacgtgctgtgcaacgagatcatcgccgagagagccagactgaaggccgagcaggaggccgaggagcccagaaagacccacagcgaggagttcaccaacagcctgaagaccaagagccagtaccacgacctgcaggcccccgacaaccagcagaccaaggacatctggaagaaggtggccgagaaggaggagctggagcagggcagcagacccgcccccaccctggaggaggagaagatcagaagcctgagcagcagcagcagaaacatccagcagatgctggccgacagcatcaacagaatgaaggcctacgccttccaccagaagaaggagagcatgaagaagaagcaggacgaggagatcaaccagatcgaggaggagagaaccaagcagatctgcaagagctggaaggaggacagcgagtggcaggccagcctgagaaagagcaaggccgccgacgagaagagaagaagcctggccaagcaggccagagaggactacaagagactgagcctgggcgcccagaagggcagaggcggcgagagactgcagagccccctgagagtgccccagaagcccgagagaccccccctgccccccaagccccagttcctgaacagcggcgcctacccccagaagcccctgagaaaccagggcgtggtgagaaccctgagcagcagcgcccaggaggacatcatcagatggttcaaggaggagcagctgcccctgagagccggctaccagaagaccagcgacaccatcgccccctggttccacggcatcctgaccctgaagaaggccaacgagctgctgctgagcaccggcatgcccggcagcttcctgatcagagtgagcgagagaatcaagggctacgccctgagctacctgagcgaggacggctgcaagcacttcctgatcgacgccagcgccgacgcctacagcttcctgggcgtggaccagctgcagcacgccaccctggccgacctggtggagtaccacaaggaggagcccatcaccagcctgggcaaggagctgctgctgtacccctgcggccagcaggaccagctgcccgactacctggagctgttcgagtag

SEQ ID NO: 69484 - DNA, 1230 bp, Artificial Sequence
  derived and/or modified sequence
atgtggcgcgtcatcgagcccccctgccccggcgcccctagtaccgagaacggtaagagtgtccattggaaactaggggcggataaggaagtgtgggtgtgggtcatgggcgaacatcacctcgacaagccgtacgatgtgctatgcaacgagatcattgcagagcgcgctagactgaaggccgagcaggaggccgaggagccaaggaagacccattcggaggagttcacaaacagcctaaagactaaatcccagtaccacgacctgcaagctccggacaaccagcaaaccaaggatatctggaaaaaggtggctgagaaggaggaactggagcagggctcacgccccgcccctacccttgaagaagagaagattagaagcctgtcaagttcgtcaagaaacatacagcagatgctggctgactcaataaataggatgaaggcgtacgcctttcaccaaaaaaaagaaagtatgaagaagaaacaggacgaggaaataaaccaaatcgaagaagaacggacaaaacaaatctgtaaatcgtggaaggaggactctgagtggcaggcgtccctgagaaagagcaaagctgccgatgagaagaggcgctcccttgcaaagcaggcccgggaagattacaaaagacttagtctgggagcgcaaaaggggagggggggagaacggcttcagagtcccctgagagtcccacagaaaccagagcgcccccctctgccccccaaaccgcagtttttaaactccggagcatatcctcagaagcccttgcgtaaccaaggagtagttcgaacactgtcttcaagcgcacaggaggatataatcagatggtttaaggaggagcagctcccactgagggccggttaccagaagactagcgacactatcgccccgtggttccacgggattctgactcttaaaaaagcgaacgaactcttgttgtcaaccgggatgcctggttcctttctgatccgtgtgtccgagcgaatcaagggttacgccctgagttatctctccgaagacgggtgtaaacacttcctgattgatgccagcgccgacgcttatagtttcctcggcgtagatcagctacagcatgcaactctcgccgatctggtggaataccacaaagaggagccaattactagcctcggtaaagagctgcttctctacccatgtggtcagcaggatcagctgcccgattacctcgagctctttgagtag

SEQ ID NO: 69485 - DNA, 1230 bp, Artificial Sequence
  derived and/or modified sequence
atgtggagggtgattgagcccccctgccctggggcccccagcacagaaaatggcaagtctgtgcactggaagctgggcgctgacaaggaggtgtgggtgtgggtgatgggagagcaccacctggacaagccctatgatgtgctgtgcaatgagatcatcgccgagcgggcccggctgaaggccgagcaggaggccgaggagcccaggaagacccacagcgaggagttcaccaacagcctgaagaccaagagccagtaccatgacctgcaggccccagacaaccagcagaccaaggacatctggaagaaggtggccgagaaggaggagctggagcagggcagcaggcctgcccccaccctggaggaggagaagatccgcagcctgagcagcagcagcaggaacatccagcagatgctggccgacagcatcaacaggatgaaggcctatgccttccaccagaagaaggagagcatgaagaagaagcaggatgaggagatcaaccagatcgaggaggagaggaccaagcagatctgcaagtcctggaaggaggacagcgagtggcaggccagcctgaggaagagcaaggctgctgatgagaagagaagaagcctggccaagcaggcccgggaggactacaagaggctgagcctgggcgcccagaagggccggggcggggagcggctgcagagccccctgcgggtgccccagaagccagagaggcctcccctgccccccaagccccagttcctgaacagcggggcctacccccagaagcccctgaggaaccagggcgtggtgaggaccctgagcagcagcgcccaggaggacatcatccgctggttcaaggaggagcagctgcccctgcgggccggctaccagaagaccagtgacaccatcgccccctggttccacggcatcctgaccctgaagaaggccaatgagctgctgctgagcacaggcatgcctggcagcttcctgatccgggtgtctgagcgcatcaagggctacgccctgagctacctgtctgaagatggctgcaagcacttcctgattgatgccagcgcagatgcctacagcttcctgggcgtggaccagctgcagcacgccaccctggccgacctggtggagtaccacaaggaggagcccatcaccagcctgggcaaggagctgctgctgtacccctgtggccagcaggaccagctgcctgactacctggagctgtttgaatag

SEQ ID NO: 69486 - DNA, 1230 bp, Artificial Sequence
  derived and/or modified sequence
atgtggcgggtgatcgagcccccctgccccggcgcccccagcaccgagaacggtaagagcgttcattggaaactcggggcagataaggaggtatgggtgtgggtgatgggtgagcaccacctggacaaaccgtatgacgtcctttgcaacgagatcattgccgaaagggcccgcctgaaagcagaacaggaggcggaggagcctaggaaaactcacagcgaagaattcaccaactctctgaagactaagagtcagtaccacgacctgcaggctcccgataatcagcagacgaaggacatctggaagaaggtcgcagaaaaagaagagctagaacagggatctagacctgcacctaccctggaagaagaaaaaataagatcgctttcaagctcctcacggaacattcagcagatgttggccgacagcataaatcggatgaaagcatacgctttccaccagaaaaaagaatccatgaaaaagaagcaggacgaagagatcaatcagattgaagaagagcgcactaagcagatttgcaagtcgtggaaggaggactctgagtggcaggccagtctgagaaagtccaaagctgctgacgagaaacgaaggagtctggccaagcaagcccgggaggactataagcggctctccctgggagcacagaaggggcggggcggagaacgactgcaatctcccctgcgcgtgccacagaagccagaaagacccccactgcccccaaaaccccaatttttgaactccggtgcctatccacagaagcctctgaggaaccaaggcgtggtgcgaaccttgtcttccagcgctcaagaggatattatccgctggtttaaagaagagcaactaccacttcgtgctggctaccagaagacttccgacactatcgctccctggtttcatgggatcctcacgctcaagaaagcaaatgaactgttactttccactgggatgccaggaagctttctgatccgcgtgagcgaacgcataaagggctatgcactgtcctacctgtccgaagacgggtgcaagcacttcctgatcgacgccagcgcagacgcctatagcttcctgggcgtcgaccagttacagcacgctactttggctgatcttgtcgagtaccataaggaggaacctatcaccagtctgggtaaagagttactgctctacccctgcggtcaacaggatcagctccctgactacctcgagctctttgagtag

SEQ ID NO: 69487 - DNA, 1230 bp, Artificial Sequence
  derived and/or modified sequence
atgtggagagtgatcgaacccccatgtcccggagccccaagcaccgaaaacggtaaaagcgtccattggaaacttggggctgataaggaagtctgggtctgggtgatgggagaacatcatctggacaagccctatgacgtcctctgtaatgagattatagccgagcgcgcacgattgaaagctgaacaggaagcggaggagcctaggaagacccactccgaagagtttacaaatagcctgaaaactaagtcacagtatcacgatctccaggccccagacaaccagcagacaaaggatatttggaaaaaagtcgccgaaaaagaggagttggaacaggggagccgcccagcgccaacactcgaggaggagaagattcgaagtctttctagcagtagtagaaacattcagcagatgctggcagatagcattaaccgcatgaaggcgtatgcctttcatcagaaaaaggaatctatgaagaaaaagcaggatgaagagattaaccagatagaagaggaaagaactaaacagatatgtaaaagttggaaggaagactctgaatggcaggcaagcctacgtaaaagcaaggccgcagatgagaagcggaggtccttggccaagcaggccagagaggattacaagcgtctgagccttggagctcagaaaggaaggggtggcgagagattgcagtcacctctgcgagtgcctcagaagccagagagaccccctctgcctccaaagccacaatttctgaatagtggggcataccctcagaagcctttgcgcaatcagggggtggtccgcacacttagcagcagtgcccaggaggacatcatcaggtggtttaaggaagaacagctgcctcttcgcgcagggtatcagaaaacttctgatacaatagccccatggttccacggaatactgacgcttaagaaggcaaatgagctgctgctgagcacagggatgcctggctcttttctcatcagggtttcagagcgtatcaagggatacgcccttagctatctgtcagaggatggatgtaaacatttcttgatcgacgcttcagccgacgcatattccttccttggggtagaccagctgcagcacgcaactttggccgatcttgtggagtaccacaaagaagagccgatcacatcactggggaaggaattgctgctatatccttgcgggcagcaggaccagctaccagactatcttgaactgttcgagtag

SEQ ID NO: 69488 - DNA, 1697 bp, Artificial Sequence
  derived and/or modified sequence
tttgctcagcccgcctgcgccgcttgggacgcctctgcctttccctccctcccttccccgacggcttctggcggccaagtggatgtggcgggtgatcgagccaccctgcccaggggcgcccagcactgagaatggcaaatcggttcattggaaacttggagctgataaggaagtctgggtatgggtgatgggcgaacaccatctagataaaccctatgatgtgctctgtaatgaaattattgctgagagggcccggctgaaagcagaacaggaggcagaagagcccagaaaaactcactctgaagaattcaccaatagcttgaaaacaaaatcacagtaccatgatctgcaggctccggataaccagcagactaaagacatctggaagaaagtggcagaaaaggaggaactggagcaaggatcgaggccagcaccaaccctggaagaagagaaaatccgatcactctccagttcttcaagaaatattcaacaaatgttggcagattcaatcaatcgtatgaaggcatatgcatttcaccagaagaaagaatctatgaagaaaaaacaagatgaagaaataaatcaaatagaagaagagagaacgaagcagatttgtaagagctggaaagaagactcggaatggcaggcatctctgcgaaaatccaaagcagctgatgagaagagacgctccttggctaaacaagcacgagaagactacaagaggttatccctcggggcccagaaaggaagaggcggtgagaggctgcaaagccccttgcgtgttccgcagaaaccagaaagacctccccttccacccaagcctcagttcctaaactcaggggcatatcctcaaaaacctcttagaaatcagggagtggtgaggacactgtccagctctgcccaagaggacatcatccggtggtttaaagaggagcagctaccacttcgagcgggctaccagaaaacctcagacaccatagccccctggttccatggaattctcacactcaagaaagcaaatgaacttcttctgagcacaggcatgcccggcagttttctcatccgagtcagtgaaaggatcaaaggctatgccctgtcctatctgtcggaggacggctgtaaacatttcctcatcgatgcctctgcagacgcctacagcttcctgggcgtggaccagctacagcatgccaccttggcggatttggtggaatatcacaaggaggaacccatcacttccctggggaaggagctccttctctatccctgtggtcagcaggaccagctgcctgactacctggagctgtttgagtgacagcctccatcagggtcatcctacagcctccaagcgggctttcccctggacaaatgccactgcaacatttatgtgtgaagccaaaatcaccctgcagcagagccaatactgatcaactgaaagtaaagtatccatggagtcctcattgacacctcttttctgcacaaatactggaattcaatgtcaagagaaaatgacctctgctcaaaagggagaagagtctcaatttcagcaagtacctgtcatgaagggtatgaccttaatgatgtacataaaataaaacaaatgaagaaatggaaaacttttagaaattaaggtgtacttgaaaacgaatatctatcatatgacccctgcactccctctgtatcatctcaggaggtttcag

SEQ ID NO: 69489 - protein, 181 aa, Artificial Sequence
  derived and/or modified sequence
MGGFFSSIFSSLFGTREMRILILGLDGAGKTTILYRLQVGEVVTTIPTIGFNVETVTYKNLKFQVWDLGGQTSIRPYWRCYYSNTDAVIYVVDSCDRDRIGISKSELVAMLEEEELRKAILVVFANKQDMEQAMTSSEMANSLGLPALKDRKWQIFKTSATKGTGLDEAMEWLVETLKSRQ

SEQ ID NO: 69490 - protein, 164 aa, Artificial Sequence
  derived and/or modified sequence
MRILILGLDGAGKTTILYRLQVGEVVTTIPTIGFNVETVTYKNLKFQVWDLGGQTSIRPYWRCYYSNTDAVIYVVDSCDRDRIGISKSELVAMLEEEELRKAILVVFANKQDMEQAMTSSEMANSLGLPALKDRKWQIFKTSATKGTGLDEAMEWLVETLKSRQ

SEQ ID NO: 69491 - DNA, 495 bp, Artificial Sequence
  derived and/or modified sequence
atgagaatcctgatcctgggcctggacggcgccggcaagaccaccatcctgtacagactgcaggtgggcgaggtggtgaccaccatccccaccatcggcttcaacgtggagaccgtgacctacaagaacctgaagttccaggtgtgggacctgggcggccagaccagcatcagaccctactggagatgctactacagcaacaccgacgccgtgatctacgtggtggacagctgcgacagagacagaatcggcatcagcaagagcgagctggtggccatgctggaggaggaggagctgagaaaggccatcctggtggtgttcgccaacaagcaggacatggagcaggccatgaccagcagcgagatggccaacagcctgggcctgcccgccctgaaggacagaaagtggcagatcttcaagaccagcgccaccaagggcaccggcctggacgaggccatggagtggctggtggagaccctgaagagcagacagtag

SEQ ID NO: 69492 - DNA, 546 bp, Artificial Sequence
  derived and/or modified sequence
atgggggggttcttttcaagtattttcagcagcttgtttgggaccagggaaatgagaatcctcattctgggcctggatggcgctgggaagacaacaattctgtaccgcttacaagttggcgaagtggtgacaacgattcctaccatcgggtttaatgtagagacagttacctacaagaatctcaagtttcaagtctgggacctaggcggccagacttctattcgcccatattggcggtgctactacagcaacacagatgcagttatctatgtcgtcgattcttgcgacagggacagaataggaataagcaagagtgagctggtcgccatgttagaagaggaggaattgcgaaaagcgattctcgtggtgtttgctaataaacaggacatggagcaggccatgacatcatccgagatggcaaacagcctgggtctgcctgctctgaaggaccgcaagtggcaaatatttaaaacatctgctaccaaaggaaccggcctcgacgaggccatggagtggcttgtggagactcttaagagcagacagtag

SEQ ID NO: 69493 - DNA, 495 bp, Artificial Sequence
  derived and/or modified sequence
atgcgcatcttgattcttggattggatggggcaggaaagaccaccattctatatcgacttcaggtaggggaagtcgttaccacgattcccacaatcggcttcaacgttgagactgtaacctataaaaatcttaaattccaagtttgggaccttggaggacagacatcaattagaccctactggcggtgttattactcaaataccgacgcggtgatctacgtggtggactcttgcgaccgggaccgcatcggtatatccaagagtgagctagttgccatgctagaagaggaggaactcagaaaagctatcctagtggtgttcgcaaacaagcaggatatggaacaggccatgacttctagcgaaatggcgaatagcctcggactgccagccctgaaagataggaaatggcaaatattcaaaacctctgccaccaaaggcactgggctggatgaagctatggagtggctcgttgaaaccctgaagagcaggcagtag

SEQ ID NO: 69494 - DNA, 495 bp, Artificial Sequence
  derived and/or modified sequence
atgcggatattaatacttggattggatggagcaggaaaaaccactatactgtacaggttgcaggtgggggaggtggtcaccacaatacccaccattgggttcaacgtagagacagtgacatataagaatcttaagttccaggtgtgggacctgggtggtcaaacgagcatccggccctactggagatgttactatagcaatacagacgctgtgatttatgttgtggacagctgcgatagagacaggatcggtatatccaagagcgaattggtggcaatgttagaggaggaagaactcaggaaggccatcttggtagtgtttgccaacaaacaggatatggagcaggccatgacatcttccgagatggccaattcccttggccttccagccctgaaggatagaaaatggcaaatttttaaaacatctgcgaccaagggcacagggctggacgaagccatggagtggctggttgagaccctgaagtccaggcagtag

SEQ ID NO: 69495 - DNA, 546 bp, Artificial Sequence
  derived and/or modified sequence
atgggcggcttcttcagcagcatcttcagcagcctgtttggcacccgggagatgaggatcctgatcctgggcctggatggagctgggaagaccaccatcctgtaccgcctgcaggtgggggaggtggtgaccaccatccccaccatcggcttcaacgtggagaccgtgacctacaagaacctgaagttccaggtgtgggacctgggcggccagaccagcatccggccctactggcgctgctactacagcaacacagatgctgtgatctacgtggtggacagctgtgaccgggaccgcatcggcatcagcaagtctgagctggtggccatgctggaggaggaggagctgaggaaggccatcctggtggtgtttgccaacaagcaggacatggagcaggccatgaccagcagcgagatggccaacagcctgggcctgcctgccctgaaggacaggaagtggcagatcttcaagaccagcgccaccaagggcaccggcctggatgaggccatggagtggctggtggagaccctgaagagccggcagtag

SEQ ID NO: 69496 - DNA, 495 bp, Artificial Sequence
  derived and/or modified sequence
atgaggatcctgatcctgggcctggatggagctgggaagaccaccatcctgtaccgcctgcaggtgggggaggtggtgaccaccatccccaccatcggcttcaacgtggagaccgtgacctacaagaacctgaagttccaggtgtgggacctgggcggccagaccagcatccggccctactggcgctgctactacagcaacacagatgctgtgatctacgtggtggacagctgtgaccgggacagaattggcatcagcaagtctgagctggtggccatgctggaggaggaggagctgaggaaggccatcctggtggtgtttgccaacaagcaggacatggagcaggccatgaccagcagcgagatggccaacagcctgggcctgcctgccctgaaggacaggaagtggcagatcttcaagaccagcgccaccaagggcaccggcctggatgaggccatggagtggctggtggagaccctgaagagccggcagtag

SEQ ID NO: 69497 - DNA, 546 bp, Artificial Sequence
  derived and/or modified sequence
atgggcggcttcttcagcagcatcttcagcagcctgttcggcacccgggagatgagaatccttattctgggcctggatggagcgggaaaaacaactatcctgtaccggttgcaggtgggcgaggtggtgacaactattcctacaatcgggttcaacgtagaaacagtgacgtacaagaacctgaaattccaagtgtgggacctaggaggacagaccagtattcgcccttattggcgatgttactactccaacaccgacgcagtgatttacgtcgtggattcctgtgacagggaccgtattggaattagcaagtctgaactcgttgcaatgctcgaagaggaagagctccgcaaagccatccttgtggtttttgccaacaagcaggacatggaacaagccatgacatctagtgaaatggcgaattcccttgggctgcccgctcttaaggatcggaaatggcagatctttaagacatccgccaccaagggaaccggactcgacgaggccatggagtggctggtcgagactcttaagagtcgacagtag

SEQ ID NO: 69498 - DNA, 495 bp, Artificial Sequence
  derived and/or modified sequence
atgcggatcctgatcctgggcctggacggcgccggcaagaccaccatcttgtatcggctgcaagtcggggaagttgtgaccacaattccaacaataggattcaatgtcgagaccgtcacttacaaaaacctcaaatttcaggtctgggatctgggcggccagacatccatcaggccctactggcgttgctattacagtaataccgatgccgttatttatgtggtggattcctgtgaccgcgaccgcatcgggatttccaaaagtgaactggtggccatgctagaggaagaggagttgcgaaaagccatcttggtcgtgttcgcaaataaacaggatatggaacaggctatgactagctctgaaatggctaacagcctcggactccctgcccttaaagatcggaaatggcagatttttaagacttcagcaactaagggaacaggactcgacgaagctatggagtggctggtggagactttgaagagcagacaatag

SEQ ID NO: 69499 - DNA, 495 bp, Artificial Sequence
  derived and/or modified sequence
atgcggatcctgatcctgggcctggacggcgccggcaagaccaccatactgtacagattgcaggttggcgaggtagttacaacaattccaaccataggatttaacgtcgagaccgtgacctataaaaaccttaagtttcaggtctgggacttaggcggacagacttctataaggccatactggcgatgttactattcgaacactgacgctgtgatttacgtcgtcgactcctgtgaccgggatcgcatcgggatttcaaagtcagagttagtcgctatgctggaggaagaagagctccggaaggctattttggtcgtgttcgctaacaagcaggacatggaacaggcgatgacgtcctccgagatggctaatagtttagggctcccagccctgaaagaccgaaagtggcaaatctttaaaactagcgccactaagggaacgggccttgatgaggcgatggagtggctagtggagaccctcaaatcacgtcaatag

SEQ ID NO: 69500 - DNA, 546 bp, Artificial Sequence
  derived and/or modified sequence
atggggggatttttctcatcgattttttccagcctgttcggcacgagggagatgagaattctgattttaggactcgatggcgcaggtaagaccaccattctctaccgactccaggtgggggaggtcgtgactactatacccacgattggtttcaatgttgagacagtcacgtataaaaatctgaagttccaggtttgggatctgggcggacagactagcatacgaccatattggagatgttactacagtaatactgacgccgtgatatacgtggtggactcctgcgacagagatagaatcgggatatcaaaatccgagctggttgccatgctggaggaggaagagctgagaaaggccatcctggtcgtgtttgccaataagcaggacatggagcaggccatgaccagcagcgagatggccaacagcttaggcctgcctgcactcaaggacaggaaatggcagatttttaaaacttcggccacaaaggggacaggattagacgaggcaatggagtggctcgtcgaaactctgaaatcaagacagtag

SEQ ID NO: 69501 - DNA, 495 bp, Artificial Sequence
  derived and/or modified sequence
atgcgaatactcatacttgggctagacggagccggaaagactaccattctgtacagactccaggttggagaggtcgtcactacaatacctactatcggcttcaatgtggaaactgtgacttataaaaaccttaaattccaggtgtgggatctcggaggccagacatcaattcgtccttattggcggtgctactatagtaacacggatgccgtcatatatgtcgttgacagctgcgatagggatcgcatcgggatcagcaaaagtgaactggtggcaatgcttgaggaagaagagctgcggaaagcaattctggttgtgtttgccaataagcaggatatggaacaggccatgacatcaagtgagatggcaaattccctgggcttgccggctctgaaagatagaaaatggcagatttttaagactagcgctacaaaaggaaccgggctagacgaggccatggaatggctggtcgagaccctgaaatcccgccaatag

SEQ ID NO: 69502 - DNA, 495 bp, Artificial Sequence
  derived and/or modified sequence
atgcgcattctgatcttgggcctggatggcgctggaaaaacaactatattatatcggttacaggtgggagaggtagtgaccactattcctacgattggtttcaatgttgaaactgtcacctacaagaatctcaaattccaggtgtgggaccttggagggcagacgtctatcagaccatactggcgatgctactatagtaatactgatgcagtgatctacgtcgtggacagctgcgaccgagaccgcataggtatcagcaaatccgaactggttgctatgctcgaagaagaagagctaaggaaggccattcttgtcgtgtttgcgaacaagcaagacatggagcaagccatgacatcttcagagatggcaaacagtctcggattgcccgcactaaaggacagaaagtggcagatcttcaaaacaagcgccactaaaggaacaggtttggacgaagccatggagtggctagtggagaccctgaagtccagacagtag

SEQ ID NO: 69503 - DNA, 3241 bp, Artificial Sequence
  derived and/or modified sequence
gatgctcaggccaccgttcccggcgcgcagtcgcagctgaccctcgctcccgcccccgcctggagtccgacgtggaagttgctggctgactgggcttgcgaggaaaccgcctcggagctgcagccgaaggccaaggaatcactgaagatcggcgagggaggacagggggttcatcatgggtggctttttctcaagtatattttccagtctgtttggaactcgggaaatgagaattttaattttgggattagatggagcaggaaaaaccacaattttgtacagattacaagtgggagaagttgttactactatacctaccattggatttaatgtagagacggtgacgtacaaaaaccttaaattccaagtctgggatttaggaggacagacaagtatcaggccatactggagatgttactattcaaacacagatgcagtcatttatgtagtagacagttgtgaccgagaccgaattggcatttccaaatcagagttagttgccatgttggaggaagaagagctgagaaaagccattttagtggtgtttgcaaataaacaggacatggaacaggccatgacttcctcagagatggcaaattcacttgggttacctgccttgaaggaccgaaaatggcagatattcaaaacgtcagcaaccaaaggcaccggccttgatgaggcaatggaatggttagttgaaacattaaaaagcagacagtaattcagtccattcttctcccctgaaatgaagactacatcacctctctccctttggaaacagtcaagtgtacttcacactactagatgttaaaactatatgattattggcatatactgactgactgcaatatttgtagtaaatagggaaaataagtatttagttggagggataatttgatcgaatcacctgaatgttctatgtaatgtaaaatattcttttcttgctttcttgtgttaaggtatatattctatttgtatggaattcttattcaaatacagttctattaaagagtatactcctattggatgaaaaaaacctatttttgaatagtagttgcagcttgtttgtataaatactaaaaaatatcttaacagatttttttccccttaaaatgaattatctttccaaagattagactcagtatgagagtaggtgaggaacatagtttgtgtaatataatctttatttgcttacctgaccactttttattaagctgttttgtttaaaagcttttggttataggcatgaatattgttttgatggttaacttcactgacttatctgtaagtgtcattttatagtactttacagttgtcaaaaaaaatcttacatatattgatctagttgatcggtagaggaagcttgtgaagtaggtaggacaggttatgatgtcttcactgtatggacgtgaacccagggttctaataggttggcttgcccaaggtcacctgctagcttgtaaggtaggaatagggctcaaagtaaaacttttggttcagaagcttgactcataaactatactatatattcccaaaaatgtcagtattgacaacacagtctaactcttaaataaaattatgctaattagttacattcaaaataatgtttataaatttatttgtctatactagtagaagtgatcagtgacatactataaataatcctaaatggttatatttgatagaattcataacacattaaagagaaaatttcacattaaaggaaggtttaaaaatctattttcagattataaaaggtgtctttactggttttcattccttttatctacatgtaattggacatgtaaacttgttaaaaatcaaaatcttactgattgtacagggagaaattaagcattctgttttaaaaattaggcttattgctagactgtaagtttaaaaacaattcatgttcaaaggagcttttcaaattacccagtccaccacagaatcagctaatgtgacagaagtaaatatagtgcgtcataattgctaaaaacagggtgaatttctttcacttaagttggaaaaccagcctctaaaaaattaggtgctggtaatgagagcttaataccatggttccctgcaggtctcagaaacattagtagttcctttcttggccctcactgtccttccagtgttggcctctggcctcttcccctcacatttatgttcattctccgggcttatattcattctctgctgctttctcccttcacccgtgggactctcacccttcttgctcattctccagcacccattcctactttagtctctttgaaatcttttttggagattttccttcagctacaaatgttccagtacaaccaatattactcctgaggggcaaagactttttcatatttatgtccctagtatctggtatggcgcctggcatatggcatttcagaatatgttcatagttgaaacagtaggatagatatttgtcatcttgacaagtagccctttgcaatttatacttgagttcactcctggtcaatggcacatggctggaaaatgcagaaagcaagttcacttacagcctgaggcttataaagcttgtacagctgcctcccggcagtccaggaaaactgcaaaaaatgggaagtaaggtcctggcaggcagacccggcatgtagccgctggccatcttgaatcctagggcatgaagttgccccaaagttcagcacttggttaagcctgatccctctggtttatcacaaagaataggatgggataaagaaagtggacacttaaataagctataaattatatggtccttgtctagcaggagacaactgcacaggtatactaccagcgtttggatattgatatatacatggcaaatctgaatattgttttatgagaggcctggcaatgggtaaaacaccaaacttgaaatcagaacataggtgcaaatggccactcctgtagtttcttttctgtaaaatgggatctggacgaatgataccaaacgtttctttctaacattgtattttataactctggcctatgattgtgttgtgtcttgcattaaaaaaaaaaatttgagagtggtagaattacttctgttatctgaaatacctgagatgcactttaaactgttgaaatgtaagctctgagggcagggaccgtatcttatttactgttagtatccgttgcatctagtgtggtgcacctggcacacagtaggcactcaataaatatgtattgattaaaaacaaagacgtcttcaatatgc

SEQ ID NO: 69504 - DNA, 1322 bp, Artificial Sequence
  derived and/or modified sequence
gttctcctccgtcctctctcggttccccttgattcctgcggggtccagggacccggacagcttggggacgtccgcagagcctgggtggctttttctcaagtatattttccagtctgtttggaactcgggaaatgagaattttaattttgggattagatggagcaggaaaaaccacaattttgtacagattacaagtgggagaagttgttactactatacctaccattggatttaatgtagagacggtgacgtacaaaaaccttaaattccaagtctgggatttaggaggacagacaagtatcaggccatactggagatgttactattcaaacacagatgcagtcatttatgtagtagacagttgtgaccgagaccgaattggcatttccaaatcagagttagttgccatgttggaggaagaagagctgagaaaagccattttagtggtgtttgcaaataaacaggacatggaacaggccatgacttcctcagagatggcaaattcacttgggttacctgccttgaaggaccgaaaatggcagatattcaaaacgtcagcaaccaaaggcaccggccttgatgaggcaatggaatggttagttgaaacattaaaaagcagacagtaattcagtccattcttctcccctgaaatgaagactacatcacctctctccctttggaaacagtcaagtgtacttcacactactagatgttaaaactatatgattattggcatatactgactgactgcaatatttgtagtaaatagggaaaataagtatttagttggagggataatttgatcgaatcacctgaatgttctatgtaatgtaaaatattcttttcttgctttcttgtgttaaggtatatattctatttgtatggaattcttattcaaatacagttctattaaagagtatactcctattggatgaaaaaaacctatttttgaatagtagttgcagcttgtttgtataaatactaaaaaatatcttaacagatttttttccccttaaaatgaattatctttccaaagattagactcagtatgagagtaggtgaggaacatagtttgtgtaatataatctttatttgcttacctgaccactttttattaagctgttttgtttaaaagcttttggttataggcatgaatattgttttgatggttaacttcactgacttatctgtaagtgtcattttatagtactttacagttgtcaaaaaaaatcttacatatattgatctagttgatcggtagaggaagcttgtgaagtaggtaggacaggttatgatgtcttcactgtatggacgtgaaccca

SEQ ID NO: 69505 - DNA, 776 bp, Artificial Sequence
  derived and/or modified sequence
gcgttctcctccgtcctctctcggttccccttgattcctgcggggtccagggacccggacagcttggggacgtccgcagagcctgggttcgagttctttacccttatcatgaagttttccctcatccccagctccacttgctgggcagagttgttcttgcggaggctggcaacgcgtcagtcgcaggtggctttttctcaagtatattttccagtctgtttggaactcgggaaatgagaattttaattttgggattagatggagcaggaaaaaccacaattttgtacagattacaagtgggagaagttgttactactatacctaccattggatttaatgtagagacggtgacgtacaaaaaccttaaattccaagtctgggatttaggaggacagacaagtatcaggccatactggagatgttactattcaaacacagatgcagtcatttatgtagtagacagttgtgaccgagaccgaattggcatttccaaatcagagttagttgccatgttggaggaagaagagctgagaaaagccattttagtggtgtttgcaaataaacaggacatggaacaggccatgacttcctcagagatggcaaattcacttgggttacctgccttgaaggaccgaaaatggcagatattcaaaacgtcagcaaccaaaggcaccggccttgatgaggcaatggaatggttagttgaaacattaaaaagcagacagtaattcagtccattcttctcccctgaaatgaagactacatcacctctctcc

SEQ ID NO: 69506 - DNA, 546 bp, Artificial Sequence
  derived and/or modified sequence
atgggcggcttcttcagcagcatcttcagcagcctgttcggcaccagagagatgagaatcctgatcctgggcctggacggcgccggcaagaccaccatcctgtacagactgcaggtgggcgaggtggtgaccaccatccccaccatcggcttcaacgtggagaccgtgacctacaagaacctgaagttccaggtgtgggacctgggcggccagaccagcatcagaccctactggagatgctactacagcaacaccgacgccgtgatctacgtggtggacagctgcgacagagacagaatcggcatcagcaagagcgagctggtggccatgctggaggaggaggagctgagaaaggccatcctggtggtgttcgccaacaagcaggacatggagcaggccatgaccagcagcgagatggccaacagcctgggcctgcccgccctgaaggacagaaagtggcagatcttcaagaccagcgccaccaagggcaccggcctggacgaggccatggagtggctggtggagaccctgaagagcagacagtag

SEQ ID NO: 69507 - DNA, 675 bp, Artificial Sequence
  derived and/or modified sequence
atggagaaccaaacgaaaccccccgatccgaggcccgacgcccctccagagtacaactcccacttcctcccaggccctccaggcacggccgtgccacctccaaccggataccctggggggctgccaatgggctattatagccctcaacaaccttccactttcccgctgtaccaaccagttggaggcatccatcccgtccgctatcagcccggtaaatatcccatgcccaaccagtcagtgcctattacatggatgccaggcccaacccccatggccaactgcccaccggggctggaatatctcgtccagctggaggtccagtgtcctcctggagtgactattgggttcgtggccgagcattggaacttgtgcagggccgtatacagcatccagaacgaaaagaaagagaatgtgatgagggtcaggggcccctgctctacctacgggtgcggaagcgactcagtcttcgaggtgaagtctctcgacggcatctccaacatcggtagcataatccgcaaatggaatggcctcctttctgccatggcggacgcggatcatttcgatattcatttccctctggatctcgacgttaagatgaaagccatgatctttggggcttgtttccttatcgactttatgtacttcgagagatctccgccacaacgtagccgatag

SEQ ID NO: 69508 - DNA, 675 bp, Artificial Sequence
  derived and/or modified sequence
atggagaaccagaccaagcccccagaccccaggccagatgcccctcctgagtacaacagccacttcctgcccggccccccaggcacagctgtgcccccacccaccggctacccaggcggcctgcccatgggctactacagcccccagcagcccagcaccttccccctgtaccagcctgtgggcggcatccaccctgtgcgctaccagcccgggaagtaccccatgcccaaccagagcgtgcccatcacctggatgcctggccccacccccatggccaactgccccccaggcctggagtacctggtgcagctggaggtgcagtgccccccaggagtgaccatcggctttgtggccgagcactggaacctgtgcagagctgtgtacagcatccagaatgagaagaaggaaaatgtgatgagggtgcggggcccctgcagcacctacggctgcggcagtgacagcgtgtttgaggtgaagagcctggatggcatcagcaacatcggcagcatcatcaggaagtggaatggcctgctgagcgccatggctgatgctgaccactttgacatccacttccccctggacctggatgtgaagatgaaggccatgatctttggagcctgcttcctgattgacttcatgtactttgagaggagccccccccagaggagcaggtag

SEQ ID NO: 69509 - DNA, 675 bp, Artificial Sequence
  derived and/or modified sequence
atggagaaccagaccaagccccccgacccccggcccgacgccccccctgagtacaacagccattttcttcctggccctcccgggactgcggtgccccctcccaccggctaccctggaggtctgcccatgggatattattcgcctcagcaaccatctactttccctctgtaccaaccagtgggaggtatccaccccgttagataccagcccggaaaataccccatgcccaaccagtcagtcccgatcacttggatgccggggcctacccccatggctaactgtccacccggcctggaatacctcgtgcagctggaggttcaatgtccacccggcgtgacaatcggattcgtcgccgagcactggaatttgtgcagagctgtgtatagcatccaaaatgagaaaaaggagaatgttatgcgggtgcggggtccttgctctacgtacggttgtggctctgactctgtgttcgaggtaaaatcactggatggaatcagcaacatcggctccatcatcagaaaatggaacggcttgctgtcggccatggcagatgccgaccatttcgatatacacttccccctggacctggacgtcaagatgaaggctatgatcttcggtgcttgttttttgattgacttcatgtactttgaaaggagtcccccacagaggtcccggtag

SEQ ID NO: 69510 - DNA, 675 bp, Artificial Sequence
  derived and/or modified sequence
atggagaatcaaacgaagccgccagacccacggccagatgcccctcccgaatataacagccacttcctccccggaccgccaggcacagctgtgcctcccccaactggataccccggaggcttacccatgggctattacagtccccagcaacccagcacattcccgctgtaccagccagtgggcggaattcaccctgtgcgataccagcctggaaagtaccctatgcccaatcagtccgtgccaataacttggatgcctgggccaactccgatggcaaattgcccccctggtttagaatacttggtgcagttagaggtgcagtgtcccccaggcgttaccataggatttgttgctgaacactggaacctgtgtcgagcagtgtactccatccagaatgaaaagaaagaaaatgtgatgagagtaagagggccatgttcaacttatggatgcggctcggacagtgtattcgaggtgaaatctctggatggcatcagtaacataggttctatcataaggaagtggaatgggctcctctccgccatggccgatgcggatcactttgatattcatttccctctcgaccttgacgtaaagatgaaagctatgatctttggcgcatgtttcctgattgattttatgtattttgagcgctcgcctccccagaggtctagatag

SEQ ID NO: 69511 - DNA, 675 bp, Artificial Sequence
  derived and/or modified sequence
atggagaaccagaccaagccccccgaccccagacccgacgccccccccgagtacaacagccacttcctgcccggcccccccggcaccgccgtgcccccccccaccggctaccccggcggcctgcccatgggctactacagcccccagcagcccagcaccttccccctgtaccagcccgtgggcggcatccaccccgtgagataccagcccggcaagtaccccatgcccaaccagagcgtgcccatcacctggatgcccggccccacccccatggccaactgcccccccggcctggagtacctggtgcagctggaggtgcagtgcccccccggcgtgaccatcggcttcgtggccgagcactggaacctgtgcagagccgtgtacagcatccagaacgagaagaaggagaacgtgatgagagtgagaggcccctgcagcacctacggctgcggcagcgacagcgtgttcgaggtgaagagcctggacggcatcagcaacatcggcagcatcatcagaaagtggaacggcctgctgagcgccatggccgacgccgaccacttcgacatccacttccccctggacctggacgtgaagatgaaggccatgatcttcggcgcctgcttcctgatcgacttcatgtacttcgagagaagccccccccagagaagcagatag

SEQ ID NO: 69512 - protein, 2017 aa, Artificial Sequence
  derived and/or modified sequence
MIILSKSQKSWIKGVFDKRECSTIIPSSKNPHRCTPVCQVCQNLIRCYCGRLIGDHAGIDYSWTISAAKGKESEQWSVEKHTTKSPTDTFGTINFQDGEHTHHAKYIRTSYDTKLDHLLHLMLKEWKMELPKLVISVHGGIQNFTMPSKFKEIFSQGLVKAAETTGAWIITEGINTGVSKHVGDALKSHSSHSLRKIWTVGIPPWGVIENQRDLIGKDVVCLYQTLDNPLSKLTTLNSMHSHFILSDDGTVGKYGNEMKLRRNLEKYLSLQKIHCRSRQGVPVVGLVVEGGPNVILSVWETVKDKDPVVVCEGTGRAADLLAFTHKHLADEGMLRPQVKEEIICMIQNTFNFSLKQSKHLFQILMECMVHRDCITIFDADSEEQQDLDLAILTALLKGTNLSASEQLNLAMAWDRVDIAKKHILIYEQHWKPDALEQAMSDALVMDRVDFVKLLIEYGVNLHRFLTIPRLEELYNTKQGPTNTLLHHLVQDVKQHTLLSGYRITLIDIGLVVEYLIGRAYRSNYTRKHFRALYNNLYRKYKHQRHSSGNRNESAESTLHSQFIRTAQPYKFKEKSIVLHKSRKKSKEQNVSDDPESTGFLYPYNDLLVWAVLMKRQKMAMFFWQHGEEATVKAVIACILYRAMAHEAKESHMVDDASEELKNYSKQFGQLALDLLEKAFKQNERMAMTLLTYELRNWSNSTCLKLAVSGGLRPFVSHTCTQMLLTDMWMGRLKMRKNSWLKIIISIILPPTILTLEFKSKAEMSHVPQSQDFQFMWYYSDQNASSSKESASVKEYDLERGHDEKLDENQHFGLESGHQHLPWTRKVYEFYSAPIVKFWFYTMAYLAFLMLFTYTVLVEMQPQPSVQEWLVSIYIFTNAIEVVREICISEPGKFTQKVKVWISEYWNLTETVAIGLFSAGFVLRWGDPPFHTAGRLIYCIDIIFWFSRLLDFFAVNQHAGPYVTMIAKMTANMFYIVIIMAIVLLSFGVARKAILSPKEPPSWSLARDIVFEPYWMIYGEVYAGEIDVCSSQPSCPPGSFLTPFLQAVYLFVQYIIMVNLLIAFFNNVYLDMESISNNLWKYNRYRYIMTYHEKPWLPPPLILLSHVGLLLRRLCCHRAPHDQEEGDVGLKLYLSKEDLKKLHDFEEQCVEKYFHEKMEDVNCSCEERIRVTSERVTEMYFQLKEMNEKVSFIKDSLLSLDSQVGHLQDLSALTVDTLKVLSAVDTLQEDEALLAKRKHSTCKKLPHSWSNVICAEVLGSMEIAGEKKYQYYSMPSSLLRSLAGGRHPPRVQRGALLEITNSKREATNVRNDQERQETQSSIVVSGVSPNRQAHSKYGQFLLVPSNLKRVPFSAETVLPLSRPSVPDVLATEQDIQTEVLVHLTGQTPVVSDWASVDEPKEKHEPIAHLLDGQDKAEQVLPTLSCTPEPMTMSSPLSQAKIMQTGGGYVNWAFSEGDETGVFSIKKKWQTCLPSTCDSDSSRSEQHQKQAQDSSLSDNSTRSAQSSECSEVGPWLQPNTSFWINPLRRYRPFARSHSFRFHKEEKLMKICKIKNLSGSSEIGQGAWVKAKMLTKDRRLSKKKKNTQGLQVPIITVNACSQSDQLNPEPGENSISEEEYSKNWFTVSKFSHTGVEPYIHQKMKTKEIGQCAIQISDYLKQSQEDLSKNSLWNSRSTNLNRNSLLKSSIGVDKISASLKSPQEPHHHYSAIERNNLMRLSQTIPFTPVQLFAGEEITVYRLEESSPLNLDKSMSSWSQRGRAAMIQVLSREEMDGGLRKAMRVVSTWSEDDILKPGQVFIVKSFLPEVVRTWHKIFQESTVLHLCLREIQQQRAAQKLIYTFNQVKPQTIPYTPRFLEVFLIYCHSANQWLTIEKYMTGEFRKYNNNNGDEITPTNTLEELMLAFSHWTYEYTRGELLVLDLQGVGENLTDPSVIKPEVKQSRGMVFGPANLGEDAIRNFIAKHHCNSCCRKLKLPDLKRNDYSPERINSTFGLEIKIESAEEPPARETGRNSPEDDMQL

SEQ ID NO: 69513 - DNA, 6054 bp, Artificial Sequence
  derived and/or modified sequence
atgatcatcctgagcaagagccagaagagctggatcaagggcgtgttcgacaagagagagtgcagcaccatcatccccagcagcaagaacccccacagatgcacccccgtgtgccaggtgtgccagaacctgatcagatgctactgcggcagactgatcggcgaccacgccggcatcgactacagctggaccatcagcgccgccaagggcaaggagagcgagcagtggagcgtggagaagcacaccaccaagagccccaccgacaccttcggcaccatcaacttccaggacggcgagcacacccaccacgccaagtacatcagaaccagctacgacaccaagctggaccacctgctgcacctgatgctgaaggagtggaagatggagctgcccaagctggtgatcagcgtgcacggcggcatccagaacttcaccatgcccagcaagttcaaggagatcttcagccagggcctggtgaaggccgccgagaccaccggcgcctggatcatcaccgagggcatcaacaccggcgtgagcaagcacgtgggcgacgccctgaagagccacagcagccacagcctgagaaagatctggaccgtgggcatccccccctggggcgtgatcgagaaccagagagacctgatcggcaaggacgtggtgtgcctgtaccagaccctggacaaccccctgagcaagctgaccaccctgaacagcatgcacagccacttcatcctgagcgacgacggcaccgtgggcaagtacggcaacgagatgaagctgagaagaaacctggagaagtacctgagcctgcagaagatccactgcagaagcagacagggcgtgcccgtggtgggcctggtggtggagggcggccccaacgtgatcctgagcgtgtgggagaccgtgaaggacaaggaccccgtggtggtgtgcgagggcaccggcagagccgccgacctgctggccttcacccacaagcacctggccgacgagggcatgctgagaccccaggtgaaggaggagatcatctgcatgatccagaacaccttcaacttcagcctgaagcagagcaagcacctgttccagatcctgatggagtgcatggtgcacagagactgcatcaccatcttcgacgccgacagcgaggagcagcaggacctggacctggccatcctgaccgccctgctgaagggcaccaacctgagcgccagcgagcagctgaacctggccatggcctgggacagagtggacatcgccaagaagcacatcctgatctacgagcagcactggaagcccgacgccctggagcaggccatgagcgacgccctggtgatggacagagtggacttcgtgaagctgctgatcgagtacggcgtgaacctgcacagattcctgaccatccccagactggaggagctgtacaacaccaagcagggccccaccaacaccctgctgcaccacctggtgcaggacgtgaagcagcacaccctgctgagcggctacagaatcaccctgatcgacatcggcctggtggtggagtacctgatcggcagagcctacagaagcaactacaccagaaagcacttcagagccctgtacaacaacctgtacagaaagtacaagcaccagagacacagcagcggcaacagaaacgagagcgccgagagcaccctgcacagccagttcatcagaaccgcccagccctacaagttcaaggagaagagcatcgtgctgcacaagagcagaaagaagagcaaggagcagaacgtgagcgacgaccccgagagcaccggcttcctgtacccctacaacgacctgctggtgtgggccgtgctgatgaagagacagaagatggccatgttcttctggcagcacggcgaggaggccaccgtgaaggccgtgatcgcctgcatcctgtacagagccatggcccacgaggccaaggagagccacatggtggacgacgccagcgaggagctgaagaactacagcaagcagttcggccagctggccctggacctgctggagaaggccttcaagcagaacgagagaatggccatgaccctgctgacctacgagctgagaaactggagcaacagcacctgcctgaagctggccgtgagcggcggcctgagacccttcgtgagccacacctgcacccagatgctgctgaccgacatgtggatgggcagactgaagatgagaaagaacagctggctgaagatcatcatcagcatcatcctgccccccaccatcctgaccctggagttcaagagcaaggccgagatgagccacgtgccccagagccaggacttccagttcatgtggtactacagcgaccagaacgccagcagcagcaaggagagcgccagcgtgaaggagtacgacctggagagaggccacgacgagaagctggacgagaaccagcacttcggcctggagagcggccaccagcacctgccctggaccagaaaggtgtacgagttctacagcgcccccatcgtgaagttctggttctacaccatggcctacctggccttcctgatgctgttcacctacaccgtgctggtggagatgcagccccagcccagcgtgcaggagtggctggtgagcatctacatcttcaccaacgccatcgaggtggtgagagagatctgcatcagcgagcccggcaagttcacccagaaggtgaaggtgtggatcagcgagtactggaacctgaccgagaccgtggccatcggcctgttcagcgccggcttcgtgctgagatggggcgacccccccttccacaccgccggcagactgatctactgcatcgacatcatcttctggttcagcagactgctggacttcttcgccgtgaaccagcacgccggcccctacgtgaccatgatcgccaagatgaccgccaacatgttctacatcgtgatcatcatggccatcgtgctgctgagcttcggcgtggccagaaaggccatcctgagccccaaggagccccccagctggagcctggccagagacatcgtgttcgagccctactggatgatctacggcgaggtgtacgccggcgagatcgacgtgtgcagcagccagcccagctgcccccccggcagcttcctgacccccttcctgcaggccgtgtacctgttcgtgcagtacatcatcatggtgaacctgctgatcgccttcttcaacaacgtgtacctggacatggagagcatcagcaacaacctgtggaagtacaacagatacagatacatcatgacctaccacgagaagccctggctgcccccccccctgatcctgctgagccacgtgggcctgctgctgagaagactgtgctgccacagagccccccacgaccaggaggagggcgacgtgggcctgaagctgtacctgagcaaggaggacctgaagaagctgcacgacttcgaggagcagtgcgtggagaagtacttccacgagaagatggaggacgtgaactgcagctgcgaggagagaatcagagtgaccagcgagagagtgaccgagatgtacttccagctgaaggagatgaacgagaaggtgagcttcatcaaggacagcctgctgagcctggacagccaggtgggccacctgcaggacctgagcgccctgaccgtggacaccctgaaggtgctgagcgccgtggacaccctgcaggaggacgaggccctgctggccaagagaaagcacagcacctgcaagaagctgccccacagctggagcaacgtgatctgcgccgaggtgctgggcagcatggagatcgccggcgagaagaagtaccagtactacagcatgcccagcagcctgctgagaagcctggccggcggcagacacccccccagagtgcagagaggcgccctgctggagatcaccaacagcaagagagaggccaccaacgtgagaaacgaccaggagagacaggagacccagagcagcatcgtggtgagcggcgtgagccccaacagacaggcccacagcaagtacggccagttcctgctggtgcccagcaacctgaagagagtgcccttcagcgccgagaccgtgctgcccctgagcagacccagcgtgcccgacgtgctggccaccgagcaggacatccagaccgaggtgctggtgcacctgaccggccagacccccgtggtgagcgactgggccagcgtggacgagcccaaggagaagcacgagcccatcgcccacctgctggacggccaggacaaggccgagcaggtgctgcccaccctgagctgcacccccgagcccatgaccatgagcagccccctgagccaggccaagatcatgcagaccggcggcggctacgtgaactgggccttcagcgagggcgacgagaccggcgtgttcagcatcaagaagaagtggcagacctgcctgcccagcacctgcgacagcgacagcagcagaagcgagcagcaccagaagcaggcccaggacagcagcctgagcgacaacagcaccagaagcgcccagagcagcgagtgcagcgaggtgggcccctggctgcagcccaacaccagcttctggatcaaccccctgagaagatacagacccttcgccagaagccacagcttcagattccacaaggaggagaagctgatgaagatctgcaagatcaagaacctgagcggcagcagcgagatcggccagggcgcctgggtgaaggccaagatgctgaccaaggacagaagactgagcaagaagaagaagaacacccagggcctgcaggtgcccatcatcaccgtgaacgcctgcagccagagcgaccagctgaaccccgagcccggcgagaacagcatcagcgaggaggagtacagcaagaactggttcaccgtgagcaagttcagccacaccggcgtggagccctacatccaccagaagatgaagaccaaggagatcggccagtgcgccatccagatcagcgactacctgaagcagagccaggaggacctgagcaagaacagcctgtggaacagcagaagcaccaacctgaacagaaacagcctgctgaagagcagcatcggcgtggacaagatcagcgccagcctgaagagcccccaggagccccaccaccactacagcgccatcgagagaaacaacctgatgagactgagccagaccatccccttcacccccgtgcagctgttcgccggcgaggagatcaccgtgtacagactggaggagagcagccccctgaacctggacaagagcatgagcagctggagccagagaggcagagccgccatgatccaggtgctgagcagagaggagatggacggcggcctgagaaaggccatgagagtggtgagcacctggagcgaggacgacatcctgaagcccggccaggtgttcatcgtgaagagcttcctgcccgaggtggtgagaacctggcacaagatcttccaggagagcaccgtgctgcacctgtgcctgagagagatccagcagcagagagccgcccagaagctgatctacaccttcaaccaggtgaagccccagaccatcccctacacccccagattcctggaggtgttcctgatctactgccacagcgccaaccagtggctgaccatcgagaagtacatgaccggcgagttcagaaagtacaacaacaacaacggcgacgagatcacccccaccaacaccctggaggagctgatgctggccttcagccactggacctacgagtacaccagaggcgagctgctggtgctggacctgcagggcgtgggcgagaacctgaccgaccccagcgtgatcaagcccgaggtgaagcagagcagaggcatggtgttcggccccgccaacctgggcgaggacgccatcagaaacttcatcgccaagcaccactgcaacagctgctgcagaaagctgaagctgcccgacctgaagagaaacgactacagccccgagagaatcaacagcaccttcggcctggagatcaagatcgagagcgccgaggagccccccgccagagagaccggcagaaacagccccgaggacgacatgcagctgtag

SEQ ID NO: 69514 - DNA, 6054 bp, Artificial Sequence
  derived and/or modified sequence
atgattatcctcagcaagagtcagaaaagctggatcaagggcgtattcgataagagagagtgctctacaatcatacccagtagcaaaaacccccacaggtgtaccccagtgtgtcaggtctgccaaaaccttattcgctgttactgtgggcgcctgatcggcgatcacgccggcatcgattattcttggactatatccgcagccaaaggcaaagaatccgagcagtggagcgtggaaaaacatactactaagtcccctacagatacatttggtaccatcaatttccaggacggcgagcatacccaccacgcgaagtacatcagaacaagctacgacaccaagcttgaccatctccttcacctaatgctaaaggagtggaagatggagctgccgaagttagttatcagcgttcacggggggattcaaaatttcacaatgccatcaaagttcaaggagatcttctctcaggggctagtgaaagcggcagagacgacgggtgcctggatcatcacggaggggatcaacacgggggtcagcaagcatgtgggggacgccctgaaatcacacagtagccatagcctgaggaaaatttggacagtgggcatcccaccatggggggtcattgaaaaccagcgggatctgatcggcaaagatgtggtgtgcttgtaccagaccctggataaccctctgagcaaacttactacccttaattccatgcattctcatttcatcctgagtgatgacggaacagtaggaaaatatggcaatgagatgaagctgcggcggaatctggagaaatacctgtctcttcagaagattcattgcaggagccgccaaggcgtacccgtggtcggactcgtggttgagggtgggccaaacgttattctgtctgtgtgggagaccgtgaaagacaaagatcctgtggtcgtctgtgagggcaccgggagagcggccgacctgttagctttcacccacaaacacctggctgacgaaggaatgcttagaccacaggtcaaggaagagatcatctgtatgatacaaaatacttttaacttttctttgaaacaatccaaacatctatttcagatcttaatggaatgtatggtacacagagactgtattacaatttttgacgccgactccgaagagcagcaggatttggatttagccattctcaccgcactgcttaagggcacaaatttatccgcatcagagcagctgaatctcgcgatggcgtgggatcgagtggacattgcaaagaaacacatcctaatctatgaacagcattggaagcctgatgcactggagcaggcaatgtctgatgcactggtgatggatagggtggatttcgtcaaactgttaattgagtacggcgtgaatttgcatagatttctgacaatccccagactcgaagagctctacaataccaagcaagggcctaccaatactctgttacatcacctggtgcaggacgtcaaacagcataccctcctctccggctataggattaccctgatcgatatcggccttgtcgtggagtacctgattgggcgtgcctacagaagtaactacaccagaaaacactttagagccctgtataataacttgtataggaagtacaagcatcagcgacacagctcaggtaaccgcaatgaaagcgctgaatctacacttcactctcagtttatccgtactgcccaaccttataagtttaaagagaaaagtatcgtgttgcataaaagtagaaagaagtctaaggagcagaacgtgtccgacgaccccgagtcgaccgggttcctgtatccatataatgaccttctggtgtgggccgtgcttatgaaacggcagaaaatggccatgtttttctggcagcatggcgaggaagccacagtcaaagcagtgatagcatgtatcctctaccgcgcaatggcacacgaagccaaagagtcacatatggtagacgacgcaagtgaagagttaaaaaactactcaaaacaatttgggcaattggccttggacctgctggagaaagcttttaaacagaacgagcgaatggcgatgactctgctgacctacgagctgaggaattggtcaaattccacgtgtctaaagttggccgtgtccggcggacttagaccatttgtgagccatacatgtacccagatgttgctaaccgacatgtggatggggcggcttaagatgagaaagaacagctggcttaaaatcattatctcaattatcctgcctcccactatactaacactggagtttaagtcaaaggccgagatgtctcacgtgccacagagccaggacttccagttcatgtggtactatagtgatcagaatgcctcatccagtaaagaatctgcctccgtgaaggagtacgatctggaacgcggccatgacgagaagctggatgaaaatcagcacttcggactggaatcaggacatcagcacctgccatggactcgtaaagtatacgagttttactctgcccctatcgtgaaattttggttctataccatggcctatttggcctttttgatgctgtttacatatacagtactagtggaaatgcaaccccaaccatcagtgcaggagtggctggtgagcatttacatctttaccaacgccattgaggtggtccgggagatctgcattagtgaacccggcaagtttactcagaaagtgaaagtctggatcagtgaatactggaaccttaccgagaccgtggcaattggtctgttctccgcgggatttgtgttgcgctggggagatcccccgttccacacagctggcaggcttatatactgtatcgatatcattttttggttctcccggctgctagacttctttgcggtgaatcaacacgctgggccatacgtgaccatgatcgcaaaaatgacggccaatatgttctatatcgtgatcattatggcaattgtcctgctgtcctttggtgtggcacgcaaagccatactgtctcctaaggaaccaccctcctggagcctggcacgggacatcgtgtttgagccatattggatgatctacggcgaagtgtacgcgggggaaatcgacgtgtgtagcagtcaaccttcctgcccaccgggatcctttttgactccatttctgcaggctgtgtaccttttcgtgcagtatatcatcatggtcaatctcctcattgccttttttaacaacgtgtatctggatatggaatccatctctaacaatctttggaaatacaatagatacagatatattatgacatatcatgaaaagccatggctcccacccccactgatcttgctctctcatgtggggttgctcttgcgtaggctatgctgccaccgggccccccatgaccaggaggagggtgatgtcggactaaagctgtacctgtctaaggaagatctcaagaagctgcatgactttgaggagcaatgcgttgaaaaatacttccacgagaaaatggaggatgtgaactgttcatgtgaagagcggatcagagtgacctctgagcgggtgaccgaaatgtactttcagctcaaggagatgaacgagaaagtgagtttcataaaggattccctcctgtcactcgattcgcaggtcggacaccttcaggatctttcagcccttactgtggatactttgaaagtcctgtccgccgtcgacacgttacaggaggacgaggctctccttgccaaaagaaagcattccacgtgcaagaagctgcctcacagctggtccaacgtgatctgcgctgaggtcctcggaagcatggagatcgcgggcgagaaaaaataccaatattactctatgccctcctctctcctacgcagcttggcgggcggacgtcaccccccccgagttcagagaggtgcgctgcttgagatcacaaactccaagcgggaggccacaaatgtgagaaacgatcaggagagacaagagacacagtcgagtatagttgtgtccggagtgtcaccaaacaggcaagcccacagcaagtacggtcagttcttgctcgtaccctccaacctgaagcgtgtgccattcagcgccgagacagtgcttccacttagcagaccttcggtgcccgacgtgcttgccacagaacaagatatccaaaccgaagtgttggtgcacctgactggtcagacacccgtagtgtcagactgggcgtccgtggacgagcccaaagaaaagcatgaaccaatagcgcacctgctagacggccaggacaaggcagagcaggtattgcccacgctatcctgcacccccgaacctatgaccatgtcatctcctctgtcgcaggcaaaaatcatgcaaactggcggcgggtatgtaaattgggcgtttagtgaaggtgacgagacgggcgtttttagtatcaaaaagaaatggcagacgtgccttccttcgacttgcgactccgactccagtaggtctgaacaacatcaaaagcaggcccaagactcatcactcagcgacaacagtacacggagcgctcagtcaagcgaatgctctgaggtgggcccgtggctccagcccaatactagcttttggatcaatcctttacgccggtacaggccctttgcacggtcacacagttttcgcttccataaggaggagaaactgatgaagatctgcaaaattaagaatttgtccggaagtagcgagattgggcagggagcctgggtcaaggcaaaaatgttgaccaaagataggcggttatcaaaaaagaaaaagaatacccaggggctgcaggttccaattataacggtcaacgcgtgctcccagtcagatcagttgaaccccgagcctggtgagaattcgatatcagaagaagagtactctaaaaattggttcacagtcagtaaatttagccatactggcgtcgagccttacattcaccagaaaatgaagactaaggagatcggacaatgtgcaatccaaatatcagactaccttaagcaaagtcaggaggacctcagcaagaacagcctgtggaatagtcgctcaaccaatttgaacagaaacagtttgcttaaatcctccattggggtggataaaatcagcgcatcactgaagtctccacaggagcctcaccaccattactctgctattgagagaaacaatctcatgcgactgtcgcagacgatcccatttacacctgttcaactgttcgctggtgaagagattacagtatatcgcctggaagagagcagtcctctgaacttggataagtctatgagctcgtggagccagagagggcgggcagccatgattcaagttctgtctagggaagaaatggacggcggattaaggaaagccatgagggtggtgtctacatggtcggaagacgacatcctcaagcccggccaggtgttcatagtcaaatcttttctccctgaagtggtcaggacctggcacaaaattttccaagaatccaccgtactgcacctttgtctgcgcgagatacagcagcagcgggctgcacagaagttgatttataccttcaaccaggtgaagcctcagactattccatatactcctcgatttctggaagtattccttatttactgccatagtgccaatcagtggttaacaatagagaagtacatgacaggtgaattccgaaagtataacaacaataacggagatgagataactcccactaatacccttgaagagctgatgctggcgttttcacactggacctatgagtacacaaggggcgaactgcttgtgctggatttacagggcgtgggagagaatctcacagacccttccgtgataaagcctgaagttaagcaaagcaggggcatggtgttcggccctgccaatttgggagaagatgcaatcagaaacttcattgctaaacaccattgtaactcttgttgccgcaagctaaaactccctgaccttaagcgcaacgactacagcccggaaagaatcaactcaacctttgggctcgagattaagatcgaaagcgccgaggagccacccgctagggaaaccgggcggaacagccctgaagacgacatgcagctctag

SEQ ID NO: 69515 - DNA, 6054 bp, Artificial Sequence
  derived and/or modified sequence
atgatcatcctgagcaagagccagaagtcctggatcaagggcgtgtttgacaagcgggagtgcagcaccatcatccccagcagcaagaacccccaccgctgcacccctgtgtgccaggtgtgccagaacctgatccgctgctactgcggccgcctgattggagaccatgctggcatcgactacagctggaccatctctgctgccaagggcaaggagagcgagcagtggagcgtggagaagcacaccaccaagagccccacagacaccttcggcaccatcaacttccaggatggagagcacacccaccacgccaagtacatccgcaccagctatgacaccaagctggaccacctgctgcacctgatgctgaaggagtggaagatggagctgcccaagctggtgatctctgtgcacggcggcatccagaacttcaccatgcccagcaagttcaaggagatcttcagccagggcctggtgaaggctgctgagaccactggagcctggatcatcacagagggcatcaacacaggagtgtccaagcacgtgggagatgccctgaagagccacagcagccacagcctgaggaagatctggacagtgggcatccccccctggggcgtgattgagaaccagagggacctgattggcaaggatgtggtgtgcctgtaccagaccctggacaaccccctgagcaagctgaccaccctgaacagcatgcacagccacttcatcctgagtgatgatggcaccgtgggcaagtatggaaatgagatgaagctgcggaggaacctggagaagtacctgagcctgcagaagatccactgccgcagccggcagggcgtgcctgtggtgggcctggtggtggagggcggccccaacgtcatcctgtctgtgtgggagaccgtgaaggacaaggaccctgtggtggtgtgtgagggcaccggccgggctgctgacctgctggccttcacccacaagcacctggctgatgagggcatgctgcggccccaggtgaaggaggagatcatctgcatgatccagaacaccttcaacttcagcctgaagcagagcaagcacctgttccagatcctgatggagtgcatggtgcaccgggactgcatcaccatctttgatgctgacagcgaggagcagcaggacctggacctggccatcctgacagccctgctgaagggcaccaacctgagcgccagcgagcagctgaacctggccatggcctgggacagagtggacatcgccaagaagcacatcctgatctatgagcagcactggaagccagatgccctggagcaggccatgtctgatgccctggtgatggacagagtggactttgtgaagctgctgattgaatatggagtgaacctgcaccgcttcctgaccatcccccggctggaggagctgtacaacaccaagcagggccccaccaacaccctgctgcaccacctggtgcaggatgtgaagcagcacaccctgctgagcggctaccgcatcaccctgattgacatcggcctggtggtggagtacctgattggccgggcctaccgcagcaactacaccaggaagcacttccgggccctgtacaacaacctgtacaggaagtacaagcaccagaggcacagcagcggcaacagaaatgaatctgctgagagcaccctgcacagccagttcatcagaacagcccagccctacaagttcaaggagaagagcatcgtgctgcacaagagcaggaagaagagcaaggagcagaatgtgtctgatgatcctgagagcacaggcttcctgtacccctacaatgacctgctggtgtgggccgtgctgatgaagaggcagaagatggccatgttcttctggcagcacggggaggaggccaccgtgaaggctgtgattgcctgcatcctgtaccgggccatggcccacgaggccaaggagagccacatggtggatgatgccagcgaggagctgaagaactacagcaagcagtttggccagctggccctggacctgctggagaaggccttcaagcagaatgaaagaatggccatgaccctgctgacctatgagctgaggaactggagcaacagcacctgcctgaagctggccgtgtctgggggcctgcggccctttgtgagccacacctgcacccagatgctgctgacagacatgtggatgggccgcctgaagatgaggaagaacagctggctgaagatcatcatcagcatcatcctgccccccaccatcctgaccctggagttcaagagcaaggccgagatgagccacgtgccccagagccaggacttccagttcatgtggtactacagcgaccagaatgccagcagcagcaaggagagcgcctctgtgaaggagtatgacctggagcggggccatgatgagaagctggatgagaaccagcacttcggcctggagagcggccaccagcacctgccctggaccaggaaggtgtatgagttctacagcgcccccatcgtgaagttctggttctacaccatggcctacctggccttcctgatgctgttcacctacacagtgctggtggagatgcagccccagcccagcgtgcaggagtggctggtgtccatctacatcttcaccaatgccatcgaggtggtgcgggagatctgcatcagcgagcccgggaagttcacccagaaggtgaaggtgtggatcagcgagtactggaacctgacagagaccgtggccatcggcctcttctctgctggctttgtgctgcgctggggagacccccccttccacacagctggccgcctcatctactgcatcgacatcatcttctggttcagccggctgctggacttctttgctgtgaaccagcacgccggcccctacgtgaccatgattgccaagatgacagccaacatgttctacatcgtcatcatcatggccatcgtgctgctgagctttggagtggccaggaaggccatcctgagccccaaggagcccccatcctggagcctggcccgggacatcgtgtttgagccctactggatgatctatggagaggtgtatgctggggagattgatgtgtgcagcagccagcccagctgccccccaggcagcttcctgacccccttcctgcaggccgtgtacctgtttgtgcagtacatcatcatggtgaacctgctgattgccttcttcaacaacgtgtacctggacatggagagcatcagcaacaacctgtggaagtacaaccgctaccgctacatcatgacctaccacgagaagccctggctgcccccacccctcatcctgctgagccacgtgggcctgctgctgcggcggctgtgctgccaccgggcccctcatgaccaggaggagggagatgtgggcctgaagctgtacctgagcaaggaggacctgaagaagctgcatgactttgaggagcagtgtgtggagaagtacttccacgagaagatggaggatgtgaactgcagctgtgaggagcgcatccgggtgaccagcgagcgggtgacagagatgtacttccagctgaaggagatgaatgagaaggtgtccttcatcaaggacagcctgctgagcctggacagccaggtgggccacctgcaggacctgagcgccctgactgtggacaccctgaaggtgctgtctgctgtggacaccctgcaggaggatgaggccctgctggccaagaggaagcacagcacctgcaagaagctgccccacagctggagcaatgtcatctgtgccgaggtgctgggctccatggagattgctggggagaagaagtaccagtactacagcatgcccagcagcctgctgcggagcctggccggcggccgccaccccccccgggtgcagagaggagccctgctggagatcaccaacagcaagcgggaggccaccaacgtgagaaatgaccaggagcggcaggagacccagagcagcatcgtggtgtctggagtgagccccaaccggcaggcccacagcaaatatggccagttcctgctggtgcccagcaacctgaagagggtgcccttctctgctgagaccgtgctgcccctgagccggcccagcgtgcctgatgtgctggccacagagcaggacatccagacagaggtgctggtgcacctgaccggccagacccctgtggtgtctgactgggcctctgtggatgagcccaaggagaagcatgagcccatcgcccacctgctggatggccaggacaaggccgagcaggtgctgcccaccctgagctgcaccccagagcccatgaccatgagcagccccctgagccaggccaagatcatgcagacaggaggcggctacgtgaactgggccttctctgaaggagatgagaccggggtcttcagcatcaagaagaagtggcagacctgcctgcccagcacctgtgacagcgacagcagccgctctgagcagcaccagaagcaggcccaggacagcagcctgagtgacaacagcaccaggtctgcccagagcagcgagtgcagcgaggtgggcccctggctgcagcccaacaccagcttctggatcaaccccctgcggcgctaccggccctttgcccggagccacagcttccgcttccacaaggaggagaagctgatgaagatctgcaagatcaagaacctgagcggcagcagcgagatcggccagggcgcctgggtgaaggccaagatgctgaccaaggaccggcggctgagcaagaagaagaagaacacccagggcctgcaggtgcccatcatcaccgtgaatgcctgcagccagagcgaccagctgaaccctgagcctggagaaaattccatcagcgaggaggagtacagcaagaactggttcaccgtgtccaagttcagccacactggagtggagccctacatccaccagaagatgaagaccaaggagatcggccagtgtgccatccagatcagtgactacctgaagcagagccaggaggacctgagcaagaacagcctgtggaacagccgcagcaccaacctgaacagaaacagcctgctgaagagcagcattggagtggacaagatcagcgccagcctgaagagcccccaggagccccaccaccactacagcgccatcgagaggaacaacctgatgaggctgagccagaccatccccttcacccctgtgcagctgtttgctggggaggagatcaccgtgtaccgcctggaggagagcagccccctgaacctggacaagtccatgagctcctggagccagaggggccgggccgccatgatccaggtgctgagccgggaggagatggatggcggcctgaggaaggccatgagggtggtgtccacctggagcgaagatgacatcctgaagccaggccaggtgttcatcgtgaagagcttcctgcctgaggtggtgaggacctggcacaagatcttccaggagagcacagtgctgcacctgtgcctgcgggagatccagcagcagagagctgcccagaagctgatctacaccttcaaccaggtgaagccccagaccatcccctacaccccccgcttcctggaggtgttcctgatctactgccacagcgccaaccagtggctgaccatcgagaagtacatgactggagagttcaggaagtacaacaacaacaatggagatgagatcacccccaccaacaccctggaggagctgatgctggccttcagccactggacctatgagtacaccagaggagagctgctggtgctggacctgcagggcgtgggggagaacctgacagaccccagcgtcatcaagccagaggtgaagcagagccggggcatggtgtttggacctgccaacctgggagaagatgccatccggaacttcatcgccaagcaccactgcaacagctgctgcaggaagctgaagctgcctgacctgaagagaaatgactacagccctgagcgcatcaacagcaccttcggcctggagatcaagattgaatctgctgaggagcccccagcccgggagaccggcaggaacagcccagaagatgacatgcagctgtag

SEQ ID NO: 69516 - DNA, 6054 bp, Artificial Sequence
  derived and/or modified sequence
atgatcatcctgagcaagagccagaagagctggatcaagggcgtgttcgacaaacgagaatgctccaccatcatccccagctccaaaaacccccacaggtgcacccctgtgtgccaggtgtgtcaaaatctcataagatgctactgcggcaggctcataggcgatcatgccggaatcgactacagttggacgattagcgccgcaaaagggaaagaatcggagcagtggtccgtggagaagcacacgaccaagagccccacagatacctttggtacaattaacttccaggatggggaacacactcaccacgccaagtacatcaggaccagttacgatactaaactcgaccatctcctccacctgatgctgaaggagtggaaaatggaattacctaaattggttatcagtgtgcacggcgggattcagaattttacaatgccaagcaagttcaaggaaatcttttcccagggcctcgtgaaggcggccgaaactacgggcgcctggatcattacggagggcatcaatacaggggtgtctaagcacgtgggggacgccctcaaatcccattctagccatagcctgaggaagatttggacagtgggaatacctccctggggggttatcgaaaaccagcgagacctgattggaaaggacgtggtatgcctgtatcaaacactcgataatccactctccaaactgaccaccttgaactctatgcattcccatttcatcctgagtgatgacggcactgtcggcaaatatggcaacgaaatgaagctgaggcgcaacttggagaagtatctctccctgcagaaaattcactgccgcagtagacagggcgtgcccgttgtgggtctggttgtcgaaggcggacctaatgtgattctgagcgtatgggaaaccgtcaaggataaggaccccgtggtagtctgtgagggcactggaagagcagcagaccttttagcttttactcacaagcatctggccgacgagggaatgctacggcctcaggttaaggaagaaatcatctgtatgattcaaaatacatttaacttctccctcaagcagtctaagcacctttttcagatattgatggaatgcatggttcatagagactgcatcaccatctttgatgccgatagcgaggaacagcaggaccttgatctcgctatcttaacagcacttctgaagggcacaaatctctctgcaagtgagcaactgaacttagcaatggcctgggatagggtggacatcgccaaaaaacacatcctcatttatgaacagcattggaagcccgacgctctggaacaggccatgtcagacgccttggtcatggacagagttgactttgtcaagcttttaatagaatacggggtcaatctccaccggttccttaccatccctagactcgaggagttgtataacacaaagcagggacctaccaatacactcttgcaccacctggtacaggacgtcaaacagcacactctcttgagcggataccggatcactctcattgatattggtctggtcgtagagtacttgatcggaagagcctaccggtccaactatacccggaagcactttcgggctttgtacaacaacttatacagaaagtacaagcaccagagacactcctccgggaacagaaatgagtccgccgagtctacactccactcgcagtttattcgcaccgcccagccttacaagttcaaagaaaagtctatcgtcctgcataagtctagaaaaaagagtaaagaacaaaacgtgtccgacgatccggagtcaaccggatttctgtacccctataacgacttgctggtgtgggcagtgctaatgaaacggcagaaaatggcgatgtttttctggcagcatggtgaagaggctacggtaaaagcagtcatcgcctgcattttataccgggccatggcccacgaggctaaggaaagtcacatggtggatgatgcctctgaagagctgaagaattatagcaaacagttcggccagttggccctggatttacttgagaaggccttcaaacagaatgaaagaatggccatgactctactgacgtatgagttgaggaattggtccaatagcacgtgcctgaaactggcggtgtctggcggattgcggcccttcgtctcccacacttgtacgcagatgctgctgaccgatatgtggatgggccgtctaaaaatgcgtaagaactcatggctcaagattatcatctctattatccttcctcccacaatcctgacgttagagttcaaatctaaagccgagatgtcccatgtcccacagtctcaggattttcagttcatgtggtactatagcgatcagaacgctagtagtagtaaggaatcagcgtcagttaaagagtacgacctcgagcgcgggcacgatgaaaagttggatgaaaatcagcatttcggccttgaatcaggacatcagcacctaccatggacacggaaagtgtatgaattttatagcgcaccaatagtcaagttttggttctatacaatggcctacttggcctttttaatgctctttacctatacagtactagtggaaatgcagcctcagcccagcgtccaggaatggctggtgtcgatctacattttcacgaacgccattgaggtcgtccgggaaatctgcattagtgagccgggcaagttcactcagaaggtcaaggtgtggatctccgagtattggaatctcaccgagacagtggctattggcctgttcagcgccggctttgtgctgagatggggggaccctcccttccatacagctggccggctgatctattgcatcgatatcatattctggttttccagactgctggacttctttgctgtgaatcagcacgcgggaccctatgtcactatgattgctaagatgacagccaacatgttttatattgtaatcattatggctattgtgctgctctccttcggcgtcgctcggaaagccatcctttctccgaaggagccaccctcttggtccctggccagggatattgtttttgaaccctattggatgatctacggtgaggtctacgctggcgaaatcgatgtatgtagcagtcagccgtcctgtccccctgggagttttctcacgccctttttgcaagctgtctacctctttgtgcagtacataataatggttaatctcctcattgcctttttcaacaacgtttatctggatatggagtcaatctccaacaacctgtggaagtacaacagataccgctacataatgacttaccatgaaaagccttggcttcctcctcctctcatcctgctttcacacgttggtctgctccttaggcggctttgttgtcaccgggctccccatgatcaggaagaaggggatgttggacttaagttgtatctgagcaaagaggacctgaaaaaactgcatgatttcgaagagcagtgtgtggagaaatacttccacgagaaaatggaagatgtgaactgttcctgcgaagaacgcatccgtgtcacctctgaaagggtgaccgagatgtattttcagttaaaggagatgaatgagaaggtgtccttcattaaggacagcctgcttagtttagatagtcaggttgggcacttgcaggatctcagcgctctgaccgtggatactctgaaggttctaagtgccgtggacaccctacaggaggatgaggccctattggccaaaagaaagcacagtacctgtaagaagctgccacactcctggtctaacgtgatatgtgctgaggtgttaggttccatggaaattgcaggggagaaaaagtaccaatattattcgatgccctcttctctattgagaagtctcgccggcggacgccacccaccccgcgtgcagagaggagccctcttggaaataacaaattccaaaagggaggctacaaatgttagaaacgatcaggagagacaggagacacagtctagtatcgtagtatctggcgtatcacctaatagacaggcccattctaagtacggccagttcttactcgtgccctcaaatttgaaacgcgtcccattttccgcagaaaccgtgcttcctttgtctaggccctccgttccagacgtgctggcgaccgagcaggatatacagaccgaagtcctggtacatctcacaggacagactcctgttgtgagcgactgggctagcgtggacgagccgaaggaaaagcatgagccgattgctcatctgctggatggacaggacaaagccgagcaagtattaccgactttgtcatgcactcccgagccaatgactatgagctcgccactcagccaggccaaaattatgcagactggcggaggttatgtaaactgggcattctccgagggagatgaaactggagtttttagcatcaagaaaaagtggcagacatgcctccccagtacgtgtgattctgattcgagtcgatccgaacagcatcagaagcaggctcaggatagcagcctgtctgacaacagcaccagatccgctcaaagcagcgagtgtagtgaggttggcccgtggctgcagccgaatacttctttttggattaacccactgcgtagatatcggccttttgcgaggtctcatagttttcggtttcataaagaagaaaagctgatgaagatatgcaaaatcaaaaatctttctgggtcctccgaaatcggccagggagcttgggtcaaagcaaagatgcttacaaaggatcgtaggctgagcaagaaaaagaaaaacacgcagggcctgcaggtgcctattatcacagtaaatgcttgttcacagtccgaccagctgaatcctgaacctggtgaaaattccatcagcgaagaggagtacagcaaaaactggttcactgtgtccaagttttcccacacgggggtcgaaccctacatccaccagaaaatgaagaccaaggagattgggcaatgtgccatccagatctccgactatcttaaacagagtcaggaagatctttctaaaaacagcctttggaattctcgctctacaaacttaaaccggaactcactgctaaagtcctccataggagtagataaaattagtgcaagtttgaagtccccacaggaaccccatcaccactattcagctatagaaaggaacaacttaatgcgtttgtcacagacgatcccctttaccccagtccagctgttcgctggagaggagatcacagtatatcggctggaggagtcatctcccttgaacctggacaagtccatgagttcgtggtcccagcggggcagggcagctatgattcaagtcttgtcccgagaagagatggatggagggctccgcaaagccatgcgagtagtgtccacttggtctgaagatgatatattaaaacctggccaagtgtttatcgtcaagtcctttctgccggaagtggttcgtacgtggcacaagatcttccaagagagtacagtgctccacctctgtttgcgggagattcagcagcagagggctgctcagaaactgatttacacttttaaccaagtcaaacctcagacaatcccctataccccacgattcctggaagtgtttctcatttattgccacagcgccaaccaatggctgacaatcgaaaagtacatgacaggggagttccgtaagtacaataacaataacggggatgagatcacgcctactaacaccctggaggagctcatgcttgctttctcccactggacatatgaatacacaagaggcgaactactcgtgctagatttacaaggggtgggagagaatctgaccgatccgagcgtgattaagcccgaagtcaaacagtctcgaggcatggtgtttggtcctgccaacttaggggaggacgctattcggaattttatagcgaaacatcattgtaacagttgctgccgcaaattgaagctgcccgacctgaaacggaacgattactcccctgagcggataaacagcactttcgggctggagattaaaatcgagtctgctgaagagcccccagcccgcgagacaggacgcaactcacccgaagatgacatgcagctgtag

SEQ ID NO: 69517 - DNA, 6054 bp, Artificial Sequence
  derived and/or modified sequence
atgattattttaagtaagagccagaagagctggataaaaggagtcttcgacaagagagagtgttccacaataataccttcttctaaaaacccgcatcgctgcacccctgtatgtcaagtttgtcaaaacttgatcaggtgttactgcggtagactaattggagatcatgctggaattgactactcttggaccattagcgctgctaagggcaaggaatcagaacagtggagtgtagagaaacacacaactaaatctccgacagacacattcggcacgattaattttcaagatggcgagcatacccaccatgcaaaatacatccgcacatcctacgacacaaagctagatcacttgcttcatctgatgttaaaagagtggaagatggagctgcccaaactagtgatcagcgttcatggagggattcagaatttcacaatgccatctaaatttaaagagatattcagccagggacttgtgaaggccgcagagaccaccggtgcatggattattactgaagggattaatacgggcgtgtccaaacatgtgggggacgccctgaagtcccactccagccacagcctgcgcaagatctggacagtcggcattcctccttggggcgttatcgagaaccagcgcgacctgatcggaaaggatgttgtgtgtctgtaccagaccctggataaccccctgtccaagctgacaaccctcaactccatgcactcacactttatactgtccgacgacggcacggtgggcaagtatggtaacgagatgaaactccgcaggaatctggaaaagtacctgagcctacaaaagatccactgcaggtcacgccaaggagttcccgttgtgggattggtggtggaggggggtcctaatgtcatactgtccgtttgggagacggtgaaggataaggacccagttgtggtgtgcgagggcaccggcagagcggctgacctactggccttcacacataagcacctcgccgacgagggaatgttgcgaccccaggttaaggaggagatcatctgtatgattcagaatactttcaacttcagcctgaaacaatcgaaacatctgttccaaatcctgatggaatgtatggtccatagggactgtatcaccatctttgacgctgactcggaggaacagcaggatctagatctggccatcctgaccgcactccttaaaggcaccaatctgtccgccagtgaacaactgaacctagccatggcctgggacagggtcgacatcgcaaagaagcatattttaatttatgaacaacactggaagcctgacgcactcgagcaggccatgagtgatgccctggtgatggatcgcgttgatttcgttaaactgctgattgagtacggggtgaatctgcatagattcctgaccatacccagacttgaggagctatacaatacaaagcagggaccaactaacacgctcttgcaccacctcgtgcaggacgtgaagcaacacacccttcttagtggatacaggattactctgatagatattggattggtggtggagtatcttattgggagggcctatagaagtaattacacccggaaacacttccgagccctgtataacaatctgtatagaaagtataagcaccagcgtcactcttctggcaacaggaacgaaagtgccgaaagcacactgcatagtcaatttattcggactgcccaaccctataagtttaaagagaaaagtatagtactccacaaatctcgaaagaaatctaaagagcagaatgtgtctgacgatcctgaaagcaccggctttctatacccatataacgatctgctcgtgtgggcggtcctgatgaagaggcagaagatggccatgtttttttggcagcatggcgaagaggccaccgtcaaggccgtgatcgcttgtatcctgtatcgcgctatggctcatgaagcgaaggagtctcacatggtggacgacgcatccgaggaactgaagaactactccaagcaatttggccagctggccctagatttactggagaaggcatttaagcagaacgagcggatggcaatgaccctgttgacctatgagctgcggaactggagcaacagcacttgccttaaactcgcggtctcagggggattacgtcccttcgtcagtcatacatgtacgcagatgctgttgacagacatgtggatggggaggcttaagatgcgaaagaactcctggttgaagattatcatcagtatcatcctgccgccaacgattctcactctggagtttaaatcaaaagcggaaatgagtcatgtcccccagagccaggactttcaatttatgtggtactatagcgaccagaacgcttcctctagcaaagaatctgcaagcgtgaaagaatacgatttggagcgaggtcatgacgaaaagttagacgaaaaccagcacttcgggctcgaaagtggccaccaacatcttccgtggacaagaaaggtatacgagttttactccgcgcctattgttaagttctggttttacacgatggcttacctcgcctttttaatgctgtttacttacacggtgctggtagagatgcagcctcaaccaagcgtccaagaatggctggtctccatttatatattcactaatgctatagaggtggtgagggaaatctgtataagtgaacccggaaagttcacccagaaagtcaaagtttggatcagtgagtattggaatctcacagagacagttgccattgggcttttctccgcgggttttgtgctgagatggggtgatccaccctttcacacagctggccgtcttatctactgcatagatatcatattttggtttagtaggctcttagacttcttcgccgtaaatcagcatgcaggcccatatgtgaccatgattgctaaaatgacagccaatatgttctacatcgttatcattatggccatcgttcttctcagtttcggagtcgccaggaaggccatcctgagtcctaaggagccgccatcttggagtctggcacgcgatattgtgtttgaaccgtactggatgatctacggcgaagtttacgccggagagattgacgtatgtagttcacagccgtcctgtccaccaggatcattcctgacccccttccttcaggcagtttacctgtttgttcaatacattattatggtgaatcttctcatcgcatttttcaacaacgtatatctagacatggaatcaatttccaataatttgtggaagtataatagatatcgctacattatgacttatcacgaaaagccttggcttcccccacctctaatcctcctgtcccacgtgggattgttgttgagaagactgtgctgccatcgcgcacctcacgatcaggaggaaggagatgtgggtctaaagctgtatcttagcaaggaagatctcaagaaactgcacgatttcgaggagcagtgtgtggagaagtacttccacgaaaaaatggaggacgttaattgttcatgtgaagaaagaatccgggtgacctctgaacgcgtgacggaaatgtactttcagctgaaggaaatgaacgagaaggtgagcttcattaaagacagcctacttagcctggatagccaggtcggccatctacaggatctctctgcactcacggtggatactctcaaagtgctgtctgccgtggatacgttacaggaagatgaggccttgctggcgaaacgcaaacattccacctgtaagaagctcccacactcttggtccaatgtgatttgcgccgaagtcctgggttctatggagatagccggtgaaaaaaaataccagtactactctatgccctccagcttactgcgatccctggctggagggaggcatccgcctagagtgcagcgtggagcactgttagagattacaaatagcaagagggaggctaccaatgtgcggaatgatcaggaaagacaagagacacaatcttcaattgtggtctccggggtgagtccaaatcgtcaggctcactctaagtacggacagtttctgcttgttccctcaaacttgaaacgggtgccattctctgcggagaccgtccttcccctcagcaggccctctgtgcctgatgtgctcgccacagagcaggacatccaaaccgaggtgctggttcacttaaccggccagactccggtggtgtctgactgggcctcagtagatgaacccaaagaaaagcatgagcctatcgctcatctgctggatggccaggataaagctgaacaagtgcttcctaccctgtcatgcacccccgagcccatgacaatgtcatcccccctgtcccaggccaagatcatgcagacaggcggaggatacgtgaattgggctttcagtgaaggtgatgagaccggagttttctccattaagaagaagtggcagacatgtctaccatcaacatgcgacagtgattctagccgttcagagcagcatcaaaagcaggcacaggactcaagcttgtcagataacagcactaggtccgctcaatcctcggaatgctcagaggtcggcccatggttgcagcctaatacatcgttctggattaatccactgcgtaggtatcgcccatttgcacgtagccactcattcaggttccacaaggaggagaaactgatgaagatttgcaagatcaagaatctctcaggctcgagcgagatcggccagggggcttgggtgaaggccaaaatgcttacaaaggaccgtaggctcagcaaaaagaaaaagaatacacagggtctacaagtgcctattattacagtgaatgcatgctcacagtccgatcaactgaacccggagccaggtgaaaacagcatctcagaagaggagtacagtaaaaactggtttaccgtcagtaagttctcccacacgggggttgaaccttacatccatcagaagatgaaaaccaaggaaataggccaatgcgcaatccagatctccgattatctaaagcagtctcaggaggacctgtccaagaactccctgtggaactcacgctctacaaaccttaacaggaattcactgctgaagtcctcaattggagtggacaaaatcagtgcctcactgaaatctccccaagagccccaccaccattattcagcaatcgagcggaataatctcatgcggctatctcagacaattcccttcaccccagtccagctgttcgcaggagaagaaataactgtgtaccgcctggaggagagctccccccttaacctggataagagcatgtcctcctggtctcagcggggacgcgctgctatgatccaggtcctgtcgagggaagaaatggatgggggtctgcggaaagcaatgcgggtggtgagcacatggtctgaggacgatatactgaagcctggccaggtttttattgtcaaaagcttcctgcccgaagtggttaggacctggcataagatcttccaggagtccaccgtcctgcacctgtgtctgagggaaatccagcagcagcgggcagcgcaaaagctgatttacaccttcaatcaggtcaagccacaaacgatcccctatacgccaaggttcctcgaggtatttctcatctactgccactcagccaaccagtggctcactattgagaaatacatgaccggagagttccgaaaatataacaataacaacggggatgagattactcccaccaacacactggaggagctcatgcttgctttttcccattggacctatgaatacacaaggggcgagttgctggtgctggacctccagggggttggggaaaaccttactgatcctagcgttatcaaacccgaggtgaaacagagcagaggcatggtcttcggacccgctaaccttggggaggacgctattagaaatttcatcgctaagcaccactgtaatagttgttgccgcaaactgaagttgcctgacttaaaaagaaacgattactctcctgaaagaatcaatagtactttcggattagaaatcaagatcgaaagcgctgaagagccccctgcacgcgaaactggacgaaattccccagaggatgacatgcagctgtat

SEQ ID NO: 69518 - DNA, 8244 bp, Artificial Sequence
  derived and/or modified sequence
atctaacgaggatctagaatagctaggatttatgaaataccggctttcaagttctctggtctccacccaaagatgattatcctatctaagtcccagaaatcctggattaaaggagtatttgacaagagagaatgtagcacaatcatacccagctcaaaaaatcctcacagatgtactccagtatgccaagtctgccagaatttaatcaggtgttactgtggccgactgattggagaccatgctgggatagattattcctggaccatctcagctgccaagggtaaagaaagtgaacaatggtctgttgaaaagcacacaacgaaaagcccaacagatacttttggcacgattaatttccaagatggagagcacacccatcatgccaagtatattagaacttcttatgatacaaaactggatcatctgttacatttaatgttgaaagagtggaaaatggaactgcccaagcttgtgatctcagtccatgggggcatccagaactttactatgccctctaaatttaaagagattttcagccaaggtttggttaaagctgcagagacaacaggagcgtggataataactgaaggcatcaatacaggagtgtccaagcatgttggggatgccttgaaatcccattcctctcattccttgagaaaaatctggacagttggaatccctccttggggtgtcattgagaaccagagagaccttattggaaaagatgtggtgtgcctgtaccagactctggataaccccctcagcaagctcacaacactcaacagcatgcactcgcacttcatcctgtctgatgatgggaccgtgggcaagtatggaaatgaaatgaagctcagaaggaacctggagaagtacctctctctgcagaaaatacactgccgctcaagacaaggcgtgccggtcgtggggctggtggtggaaggcggtcccaacgtcatcctgtcagtgtgggagactgtcaaggacaaggacccagtggtggtgtgtgagggcacaggtagggcggctgacctcctggccttcacacacaaacacctggcagatgaagggatgctgcgacctcaggtgaaagaggagatcatctgcatgattcagaacactttcaactttagtcttaaacagtccaagcaccttttccaaattctaatggagtgtatggttcacagggattgtattaccatatttgatgctgactctgaagagcagcaagacctggacttagcaatcctaacagctttgctgaagggcacaaatttatcagcgtcagagcaattaaatctggcaatggcttgggacagggtggacattgccaagaaacatatcctaatttatgaacaacactggaagcctgatgccctggaacaagcaatgtcagatgctttagtgatggatcgggtggattttgtgaagctcttaatagaatatggagtgaacctccatcgctttcttaccatccctcgactggaagagctctacaatacaaaacaaggacctactaatacactcttgcatcatctcgtccaagatgtgaaacagcatacccttctttcaggctaccgaataaccttgattgacattggattagtagtagaatacctcattggtagagcatatcgcagcaactacactagaaaacatttcagagccctctacaacaacctctacagaaaatacaagcaccagagacactcctcaggaaatagaaatgagtctgcagaaagtacgctgcactcccagttcattagaactgcacagccatacaaattcaaggaaaagtctatagtccttcataaatcaaggaagaagtcaaaagaacaaaatgtatcagatgaccctgagtctactggctttctttacccttacaatgacctgctggtttgggctgtgctgatgaaaaggcagaagatggctatgttcttctggcagcatggagaggaggccacggttaaagccgtgattgcgtgtatcctctaccgggcaatggcccatgaagctaaggagagtcacatggtggatgatgcctcagaagagttgaagaattactcaaaacagtttggccagctggctctggacttgttggagaaggcattcaagcagaatgagcgcatggccatgacgctgttgacgtatgaactcaggaactggagcaattcgacctgccttaaactggccgtgtcgggaggattacgaccctttgtttcacatacttgtacccagatgctactgacagacatgtggatggggaggctgaaaatgaggaaaaactcttggttaaagattattataagcattattttaccacccaccattttgacactggaatttaaaagcaaagctgagatgtcacatgttccccagtcccaggacttccaatttatgtggtattacagtgaccagaacgccagcagttccaaagaaagtgcttctgtgaaagagtatgatttggaaaggggccatgatgagaaactggatgaaaatcagcattttggtttggaaagtgggcaccaacaccttccgtggaccaggaaagtctatgagttctacagtgctccaattgtcaagttttggttttatacgatggcgtatttggcattcctcatgctgttcacttacaccgtgttggtggagatgcagccccagcccagcgtgcaggagtggcttgttagcatttacatcttcaccaatgctattgaggtggtcagggagatctgtatttcagaacctgggaagtttacccaaaaggtgaaggtatggattagtgagtactggaacttaacagaaactgtggccattggcctgttttcagctggcttcgtccttcgatggggtgaccctccttttcacacagcgggaagactgatctactgcatagacatcatattctggttctcacggctcctggacttctttgctgtgaatcaacatgcaggtccatatgtgaccatgattgcaaaaatgacagcaaacatgttctatattgtgatcatcatggccatagtcctgctgagctttggagtggcacgcaaggccatcctttcgccaaaagagccaccatcttggagtctagctcgagatattgtatttgagccatactggatgatatacggagaagtctatgctggagaaatagatgtttgttcaagccagccatcctgccctcctggttcttttcttactccattcttgcaagctgtctacctcttcgtgcaatatatcatcatggtgaacctgttgattgctttcttcaacaacgtttacttagatatggaatccatttcaaataacctgtggaaatacaaccgctatcgctacatcatgacctaccacgagaagccctggctgcccccacctctcatcctgctgagccacgtgggccttctcctccgccgcctgtgctgtcatcgagctcctcacgaccaagaagagggtgacgttggattaaaactctacctcagtaaggaggatctgaaaaaacttcatgattttgaggagcagtgcgtggaaaaatacttccatgagaagatggaagatgtgaattgtagttgtgaggaacgaatccgagtgacatcagaaagggttacagagatgtacttccagctgaaagaaatgaatgaaaaggtgtcttttataaaggactccttactgtctttggacagccaggtgggacacctgcaggatctctctgccctgactgtggataccctgaaagtcctttctgctgttgacactttgcaagaggatgaggctctcctggccaagagaaagcattctacttgcaaaaaacttccccacagctggagcaatgtcatctgtgcagaggttctaggcagcatggagatcgctggagagaagaaataccagtattatagcatgccctcttctttgctgaggagcctggctggaggccggcatcccccaagagtgcagaggggggcacttcttgagattacaaacagtaaaagagaggctacaaatgtaagaaatgaccaggaaaggcaagaaacacaaagtagtatagtggtttctggggtgtctcctaacaggcaagcacactcaaagtatggccagtttcttctggtcccctctaatctaaagcgagttcctttttcagcagaaactgtcttgcctctgtccagaccctctgtgccagatgtgctggcaactgaacaggacatccagactgaggttcttgttcatctgactgggcagaccccagttgtctctgactgggcatcagtggatgaacccaaggaaaagcacgagcctattgctcacttactggatggacaagacaaggcagagcaagtgctacccactttgagttgcacacctgaacccatgacaatgagctcccctctttcccaagccaagatcatgcaaactggaggtggatatgtaaactgggcattttcagaaggtgatgaaactggtgtgtttagcatcaagaaaaagtggcaaacctgcttgccctccacttgtgacagtgattcctctcggagtgaacagcaccagaagcaggcccaggacagctccctatctgataactcaacaagatcggcccagagtagtgaatgctcagaggtgggaccatggcttcagccaaacacatccttttggatcaatcctctccgcagatacaggcccttcgctaggagtcatagttttagattccataaggaggagaaattgatgaagatctgtaagattaaaaatctttcaggctcttcagaaatagggcagggagcatgggtcaaagcgaaaatgctaaccaaagacaggagactgtcaaagaaaaagaagaatactcaaggactccaggtgccaatcataacagtcaatgcctgctctcagagtgaccagttgaatccagagccaggagaaaacagcatctctgaagaggagtacagcaagaactggttcacagtgtccaaatttagtcacacaggtgtagaaccttacatacatcagaaaatgaaaactaaagaaattggacaatgtgctatacaaatcagtgattacctaaagcagtctcaagaggatctcagcaaaaactctttgtggaattccaggagcaccaacctcaataggaactccctgctgaaaagttcaattggagttgacaagatctcagcctccttaaaaagccctcaagagcctcaccatcattattcagccattgaaaggaataatttaatgaggctttctcagaccataccatttacaccagtccaactgtttgcaggagaagaaataactgtctacaggttggaggagagttcccctttaaaccttgataaaagcatgtcctcttggtctcagcgtgggagagcggcaatgatccaggtattgtcccgagaggagatggatgggggcctccgtaaagctatgagagtcgtcagcacttggtctgaggatgacattctcaagccgggacaagttttcattgtcaagtcctttcttcctgaggttgtgcggacatggcataaaatcttccaggagagcactgtgcttcatctttgcctcagggaaattcaacaacaaagagctgctcaaaaattgatctataccttcaaccaagtgaaaccacaaaccataccctacacaccaaggttcctggaagttttcttaatctactgccattcagccaaccagtggttgaccattgagaagtatatgacaggggagttccggaagtataacaacaacaatggtgatgaaatcacccccaccaacaccctggaggagctgatgttggctttctctcactggacctatgagtacactcggggagagctgctggttttagatttgcaaggtgttggagaaaatttgacagatccatctgttataaaacctgaagtcaaacaatcaagaggaatggtgtttggaccggccaatttgggggaagatgcaattagaaacttcattgcaaaacatcattgtaactcctgctgccggaagctcaaactcccggatttaaaaagaaatgactattcccctgaaaggataaattccacctttggacttgagataaaaatagaatcagctgaggagcctccagcaagggagacgggtagaaattccccagaagatgatatgcaactataaaaagggaggagcaagaagatcccagtgcttgccctgcctgccaggaactctgtgataacatagattgatcaacgtgatgttgattacatcagcgtctccttgggacacgccttctgagcctcacatctccttctgttcaaaggcctcattggtatatgatcaatgggttctcctagacactgacctctgtccagggcactttgcagctccatcctcaagttccacacgaagatgcttggatgagtcagctgggaatattgttcttgtgtacctcattgctttagctggtcacttggaactttggagcagaatcctgcacattaaaggatggggttgggggggatacatttattttattttctcactatgtatgcagactggaccccctactactatttgtcacctcacccacagattgtatttatgtctatatatatgttcataaaaagttatgtgatttcctcctctgtcttttccacaacataggactttgaatagcaatgataggaaaaacaatggaacaagggtgggtttgcacagattggagcacattcctgcacaaactaccaagtatactggtgaaatctcgatgggtttcagatattgtcagtgaatcatatgatgcctggatatttcaggtttctgtaaaagaaagggaaacctaaaacaaatacccttccatatataatatatatggaatatgtatattatatatatttttatatatataatatatatggaatatatatattatatatataaaatacatatggaatatatatattttatatatatatatatatatttttatttttgagatggagtttcactctttttacccaggctggagtgcaatgatgcgatctcactgcaacctctgcctcccgggcttgagcgattcttgtgtctcagtcttccgggtagctgggactacaggtgtgcaccactatgcctggctaattttgtatttttagtagagatggggtttcaccatgttggccaggctggtctcaaactcctgacctcagatgatccacctgccttggcttcccaaagtgctgggattacaggcgtgagccactgcgcctggcctttttttttttttttttaaacgagaacaagaatatgaagaactggaaatcattaagaaagggtttcccttccttaaagctcaggggtactattagttaggagttgactaactcaacctgtaaaacaccactcctccttccaaagttgtatatataatattgcaggttaaattactttatgtcaggtcctatgaagaaagatacggtttcagactgaaaacatgtttcacaggtgtttgcttccttccagagcagagttccctattcccctggcataaagaatgtatatatattttgaaatatggctgagaacatgtcattggtttgtgaggcctaaggtgaagcactcctggcagccacactgtgtagtgtatttgagggatcagtcatccctcttgtatgctgggcctggttgccctacctcgaacaagcaccagcttttcacacaaggagagatgtggggctgggagtcctctccccatcctattgcatctcctttcttattataagctgttccagttcacaggcagcaaacctcctgggtttgaaaaattccaacttatttttatctttaatcctgacattagctgacttgctagtgagcttgctttaaaaatctacactcttgcattcttaggcatacaggggaaatgttgaaaaggaaggtggaaaaccaagaatttagtttgccaatgattgcctctgattcttgtaagtttgagttccacaagggctaatttattccccttttacttgggttttggggtggtggaaagcgggaaatttgggtgatttgttgattggcaatgaggataaaatgttaatacttttttggggacttaacaactttatcctattctacaagtcagtaaaggaacaattggtactcacctcagtgctgcactcaactatggaaagaggcagagtttgcttgcccaattgccaaactaaagacatcagttcattggtcaaatatttgttacctggaatggaacttgaaagcaaatacatttggatttcaaatttc

SEQ ID NO: 69519 - protein, 2017 aa, Artificial Sequence
  derived and/or modified sequence
MTAPVTSQKSWIKGVFDKRECSTIIPSSKNPHRCTPVCQVCQNLIRCYCGRLIGDHAGIDYSWTISAAKGKESEQWSVEKHTTKSPTDTFGTINFQDGEHTHHAKYIRTSYDTKLDHLLHLMLKEWKMELPKLVISVHGGIQNFTMPSKFKEIFSQGLVKAAETTGAWIITEGINTGVSKHVGDALKSHSSHSLRKIWTVGIPPWGVIENQRDLIGKDVVCLYQTLDNPLSKLTTLNSMHSHFILSDDGTVGKYGNEMKLRRNLEKYLSLQKIHCRSRQGVPVVGLVVEGGPNVILSVWETVKDKDPVVVCEGTGRAADLLAFTHKHLADEGMLRPQVKEEIICMIQNTFNFSLKQSKHLFQILMECMVHRDCITIFDADSEEQQDLDLAILTALLKGTNLSASEQLNLAMAWDRVDIAKKHILIYEQHWKPDALEQAMSDALVMDRVDFVKLLIEYGVNLHRFLTIPRLEELYNTKQGPTNTLLHHLVQDVKQHTLLSGYRITLIDIGLVVEYLIGRAYRSNYTRKHFRALYNNLYRKYKHQRHSSGNRNESAESTLHSQFIRTAQPYKFKEKSIVLHKSRKKSKEQNVSDDPESTGFLYPYNDLLVWAVLMKRQKMAMFFWQHGEEATVKAVIACILYRAMAHEAKESHMVDDASEELKNYSKQFGQLALDLLEKAFKQNERMAMTLLTYELRNWSNSTCLKLAVSGGLRPFVSHTCTQMLLTDMWMGRLKMRKNSWLKIIISIILPPTILTLEFKSKAEMSHVPQSQDFQFMWYYSDQNASSSKESASVKEYDLERGHDEKLDENQHFGLESGHQHLPWTRKVYEFYSAPIVKFWFYTMAYLAFLMLFTYTVLVEMQPQPSVQEWLVSIYIFTNAIEVVREICISEPGKFTQKVKVWISEYWNLTETVAIGLFSAGFVLRWGDPPFHTAGRLIYCIDIIFWFSRLLDFFAVNQHAGPYVTMIAKMTANMFYIVIIMAIVLLSFGVARKAILSPKEPPSWSLARDIVFEPYWMIYGEVYAGEIDVCSSQPSCPPGSFLTPFLQAVYLFVQYIIMVNLLIAFFNNVYLDMESISNNLWKYNRYRYIMTYHEKPWLPPPLILLSHVGLLLRRLCCHRAPHDQEEGDVGLKLYLSKEDLKKLHDFEEQCVEKYFHEKMEDVNCSCEERIRVTSERVTEMYFQLKEMNEKVSFIKDSLLSLDSQVGHLQDLSALTVDTLKVLSAVDTLQEDEALLAKRKHSTCKKLPHSWSNVICAEVLGSMEIAGEKKYQYYSMPSSLLRSLAGGRHPPRVQRGALLEITNSKREATNVRNDQERQETQSSIVVSGVSPNRQAHSKYGQFLLVPSNLKRVPFSAETVLPLSRPSVPDVLATEQDIQTEVLVHLTGQTPVVSDWASVDEPKEKHEPIAHLLDGQDKAEQVLPTLSCTPEPMTMSSPLSQAKIMQTGGGYVNWAFSEGDETGVFSIKKKWQTCLPSTCDSDSSRSEQHQKQAQDSSLSDNSTRSAQSSECSEVGPWLQPNTSFWINPLRRYRPFARSHSFRFHKEEKLMKICKIKNLSGSSEIGQGAWVKAKMLTKDRRLSKKKKNTQGLQVPIITVNACSQSDQLNPEPGENSISEEEYSKNWFTVSKFSHTGVEPYIHQKMKTKEIGQCAIQISDYLKQSQEDLSKNSLWNSRSTNLNRNSLLKSSIGVDKISASLKSPQEPHHHYSAIERNNLMRLSQTIPFTPVQLFAGEEITVYRLEESSPLNLDKSMSSWSQRGRAAMIQVLSREEMDGGLRKAMRVVSTWSEDDILKPGQVFIVKSFLPEVVRTWHKIFQESTVLHLCLREIQQQRAAQKLIYTFNQVKPQTIPYTPRFLEVFLIYCHSANQWLTIEKYMTGEFRKYNNNNGDEITPTNTLEELMLAFSHWTYEYTRGELLVLDLQGVGENLTDPSVIKPEVKQSRGMVFGPANLGEDAIRNFIAKHHCNSCCRKLKLPDLKRNDYSPERINSTFGLEIKIESAEEPPARETGRNSPEDDMQL

SEQ ID NO: 69520 - DNA, 6054 bp, Artificial Sequence
  derived and/or modified sequence
atgaccgcccccgtgaccagccagaagagctggatcaagggcgtgttcgacaagagagagtgcagcaccatcatccccagcagcaagaacccccacagatgcacccccgtgtgccaggtgtgccagaacctgatcagatgctactgcggcagactgatcggcgaccacgccggcatcgactacagctggaccatcagcgccgccaagggcaaggagagcgagcagtggagcgtggagaagcacaccaccaagagccccaccgacaccttcggcaccatcaacttccaggacggcgagcacacccaccacgccaagtacatcagaaccagctacgacaccaagctggaccacctgctgcacctgatgctgaaggagtggaagatggagctgcccaagctggtgatcagcgtgcacggcggcatccagaacttcaccatgcccagcaagttcaaggagatcttcagccagggcctggtgaaggccgccgagaccaccggcgcctggatcatcaccgagggcatcaacaccggcgtgagcaagcacgtgggcgacgccctgaagagccacagcagccacagcctgagaaagatctggaccgtgggcatccccccctggggcgtgatcgagaaccagagagacctgatcggcaaggacgtggtgtgcctgtaccagaccctggacaaccccctgagcaagctgaccaccctgaacagcatgcacagccacttcatcctgagcgacgacggcaccgtgggcaagtacggcaacgagatgaagctgagaagaaacctggagaagtacctgagcctgcagaagatccactgcagaagcagacagggcgtgcccgtggtgggcctggtggtggagggcggccccaacgtgatcctgagcgtgtgggagaccgtgaaggacaaggaccccgtggtggtgtgcgagggcaccggcagagccgccgacctgctggccttcacccacaagcacctggccgacgagggcatgctgagaccccaggtgaaggaggagatcatctgcatgatccagaacaccttcaacttcagcctgaagcagagcaagcacctgttccagatcctgatggagtgcatggtgcacagagactgcatcaccatcttcgacgccgacagcgaggagcagcaggacctggacctggccatcctgaccgccctgctgaagggcaccaacctgagcgccagcgagcagctgaacctggccatggcctgggacagagtggacatcgccaagaagcacatcctgatctacgagcagcactggaagcccgacgccctggagcaggccatgagcgacgccctggtgatggacagagtggacttcgtgaagctgctgatcgagtacggcgtgaacctgcacagattcctgaccatccccagactggaggagctgtacaacaccaagcagggccccaccaacaccctgctgcaccacctggtgcaggacgtgaagcagcacaccctgctgagcggctacagaatcaccctgatcgacatcggcctggtggtggagtacctgatcggcagagcctacagaagcaactacaccagaaagcacttcagagccctgtacaacaacctgtacagaaagtacaagcaccagagacacagcagcggcaacagaaacgagagcgccgagagcaccctgcacagccagttcatcagaaccgcccagccctacaagttcaaggagaagagcatcgtgctgcacaagagcagaaagaagagcaaggagcagaacgtgagcgacgaccccgagagcaccggcttcctgtacccctacaacgacctgctggtgtgggccgtgctgatgaagagacagaagatggccatgttcttctggcagcacggcgaggaggccaccgtgaaggccgtgatcgcctgcatcctgtacagagccatggcccacgaggccaaggagagccacatggtggacgacgccagcgaggagctgaagaactacagcaagcagttcggccagctggccctggacctgctggagaaggccttcaagcagaacgagagaatggccatgaccctgctgacctacgagctgagaaactggagcaacagcacctgcctgaagctggccgtgagcggcggcctgagacccttcgtgagccacacctgcacccagatgctgctgaccgacatgtggatgggcagactgaagatgagaaagaacagctggctgaagatcatcatcagcatcatcctgccccccaccatcctgaccctggagttcaagagcaaggccgagatgagccacgtgccccagagccaggacttccagttcatgtggtactacagcgaccagaacgccagcagcagcaaggagagcgccagcgtgaaggagtacgacctggagagaggccacgacgagaagctggacgagaaccagcacttcggcctggagagcggccaccagcacctgccctggaccagaaaggtgtacgagttctacagcgcccccatcgtgaagttctggttctacaccatggcctacctggccttcctgatgctgttcacctacaccgtgctggtggagatgcagccccagcccagcgtgcaggagtggctggtgagcatctacatcttcaccaacgccatcgaggtggtgagagagatctgcatcagcgagcccggcaagttcacccagaaggtgaaggtgtggatcagcgagtactggaacctgaccgagaccgtggccatcggcctgttcagcgccggcttcgtgctgagatggggcgacccccccttccacaccgccggcagactgatctactgcatcgacatcatcttctggttcagcagactgctggacttcttcgccgtgaaccagcacgccggcccctacgtgaccatgatcgccaagatgaccgccaacatgttctacatcgtgatcatcatggccatcgtgctgctgagcttcggcgtggccagaaaggccatcctgagccccaaggagccccccagctggagcctggccagagacatcgtgttcgagccctactggatgatctacggcgaggtgtacgccggcgagatcgacgtgtgcagcagccagcccagctgcccccccggcagcttcctgacccccttcctgcaggccgtgtacctgttcgtgcagtacatcatcatggtgaacctgctgatcgccttcttcaacaacgtgtacctggacatggagagcatcagcaacaacctgtggaagtacaacagatacagatacatcatgacctaccacgagaagccctggctgcccccccccctgatcctgctgagccacgtgggcctgctgctgagaagactgtgctgccacagagccccccacgaccaggaggagggcgacgtgggcctgaagctgtacctgagcaaggaggacctgaagaagctgcacgacttcgaggagcagtgcgtggagaagtacttccacgagaagatggaggacgtgaactgcagctgcgaggagagaatcagagtgaccagcgagagagtgaccgagatgtacttccagctgaaggagatgaacgagaaggtgagcttcatcaaggacagcctgctgagcctggacagccaggtgggccacctgcaggacctgagcgccctgaccgtggacaccctgaaggtgctgagcgccgtggacaccctgcaggaggacgaggccctgctggccaagagaaagcacagcacctgcaagaagctgccccacagctggagcaacgtgatctgcgccgaggtgctgggcagcatggagatcgccggcgagaagaagtaccagtactacagcatgcccagcagcctgctgagaagcctggccggcggcagacacccccccagagtgcagagaggcgccctgctggagatcaccaacagcaagagagaggccaccaacgtgagaaacgaccaggagagacaggagacccagagcagcatcgtggtgagcggcgtgagccccaacagacaggcccacagcaagtacggccagttcctgctggtgcccagcaacctgaagagagtgcccttcagcgccgagaccgtgctgcccctgagcagacccagcgtgcccgacgtgctggccaccgagcaggacatccagaccgaggtgctggtgcacctgaccggccagacccccgtggtgagcgactgggccagcgtggacgagcccaaggagaagcacgagcccatcgcccacctgctggacggccaggacaaggccgagcaggtgctgcccaccctgagctgcacccccgagcccatgaccatgagcagccccctgagccaggccaagatcatgcagaccggcggcggctacgtgaactgggccttcagcgagggcgacgagaccggcgtgttcagcatcaagaagaagtggcagacctgcctgcccagcacctgcgacagcgacagcagcagaagcgagcagcaccagaagcaggcccaggacagcagcctgagcgacaacagcaccagaagcgcccagagcagcgagtgcagcgaggtgggcccctggctgcagcccaacaccagcttctggatcaaccccctgagaagatacagacccttcgccagaagccacagcttcagattccacaaggaggagaagctgatgaagatctgcaagatcaagaacctgagcggcagcagcgagatcggccagggcgcctgggtgaaggccaagatgctgaccaaggacagaagactgagcaagaagaagaagaacacccagggcctgcaggtgcccatcatcaccgtgaacgcctgcagccagagcgaccagctgaaccccgagcccggcgagaacagcatcagcgaggaggagtacagcaagaactggttcaccgtgagcaagttcagccacaccggcgtggagccctacatccaccagaagatgaagaccaaggagatcggccagtgcgccatccagatcagcgactacctgaagcagagccaggaggacctgagcaagaacagcctgtggaacagcagaagcaccaacctgaacagaaacagcctgctgaagagcagcatcggcgtggacaagatcagcgccagcctgaagagcccccaggagccccaccaccactacagcgccatcgagagaaacaacctgatgagactgagccagaccatccccttcacccccgtgcagctgttcgccggcgaggagatcaccgtgtacagactggaggagagcagccccctgaacctggacaagagcatgagcagctggagccagagaggcagagccgccatgatccaggtgctgagcagagaggagatggacggcggcctgagaaaggccatgagagtggtgagcacctggagcgaggacgacatcctgaagcccggccaggtgttcatcgtgaagagcttcctgcccgaggtggtgagaacctggcacaagatcttccaggagagcaccgtgctgcacctgtgcctgagagagatccagcagcagagagccgcccagaagctgatctacaccttcaaccaggtgaagccccagaccatcccctacacccccagattcctggaggtgttcctgatctactgccacagcgccaaccagtggctgaccatcgagaagtacatgaccggcgagttcagaaagtacaacaacaacaacggcgacgagatcacccccaccaacaccctggaggagctgatgctggccttcagccactggacctacgagtacaccagaggcgagctgctggtgctggacctgcagggcgtgggcgagaacctgaccgaccccagcgtgatcaagcccgaggtgaagcagagcagaggcatggtgttcggccccgccaacctgggcgaggacgccatcagaaacttcatcgccaagcaccactgcaacagctgctgcagaaagctgaagctgcccgacctgaagagaaacgactacagccccgagagaatcaacagcaccttcggcctggagatcaagatcgagagcgccgaggagccccccgccagagagaccggcagaaacagccccgaggacgacatgcagctgtag

SEQ ID NO: 69521 - DNA, 6054 bp, Artificial Sequence
  derived and/or modified sequence
atgacggctccagtgacaagccagaaatcttggatcaagggtgtcttcgataagcgcgagtgttccaccattatcccctcatctaagaaccctcatagatgcactccagtgtgccaagtgtgtcagaatctcatacgttgttattgcggtcgcctcatcggcgatcacgccggcattgattattcctggaccattagcgccgctaagggaaaggagtccgagcagtggtcagttgaaaagcacacgaccaaatccccaactgacaccttcgggactatcaactttcaagacggagaacacacccaccacgcaaaatatatcagaaccagctacgacactaagctggatcaccttctgcatctgatgctgaaggagtggaaaatggagctgcccaaactcgttatcagtgttcacggtggaatccaaaactttacaatgccctccaagtttaaagaaatctttagccaaggtctagtgaaagccgccgaaacaacaggtgcatggataattactgagggaataaacactggggtgagcaagcacgttggagacgcgctgaagtctcactcttcacacagccttaggaagatttggacagtcggaatcccaccctggggtgtaatcgagaatcagcgggacttgatagggaaggatgttgtttgtctctaccagacgcttgacaatcctctttctaaactgacaacactcaacagtatgcattctcacttcattctcagcgacgacgggacagtgggcaagtatggcaatgaaatgaagctgaggcgcaatctggagaaatatctcagcctgcaaaagatccattgccggtctaggcagggcgtaccagtggtgggcctcgttgtggagggaggccccaatgtgatcctaagcgtgtgggaaaccgtgaaggacaaggatccagtcgtcgtctgcgaggggacgggcagagccgcagacctcctcgcattcacacataaacatctagccgacgaggggatgctgcggcctcaagtcaaagaggaaatcatttgcatgatacagaacaccttcaattttagccttaagcagagcaagcatctgttccagatcctgatggaatgtatggtgcatcgcgattgcataacaatcttcgacgccgacagcgaggagcagcaagacctggaccttgccatcttaacagccttgctgaaaggtacaaacctttccgccagcgagcagctcaatctcgccatggcctgggaccgggtagatatcgcaaaaaaacatatcttgatctatgaacagcattggaagccagacgcgttggagcaggctatgagtgacgccctggttatggaccgagtcgactttgtgaaactgttgatcgaatacggagtgaacctgcaccggttcttaacaattcccagattagaagagctatacaatactaagcagggacctaccaacaccttgctgcaccacctcgtgcaagacgtcaagcaacacaccctgctcagcggatatagaattactctcatcgacattggcctggtcgtggagtatctgattggccgcgcctatcgaagcaattacactcgcaagcacttccgcgccctgtacaataatctgtaccgcaagtacaagcatcagcggcacagctctggcaatcgaaatgagtcagctgagagcaccctacactcacagttcattcgaaccgcccagccttacaagtttaaggaaaagagtatcgtcctccataagagccgcaagaaatctaaggaacagaacgtctccgacgatccggagtctaccgggtttctgtatccatacaatgacctgctggtctgggccgtgcttatgaagaggcagaaaatggccatgtttttctggcagcacggcgaagaggctaccgtgaaggctgtcatcgcttgtatcctctaccgcgcaatggcccacgaggcaaaggagagccatatggtggatgatgcatcagaagaattgaaaaattattctaaacagttcgggcagctcgccctcgacctgctcgaaaaagcctttaagcagaacgagaggatggctatgacactgctgacctatgagctcagaaattggtccaacagcacttgcctgaagctggctgtttccggtggcctgcgaccattcgtctcccatacctgtacacagatgctcctaaccgatatgtggatgggccggctcaaaatgagaaaaaactcttggctgaaaattatcatcagtattatcttgccaccaacgattctaactctagagttcaagtctaaggcagagatgtctcatgtcccgcagtcccaagactttcagtttatgtggtattatagcgatcaaaacgccagtagctcaaaggaaagtgcctccgtgaaggaatacgatctggagcgcggccatgacgagaagttagatgagaaccagcacttcgggttggagtccggccatcagcacctcccttggacaaggaaggtttatgaattttactcagcccctatcgtgaagttctggttttacacaatggcttacctggcctttctgatgctattcacatatacagtgctggtcgagatgcagccacagccatctgttcaggagtggctggtgtctatatatatcttcacaaacgctattgaggtcgtgcgcgagatctgcatcagcgagcccggcaagtttacacaaaaggtgaaggtttggattagtgaatattggaacctcactgaaactgtggctataggtttattcagcgctgggttcgttctccggtggggcgaccctcccttccacacggcggggagactgatctattgtatagacataattttttggttctctcgcctgctggattttttcgcggtcaatcagcatgcagggccatatgtgactatgatcgcgaaaatgactgctaatatgttctacattgtgattatcatggcgatcgtgctgctttcattcggggtggctagaaaggcaattttatcccccaaagaacccccctcttggagtcttgcccgagacatcgtgttcgaaccgtactggatgatttacggagaggtgtatgccggcgagatcgatgtgtgttccagccagcccagttgtccaccagggagcttcctgacaccgtttctgcaggccgtgtatctgtttgtccagtatatcatcatggttaacctgctgatagccttcttcaacaacgtgtatttggatatggaatcaatctcaaacaacctttggaaatataacagataccggtacataatgacctaccacgaaaagccttggttaccgcctcctttaattctattaagtcatgtcggtctgttgttaaggagactgtgctgtcaccgggcgccccacgaccaagaagaaggggatgttggcctaaagctgtatttatccaaagaggaccttaagaagttgcatgatttcgaagagcagtgcgtggagaaatattttcacgagaagatggaagatgtgaattgttcatgtgaagaacggatccgggttacaagcgagcgggtgaccgagatgtatttccaattgaaggaaatgaacgaaaaggtgtccttcataaaggactctcttctgtctttggacagccaggtgggccatctccaggacctctctgctctgactgtcgacacattaaaggtcttaagtgccgtggatacattgcaggaagatgaagctctccttgctaaacgaaagcatagcacatgtaagaaactcccacatagttggtcaaacgttatctgcgccgaggtgctagggagcatggaaatcgctggtgaaaagaagtatcagtactatagcatgccgagctccttactcaggagccttgctggcggccggcacccacctagggtccagcgtggcgctctgctggagattaccaattctaagcgcgaggctacaaatgtgaggaacgatcaggagcgacaggagacccagagttctatcgtagtatctggtgtgtctcccaacaggcaggctcatagcaaatacggccagtttctactcgtcccctcaaacttaaaaagagtcccattttctgcagagactgtgctgccactgtcgcggcccagtgtgccggatgtcctggccaccgagcaggatatccagacggaggttcttgtacatctgaccggacagacccctgtcgtgagcgactgggctagcgtggacgagccgaaggagaaacacgagcccatcgcgcatttgctagatggtcaggataaagctgagcaggtgctgcccaccttaagctgcactccagagcccatgacaatgtcctcacccctgtcacaagcaaagattatgcaaaccggggggggatatgtgaactgggcctttagcgagggagatgaaacaggcgtttttagcatcaagaaaaaatggcagacttgcttaccaagcacctgtgactcagattcttcccgctcagaacagcatcagaagcaggcccaggacagcagcttaagcgataactcgacccgctccgcgcagtcatctgaatgctctgaagtgggaccctggcttcaacccaatacctctttctggattaatcctctgagacggtaccgcccatttgcgaggtctcactctttcagatttcataaggaagagaagttaatgaaaatctgtaaaatcaagaacctgagcggatcttcagaaattggtcagggagcttgggtgaaagctaagatgcttactaaggatagacgcctgagcaaaaagaagaaaaatacacagggactgcaggtacccatcattacggtaaacgcctgtagtcagagcgaccagttaaacccagagcccggagagaattcaataagtgaagaagagtactctaaaaactggttcacggtgtccaagttctcgcacacaggcgttgagccctacattcaccagaagatgaaaacaaaggaaattgggcaatgcgccatccagatctctgattatctgaaacaatcacaggaagacctttcaaagaacagcctgtggaatagtcggtcaacaaacctgaaccgcaatagcctgctgaaatccagtatcggtgtggacaagatcagcgcatcccttaaatcccctcaagagccgcaccaccattacagcgccatcgagcgtaacaatctgatgaggctgtcacagacaatcccgtttacccccgtccagttattcgccggcgaagaaattaccgtgtatcgtctggaggaaagcagtcccctcaatttagataaatctatgtccagttggtcccagcgaggaagggccgccatgattcaggttctgtctagagaggagatggacgggggcctgcggaaggctatgcgagtggtgtctacttggtcggaggacgatatcctaaagcccgggcaagtgttcatagtgaagtcctttttgccagaagttgtgagaacatggcacaaaattttccaggagtcaaccgtgttgcatctgtgtttaagggagatccagcaacaacgagcagcacaaaaactgatctacacttttaaccaggtgaagcctcagactatcccgtacaccccaaggtttctagaagtgttcttgatctactgccactctgcaaaccagtggctgacgatcgagaaatacatgaccggtgagttccgaaagtacaataataacaatggcgatgagattaccccgactaacacgctggaagagcttatgctggccttctcacattggacttatgagtatacccgcggggaactcctggtgctggatctacaaggtgtgggagaaaacctgaccgatcctagcgttatcaaacccgaagtgaaacagagcaggggtatggtttttggaccggctaatctaggagaggacgctatcaggaactttatagcgaagcaccattgcaattcttgttgtcgcaagctcaagttaccagatctgaaacggaacgactacagcccggaacggatcaattccaccttcggcttggaaataaaaatcgaaagtgcggaggaacccccggcccgggagaccgggcgcaatagccctgaggatgacatgcaactgtag

SEQ ID NO: 69522 - DNA, 6054 bp, Artificial Sequence
  derived and/or modified sequence
atgacagcccctgtgaccagccagaagtcctggatcaagggcgtgtttgacaagcgggagtgcagcaccatcatccccagcagcaagaacccccaccgctgcacccctgtgtgccaggtgtgccagaacctgatccgctgctactgcggccgcctgattggagaccatgctggcatcgactacagctggaccatctctgctgccaagggcaaggagagcgagcagtggagcgtggagaagcacaccaccaagagccccacagacaccttcggcaccatcaacttccaggatggagagcacacccaccacgccaagtacatccgcaccagctatgacaccaagctggaccacctgctgcacctgatgctgaaggagtggaagatggagctgcccaagctggtgatctctgtgcacggcggcatccagaacttcaccatgcccagcaagttcaaggagatcttcagccagggcctggtgaaggctgctgagaccactggagcctggatcatcacagagggcatcaacacaggagtgtccaagcacgtgggagatgccctgaagagccacagcagccacagcctgaggaagatctggacagtgggcatccccccctggggcgtgattgagaaccagagggacctgattggcaaggatgtggtgtgcctgtaccagaccctggacaaccccctgagcaagctgaccaccctgaacagcatgcacagccacttcatcctgagtgatgatggcaccgtgggcaagtatggaaatgagatgaagctgcggaggaacctggagaagtacctgagcctgcagaagatccactgccgcagccggcagggcgtgcctgtggtgggcctggtggtggagggcggccccaacgtcatcctgtctgtgtgggagaccgtgaaggacaaggaccctgtggtggtgtgtgagggcaccggccgggctgctgacctgctggccttcacccacaagcacctggctgatgagggcatgctgcggccccaggtgaaggaggagatcatctgcatgatccagaacaccttcaacttcagcctgaagcagagcaagcacctgttccagatcctgatggagtgcatggtgcaccgggactgcatcaccatctttgatgctgacagcgaggagcagcaggacctggacctggccatcctgacagccctgctgaagggcaccaacctgagcgccagcgagcagctgaacctggccatggcctgggacagagtggacatcgccaagaagcacatcctgatctatgagcagcactggaagccagatgccctggagcaggccatgtctgatgccctggtgatggacagagtggactttgtgaagctgctgattgaatatggagtgaacctgcaccgcttcctgaccatcccccggctggaggagctgtacaacaccaagcagggccccaccaacaccctgctgcaccacctggtgcaggatgtgaagcagcacaccctgctgagcggctaccgcatcaccctgattgacatcggcctggtggtggagtacctgattggccgggcctaccgcagcaactacaccaggaagcacttccgggccctgtacaacaacctgtacaggaagtacaagcaccagaggcacagcagcggcaacagaaatgaatctgctgagagcaccctgcacagccagttcatcagaacagcccagccctacaagttcaaggagaagagcatcgtgctgcacaagagcaggaagaagagcaaggagcagaatgtgtctgatgatcctgagagcacaggcttcctgtacccctacaatgacctgctggtgtgggccgtgctgatgaagaggcagaagatggccatgttcttctggcagcacggggaggaggccaccgtgaaggctgtgattgcctgcatcctgtaccgggccatggcccacgaggccaaggagagccacatggtggatgatgccagcgaggagctgaagaactacagcaagcagtttggccagctggccctggacctgctggagaaggccttcaagcagaatgaaagaatggccatgaccctgctgacctatgagctgaggaactggagcaacagcacctgcctgaagctggccgtgtctgggggcctgcggccctttgtgagccacacctgcacccagatgctgctgacagacatgtggatgggccgcctgaagatgaggaagaacagctggctgaagatcatcatcagcatcatcctgccccccaccatcctgaccctggagttcaagagcaaggccgagatgagccacgtgccccagagccaggacttccagttcatgtggtactacagcgaccagaatgccagcagcagcaaggagagcgcctctgtgaaggagtatgacctggagcggggccatgatgagaagctggatgagaaccagcacttcggcctggagagcggccaccagcacctgccctggaccaggaaggtgtatgagttctacagcgcccccatcgtgaagttctggttctacaccatggcctacctggccttcctgatgctgttcacctacacagtgctggtggagatgcagccccagcccagcgtgcaggagtggctggtgtccatctacatcttcaccaatgccatcgaggtggtgcgggagatctgcatcagcgagcccgggaagttcacccagaaggtgaaggtgtggatcagcgagtactggaacctgacagagaccgtggccatcggcctcttctctgctggctttgtgctgcgctggggagacccccccttccacacagctggccgcctcatctactgcatcgacatcatcttctggttcagccggctgctggacttctttgctgtgaaccagcacgccggcccctacgtgaccatgattgccaagatgacagccaacatgttctacatcgtcatcatcatggccatcgtgctgctgagctttggagtggccaggaaggccatcctgagccccaaggagcccccatcctggagcctggcccgggacatcgtgtttgagccctactggatgatctatggagaggtgtatgctggggagattgatgtgtgcagcagccagcccagctgccccccaggcagcttcctgacccccttcctgcaggccgtgtacctgtttgtgcagtacatcatcatggtgaacctgctgattgccttcttcaacaacgtgtacctggacatggagagcatcagcaacaacctgtggaagtacaaccgctaccgctacatcatgacctaccacgagaagccctggctgcccccacccctcatcctgctgagccacgtgggcctgctgctgcggcggctgtgctgccaccgggcccctcatgaccaggaggagggagatgtgggcctgaagctgtacctgagcaaggaggacctgaagaagctgcatgactttgaggagcagtgtgtggagaagtacttccacgagaagatggaggatgtgaactgcagctgtgaggagcgcatccgggtgaccagcgagcgggtgacagagatgtacttccagctgaaggagatgaatgagaaggtgtccttcatcaaggacagcctgctgagcctggacagccaggtgggccacctgcaggacctgagcgccctgactgtggacaccctgaaggtgctgtctgctgtggacaccctgcaggaggatgaggccctgctggccaagaggaagcacagcacctgcaagaagctgccccacagctggagcaatgtcatctgtgccgaggtgctgggctccatggagattgctggggagaagaagtaccagtactacagcatgcccagcagcctgctgcggagcctggccggcggccgccaccccccccgggtgcagagaggagccctgctggagatcaccaacagcaagcgggaggccaccaacgtgagaaatgaccaggagcggcaggagacccagagcagcatcgtggtgtctggagtgagccccaaccggcaggcccacagcaaatatggccagttcctgctggtgcccagcaacctgaagagggtgcccttctctgctgagaccgtgctgcccctgagccggcccagcgtgcctgatgtgctggccacagagcaggacatccagacagaggtgctggtgcacctgaccggccagacccctgtggtgtctgactgggcctctgtggatgagcccaaggagaagcatgagcccatcgcccacctgctggatggccaggacaaggccgagcaggtgctgcccaccctgagctgcaccccagagcccatgaccatgagcagccccctgagccaggccaagatcatgcagacaggaggcggctacgtgaactgggccttctctgaaggagatgagaccggggtcttcagcatcaagaagaagtggcagacctgcctgcccagcacctgtgacagcgacagcagccgctctgagcagcaccagaagcaggcccaggacagcagcctgagtgacaacagcaccaggtctgcccagagcagcgagtgcagcgaggtgggcccctggctgcagcccaacaccagcttctggatcaaccccctgcggcgctaccggccctttgcccggagccacagcttccgcttccacaaggaggagaagctgatgaagatctgcaagatcaagaacctgagcggcagcagcgagatcggccagggcgcctgggtgaaggccaagatgctgaccaaggaccggcggctgagcaagaagaagaagaacacccagggcctgcaggtgcccatcatcaccgtgaatgcctgcagccagagcgaccagctgaaccctgagcctggagaaaattccatcagcgaggaggagtacagcaagaactggttcaccgtgtccaagttcagccacactggagtggagccctacatccaccagaagatgaagaccaaggagatcggccagtgtgccatccagatcagtgactacctgaagcagagccaggaggacctgagcaagaacagcctgtggaacagccgcagcaccaacctgaacagaaacagcctgctgaagagcagcattggagtggacaagatcagcgccagcctgaagagcccccaggagccccaccaccactacagcgccatcgagaggaacaacctgatgaggctgagccagaccatccccttcacccctgtgcagctgtttgctggggaggagatcaccgtgtaccgcctggaggagagcagccccctgaacctggacaagtccatgagctcctggagccagaggggccgggccgccatgatccaggtgctgagccgggaggagatggatggcggcctgaggaaggccatgagggtggtgtccacctggagcgaagatgacatcctgaagccaggccaggtgttcatcgtgaagagcttcctgcctgaggtggtgaggacctggcacaagatcttccaggagagcacagtgctgcacctgtgcctgcgggagatccagcagcagagagctgcccagaagctgatctacaccttcaaccaggtgaagccccagaccatcccctacaccccccgcttcctggaggtgttcctgatctactgccacagcgccaaccagtggctgaccatcgagaagtacatgactggagagttcaggaagtacaacaacaacaatggagatgagatcacccccaccaacaccctggaggagctgatgctggccttcagccactggacctatgagtacaccagaggagagctgctggtgctggacctgcagggcgtgggggagaacctgacagaccccagcgtcatcaagccagaggtgaagcagagccggggcatggtgtttggacctgccaacctgggagaagatgccatccggaacttcatcgccaagcaccactgcaacagctgctgcaggaagctgaagctgcctgacctgaagagaaatgactacagccctgagcgcatcaacagcaccttcggcctggagatcaagattgaatctgctgaggagcccccagcccgggagaccggcaggaacagcccagaagatgacatgcagctgtag

SEQ ID NO: 69523 - DNA, 6054 bp, Artificial Sequence
  derived and/or modified sequence
atgaccgcccccgtgaccagccagaagagctggatcaagggcgtgttcgacaagcgcgaatgttcaaccattatcccctccagcaagaacccccatcggtgcaccccagtgtgtcaggtgtgtcagaacctcatacgttgctactgtgggcgcctgatcggggatcatgccggcattgactactcctggactatctcagctgctaaaggcaaagaatcagaacaatggtctgttgaaaagcacacgactaaatccccaacagacacatttggcaccatcaacttccaggacggggaacatacccatcacgcaaagtatataagaacttcttatgatacaaaactggatcacctactgcacctcatgcttaaggagtggaaaatggagctgcccaagctcgttatctccgttcatggcgggatacaaaatttcacaatgccatcaaaatttaaagagatatttagtcaaggcctggtgaaggctgctgagactactggagcctggataataacagaaggcatcaataccggcgtaagtaagcacgtcggagatgctctgaaatcacattcttcccactcactgagaaagatttggactgtggggatccccccgtggggtgttatcgaaaatcagcgtgacctcattggaaaggatgtagtctgtctgtatcagacattagataacccgctcagcaagctcacaaccctgaattccatgcattctcatttcattctgagcgacgacggcaccgtaggaaaatatggtaatgagatgaagctgagacggaacttggagaagtacttgtccctgcagaagatacactgtcgcagcaggcagggagtcccggttgtcggcctggtggttgaaggtggccccaacgttatccttagcgtgtgggaaacggtcaaagacaaagaccccgttgtggtctgcgaaggtactggcagggccgcagacctgctggctttcacacacaagcatttggccgatgaggggatgcttcgaccccaggtgaaagaagagatcatatgtatgattcagaacacattcaactttagcctgaagcagtctaaacatttattccagatcctcatggaatgtatggtgcatagagactgcatcaccatcttcgatgcagacagcgaagagcagcaggacctggacctggctattctgacggcattactcaagggcactaacctctctgcgagcgagcaactgaaccttgcgatggcctgggaccgagtcgatatcgcaaagaaacacattttaatttacgagcaacattggaagccagacgccctggagcaggctatgtctgacgctttggtgatggaccgtgtggattttgtgaagctgctcatcgagtacggggtaaacctccataggttcctgacaatcccacggctggaggagctttacaacactaaacaaggtccgacaaataccttgttgcatcaccttgtgcaagatgttaagcagcacaccttactttcgggctaccggattaccctgatagacattgggttggtggtagagtatttaataggcagggcctacagatccaattatacaagaaaacattttagagctctctacaataatctctatcgtaagtacaaacaccagaggcattcctccgggaaccgtaacgaatctgctgagagtacactgcatagccagttcatcaggaccgctcagccatataagtttaaagagaagtctatagtactccataaatccagaaaaaagtcaaaggagcagaacgtgagcgacgatcccgaatccacaggtttcctgtatccatataacgacctcctcgtttgggcagtgcttatgaaaaggcagaagatggcaatgttcttttggcaacacggtgaggaagcgaccgttaaggccgtgattgcctgtatcctgtatcgggcaatggcccacgaagcaaaggagagccacatggtggatgacgcctcggaagagctcaagaactactccaagcagttcggacaactcgcgttggatctgctcgagaaagccttcaagcagaacgagagaatggccatgacactcttgacctatgagctgcgaaattggtctaattcaacatgcctgaagctcgctgtttccggggggcttagacccttcgtgtctcacacgtgtacacagatgctgctgaccgacatgtggatggggcgcttaaagatgcggaagaacagctggttgaagatcattatcagcatcatcttaccgcctaccatcctgacacttgagttcaagtctaaagccgagatgtcccatgtcccacagtcccaggattttcagttcatgtggtattattcagatcagaacgcctcctcaagtaaagagtctgcctctgtgaaggaatacgaccttgagcgcgggcacgatgagaaactggatgagaatcagcacttcggactggagagcgggcaccagcacttgccctggactaggaaagtatatgaattttactccgcgccgattgtcaagttttggttttataccatggcttacctggctttcttgatgctgtttacctacacagtcctggtcgaaatgcagccacaaccaagcgtgcaggagtggcttgtgagcatatatattttcacaaacgcaatcgaagtcgtgagggagatatgcatcagcgagccaggaaaatttactcaaaaggtgaaagtgtggatcagtgaatattggaacttaacggaaactgtggcaataggactctttagcgctggcttcgttttacgatggggcgatccaccgttccatactgcaggccgcctgatctactgcattgacattatcttctggttctcccggctcctggatttctttgctgtgaaccagcacgcaggcccgtatgtgacaatgatcgcaaagatgacagccaacatgttttacatcgtcatcatcatggcaatagtacttttatcttttggcgttgcgcgcaaggcgattctgagtccgaaagagcccccttcttggtcccttgcccgcgacatcgtgttcgaaccatattggatgatctatggagaggtttatgccggggagatcgatgtgtgctcatctcagccttcttgtcctcccggaagtttcctgacacctttcctgcaggctgtctatttgtttgtccagtacattatcatggttaacctacttatagccttttttaataatgtgtatcttgatatggaatctatctcaaacaatctgtggaagtacaaccgatataggtatattatgacctaccacgaaaagccatggcttccaccgcctttgattcttcttagccatgtcggcctgctcctgcgccgattgtgttgccacagggcaccccacgaccaagaggagggtgacgtggggcttaaattgtacttaagcaaagaggatctcaaaaaactccatgactttgaggaacagtgtgttgagaaatacttccacgagaaaatggaggatgttaattgttcttgcgaagaacgcatcagagtgacttccgagcgagtcaccgaaatgtactttcagcttaaagagatgaatgagaaggtgtccttcatcaaagacagtctgctgtctcttgacagccaggttgggcatctccaagatctgtcagcccttactgtggacacgttgaaggtcctgtctgcagtagacaccctccaggaggacgaggccttgctcgcaaaaagaaaacatagcacatgtaaaaagctgccccattcctggtctaatgtgatctgtgccgaagttctgggctccatggaaatcgccggtgagaagaagtaccagtattactcaatgccatcctcattactgaggtccctggccgggggaagacacccccctcgagtgcaaaggggggccttgctcgaaatcacaaacagtaaaagagaggctacaaatgttagaaacgatcaagaacgacaagagactcagagctctattgtggtgtcgggcgtgtcccccaacagacaagcgcatagtaagtacggacagttcctgctggtgccgtccaaccttaagagggtccccttctcagcagaaaccgtgctgccactgtctagaccaagcgtacccgatgttctggcaaccgagcaggacatccagaccgaggtgctggtacacttaacaggtcaaactcccgtggtgagtgattgggcctccgtggatgagcctaaggaaaaacacgagcccattgcacatcttttggatgggcaagataaggccgaacaagtgctgccaactttgtcatgtacaccagagcctatgaccatgtctagcccgctcagtcaggccaaaatcatgcaaaccggaggaggatatgtgaactgggccttctctgaaggcgacgagaccggcgtcttttctatcaagaagaagtggcaaacttgtctcccaagcacatgcgactcagacagctctcgatctgagcaacatcagaagcaggcgcaggactccagcctgtcagacaactccactcggtccgcgcagtcttctgagtgctcagaggtcggcccgtggcttcagcctaataccagcttttggattaacccgctgagacgatacagaccattcgccaggtctcattcattcagattccataaagaggagaaactcatgaaaatatgtaaaatcaaaaatctttcaggcagcagcgaaattggtcagggggcatgggtaaaggccaaaatgctgaccaaggaccgcaggctatcaaagaagaagaaaaacactcaagggcttcaggtacctatcatcaccgtcaatgcatgttcccagagcgatcagctgaacccagaacctggagagaactctatcagcgaagaggagtactccaagaattggttcaccgtgtcgaagtttagccacacaggcgtggagccctacatccatcagaaaatgaaaaccaaggaaattggacagtgtgccatccagatctcggactacttgaaacaatcccaggaagacttaagtaaaaacagcctctggaattcccgatcaaccaaccttaaccggaatagtttgctcaagtcgagcatcggtgtggataagattagtgccagtctaaagagcccccaggagccccaccaccactattcagcaattgagcgtaataatcttatgcgtttgtctcagacgatccccttcactccagtacagttatttgccggagaagaaatcactgtctatcgactggaggagagcagccctctaaatctcgacaaatccatgtcaagctggagtcaacgagggcgcgccgccatgattcaggtcctgtcacgcgaggagatggacggtggccttcggaaggctatgagagtggtctcaacatggtccgaggacgatattctgaagcccggccaggtttttatcgtgaagtcttttttacccgaagtcgtccgcacctggcataagatttttcaagaaagtacagtgctgcatctgtgtttacgggagattcagcagcagagggcagcccaaaaactgatctataccttcaaccaggttaagccccaaactattccatatactccacggttcctggaagttttcctgatctactgccacagtgctaaccagtggctgactatagagaaatatatgacgggcgagttccggaagtacaacaataataacggcgatgaaatcacgcccactaatacactggaagagctaatgcttgcgtttagccattggacttacgaatatactagaggtgaacttctagtgctcgacctccagggcgttggcgagaatctcaccgatccgagtgtaatcaaaccggaggtgaagcagagtagaggaatggtcttcgggccggcaaatcttggggaggatgccatcaggaatttcatagcgaagcaccattgtaattcctgttgtcgaaagctgaaacttcccgatctgaagagaaatgactacagcccagaacgcattaactctaccttcggactggagatcaaaattgagtccgccgaagagccccccgcgcgggagacgggtcgaaactcacccgaggacgatatgcagctctag

SEQ ID NO: 69524 - DNA, 6053 bp, Artificial Sequence
  derived and/or modified sequence
atgaccgcccctgttacatctcaaaaatcctggatcaagggagtcttcgataagagggaatgttctacgatcatcccatcaagcaaaaatcctcatagatgcacccctgtctgtcaggtgtgccaaaacctcatcaggtgctattgtggcagattaattggcgaccacgcgggtatcgactattcatggacaatctccgcagcaaagggaaaagagtcagagcagtggtcagtcgagaagcatacgacaaaatcaccgactgatactttcggcactatcaacttccaagacggggaacatactcatcacgcaaagtacattcggacttcttatgacaccaagctggatcacctcctgcacctgatgctgaaagagtggaagatggagttgcccaagctggttattagtgtgcacggcggaatccaaaactttacaatgccgagcaagttcaaggaaatctttagccaggggctggtaaaggctgctgagacaactggggcttggatcattacagaagggatcaatacaggggtgtccaaacacgttggcgacgctctgaaatctcattcaagccactcattgcgcaagatttggaccgtcggcattcctccttggggcgtgatagaaaatcaaagggacctgatcggcaaggatgtagtgtgcttatatcagactctggacaatcccctcagcaagttaacgactctaaacagtatgcactcacactttatcctctctgacgatgggaccgtggggaaatacgggaacgagatgaaactgagacggaaccttgagaaatacctttcgctacagaaaattcactgtagaagtcggcagggcgtgcccgtggtaggactagtggtggaaggcggaccaaatgtaattctgtccgtctgggagaccgtgaaagataaagacccggtcgtcgtctgcgaagggaccggcagagccgcagacttgctcgctttcacgcacaaacaccttgccgacgagggcatgctgcgtcctcaggtaaaggaggagattatttgcatgatccagaatacttttaacttttccttgaagcagagcaagcatctgtttcagattctgatggagtgtatggtacatcgcgattgcatcaccattttcgatgccgattcagaggaacagcaggacctggacctcgccattctgaccgctctgttaaagggcacaaacctgagtgcatcagagcaactgaatttagccatggcatgggaccgagtcgacattgcaaagaagcatattctgatttacgaacagcactggaaacctgatgctctggaacaagcaatgagcgatgcgctggtgatggaccgtgtagacttcgtcaaacttctgatcgaatacggagtcaaccttcaccgttttttgacaattcccagattagaagagctgtataataccaaacagggcccaaccaacactctcctacaccacttggtgcaggacgtcaagcaacacactctgctttccggctataggataactctgatcgacataggcttggtggtggaatacctgatcggccgtgcttatcggagtaactacacgcgaaagcactttagggctctatacaataacctgtaccgtaagtacaaacaccagcgccactcttctgggaacaggaatgagtccgccgagtccaccctgcattcacagttcattcgtaccgcacaaccctataagttcaaggagaagtctatcgtgctccacaagtcccgcaaaaaatcgaaggagcagaatgtttccgatgacccagagtctaccggattcctgtacccatataacgacctgttagtgtgggcagttctgatgaaaaggcagaagatggccatgttcttttggcagcatggcgaagaagcaactgtgaaagccgtaattgcgtgtatcctataccgggcaatggcccacgaggctaaggaatctcatatggtggatgatgctagtgaagagctgaaaaactactcaaagcagttcggccagctggccctggatctcttagaaaaggccttcaaacagaacgaacggatggccatgactttgttgacctacgagcttcggaattggtcgaattcaacatgcttgaaattagctgtcagcgggggacttagaccattcgtgagtcacacgtgcacacaaatgctcctcacagatatgtggatgggacgcctcaaaatgcgtaaaaatagctggttgaagatcattatatccataatcctgcctcccaccattctcactctagaattcaagtccaaggctgaaatgtcccatgtcccccagagtcaggacttccagtttatgtggtactattctgaccaaaatgcctcctcttccaaggagagcgcttccgttaaagaatacgaccttgagagaggacatgatgagaaactggatgagaaccaacactttggtctggagagcggacaccagcacttgccctggactcgcaaggtttatgaattctattcagcaccgattgtcaagttttggttctataccatggcatacttagcctttttgatgcttttcacatacaccgtgttggtggaaatgcagccccagccttctgtccaggagtggcttgtgtcaatttacattttcactaacgccatcgaggtcgtgcgcgagatttgcatctctgaaccaggaaaatttactcagaaagtaaaagtttggatcagtgagtattggaatttaaccgagactgttgcaatagggctgttttctgcagggtttgtgctgcgttggggagacccaccgttccataccgctggccgactaatctattgcatcgatattattttttggttctctcggctccttgatttctttgcggtaaatcaacatgccggaccatatgttaccatgattgccaaaatgactgctaacatgttttatattgtgatcataatggccatcgtgctgctgagcttcggggtggccaggaaggcaatactaagcccaaaggagcctccaagctggtccttggctagagatatagtcttcgagccctactggatgatctatggcgaagtgtatgctggggagattgacgtgtgttctagtcaaccctcttgcccacctgggtctttcctgacaccgttcctccaggctgtctatctattcgtccagtacatcatcatggtgaacctactcatcgcattctttaacaacgtctatctggacatggagagtatttccaataatctatggaagtacaaccggtaccgatatatcatgacctaccacgagaaaccgtggctgccccctcctttgattctgttaagtcatgttggactgttgctgagaagattgtgttgtcatagggcgccacacgatcaggaggagggggacgtcggcctcaagctttacctgtctaaggaagacctgaagaagttacatgactttgaggagcagtgcgtcgagaaatacttccatgaaaaaatggaggacgttaattgctcctgtgaggagcgcatccgagtgactagcgaaagggtaaccgagatgtattttcagttgaaagagatgaatgaaaaagtttccttcatcaaggattccttgttgagcctggacagccaagtggggcacttgcaggatctgagtgcactcacggtggacactctcaaagttctgagcgcagtcgacacactccaagaggatgaagccttgctcgccaaacggaagcactcgacatgtaaaaagttgcctcacagttggtccaacgtcatatgtgctgaggttttagggtcaatggaaattgcgggtgaaaagaaatatcaatattactccatgcctagcagcctcctcaggagtctggccggagggcgacaccctccaagagttcagcggggagcgcttcttgagattaccaactcgaaacgagaagctacgaatgtgaggaatgatcaagagaggcaggaaactcaatccagtatcgttgtctctggagtcagccctaaccggcaagcacattctaaatatggccagttcctcctggtaccatccaatctgaaaagggtgccattcagcgccgaaacggtgcttccgctctctaggccttccgtcccagacgtgctcgcaaccgaacaggacatccagactgaagtgttagtgcatctgaccggccagactcctgttgtctccgactgggcatcagttgacgagcctaaggagaagcacgaacctattgctcatctgctcgacggtcaagataaagcagagcaggtgctgcctacgctctcctgtacccccgaacctatgacaatgtcgtccccgttatcgcaggccaagataatgcaaaccggtggtggttatgtgaattgggctttcagcgaaggcgacgaaaccggagtattctccatcaaaaaaaaatggcaaacctgcctgcctagtacttgtgatagtgatagctccagatctgagcagcatcagaagcaggcgcaggattccagcctatctgacaatagtacacggtccgctcagtcgtcggagtgcagtgaagtcggcccatggttgcagcctaacacatccttctggatcaaccctttacgacggtacaggccattcgcccgttcccactcttttcggtttcacaaggaagagaaattgatgaagatttgcaagataaagaacctctcaggctcaagcgaaatcggtcagggagcttgggttaaggccaaaatgctgactaaagaccggaggctgagtaaaaagaagaagaatacccaaggtctgcaggtgcctatcatcacagttaatgcctgttcacaatccgaccaacttaaccccgagccgggtgaaaattctatctcagaggaagaatattccaagaactggtttaccgtgtccaaattcagccacacaggtgtcgagccatacatccatcagaagatgaaaaccaaagagattgggcagtgcgccatccagatttctgactatctcaaacagtcccaagaggacctctcaaagaactctctctggaatagtaggtccacaaatctaaatcgaaactctctgctgaagagcagcatcggcgtggacaagatctctgccagtctgaagagtcctcaggagcctcaccaccactatagcgccattgagagaaataatctgatgcgtctctctcagacgatccctttcacgcccgtccagctgttcgcgggagaggaaatcacagtttatcggcttgaggagtcgagccccctcaatctagataaatcaatgagtagctggtcccagcggggaagagccgctatgattcaggtcctgtctagggaggagatggacggaggactgagaaaggccatgagagtcgtgtcgacgtggagtgaggatgatattttaaagcctggccaagtcttcattgttaagtcatttttgccagaggtggtacgcacatggcacaagatctttcaggaatccaccgtcttgcacctgtgtctccgagagatccaacagcagcgggcagctcagaaattaatttacactttcaatcaggtaaaaccacaaacgattccatatacaccgaggtttctcgaagtcttcctcatatattgtcactcagcgaatcagtggctgaccatcgaaaaatacatgaccggcgagtttaggaagtacaacaataacaatggggacgagatcacacctacgaatactttggaggagctaatgctggctttcagccactggacctacgaatacacgcggggagaacttctggtgctggatctgcagggcgtgggggagaacctaacggacccatctgtgatcaaaccagaggtgaagcagtctcgcggaatggtgtttggaccagccaaccttggcgaggatgccatacgcaatttcattgctaagcatcactgtaactcctgctgcaggaagctgaagctccctgacctgaagagaaacgactattccccagagcgcatcaattctacgtttgggctcgagatcaaaattgagtccgcggaagaaccgccagcccgtgagacaggcaggaatagtcctgaggacgatatgcagctgta

SEQ ID NO: 69525 - DNA, 8271 bp, Artificial Sequence
  derived and/or modified sequence
gctttccgaggcggctggagaagtgcccagacggccgtccctccgcgcccctgcgcgtccccgtgcgcccagtgttccccgtgcaggagtcccggagcgatgacagcgccggttacgtcccagaaatcctggattaaaggagtatttgacaagagagaatgtagcacaatcatacccagctcaaaaaatcctcacagatgtactccagtatgccaagtctgccagaatttaatcaggtgttactgtggccgactgattggagaccatgctgggatagattattcctggaccatctcagctgccaagggtaaagaaagtgaacaatggtctgttgaaaagcacacaacgaaaagcccaacagatacttttggcacgattaatttccaagatggagagcacacccatcatgccaagtatattagaacttcttatgatacaaaactggatcatctgttacatttaatgttgaaagagtggaaaatggaactgcccaagcttgtgatctcagtccatgggggcatccagaactttactatgccctctaaatttaaagagattttcagccaaggtttggttaaagctgcagagacaacaggagcgtggataataactgaaggcatcaatacaggagtgtccaagcatgttggggatgccttgaaatcccattcctctcattccttgagaaaaatctggacagttggaatccctccttggggtgtcattgagaaccagagagaccttattggaaaagatgtggtgtgcctgtaccagactctggataaccccctcagcaagctcacaacactcaacagcatgcactcgcacttcatcctgtctgatgatgggaccgtgggcaagtatggaaatgaaatgaagctcagaaggaacctggagaagtacctctctctgcagaaaatacactgccgctcaagacaaggcgtgccggtcgtggggctggtggtggaaggcggtcccaacgtcatcctgtcagtgtgggagactgtcaaggacaaggacccagtggtggtgtgtgagggcacaggtagggcggctgacctcctggccttcacacacaaacacctggcagatgaagggatgctgcgacctcaggtgaaagaggagatcatctgcatgattcagaacactttcaactttagtcttaaacagtccaagcaccttttccaaattctaatggagtgtatggttcacagggattgtattaccatatttgatgctgactctgaagagcagcaagacctggacttagcaatcctaacagctttgctgaagggcacaaatttatcagcgtcagagcaattaaatctggcaatggcttgggacagggtggacattgccaagaaacatatcctaatttatgaacaacactggaagcctgatgccctggaacaagcaatgtcagatgctttagtgatggatcgggtggattttgtgaagctcttaatagaatatggagtgaacctccatcgctttcttaccatccctcgactggaagagctctacaatacaaaacaaggacctactaatacactcttgcatcatctcgtccaagatgtgaaacagcatacccttctttcaggctaccgaataaccttgattgacattggattagtagtagaatacctcattggtagagcatatcgcagcaactacactagaaaacatttcagagccctctacaacaacctctacagaaaatacaagcaccagagacactcctcaggaaatagaaatgagtctgcagaaagtacgctgcactcccagttcattagaactgcacagccatacaaattcaaggaaaagtctatagtccttcataaatcaaggaagaagtcaaaagaacaaaatgtatcagatgaccctgagtctactggctttctttacccttacaatgacctgctggtttgggctgtgctgatgaaaaggcagaagatggctatgttcttctggcagcatggagaggaggccacggttaaagccgtgattgcgtgtatcctctaccgggcaatggcccatgaagctaaggagagtcacatggtggatgatgcctcagaagagttgaagaattactcaaaacagtttggccagctggctctggacttgttggagaaggcattcaagcagaatgagcgcatggccatgacgctgttgacgtatgaactcaggaactggagcaattcgacctgccttaaactggccgtgtcgggaggattacgaccctttgtttcacatacttgtacccagatgctactgacagacatgtggatggggaggctgaaaatgaggaaaaactcttggttaaagattattataagcattattttaccacccaccattttgacactggaatttaaaagcaaagctgagatgtcacatgttccccagtcccaggacttccaatttatgtggtattacagtgaccagaacgccagcagttccaaagaaagtgcttctgtgaaagagtatgatttggaaaggggccatgatgagaaactggatgaaaatcagcattttggtttggaaagtgggcaccaacaccttccgtggaccaggaaagtctatgagttctacagtgctccaattgtcaagttttggttttatacgatggcgtatttggcattcctcatgctgttcacttacaccgtgttggtggagatgcagccccagcccagcgtgcaggagtggcttgttagcatttacatcttcaccaatgctattgaggtggtcagggagatctgtatttcagaacctgggaagtttacccaaaaggtgaaggtatggattagtgagtactggaacttaacagaaactgtggccattggcctgttttcagctggcttcgtccttcgatggggtgaccctccttttcacacagcgggaagactgatctactgcatagacatcatattctggttctcacggctcctggacttctttgctgtgaatcaacatgcaggtccatatgtgaccatgattgcaaaaatgacagcaaacatgttctatattgtgatcatcatggccatagtcctgctgagctttggagtggcacgcaaggccatcctttcgccaaaagagccaccatcttggagtctagctcgagatattgtatttgagccatactggatgatatacggagaagtctatgctggagaaatagatgtttgttcaagccagccatcctgccctcctggttcttttcttactccattcttgcaagctgtctacctcttcgtgcaatatatcatcatggtgaacctgttgattgctttcttcaacaacgtttacttagatatggaatccatttcaaataacctgtggaaatacaaccgctatcgctacatcatgacctaccacgagaagccctggctgcccccacctctcatcctgctgagccacgtgggccttctcctccgccgcctgtgctgtcatcgagctcctcacgaccaagaagagggtgacgttggattaaaactctacctcagtaaggaggatctgaaaaaacttcatgattttgaggagcagtgcgtggaaaaatacttccatgagaagatggaagatgtgaattgtagttgtgaggaacgaatccgagtgacatcagaaagggttacagagatgtacttccagctgaaagaaatgaatgaaaaggtgtcttttataaaggactccttactgtctttggacagccaggtgggacacctgcaggatctctctgccctgactgtggataccctgaaagtcctttctgctgttgacactttgcaagaggatgaggctctcctggccaagagaaagcattctacttgcaaaaaacttccccacagctggagcaatgtcatctgtgcagaggttctaggcagcatggagatcgctggagagaagaaataccagtattatagcatgccctcttctttgctgaggagcctggctggaggccggcatcccccaagagtgcagaggggggcacttcttgagattacaaacagtaaaagagaggctacaaatgtaagaaatgaccaggaaaggcaagaaacacaaagtagtatagtggtttctggggtgtctcctaacaggcaagcacactcaaagtatggccagtttcttctggtcccctctaatctaaagcgagttcctttttcagcagaaactgtcttgcctctgtccagaccctctgtgccagatgtgctggcaactgaacaggacatccagactgaggttcttgttcatctgactgggcagaccccagttgtctctgactgggcatcagtggatgaacccaaggaaaagcacgagcctattgctcacttactggatggacaagacaaggcagagcaagtgctacccactttgagttgcacacctgaacccatgacaatgagctcccctctttcccaagccaagatcatgcaaactggaggtggatatgtaaactgggcattttcagaaggtgatgaaactggtgtgtttagcatcaagaaaaagtggcaaacctgcttgccctccacttgtgacagtgattcctctcggagtgaacagcaccagaagcaggcccaggacagctccctatctgataactcaacaagatcggcccagagtagtgaatgctcagaggtgggaccatggcttcagccaaacacatccttttggatcaatcctctccgcagatacaggcccttcgctaggagtcatagttttagattccataaggaggagaaattgatgaagatctgtaagattaaaaatctttcaggctcttcagaaatagggcagggagcatgggtcaaagcgaaaatgctaaccaaagacaggagactgtcaaagaaaaagaagaatactcaaggactccaggtgccaatcataacagtcaatgcctgctctcagagtgaccagttgaatccagagccaggagaaaacagcatctctgaagaggagtacagcaagaactggttcacagtgtccaaatttagtcacacaggtgtagaaccttacatacatcagaaaatgaaaactaaagaaattggacaatgtgctatacaaatcagtgattacctaaagcagtctcaagaggatctcagcaaaaactctttgtggaattccaggagcaccaacctcaataggaactccctgctgaaaagttcaattggagttgacaagatctcagcctccttaaaaagccctcaagagcctcaccatcattattcagccattgaaaggaataatttaatgaggctttctcagaccataccatttacaccagtccaactgtttgcaggagaagaaataactgtctacaggttggaggagagttcccctttaaaccttgataaaagcatgtcctcttggtctcagcgtgggagagcggcaatgatccaggtattgtcccgagaggagatggatgggggcctccgtaaagctatgagagtcgtcagcacttggtctgaggatgacattctcaagccgggacaagttttcattgtcaagtcctttcttcctgaggttgtgcggacatggcataaaatcttccaggagagcactgtgcttcatctttgcctcagggaaattcaacaacaaagagctgctcaaaaattgatctataccttcaaccaagtgaaaccacaaaccataccctacacaccaaggttcctggaagttttcttaatctactgccattcagccaaccagtggttgaccattgagaagtatatgacaggggagttccggaagtataacaacaacaatggtgatgaaatcacccccaccaacaccctggaggagctgatgttggctttctctcactggacctatgagtacactcggggagagctgctggttttagatttgcaaggtgttggagaaaatttgacagatccatctgttataaaacctgaagtcaaacaatcaagaggaatggtgtttggaccggccaatttgggggaagatgcaattagaaacttcattgcaaaacatcattgtaactcctgctgccggaagctcaaactcccggatttaaaaagaaatgactattcccctgaaaggataaattccacctttggacttgagataaaaatagaatcagctgaggagcctccagcaagggagacgggtagaaattccccagaagatgatatgcaactataaaaagggaggagcaagaagatcccagtgcttgccctgcctgccaggaactctgtgataacatagattgatcaacgtgatgttgattacatcagcgtctccttgggacacgccttctgagcctcacatctccttctgttcaaaggcctcattggtatatgatcaatgggttctcctagacactgacctctgtccagggcactttgcagctccatcctcaagttccacacgaagatgcttggatgagtcagctgggaatattgttcttgtgtacctcattgctttagctggtcacttggaactttggagcagaatcctgcacattaaaggatggggttgggggggatacatttattttattttctcactatgtatgcagactggaccccctactactatttgtcacctcacccacagattgtatttatgtctatatatatgttcataaaaagttatgtgatttcctcctctgtcttttccacaacataggactttgaatagcaatgataggaaaaacaatggaacaagggtgggtttgcacagattggagcacattcctgcacaaactaccaagtatactggtgaaatctcgatgggtttcagatattgtcagtgaatcatatgatgcctggatatttcaggtttctgtaaaagaaagggaaacctaaaacaaatacccttccatatataatatatatggaatatgtatattatatatatttttatatatataatatatatggaatatatatattatatatataaaatacatatggaatatatatattttatatatatatatatatatttttatttttgagatggagtttcactctttttacccaggctggagtgcaatgatgcgatctcactgcaacctctgcctcccgggcttgagcgattcttgtgtctcagtcttccgggtagctgggactacaggtgtgcaccactatgcctggctaattttgtatttttagtagagatggggtttcaccatgttggccaggctggtctcaaactcctgacctcagatgatccacctgccttggcttcccaaagtgctgggattacaggcgtgagccactgcgcctggcctttttttttttttttttaaacgagaacaagaatatgaagaactggaaatcattaagaaagggtttcccttccttaaagctcaggggtactattagttaggagttgactaactcaacctgtaaaacaccactcctccttccaaagttgtatatataatattgcaggttaaattactttatgtcaggtcctatgaagaaagatacggtttcagactgaaaacatgtttcacaggtgtttgcttccttccagagcagagttccctattcccctggcataaagaatgtatatatattttgaaatatggctgagaacatgtcattggtttgtgaggcctaaggtgaagcactcctggcagccacactgtgtagtgtatttgagggatcagtcatccctcttgtatgctgggcctggttgccctacctcgaacaagcaccagcttttcacacaaggagagatgtggggctgggagtcctctccccatcctattgcatctcctttcttattataagctgttccagttcacaggcagcaaacctcctgggtttgaaaaattccaacttatttttatctttaatcctgacattagctgacttgctagtgagcttgctttaaaaatctacactcttgcattcttaggcatacaggggaaatgttgaaaaggaaggtggaaaaccaagaatttagtttgccaatgattgcctctgattcttgtaagtttgagttccacaagggctaatttattccccttttacttgggttttggggtggtggaaagcgggaaatttgggtgatttgttgattggcaatgaggataaaatgttaatacttttttggggacttaacaactttatcctattctacaagtcagtaaaggaacaattggtactcacctcagtgctgcactcaactatggaaagaggcagagtttgcttgcccaattgccaaactaaagacatcagttcattggtcaaatatttgttacctggaatggaacttgaaagcaaatacatttggatttcaaatttc

SEQ ID NO: 69526 - protein, 169 aa, Artificial Sequence
  derived and/or modified sequence
MSYFVTDYDPTIEDSYTKQCVIDDRAARLDILDTAGQEEFGAMREQYMRTGEGFLLVFSVTDRGSFEEIYKFQRQILRVKDRDEFPMILIGNKADLDHQRQVTQEEGQQLARQLKVTYMEASAKIRMNVDQAFHELVRVIRKFQEQECPPSPEPTRKEKDKKGCHCVIF

SEQ ID NO: 69527 - DNA, 510 bp, Artificial Sequence
  derived and/or modified sequence
atgtcttacttcgtcactgattatgaccctacaattgaggacagttacacaaagcagtgtgtgattgatgatagagcagcccggctcgatatacttgacaccgccggtcaggaggagttcggcgctatgcgtgagcagtacatgagaacaggtgagggatttctgcttgtgttctcagtgacggaccgtggatcattcgaagagatttacaagtttcaacgccagattctgagggttaaagaccgcgacgagttccctatgattttgatcggaaacaaggcggacctcgatcaccagcggcaggtcactcaggaggaggggcagcagttggctcggcagctcaaagtgacatacatggaggccagcgctaagatccggatgaacgtcgatcaggcgttccacgagcttgtgagggttatccgcaaatttcaggagcaggaatgtccacccagccccgagcctaccagaaaagagaaagacaaaaagggttgtcactgtgtcatcttctag

SEQ ID NO: 69528 - DNA, 510 bp, Artificial Sequence
  derived and/or modified sequence
atgagctactttgtgacagattatgaccccaccattgaagattcctacaccaagcagtgtgtgattgatgaccgggccgcccggctggacatcctggacacagctggccaggaggagtttggagccatgagggagcagtacatgaggactggagagggcttcctgctggtgttttctgtgacagaccggggcagctttgaggagatctacaagttccagaggcagatcctgcgggtgaaggacagagatgagttccccatgatcctgattggcaacaaggctgacctggaccaccagaggcaggtgacccaggaggagggccagcagctggcccggcagctgaaggtgacctacatggaggccagcgccaagatccgcatgaatgtggaccaggccttccacgagctggtgcgggtcatcaggaagttccaggagcaggagtgcccccccagccctgagcccaccaggaaggagaaggacaagaagggctgccactgcgtcatcttctag

SEQ ID NO: 69529 - DNA, 510 bp, Artificial Sequence
  derived and/or modified sequence
atgagctacttcgtgaccgactacgaccccaccatcgaggacagctacacaaagcaatgcgtgatcgatgaccgggcggctcgcctggacatattagacacagcaggccaagaggaattcggcgcaatgcgagagcagtacatgaggactggagagggtttccttcttgtgtttagtgtgacagatagggggagcttcgaagagatatataagttccagcggcaaatccttagagtgaaagaccgggatgagtttcctatgattttgatcggcaataaggcagacttagaccaccagcgacaggtgacgcaagaggagggacagcagctagctcgacagctaaaagtcacatacatggaagcttccgccaaaattcgaatgaatgtcgaccaggcttttcatgaattggtgcgggtcattcgcaagttccaggaacaggaatgtcctcccagtcccgagccaacacggaaagaaaaggataagaagggctgccattgtgtgattttttag

SEQ ID NO: 69530 - DNA, 510 bp, Artificial Sequence
  derived and/or modified sequence
atgagttactttgtgacagattacgatcctaccatcgaagatagctacactaagcagtgtgtgattgacgatagagccgcaaggctagatatcctcgataccgcgggtcaggaagaattcggcgctatgcgcgagcagtacatgcggaccggggaaggatttctgctcgtttttagcgttaccgatcgcggatctttcgaagaaatatataagttccaacgacagatcctgcgcgtgaaggacagagacgaattcccaatgattttgattggaaacaaagcagacttggaccatcagagacaggtgactcaagaggaaggacagcaactagcacgccagcttaaagtgacttacatggaagctagcgcgaaaatccgtatgaacgtggatcaggcatttcacgagctggtcagagtgattagaaagttccaggaacaggagtgtcccccatcaccggagcccacgcgtaaggagaaggacaagaaggggtgtcactgcgtcattttctag

SEQ ID NO: 69531 - DNA, 1278 bp, Artificial Sequence
  derived and/or modified sequence
atctcagatgcatgcagctcctgctgggcggtttcattctctgccagccattcattcacattaaaagcaatggcccattaaggaaataagtggatgatgctcctccatcacccatgtcctattttgtaacggattatgatccaaccattgaagattcttacacaaagcagtgtgtgatagatgacagagcagcccggctagatattttggatacagcaggacaagaagagtttggagccatgagagaacagtatatgaggactggcgaaggcttcctgttggtcttttcagtcacagatagaggcagttttgaagaaatctataagtttcaaagacagattctcagagtaaaggatcgtgatgagttcccaatgattttaattggtaataaagcagatctggatcatcaaagacaggtaacacaggaagaaggacaacagttagcacggcagcttaaggtaacatacatggaggcatcagcaaagattaggatgaatgtagatcaagctttccatgaacttgtccgggttatcaggaaatttcaagagcaggaatgtcctccttcaccagaaccaacacggaaagaaaaagacaagaaaggctgccattgtgtcattttctagaatcccttcagttttagctaccaacggccaggaaaagccctcatcttctctttctctcctcagtttacatcttgttggtacctttctagccttagacaaatgatcaccatgttagccttagacgaagaagctggctagtcctttctgtgaagctaatacaatggtcatttccagacaaatttaaaggaaacactaaggctgcttcaaagattatctgattcctttaaaatatatgtctatatacacagacatgctctttttttaagtgcttacattttaatagagatgaatcagttttggaatctaagctgtttgccaagctgaagctacaggttgtgaaataatttttaacttttggaatcatactgcctactgttactctaaatagaaatatagggttttttttaatgtgaatttttgcctatctttaaacatttcaatgtcagcctttgttaaccttaaatacactgaattgaatctacaaaagtgaaccatctcagacctttactgatactacaacttttgttttctgatggccaaaataccaaatgcctgttgtatttatggattaaaaactgcttataaaaccctgtgttactactcctactcttggagatgataatattctatgtggtcaaatatttggactcattta

SEQ ID NO: 69532 - DNA, 497 bp, Artificial Sequence
  derived and/or modified sequence
aatatttttgaactgtggttgactgtgggtaactgaaaccaaggaaagtgaaactggggataagcaaggtactgtagttttctttgatcagcacctgaaagatactgtgccacttcttctgatccccatggtttctgatgagaaatctgctgtttttctcctgtagtcctattttgtaacggattatgatccaaccattgaagattcttacacaaagcagtgtgtgatagatgacagagcagcccggctagatattttggatacagcaggacaagaagagtttggagccatgagagaacagtatatgaggactggcgaaggcttcctgttggtcttttcagtcacagatagaggcagttttgaagaaatctataagtttcaaagacagattctcagagtaaaggatcgtgatgagttcccaatgattttaattggtaataaagcagatctggatcatcaaagacaggtaacacaggaagaaggacaacagttagcac

SEQ ID NO: 69533 - DNA, 993 bp, Artificial Sequence
  derived and/or modified sequence
gtggtattcaggtgatgaatgtggattccgttttgagttggagaaatttctttttgtcagtttggatttaattttaagaaataatgagtcctattttgtaacggattatgatccaaccattgaagattcttacacaaagcagtgtgtgatagatgacagagcagcccggctagatattttggatacagcaggacaagaagagtttggagccatgagagaacagtatatgaggactggcgaaggcttcctgttggtcttttcagtcacagatagaggcagttttgaagaaatctataagtttcaaagacagattctcagagtaaaggatcgtgatgagttcccaatgattttaattggtaataaagcagatctggatcatcaaagacaggtaacacaggaagaaggacaacagttagcacggcagcttaaggtaacatacatggaggcatcagcaaagattaggatgaatgtagatcaagctttccatgaacttgtccgggttatcaggaaatttcaagagcaggaatgtcctccttcaccagaaccaacacggaaagaaaaagacaagaaaggctgccattgtgtcattttctagaatcccttcagttttagctaccaacggccaggaaaagccctcatcttctctttctctcctcagtttacatcttgttggtacctttctagccttagacaaatgatcaccatgttagccttagacgaagaagctggctagtcctttctgtgaagctaatacaatggtcatttccagacaaatttaaaggaaacactaaggctgcttcaaagattatctgattcctttaaaatatatgtctatatacacagacatgctctttttttaagtgcttacattttaatagagatgaatcagttttggaatctaagctgtttgccaagctgaagctacaggttgtgaaataatttttaacttttggaatcatactgcctactgttactctaaatagaaatataggg

SEQ ID NO: 69534 - DNA, 2034 bp, Artificial Sequence
  derived and/or modified sequence
atctcagatgcatgcagctcctgctgggcggtttcattctctgccagccattcattcacattaaaagcaatggcccattaaggaaataagtggatgatgctcctccatcacccatgtcctattttgtaacggattatgatccaaccattgaagattcttacacaaagcagtgtgtgatagatgacagagcagcccggctagatattttggatacagcaggacaagaagagtttggagccatgagagaacagtatatgaggactggcgaaggcttcctgttggtcttttcagtcacagatagaggcagttttgaagaaatctataagtttcaaagacagattctcagagtaaaggatcgtgatgagttcccaatgattttaattggtaataaagcagatctggatcatcaaagacaggtaacacaggaagaaggacaacagttagcacggcagcttaaggtaacatacatggaggcatcagcaaagattaggatgaatgtagatcaagctttccatgaacttgtccgggttatcaggaaatttcaagagcaggaatgtcctccttcaccagaaccaacacggaaagaaaaagacaagaaaggctgccattgtgtcattttctagaatcccttcagttttagctaccaacggccaggaaaagccctcatcttctctttctctcctcagtttacatcttgttggtacctttctagccttagacaaatgatcaccatgttagccttagacgaagaagctggctagtcctttctgtgaagctaatacaatggtcatttccagacaaatttaaaggaaacactaaggctgcttcaaagattatctgattcctttaaaatatatgtctatatacacagacatgctctttttttaagtgcttacattttaatagagatgaatcagttttggaatctaagctgtttgccaagctgaagctacaggttgtgaaataatttttaacttttggaatcatactgcctactgttactctaaatagaaatatagggttttttttaatgtgaatttttgcctatctttaaacatttcaatgtcagcctttgttaaccttaaatacactgaattgaatctacaaaagtgaaccatctcagacctttactgatactacaacttttgttttctgatggccaaaataccaaatgcctgttgtatttatggattaaaaactgcttataaaaccctgtgttactactcctactcttggagatgataatattctatgtggtcaaatatttggactcatttaggacttagatatttcagtgtacttgattttttaatttaactctttttcacagccacgctaagggtaaaaaggaataatttccttctgtcttccttttcaagtatttctgggtaagggattcaaaaaactaaaactgtttttgtttgtaatataaaatatggaattgatctttccagggtcagagatgattaatgtttttgctatatacttttatacattattttcttatcaaactagttaacaagtatttttatatgtttgtaagcagatatgctttcatagcataccttgtgtatatgtaaagataagtatttaattctcactgttcacttttaactgacaaagaaaaacaagtggaaactacagaaactgtggtagaacttttacttgctggtctggtcttggttgtacccatctttggccagtcacataactactcaagaaaccttcccaatagagtacaacaggatgagactctgaaatcactttcagtattccctgctagatattgattgttatttcaagtattaagtgtaagcttttaatggataattagtataactgtggatggcatctgattttgtttttaattctgtggattgtgtttaagcaattcaatagtatgttcctgattttgagatgctaagtggtattgcacagttgtcactttatcaagtgtgtacaacagtcccatgaagtttatagagcatacccttgtatagcttcaggtgctagaattaaaattgatctgttatc

SEQ ID NO: 69535 - DNA, 510 bp, Artificial Sequence
  derived and/or modified sequence
atgagctacttcgtgaccgactacgaccccaccatcgaggacagctacaccaagcagtgcgtgatcgacgacagagccgccagactggacatcctggacaccgccggccaggaggagttcggcgccatgagagagcagtacatgagaaccggcgagggcttcctgctggtgttcagcgtgaccgacagaggcagcttcgaggagatctacaagttccagagacagatcctgagagtgaaggacagagacgagttccccatgatcctgatcggcaacaaggccgacctggaccaccagagacaggtgacccaggaggagggccagcagctggccagacagctgaaggtgacctacatggaggccagcgccaagatcagaatgaacgtggaccaggccttccacgagctggtgagagtgatcagaaagttccaggagcaggagtgcccccccagccccgagcccaccagaaaggagaaggacaagaagggctgccactgcgtgatcttctag

SEQ ID NO: 69536 - protein, 599 aa, Artificial Sequence
  derived and/or modified sequence
MPSSLPGSQVPHPTLDAVDLVEKTLRNEGTSSSAPVLEEGDTDPWTLPQLKDTSQPWKELRVAGRLRRVAGSVLKACGLLGSLYFFICSLDVLSSAFQLLGSKVAGDIFKDNVVLSNPVAGLVIGVLVTALVQSSSTSSSIVVSMVAAKLLTVRVSVPIIMGVNVGTSITSTLVSMAQSGDRDEFQRAFSGSAVHGIFNWLTVLVLLPLESATALLERLSELALGAASLTPRAQAPDILKVLTKPLTHLIVQLDSDMIMSSATGNATNSSLIKHWCGTTGQPTQENSSCGAFGPCTEKNSTAPADRLPCRHLFAGTELTDLAVGCILLAGSLLVLCGCLVLIVKLLNSVLRGRVAQVVRTVINADFPFPLGWLGGYLAVLAGAGLTFALQSSSVFTAAVVPLMGVGVISLDRAYPLLLGSNIGTTTTALLAALASPADRMLSALQVALIHFFFNLAGILLWYLVPALRLPIPLARHFGVVTARYRWVAGVYLLLGFLLLPLAAFGLSLAGGMELAAVGGPLVGLVLLVILVTVLQRRRPAWLPVRLRSWAWLPVWLHSLEPWDRLVTRCCPCNVCSPPKATTKEAYCYENPEILASQQL

SEQ ID NO: 69537 - DNA, 1800 bp, Artificial Sequence
  derived and/or modified sequence
atgccatctagcctgccgggatcccaggtgcctcacccaaccctcgacgccgttgacttagtggaaaaaactttgcgcaacgagggaacctcttctagtgctcccgtgttggaagaaggagatacagatccttggacgctccctcaactaaaagatacttctcagccatggaaggaattacgcgtggccggtcgcctcaggagggtggcaggttcggtcttgaaggcatgcgggctgctgggatcactctacttctttatctgcagcctggatgtactctcttctgcgtttcagctcctcggaagcaaagtggctggagacatattcaaagataacgtggtcctgtcgaaccccgttgcggggttagtgatcggtgttctcgtgaccgcattggtccagagttcttcaacaagctcaagtatagttgtgtctatggtcgcggccaagctcctgactgtccgcgtttcggtccctatcattatgggcgtgaacgttgggaccagcataacttcaacgctcgtatcaatggcacagagtggagaccgagacgagttccagagggccttctccgggtcagccgttcatgggatttttaactggctgacggttttagtcctgctgccactcgagagcgccactgccctgttagaaaggctttcagagctggcattgggtgctgctagcctaacgccaagagcccaggctccggacatactcaaagtgcttaccaagccactcacacatctgatcgttcagttggactcggatatgatcatgtcctccgcaacggggaatgccacaaacagcagcctgattaagcactggtgtgggactaccggccagccgacccaagagaactcttcttgtggagcatttggcccgtgtaccgagaaaaattctaccgcaccggccgacagactaccctgccgtcatctgttcgctgggacagaactcacagacctggccgtgggctgcattctgcttgctgggtcactcctggtgctgtgtggatgcctggtgcttatcgtgaagctgctcaacagcgtcctccgaggtagggtggcccaagtagttagaaccgtaattaatgcagactttccattccctctgggttggctgggaggatatctggctgtgctggccggagccggcctcacatttgctttgcagagctcttccgtatttaccgctgccgtcgtccccctgatgggggtgggtgtaatatcgctggaccgcgcctacccacttctgctgggatccaacataggcacaaccactacagcgctgctggctgctctagcatcccctgcagataggatgctctcagccttgcaagtagcgctgattcattttttctttaatctagctggaattctcctctggtatctggtccctgctttgcggctgcccatccctctggcgcgacattttggcgtggtgacggcccggtaccgatgggtcgcaggggtgtatctcctcctcgggtttctgctcctccccctggcagccttcggcctcagcctcgctggaggaatggaattagctgctgtcggcggacccctagtaggccttgtgctgctcgtcatccttgtcacggtactacaacgcagaagacccgcctggcttccagttaggctgcggtcttgggcgtggctccccgtgtggctgcattctcttgagccctgggataggcttgtcacccggtgctgcccatgcaacgtgtgcagccctcccaaagcgaccacaaaggaggcgtactgctacgaaaatcctgagatcctggcttcccagcagctgtag

SEQ ID NO: 69538 - DNA, 1800 bp, Artificial Sequence
  derived and/or modified sequence
atgccgagcagtttgcccggttcccaagtaccccatcccactctggatgccgtagacctggtggaaaaaacactgcggaacgaagggactagcagctcggcacccgtgctggaggagggcgatacagacccgtggacactgccgcagctcaaagatacctcgcagccatggaaagagctgagggtagccggcaggctgcgaagggttgcaggctccgttttgaaagcttgcggacttctcggatccctttacttcttcatctgctcactagatgtactgagcagcgccttccagctccttggcagcaaagtagctggcgacattttcaaggacaacgtggttctcagtaacccggtggccgggctggtcatcggtgtgctggtgactgcactagttcagagttctagtacctcttccagcattgttgtctccatggtggccgccaaactgttgaccgtgagagtctcggtccccatcattatgggagtgaacgtgggtacctccattacgtccacgctcgtctccatggcccagagtggggaccgcgatgagtttcagcgagcattctcaggctctgccgtgcacggcatatttaactggttgactgtgctcgtgctgcttccgcttgaatcagcaaccgcactcctggagagactgagtgaactggcgctcggagcagcctccctaactccgcgagctcaggcccccgatatccttaaagtgctgactaagcccctgacccatttgatcgtacaattggacagtgatatgatcatgtccagcgccactgggaacgcaaccaattcatctctcatcaaacactggtgcggaacgacaggacagcctactcaagagaacagtagctgtggcgcatttgggccttgcaccgagaaaaacagcactgcccctgcagaccgtcttccctgcaggcacctctttgctggcactgaacttacagacttggcagtgggttgcattctcttggccggtagcctcctggtgttgtgtggctgcctggtgctcattgtcaaactgctgaatagtgtgctgcggggcagagtggctcaggtggtccgaactgtgataaacgctgacttccccttccctctagggtggcttggggggtacctggctgtgctggccggcgctggcttgacctttgctttacagtcttcttccgttttcaccgctgccgtcgtgcctctcatgggggtcggggtcatttctctcgacagagcctaccccctgttactggggtcaaacattggaactacaacgaccgcgctactcgcagctctcgcctctcctgcagatcgtatgttaagtgcactccaggtcgccctgattcatttcttcttcaatttggcgggcattctcttatggtacctggtgccggcactccggttgcctattcccttggctagacactttggcgtagttactgctcgatatcgctgggtggctggcgtttatctgctcctagggttcctgctgctgcccctggccgccttcgggttgtccctcgcagggggtatggagctggccgcggtcggaggcccactggtgggcctggtgctactggtcattttagtgacggtcctccagagaagacgccctgcctggctcccggtgagattgaggtcttgggcttggttgcctgtttggttgcacagcctggagccctgggacaggctcgtcacacgctgttgcccctgtaacgtgtgttctccgcccaaggctaccactaaagaggcgtattgctacgaaaaccccgaaatcctggcgagtcagcagctttag

SEQ ID NO: 69539 - DNA, 1800 bp, Artificial Sequence
  derived and/or modified sequence
atgcccagcagcctgcccggcagccaggtgccccaccccaccctggatgctgtggacctggtggagaagaccctgagaaatgaaggcaccagcagcagcgcccctgtgctggaggagggggacacagacccctggaccctgccccagctgaaggacaccagccagccctggaaggagctgcgggtggccggccgcctgcggcgggtggccggctctgtgctgaaggcctgtggcctgctgggcagcctgtacttcttcatctgcagcctggatgtgctgagcagcgccttccagctgctgggcagcaaggtggccggggacatcttcaaggacaacgtggtgctgagcaaccctgtggccggcctggtgattggagtgctggtgacagccctggtgcagagcagcagcaccagcagcagcatcgtggtgtccatggtggccgccaagctgctgactgtgcgggtgtctgtgcccatcatcatgggcgtgaatgtgggcaccagcatcaccagcaccctggtgtccatggcccagagcggggacagagatgagttccagagggccttcagcggcagcgctgtgcacggcatcttcaactggctgactgtgctggtgctgctgcccctggagagcgccacagccctgctggagcggctgtctgagctggccctgggcgccgccagcctgaccccccgggcccaggccccagacatcctgaaggtgctgaccaagcccctgacccacctgattgtgcagctggacagcgacatgatcatgagcagcgccactggaaatgccaccaacagcagcctcatcaagcactggtgtggcaccaccggccagcccacccaggagaacagcagctgtggggccttcggcccctgcacagagaagaacagcacagccccagctgaccggctgccctgccgccacctgtttgctggaacagagctgacagacctggccgtgggctgcatcctgctggccggcagcctgctggtgctgtgtggctgcctggtgctgattgtgaagctgctgaacagcgtgctgcggggccgggtggcccaggtggtgaggacagtcatcaatgctgacttccccttccccctgggctggctgggcggctacctggccgtgctggccggggccggcctgacctttgccctgcagagcagctctgtgttcaccgctgctgtggtgcccctgatgggcgtgggcgtcatcagcctggaccgggcctaccccctgctgctgggcagcaacatcggcaccaccaccacagccctgctggccgccctggccagccctgctgacaggatgctgagcgccctgcaggtggccctgatccacttcttcttcaacctggccggcatcctgctgtggtacctggtgcctgccctgcggctgcccatccccctggcccggcactttggagtggtgacagcccgctaccgctgggtggccggcgtgtacctgctgctgggcttcctgctgctgcccctggccgccttcggcctgagcctggccggcggcatggagctggccgctgtgggcggccccctggtgggcctggtgctgctggtgatcctggtgacagtgctgcagaggagaagacctgcctggctgcctgtgcggctgcgctcctgggcctggctgcctgtgtggctgcacagcctggagccctgggaccggctggtgacccgctgctgcccctgcaatgtgtgcagcccccccaaggccaccaccaaggaggcctactgctatgaaaatcctgagatcctggccagccagcagctgtag

SEQ ID NO: 69540 - DNA, 1800 bp, Artificial Sequence
  derived and/or modified sequence
atgcccagcagcctgcccggcagccaggtgccccaccccaccctggatgctgtcgacctggttgaaaaaacgctacgcaatgaggggacatcttcgtctgcccctgtgctcgaagaaggtgataccgatccatggaccttgccacaactgaaggacacttctcagccttggaaagagctccgggtagctgggcggctgagaagagtggcggggtctgtgctaaaagcgtgtgggctgctggggtctctgtactttttcatttgttctctggatgtcttgagcagcgcctttcagctcctgggcagtaaggtagctggggacatttttaaagacaatgtggtactcagcaaccccgtggccggattggtgatcggagttctggtgactgctctggtgcagtcttcatcaactagcagcagcatcgtggttagcatggtggcggccaagttacttactgtgcgcgtctccgtgcctattatcatgggtgtcaatgtcggcacaagcatcactagtacgttagtgagcatggctcaatcgggcgaccgtgacgagttccagcgagctttttcagggtcagcagtgcatggaatctttaattggttgacagtactggtcttgctgccccttgagagcgctaccgctttgcttgaaaggttatcagagctggctctcggtgccgcaagtttaactccaagagcccaggctccagatatcttaaaggtgctgaccaaacccctgacccatctcatagtacagttggacagtgatatgatcatgtcttcagcaacgggaaatgccacaaacagctctctgatcaagcattggtgtggcaccacaggacaacctactcaggagaattcatcatgcggcgccttcggtccctgtaccgagaagaattctaccgcccctgctgatcgcctcccctgccgtcatctgtttgccggcaccgaattaacagatctggccgttggctgcatcttgttggcaggctctctgctcgtcttgtgtggttgtctggtgctgattgtcaagctgttaaactctgtcctgcggggacgtgtggcacaagttgtgcggacagtaataaatgccgatttcccatttcccctgggctggttgggggggtatctggcagtgttggctggtgctggactgacattcgctttacagagctcctccgtattcacagctgccgtggtgcctctgatgggcgtcggtgtcatttccttagaccgcgcttaccccttactattagggtccaatatcggcactacaacaacagcactgcttgccgcactggcctccccagctgaccggatgctaagtgcactccaggtcgctctgatccatttttttttcaacctggctggaatcctgctctggtatcttgtgcctgccttgcggctgcccattcccctagcgcggcattttggggtagttactgccagatataggtgggtggctggagtttatcttctcttgggctttcttctgctgcctctagccgccttcggcctgtccctggccgggggcatggagctcgctgccgtaggcggcccactggtcggactagtcctgctcgtcatactggtcactgtgctccaaaggaggcggcctgcctggctgccagttcggctgaggtcctgggcctggctgccggtgtggctacactccctagaaccttgggacagacttgtgacaagatgttgcccgtgtaatgtttgtagcccccccaaggctacaacaaaggaagcctattgctacgaaaacccagagatcctcgctagccagcagctttag

SEQ ID NO: 69541 - DNA, 1800 bp, Artificial Sequence
  derived and/or modified sequence
atgcccagcagcctgcccggcagccaggtgccccaccccaccctggatgccgtcgacctcgtggagaagactctgaggaatgaagggaccagcagtagtgccccagtgttggaagagggagatacggatccttggacactgccccagctgaaagacacgtcgcaaccctggaaggagttgcgcgtagccggcagactacgcagagtggctggctcagttctaaaagcatgtggattattgggcagcttgtacttcttcatctgctccttggacgtgctgagttctgctttccagctactaggaagcaaagtggccggagatatctttaaagataacgttgtgctctcgaaccccgtcgcaggcctggtgataggcgtcttggttacagcgctggtgcagagttcttcaacaagttcgagcatcgtggtctcaatggttgcggcaaaattgctaaccgtgcgggtttcggttcctatcataatgggggtaaacgtcggcacaagcataaccagcacgctcgtctcaatggcacaaagtggagaccgggacgaatttcagagggctttctcggggtccgcagtgcacggcatttttaactggcttacagtattagtgctgctccctcttgagagtgcaaccgctctgttggaacggctgagcgagcttgctctgggagcagcttcactgactccccgagcccaagctccagatattctcaaggtcctgaccaaacccctcacccaccttatcgtgcagcttgatagcgacatgattatgtccagtgctactggcaatgcgacaaattcatcccttattaaacattggtgtggaactacaggtcagccaacccaggagaactccagttgcggggcctttgggccctgcactgagaaaaattccactgcacccgccgaccgcctcccatgccgtcacctgttcgcaggcactgagcttaccgatctggctgtgggatgtatcctgctggcggggagtctgcttgttctgtgcggatgtttagtgctgatagtcaagttgctgaacagcgtgttgaggggacgggtggctcaggtggttaggaccgttattaacgctgacttccccttcccgctcgggtggctgggaggctacctcgctgtccttgcaggcgccggcctgactttcgctctgcagtcctcatcggtttttacggctgctgtcgtccccctaatgggagtcggggttatctccctggaccgggcataccctttgctgttaggatcaaacattggtacaactacaacagcacttcttgcggccctagcgtcccctgccgaccggatgttgtccgccctccaggtggcgctaattcactttttttttaatctggctggcattctgctctggtacctggtccccgctctgcggctgcccatcccccttgcacgccattttggagtggtcactgccagatatcggtgggttgctggggtctatctgttactcggttttctgctgctccccttagctgctttcgggctctcgctggctggcggaatggaactggcagccgtggggggtccactggtcggcctggtgctgttggttatccttgttaccgtgctccaacgcagaaggccagcttggctccctgttcgccttcgtagttgggcctggcttccagtatggctgcactccctggaaccctgggacaggttagtcacccggtgttgcccctgtaacgtatgcagcccacccaaggcaacgactaaggaagcctactgttatgagaacccggaaattttggctagccagcagctgtag

SEQ ID NO: 69542 - DNA, 1800 bp, Artificial Sequence
  derived and/or modified sequence
atgccatcttccctcccaggctctcaggtaccgcaccctacactcgatgctgtcgacctggtggaaaaaactctgcggaacgagggaacgagctcatcagctcctgtcctggaggagggcgatacagacccatggactctgcctcagctgaaggatactagtcagccatggaaagaactgcgtgtagcaggccgtctcaggagggtagctgggtccgtgctgaaagcctgcggcctgttgggctcattatatttcttcatatgctctctcgacgttttgagctcagcgttccagctgttggggtctaaagtagccggagacatatttaaggataatgtcgtgctgagtaaccctgtggcgggtctggtcatcggcgtcctggtcacagcgctcgtccagagtagcagcactagctccagcattgttgtgagcatggtggcagctaaactgctcactgtccgcgtgtccgtgccgatcattatgggggtcaatgtcggaaccagcataacatctacactggtttccatggctcaatcgggcgaccgggacgaattccagcgcgctttctccggttcagccgtccacggaatattcaactggctcacggtgttagttttgcttcccctggaaagcgccacggcgctgctggaacggctcagcgagctcgctttgggtgctgcgagcctcacaccccgagcacaagccccagacatccttaaggtgctgacgaaacctctaactcacctcattgtgcagttagattctgatatgatcatgtctagcgccacgggaaatgcgactaactcatcgctgattaagcactggtgtggaacaactggccagccaactcaggaaaatagcagctgtggcgctttcggaccctgcactgagaagaattcgactgcacccgcagaccgcctgccctgtcgccacttgttcgcaggaacggaattgactgatctcgcggtggggtgcattctgttggcaggatctctcctggtgctatgtggttgcttagtcctaattgtgaagttgttgaacagtgtccttcggggacgggttgcgcaggtcgtccgcaccgtgatcaacgccgatttcccattcccattgggatggctggggggatatctggcagtgctcgcaggtgcgggtttgacatttgcccttcagagttcatctgtatttacagctgcggtcgtgccgcttatgggagtaggcgttattagcctggacagggcctatcctctgctgctgggtagcaacattggcacgacaactacggctctcctagcagcacttgcatctcctgctgacaggatgctttccgctttgcaagtcgcactgatacatttcttcttcaatctggctggtatcttactgtggtacctcgtgcctgctctgcggcttccaataccattggccaggcattttggcgttgtgacagcccgttaccgctgggtggccggagtgtatctgttgttgggattcttgctgcttccgctggccgcattcggcctttctctggccggaggaatggaacttgcggcagtgggagggccattggtggggttggtcttactagtgatcctcgtgactgtactccagcgcagacgacccgcatggctgccggtgcgtctgcgctcttgggcctggctcccagtttggctgcattccctggaaccatgggacagactggtgacgaggtgttgcccatgtaatgtttgtagcccgcctaaggcaaccaccaaggaggcatactgctatgagaaccccgagatcctggcgtcccagcaactgtag

SEQ ID NO: 69543 - DNA, 1800 bp, Artificial Sequence
  derived and/or modified sequence
atgccttcttccctgcccggatctcaggtgccccatccaactctggacgcagtcgatcttgtggagaagacacttcggaatgaaggtacttcaagctcggctcctgtgcttgaggaaggagataccgacccatggactcttcctcagctaaaagacacttctcagccttggaaggaattaagggtggcagggaggttacgcagggtggccggaagtgtgctgaaagcttgcggattactgggctcactctatttctttatctgctcactcgatgtgctgtcaagtgcatttcagctgttggggagcaaggtggctggtgacattttcaaggataatgttgttctctccaatccagtggccggactggtgattggagtcctggttaccgctctggttcaatcatcatccacctcgtctagtattgtggtttccatggtggcagctaaattactgacagttcgcgtgtccgtaccaatcatcatgggggtgaatgtggggacctctattacctctaccctcgtgtctatggcacagtcgggagaccgcgatgaatttcagcgggctttctccggttccgcagtacatggtatcttcaattggctaaccgtgctggtccttctgccactcgagtctgccacggctctcctagaacggctgtccgagctggccctgggtgcagcctcgctgactcccagagcgcaggctccagatattctgaaagtgctcaccaaaccactcacgcatctgatcgtgcagcttgatagcgatatgatcatgagcagtgcaaccgggaacgctaccaatagctccctgattaagcactggtgcggcaccacagggcagcctacccaggagaatagcagttgcggcgcatttgggccttgtactgaaaaaaatagcactgctcccgcagatagacttccgtgtagacatctctttgccggaacggaattgacagatcttgctgttggatgcatcttactggctggcagcttgctggtgttatgcggctgtctggtattgatcgtaaaactgctgaactccgtgctgcgcggacgtgtcgcgcaagtcgtcagaacagtcatcaatgctgactttccatttcccctgggctggttggggggatacctcgctgtccttgcaggagcaggcctgacctttgcactgcagtcatcttcagtattcactgccgctgtcgttcccctgatgggagtgggagttatttctctggatagagcctaccccctcttactagggtcaaacatcggaaccaccaccacagcgttactcgctgccctagcttctccggctgatagaatgctgtcggcattacaggtcgccctgatacactttttcttcaacctggccggaatactgctttggtatctggtgcctgccctcaggttgccgattccactggcccgacactttggtgtcgtgaccgctagatatagatgggtggcaggtgtgtatctgcttctggggttcttactgctaccacttgccgctttcgggctgagtcttgcaggcggaatggagctcgccgcagtcggtgggccactggttggcttagtgctattggtaatcctggtgaccgtcttacagagacgcaggcctgcctggctcccagttcgccttcgttcctgggcctggctccccgtttggctccatagcctggaaccttgggataggcttgtcacccggtgttgcccctgcaatgtgtgctctcctccaaaggcaacgacgaaagaggcgtattgttacgagaatcccgagatactggccagccagcagctctag

SEQ ID NO: 69544 - DNA, 2124 bp, Artificial Sequence
  derived and/or modified sequence
acacaggtaggagctcctaggaccaggctgaggcccagggacagtgaggccgaggctgggtggcctccaggccaagggcttgggccccatcctgagtctccaggacccaagggcaagagacgccaggcttgggcagcaggagggaggatctagacctgggcctgggtctgtccctgcccgaaatccatgccgagttcccttcccggcagccaggtcccccaccccactctggacgcggttgacctagtggaaaagactctgaggaatgaagggacctccagttctgctccagtcttggaggaaggggacacagacccctggaccctccctcagctgaaggacacaagccagccctggaaagagctccgcgtggccggcaggctgcgccgcgtggccggcagcgtcctcaaggcctgcgggctcctcggcagcctgtacttcttcatctgctctctggacgtcctcagctccgccttccagctgctgggcagcaaagtggccggagacatcttcaaggacaacgtggtgctgtccaaccctgtggctggactggtcattggcgtgctggtcacagccctggtgcagagttccagcacgtcctcctccatcgtggtcagcatggtggctgctaagctgctgactgtccgggtgtctgtgcccatcatcatgggtgtcaacgtaggcacatccatcaccagcaccctggtctcaatggcgcagtcaggggaccgggatgaatttcagagggctttcagcggctcggcggtgcacgggatcttcaactggctcacagtgctggtcctgctgccactggagagcgccacggccctgctggagaggctaagtgagctagccctgggtgccgccagcctgacacccagggcgcaggcgcccgacatcctcaaggtgctgacgaagccgctcacacacctcatcgtgcagttggactccgacatgatcatgagcagtgccacaggcaacgccactaacagcagtctcattaagcactggtgcggcaccacggggcagccgacccaggagaacagcagctgtggcgccttcggcccgtgcacagagaagaacagcacagccccggcggacaggctgccctgccgccacctgtttgcgggcacggagctcacggacctggccgtgggctgcatcctgctggccggctccctgctggtgctctgcggctgcctggtcctcatagtcaagctgctcaactctgtgctgcgcggccgcgtggcccaggtcgtgaggacagtcatcaatgcggacttccccttcccgctgggctggctcggcggctacctggccgtcctcgcgggcgccggcctgaccttcgcactgcagagcagcagcgtcttcacggcggccgtcgtgcccctcatgggggtcggggtgatcagtctggaccgggcgtaccccctcttactgggctccaacatcggcaccactaccacagccctgctggctgccctggccagccccgcagacaggatgctcagcgccctgcaggtcgccctcatccacttcttcttcaacctggccggcatcctgctgtggtacctggtgcctgcactgcggctgcccatcccgctggccaggcacttcggggtggtgaccgcccgttaccgctgggtggctggggtctacctgctgctcggattcctgctgctgcccctggcggccttcgggctctccctggcagggggcatggagctggccgctgtcgggggtcccctggtggggctggtgctcctcgtcatcctggttactgtcctgcagcggcgccggccggcctggctgcctgtccgcctgcgctcctgggcctggctccccgtctggctccattctctggagccctgggaccgcctggtgacccgctgctgcccctgcaacgtctgcagccccccgaaggccaccaccaaagaggcctactgctacgagaaccctgagatcttggcctcccagcagttgtgacgggcagttgctgagcagaccgccccaccctccccggctgggagggctctggagggccctggagggggggtccccgcggcagctgacctccggtcacctgcttccccttctgtgcaaataaaccaggctgttatctgg

SEQ ID NO: 69545 - DNA, 2162 bp, Artificial Sequence
  derived and/or modified sequence
atggagacaaggcctaggggccttggggccaggagggtacccccgtgagggcctgggctcctgggtaaacattaatgggctcagtacccagcaggtcatgtgcgcgatcaggggatctttgacctgcaactgctcccgccccgtgtctcctccctgcaggtgccccctcaccacccacacagcagatctagacctgggcctgggtctgtccctgcccgaaatccatgccgagttcccttcccggcagccaggtcccccaccccactctggacgcggttgacctagtggaaaagactctgaggaatgaagggacctccagttctgctccagtcttggaggaaggggacacagacccctggaccctccctcagctgaaggacacaagccagccctggaaagagctccgcgtggccggcaggctgcgccgcgtggccggcagcgtcctcaaggcctgcgggctcctcggcagcctgtacttcttcatctgctctctggacgtcctcagctccgccttccagctgctgggcagcaaagtggccggagacatcttcaaggacaacgtggtgctgtccaaccctgtggctggactggtcattggcgtgctggtcacagccctggtgcagagttccagcacgtcctcctccatcgtggtcagcatggtggctgctaagctgctgactgtccgggtgtctgtgcccatcatcatgggtgtcaacgtaggcacatccatcaccagcaccctggtctcaatggcgcagtcaggggaccgggatgaatttcagagggctttcagcggctcggcggtgcacgggatcttcaactggctcacagtgctggtcctgctgccactggagagcgccacggccctgctggagaggctaagtgagctagccctgggtgccgccagcctgacacccagggcgcaggcgcccgacatcctcaaggtgctgacgaagccgctcacacacctcatcgtgcagttggactccgacatgatcatgagcagtgccacaggcaacgccactaacagcagtctcattaagcactggtgcggcaccacggggcagccgacccaggagaacagcagctgtggcgccttcggcccgtgcacagagaagaacagcacagccccggcggacaggctgccctgccgccacctgtttgcgggcacggagctcacggacctggccgtgggctgcatcctgctggccggctccctgctggtgctctgcggctgcctggtcctcatagtcaagctgctcaactctgtgctgcgcggccgcgtggcccaggtcgtgaggacagtcatcaatgcggacttccccttcccgctgggctggctcggcggctacctggccgtcctcgcgggcgccggcctgaccttcgcactgcagagcagcagcgtcttcacggcggccgtcgtgcccctcatgggggtcggggtgatcagtctggaccgggcgtaccccctcttactgggctccaacatcggcaccactaccacagccctgctggctgccctggccagccccgcagacaggatgctcagcgccctgcaggtcgccctcatccacttcttcttcaacctggccggcatcctgctgtggtacctggtgcctgcactgcggctgcccatcccgctggccaggcacttcggggtggtgaccgcccgttaccgctgggtggctggggtctacctgctgctcggattcctgctgctgcccctggcggccttcgggctctccctggcagggggcatggagctggccgctgtcgggggtcccctggtggggctggtgctcctcgtcatcctggttactgtcctgcagcggcgccggccggcctggctgcctgtccgcctgcgctcctgggcctggctccccgtctggctccattctctggagccctgggaccgcctggtgacccgctgctgcccctgcaacgtctgcagccccccgaaggccaccaccaaagaggcctactgctacgagaaccctgagatcttggcctcccagcagttgtgacgggcagttgctgagcagaccgccccaccctccccggctgggagggctctggagggccctggagggggggtccccgcggcagctgacctccggtcacctgcttccccttctgtgcaaataaaccaggctgttatctgg

SEQ ID NO: 69546 - DNA, 1800 bp, Artificial Sequence
  derived and/or modified sequence
atgcccagcagcctgcccggcagccaggtgccccaccccaccctggacgccgtggacctggtggagaagaccctgagaaacgagggcaccagcagcagcgcccccgtgctggaggagggcgacaccgacccctggaccctgccccagctgaaggacaccagccagccctggaaggagctgagagtggccggcagactgagaagagtggccggcagcgtgctgaaggcctgcggcctgctgggcagcctgtacttcttcatctgcagcctggacgtgctgagcagcgccttccagctgctgggcagcaaggtggccggcgacatcttcaaggacaacgtggtgctgagcaaccccgtggccggcctggtgatcggcgtgctggtgaccgccctggtgcagagcagcagcaccagcagcagcatcgtggtgagcatggtggccgccaagctgctgaccgtgagagtgagcgtgcccatcatcatgggcgtgaacgtgggcaccagcatcaccagcaccctggtgagcatggcccagagcggcgacagagacgagttccagagagccttcagcggcagcgccgtgcacggcatcttcaactggctgaccgtgctggtgctgctgcccctggagagcgccaccgccctgctggagagactgagcgagctggccctgggcgccgccagcctgacccccagagcccaggcccccgacatcctgaaggtgctgaccaagcccctgacccacctgatcgtgcagctggacagcgacatgatcatgagcagcgccaccggcaacgccaccaacagcagcctgatcaagcactggtgcggcaccaccggccagcccacccaggagaacagcagctgcggcgccttcggcccctgcaccgagaagaacagcaccgcccccgccgacagactgccctgcagacacctgttcgccggcaccgagctgaccgacctggccgtgggctgcatcctgctggccggcagcctgctggtgctgtgcggctgcctggtgctgatcgtgaagctgctgaacagcgtgctgagaggcagagtggcccaggtggtgagaaccgtgatcaacgccgacttccccttccccctgggctggctgggcggctacctggccgtgctggccggcgccggcctgaccttcgccctgcagagcagcagcgtgttcaccgccgccgtggtgcccctgatgggcgtgggcgtgatcagcctggacagagcctaccccctgctgctgggcagcaacatcggcaccaccaccaccgccctgctggccgccctggccagccccgccgacagaatgctgagcgccctgcaggtggccctgatccacttcttcttcaacctggccggcatcctgctgtggtacctggtgcccgccctgagactgcccatccccctggccagacacttcggcgtggtgaccgccagatacagatgggtggccggcgtgtacctgctgctgggcttcctgctgctgcccctggccgccttcggcctgagcctggccggcggcatggagctggccgccgtgggcggccccctggtgggcctggtgctgctggtgatcctggtgaccgtgctgcagagaagaagacccgcctggctgcccgtgagactgagaagctgggcctggctgcccgtgtggctgcacagcctggagccctgggacagactggtgaccagatgctgcccctgcaacgtgtgcagcccccccaaggccaccaccaaggaggcctactgctacgagaaccccgagatcctggccagccagcagctgtag

SEQ ID NO: 69547 - protein, 945 aa, Artificial Sequence
  derived and/or modified sequence
MSERAADDVRGEPRRAAAAAGGAAAAAARQQQQQQQQQQPPPPQPQRQQHPPPPPRRTRPEDGGPGAASTSAAAMATVGERRPLPSPEVMLGQSWNLWVEASKLPGKDGTELDESFKEFGKNREVMGLCREDMPIFGFCPAHDDFYLVVCNDCNQVVKPQAFQSHYERRHSSSSKPPLAVPPTSVFSFFPSLSKSKGGSASGSNRSSSGGVLSASSSSSKLLKSPKEKLQLRGNTRPMHPIQQSRVPHGRIMTPSVKVEKIHPKMDGTLLKSAVGPTCPATVSSLVKPGLNCPSIPKPTLPSPGQILNGKGLPAPPTLEKKPEDNSNNRKFLNKRLSEREFDPDIHCGVIDLDTKKPCTRSLTCKTHSLTQRRAVQGRRKRFDVLLAEHKNKTREKELIRHPDSQQPPQPLRDPHPAPPRTSQEPHQNPHGVIPSESKPFVASKPKPHTPSLPRPPGCPAQQGGSAPIDPPPVHESPHPPLPATEPASRLSSEEGEGDDKEESVEKLDCHYSGHHPQPASFCTFGSRQIGRGYYVFDSRWNRLRCALNLMVEKHLNAQLWKKIPPVPSTTSPISTRIPHRTNSVPTSQCGVSYLAAATVSTSPVLLSSTCISPNSKSVPAHGTTLNAQPAASGAMDPVCSMQSRQVSSSSSSPSTPSGLSSVPSSPMSRKPQKLKSSKSLRPKESSGNSTNCQNASSSTSGGSGKKRKNSSPLLVHSSSSSSSSSSSSHSMESFRKNCVAHSGPPYPSTVTSSHSIGLNCVTNKANAVNVRHDQSGRGPPTGSPAESIKRMSVMVNSSDSTLSLGPFIHQSNELPVNSHGSFSHSHTPLDKLIGKKRKCSPSSSSINNSSSKPTKVAKVPAVNNVHMKHTGTIPGAQGLMNSSLLHQDISSPCLRTGISATSPQSPDLKSKGTSLTAENSTGRNNADTFEDKLHLHSALWTPRCL

SEQ ID NO: 69548 - protein, 26 aa, Artificial Sequence
  derived and/or modified sequence
MSERAADDVRGEPRRAAAAAGGAAAA

SEQ ID NO: 69549 - protein, 130 aa, Artificial Sequence
  derived and/or modified sequence
MSERAADDVRGEPRRAAAAAGGAAAAAARQQQQQQQQQQPPPPQPQRQQHPPPPPRRTRPEDGGPGAASTSAAAMATVGERRPLPSPEVMLGQSWNLWVEASKLPGKDGDRIGRKFQGVWNREVMGLCRE

SEQ ID NO: 69550 - DNA, 2838 bp, Artificial Sequence
  derived and/or modified sequence
atgagcgagcgagcagctgacgatgtcaggggcgagcccagaagagcggcagccgcggccggaggtgctgccgctgcagctgcacgacaacagcagcagcaacaacagcagcagcagccaccacctccccagccccagcggcaacaacaccccccaccaccaccacggcggacccggcccgaagacgggggaccaggggctgccagcacaagtgctgccgctatggcgacagtgggcgaaagacggcccttaccctcgccggaggtgatgttggggcagtcatggaatctgtgggtggaggccagtaagctgcccggcaaggacggcaccgaactggatgagtcttttaaggagttcggcaaaaacagggaggtcatgggcctgtgtagggaagacatgcccatatttgggttctgtccggctcatgacgatttttacttggtggtgtgcaatgattgcaaccaggtagtaaagccccaggcttttcagagtcactatgaacgtcggcacagtagtagttcgaaaccgccactcgccgtaccacctacctctgttttcagtttcttccccagcctcagcaagagcaaaggagggagcgccagcggttcgaaccggtccagcagcgggggggtcttgtcggcgagttcatcttcaagtaaactgcttaaaagtcctaaagaaaagctgcagttgcgaggcaataccagacccatgcatccgatccaacagagcagagttccgcacggtcgaatcatgaccccttctgtgaaggtggagaagatacatcctaaaatggacgggaccctgctcaaaagcgcggtgggtccaacttgcccagctaccgtgtcttccttagtaaaacctggtcttaactgcccttccataccgaagcctaccctgccctccccaggacagattctgaacggaaaagggttacccgccccgcctactctggaaaaaaagccagaggacaactccaacaataggaaattcctgaataaaagactgagtgagcgcgaattcgatccagacatccattgtggagtcatcgacttagataccaagaagccatgcacaaggtccttaacgtgtaaaacccatagccttacccagcggagggccgtgcagggtcgccgaaagagatttgatgtgttgctagccgagcataagaataaaacccgcgagaaggaactgatcaggcacccagatagccagcagcccccacaacccctccgagacccccacccggctcccccgcgaacaagccaggagccacatcagaacccccacggcgtgatccctagtgagagcaagcccttcgttgcaagcaagcccaagccccatactccatctctcccaaggccacctgggtgccccgcacagcagggagggtccgcacccattgatccaccgcctgttcatgaatcaccgcacccgccactgcctgccacagaacccgccagcaggctatcctctgaggagggagagggagacgataaagaggagtccgtagagaagttggattgtcattacagcgggcatcacccacagccggcttccttctgtaccttcggaagtcggcagataggtcggggttactatgtcttcgattctcgttggaaccgccttcgctgtgcgctaaatcttatggtcgaaaaacatttgaacgctcagctatggaagaaaatacctcccgtgcctagcactacctcaccaatttccactaggatcccacatagaacaaactcggtgcctacttcccagtgcggggtgtcatacctcgcagcggccaccgtgtcaacctctcctgtactgctgtcatccacatgtataagccccaatagtaaatctgtgccagcccatggcaccactctcaacgcccagcctgccgcaagcggcgccatggatccagtctgctcgatgcagtctaggcaggtcagctcctcttcttcttcgccttcgaccccctctggcctcagctcagtcccaagttcgccgatgtcccgtaaaccccagaaactgaaatctagtaaaagcttgaggcctaaggaatctagcggaaacagcacaaattgtcagaacgcttcttctagcacctcgggcggtagcggaaagaagcggaagaactcaagccccctgttggttcactcatcatccagctcatcttcatcctcttccagtagtcatagtatggagagcttcagaaaaaattgcgtggctcattccggcccaccttatccatcgaccgtgacctccagccactcaatcggcctaaactgtgtgaccaacaaggctaatgcggtcaatgtgcgccacgaccagtccggccggggccctcctaccgggtcgcccgccgagtcgattaagaggatgtctgtcatggtgaactcttctgatagtaccttaagcttaggacctttcatccatcaatcgaacgagttgccagtgaattctcacggatccttttctcactctcacacaccactggacaaactcattggcaagaagcgcaagtgttctccaagctcctcaagtatcaataattcctcctcaaagcccactaaggtggcaaaagttcctgcggtgaataatgtccacatgaagcacacaggcacaatcccaggcgcccagggactcatgaacagttccttgttgcaccaggatattagcagcccatgcctgcgcactggcatatccgctacgtctccgcaaagccccgatctgaagtccaaagggacttctcttaccgccgagaacagcacaggaaggaataacgcggacacatttgaggacaagttacatctccactcagccctgtggactcccaggtgcctgtag

SEQ ID NO: 69551 - DNA, 81 bp, Artificial Sequence
  derived and/or modified sequence
atgtccgagagggccgctgatgacgtgaggggtgagccaagacgcgccgcggccgccgctggaggggcagccgctgcctag

SEQ ID NO: 69552 - DNA, 2838 bp, Artificial Sequence
  derived and/or modified sequence
atgagcgaacgagccgctgacgatgtgcggggagaaccgcggcgggctgcggcagctgccggcggcgccgcagcggctgcagcacgtcagcaacagcaacagcagcagcagcagcagccaccaccacctcagcctcagcgccaacagcatccaccacccccaccgcgccgcacaaggcctgaggacgggggacccggagccgcctcaacatctgctgcggccatggccaccgtcggcgaacgccgtccattgcccagcccagaggtgatgctaggccaatcatggaatctgtgggtcgaggcgagtaagctgccgggcaaagatggcaccgaactggacgagtccttcaaagagtttggaaagaaccgggaggtcatgggcctttgtagagaggacatgcctatattcggcttctgcccagcccacgacgatttctacttggtggtgtgcaacgattgcaaccaggtagttaaaccacaggctttccaatctcattacgagcggagacattcttcaagttctaagccaccactcgcagtccctcctaccagcgtgttcagctttttcccttccttgtcgaaaagtaagggaggaagcgcgtcaggttcaaatcgatcgtccagtggcggagtgctgtctgcatcatcaagctcttcgaaactcctcaagagccctaaggagaaactacaactaagagggaatacacggccgatgcatccgatccagcaatccagggtaccacatggccgcattatgaccccgtcagtcaaggtggagaaaatacacccgaaaatggacggcacactcctgaaatcggcggttgggcctacttgccctgctaccgtatcatccctggttaaacctggcctgaactgccctagtattcccaaaccaacactgcctagtcctggacaaattctgaacggcaaggggctgccagccccacccacactggagaagaagcctgaagacaacagtaataatcgcaaattcctgaacaagcgtctctccgagcgagagtttgatccagatatccactgtggggttatcgatctcgatacgaagaaaccatgcacccgtagcctgacctgtaaaactcattcgctaacccagagacgcgcggttcagggaagacgaaagcggtttgatgtcctacttgcagagcacaagaataaaacacgggaaaaggaattgatcagacatccagattcgcagcagcctccccagccactgagggaccctcatccggcaccaccacgcaccagccaggagccacatcagaatccacacggtgtaattccgagcgaaagcaagcctttcgtcgcatccaaacctaagccacacactccatcgctgccaagacctccgggctgccccgctcagcagggaggaagtgcccccatcgatcctcctccggtgcacgagagcccccacccccccctgccggccaccgaacccgcgagtcgattgtcatctgaggagggggagggcgatgacaaggaggagtcagtcgagaaactggactgtcattacagtggtcaccacccgcagccggccagcttttgcactttcggaagccggcagattgggagaggttattacgttttcgacagccgctggaatcgtctaagatgcgccttaaatctcatggtggaaaagcatctgaatgcgcagctgtggaagaaaatcccccccgtaccttctacaacatcaccaatcagcacaagaatccctcatcggacgaactccgtgccaacgtcacagtgtggggttagctatctcgccgcggcaactgtgtctacatcccccgtgctcttaagtagcacctgtatctcccctaacagtaaaagcgtgccagcacatggtacaactctaaacgcccagcccgccgcatcaggagccatggaccccgtatgctccatgcaaagtcgccaggtcagctcctcgagctcaagcccttcaaccccctccggcctgagcagcgttccaagttccccaatgtcccggaaaccccagaagttaaaatcttcgaaaagcctccgccctaaggagtcaagcgggaatagcactaattgccagaacgcctccagttcgacttctggcgggtctggtaagaagcgcaagaactcctctccactactggtacattcctcaagttcatcgtcaagcagctccagttcttcccattccatggagagcttcaggaaaaattgcgtcgctcactcaggccccccttatccatccactgtcacaagcagccatagcattggcttgaactgtgtgaccaataaagcaaatgcagtgaacgttcgccatgaccagagtggaaggggcccgccgactggcagtcctgctgagtcgatcaaacgaatgagcgtcatggtgaactcctcagactccactttgagcctaggtcccttcatccaccagagcaatgagctgcccgttaacagtcatggttctttttcccattcccacactccccttgataagcttatcggcaaaaagcgcaagtgctccccatcatcatcaagtatcaacaactccagctctaagccgacgaaagtcgctaaagtgccagccgtcaataatgtacacatgaagcataccggcactatcccaggcgcccagggcctcatgaactcctcattgctccatcaggatatttcctcaccctgcctccgaacaggaatttccgctactagtccacaatcccccgacttaaaaagcaaaggcacaagcttgacagccgagaattcaacagggagaaataatgccgataccttcgaagacaagctgcacctccattcagcactgtggaccccacgctgtctgtag

SEQ ID NO: 69553 - DNA, 2838 bp, Artificial Sequence
  derived and/or modified sequence
atgtctgaaagagctgctgatgatgtgcggggggagccccggcgggctgctgctgctgctgggggcgctgctgctgctgctgcccggcagcagcagcagcagcagcagcagcagcagcccccaccaccccagccccagaggcagcagcaccccccacctccacccaggaggaccaggccagaagatggcggccctggagctgccagcaccagcgctgctgccatggccaccgtgggggagcggcggcccctgcccagccctgaggtgatgctgggccagagctggaacctgtgggtggaggccagcaagctgcccgggaaggatggaacagagctggatgagagcttcaaggagtttgggaagaaccgggaggtgatgggcctgtgccgggaggacatgcccatcttcggcttctgcccagcccatgatgacttctacctggtggtgtgcaatgactgcaaccaggtggtgaagccccaggccttccagagccactatgaaagaagacacagcagcagcagcaagccacccctggccgtgccccccaccagcgtcttctccttcttccccagcctgagcaagagcaagggcggcagcgccagcggcagcaacagaagcagcagcggcggcgtgctgagcgccagcagcagcagcagcaagctgctgaagagccccaaggagaagctgcagctgcggggcaacacccggcccatgcaccccatccagcagagccgggtgccccacggccgcatcatgaccccatctgtgaaggtggagaagatccaccccaagatggatggcaccctgctgaagtctgctgtgggccccacctgcccagccaccgtgagcagcctggtgaagccaggcctgaactgccccagcatccccaagcccaccctgcccagccctggccagatcctgaatggcaagggcctgcctgccccacccaccctggagaagaagccagaggacaacagcaacaacaggaagttcctgaacaagaggctgtctgagcgggagtttgatcctgacatccactgtggggtcatcgacctggacaccaagaagccctgcaccaggagcctgacctgcaagacccacagcctgacccagaggagagctgtgcagggccgcaggaagagatttgatgtgctgctggccgagcacaagaacaagacccgggagaaggagctgatccgccacccagacagccagcagcccccccagcccctgcgggacccccacccagccccacccaggaccagccaggagccccaccagaacccccacggcgtcatccccagcgagagcaagccctttgtggccagcaagcccaagccccacacccccagcctgcccaggcctcctggctgcccagcccagcagggcggcagcgcccccatcgaccccccacctgtgcatgagagcccccacccccccctgcctgccacagagcccgccagccggctgagcagcgaggagggggagggagatgacaaggaggagagcgtggagaagctggactgccactacagcggccaccacccccagcctgccagcttctgcaccttcggcagccggcagatcggccggggctactacgtgtttgacagccgctggaaccggctgcgctgtgccctgaacctgatggtggagaagcacctgaatgcccagctgtggaagaagatcccccctgtgcccagcaccaccagccccatcagcacccgcatcccccacaggaccaacagcgtgcccaccagccagtgtggggtgtcctacctggccgccgccaccgtgtccaccagccctgtgctgctgagcagcacctgcatcagccccaacagcaagtctgtgcctgcccacggcaccaccctgaatgcccagcctgctgccagcggggccatggaccctgtgtgcagcatgcagagccggcaggtgagcagcagcagcagcagccccagcaccccatctggcctgagctctgtgcccagcagccccatgagcaggaagccccagaagctgaagagcagcaagagcctgcggcccaaggagagcagcggcaacagcaccaactgccagaatgccagcagcagcaccagcggcggcagcggcaagaagaggaagaacagcagccccctgctggtgcacagcagcagcagcagcagcagcagcagcagcagcagccacagcatggagagcttcaggaagaactgtgtggcccacagcggccccccctaccccagcacagtgaccagcagccacagcatcggcctgaactgtgtgaccaacaaggccaatgctgtgaatgtgagacatgaccagagcggccggggccccccaacaggcagccctgctgagagcatcaagaggatgtctgtgatggtgaacagcagtgacagcaccctgagcctgggccccttcatccaccagagcaatgagctgcctgtgaacagccacggcagcttcagccacagccacacccccctggacaagctgattggcaagaagaggaagtgcagccccagcagcagcagcatcaacaacagcagcagcaagcccaccaaggtggccaaggtgcctgctgtgaacaacgtgcacatgaagcacacaggcaccatccctggggcccagggcctgatgaacagcagcctgctgcaccaggacatcagcagcccctgcctgaggacaggcatcagcgccaccagcccccagagcccagacctgaagagcaagggcaccagcctgacagctgagaacagcactggaagaaataatgctgacacctttgaggacaagctgcacctgcacagcgccctgtggaccccccgctgcctgtag

SEQ ID NO: 69554 - DNA, 81 bp, Artificial Sequence
  derived and/or modified sequence
atgtctgaaagagctgctgatgatgtgcggggggagccccggcgggctgctgctgctgctgggggcgctgctgctgcctag

SEQ ID NO: 69555 - DNA, 2838 bp, Artificial Sequence
  derived and/or modified sequence
atgagcgagcgggccgccgacgacgtgcggggcgagccccggcgggcagctgccgctgcaggcggcgccgcagcagccgccgccaggcagcagcagcagcagcaacaacagcaacagccccccccgccccagccccaaaggcagcagcatcctccccccccaccccgcagaacaaggcccgaggacggtggtcccggagctgcaagtacttctgccgctgcaatggcaacagtaggcgaacgccgtcctctaccaagcccagaggtaatgctcgggcagtcatggaatctgtgggtcgaggctagtaagttacccggcaaggacgggaccgaattggatgaatccttcaaggagtttggaaaaaatagagaggtgatgggactttgccgagaagacatgcctatatttgggttctgtccagctcatgatgatttctatcttgtggtgtgcaacgattgcaaccaggtcgtgaagcctcaagcgtttcagagccactatgagagaagacattcatctagctccaagccccccctggccgttccacccacgagtgttttctcattcttcccctcactgagtaagtcaaaggggggctccgcctccggctcgaatagatcctcctctggaggagtgctgtcagcctcctcctcaagcagcaagttgttgaagtcccctaaagaaaagttacagcttcgggggaatactaggcccatgcaccccatccagcagagccgtgttccacacgggaggatcatgactccctccgttaaggtagaaaaaatccatcccaagatggacggaaccttgctgaagtccgccgttgggcctacctgccctgccaccgttagctcattagtgaaacctgggctcaactgtcctagtatccccaagcctactctccctagccccgggcagatcttgaatggcaaaggtcttcccgcaccaccgacattagagaagaaacctgaggataactctaacaatagaaagtttttaaacaagcgcctaagcgagcgagagttcgatcctgatatccattgtggggtaattgatctagatacaaaaaagccatgcactcgctcactgacatgtaaaactcactctctcacacaaagaagagcagtacaggggagaagaaagcggttcgacgtgctgctcgccgaacacaaaaacaagacgcgggagaaggagttgattcgccatccagacagccaacagcctccacagcccctaagagacccccaccccgccccacccagaacgtctcaagagccccatcaaaacccgcacggcgtgatcccttccgagtcaaagcctttcgtggcctcaaagcctaaaccacacacaccttctctcccacgaccgccaggctgtccagctcagcagggcggctcagctccaattgatcctccacctgtacatgagtccccccaccctccactgcccgcgacagaaccagctagccgcctatcctccgaggagggtgagggggacgataaagaggagtcagtagagaagctcgattgccactactcaggtcatcatcctcaaccagcttctttctgcaccttcggatcacggcagatcgggagaggatactatgtgttcgattccaggtggaaccgccttcgctgtgctctgaatctcatggtcgagaaacacctcaacgcccagctatggaagaaaattcctccagtcccctctactacttcacccatctcaactagaatcccccaccgcactaactccgtaccaacttcacaatgtggggttagctatctggcagctgctacagtgagtacctcccccgtgctattgtccagtacttgcatcagtcccaattccaaatccgtgcccgcacatggtactacgttaaatgctcagcccgccgcctccggagctatggatcccgtatgcagcatgcaaagcagacaggtgagcagcagctcaagctcaccaagcacgccatcaggcctgagcagcgtaccttcaagtcctatgtccagaaagcctcagaagctcaaatcctcaaaaagcctgagacccaaggagtcgagtggaaacagcaccaattgccaaaatgctagctcatccacgagcggagggtctggaaaaaaacggaaaaactcatcacccctgctcgtgcattcgtcctcctcatcatctagctcatcgtcaagctctcactcaatggagagcttcaggaaaaattgtgtggctcatagcggccccccatacccctctactgtgacctctagccactccattgggctgaactgcgtcacaaataaggctaacgccgtaaatgtacgccatgatcagtccgggcgagggcctcctaccggaagcccggctgaatcaattaagcggatgtcagtaatggtgaacagtagtgattccaccctgagcttgggaccctttattcatcagtccaacgagctgcccgtcaactcacacggctcatttagccactcccacaccccgctcgacaaactcatcggaaaaaagaggaagtgctcaccaagtagcagttccattaacaattcctccagcaagccaactaaggtagctaaggtgccagccgttaacaatgtacatatgaaacatacaggcacaatccccggtgcacagggcctgatgaattcgagtctgctgcaccaggacattagttccccatgtctgcgcaccggcatttcagcgaccagcccacagagtcctgacctgaaatccaagggtacctccctgaccgcggagaatagcaccggcaggaataatgccgatacctttgaagataaactgcaccttcatagtgcactgtggactccccgctgtctttag

SEQ ID NO: 69556 - DNA, 81 bp, Artificial Sequence
  derived and/or modified sequence
atgagcgagcgggccgccgacgacgtgcggggcgagccccggcgggcagcggcagcggctggaggggccgccgcggcttag

SEQ ID NO: 69557 - DNA, 2838 bp, Artificial Sequence
  derived and/or modified sequence
atgagcgagcgggccgccgacgacgtgcggggcgagccccggcgggccgctgccgcagccggcggggccgctgccgctgctgctcgacagcagcagcagcagcagcaacagcaacagcccccacccccccagccacagcggcagcagcatccacccccacccccaaggaggacacggcctgaggatggaggacccggggccgcgtccaccagtgcggcggctatggccaccgttggagagaggagaccactgccaagccctgaggtgatgctgggtcagagctggaacctgtgggtcgaagccagcaaactccccggaaaggacgggacagaacttgacgaatcttttaaagagtttggaaaaaatagggaggtcatgggtttatgccgcgaggatatgccaatattcggattctgtcccgcacacgacgatttttacctggtggtatgcaacgactgcaaccaggtcgtaaaaccgcaggctttccaaagccattatgaaaggaggcactcttcttctagcaaaccgcctctggctgtcccgccaacctccgtgttctctttttttccttcactcagcaagtctaagggcggtagcgcatcaggatctaacaggtcatcttccgggggtgtgctcagcgcctcctcaagcagctcaaagttgctgaagtctcctaaagagaagttacagttgcgcggaaatacacgtcccatgcaccctatccaacagtctcgagtcccgcatggaagaatcatgactccttctgtgaaagtggaaaaaattcatcctaagatggatgggactctgcttaagagcgccgtgggaccaacttgcccagccaccgtgtccagcttagtaaagcccggtctgaactgccccagtatccctaaacctacactccctagccctggccagattctgaacggcaaggggctccctgcacccccaaccttagagaagaagccggaggataatagcaacaaccggaaatttctgaacaaacgcctgtccgaacgagagttcgaccctgatatacactgtggggttattgacctagatacaaagaaaccctgtacccggtccctgacatgtaagacccattccttgactcagcgccgtgctgtgcagggccggcgaaaacgcttcgacgtccttctggccgagcataagaataaaacgagagaaaaagagctgattagacaccctgattcccagcagccaccccagcctctgagagatcctcatcccgcccctcctcgaactagccaggaaccccaccagaacccccacggcgtgatcccgtctgaaagcaagccattcgtggcttccaaaccaaagccccataccccgtccctgcctagacctccaggttgtcccgcccaacaggggggctcagcgcccatcgatccaccgccagtccatgagagccctcatccacccttaccggccactgagcccgcatcccgcctcagttcagaagagggggaaggcgacgacaaagaagagtcggtggagaaactcgactgccactattctgggcatcatccacaacccgcctccttttgcacgttcggctccagacagattggccgggggtactacgtgttcgacagtaggtggaaccgtctcagatgcgccctgaacttgatggtggagaaacacctgaatgcccaactctggaaaaaaatacccccggtacctagtacaaccagccctattagcacgaggatccctcatagaaccaactctgttcccacctcacaatgcggcgtgtcctacctggcagctgcaacagtgtcaacctctccagtgttgctgtcatctacttgcatcagtcctaacagcaagagtgtccctgcccacggaaccacgctcaacgcgcagcctgctgccagcggagccatggaccccgtgtgttccatgcagagtagacaggtctcctcatcctccagttccccatcaaccccaagtgggctgagtagtgtacctagtagccccatgtcgagaaaaccccagaagcttaagtcttcaaaatccctacgacccaaagagagctccggtaactctacgaactgtcaaaacgctagtagttccacatcaggcgggtcagggaagaagcgtaaaaacagctccccactgttagtgcactccagctctagtagctcctcctcatcctcttcctcccacagtatggagtctttccgtaaaaactgcgtggcccactccggcccgccataccctagtaccgtgaccagttcacactcaatcggcttaaattgtgtcactaacaaagcgaacgcagttaatgtgcggcacgatcaatccgggcggggacctcctaccggcagtccagcagagtcaatcaaacggatgagtgtaatggttaatagtagtgactctaccctgtctcttggtcctttcattcatcagtccaacgaacttccagtgaacagccacggctcattctcccactctcacaccccccttgataagttgattgggaagaaacggaagtgcagcccatcttcatcatccattaataactcctcctctaagcctactaaggtggctaaggtgccggctgttaacaacgtgcatatgaagcacacaggtactatcccaggggcacaggggctcatgaatagttccctcctgcatcaagatatcagcagtccctgcctccggacgggaatctccgcaacttcaccgcaatccccagatctgaagagtaagggcacctcactgacggctgagaatagcactggaaggaacaacgccgatactttcgaggacaagcttcatttgcattcggctttatggactccaaggtgcctgtag

SEQ ID NO: 69558 - DNA, 2838 bp, Artificial Sequence
  derived and/or modified sequence
atgtctgagagagcagccgacgacgtccggggtgaacctcgaagggccgctgccgcagcgggtggcgctgctgccgcagcggcacgccagcagcaacagcagcagcaacaacagcaacccccacccccacagccacagagacaacagcatccacccccacctcctcggaggactagacccgaggacgggggtccaggagctgcatccactagcgctgccgcaatggccacagtaggcgagagacggcctcttccctcaccggaagttatgcttggtcagtcttggaacctctgggtagaagcgtctaagctgccgggtaaggacggaactgagttagacgagtctttcaaagaatttgggaaaaatcgagaggtcatggggttgtgccgcgaagatatgcctatctttggattttgccccgcacatgacgacttttatcttgttgtgtgtaacgactgtaatcaggtggtcaaaccacaggcattccaaagccactatgagagacgccactcctcttccagtaagcctccacttgctgttcctcctacctccgtgttcagtttttttccctccttgtccaagtccaaaggtggctcggcctccggtagcaacagaagtagtagcggcggtgtgctgtccgcaagctcttcctccagtaagctgcttaagagcccaaaggagaaacttcagctaagggggaacactcggccaatgcaccccattcagcagtccagagtaccacacggccgaataatgacgccatctgtcaaggtagagaagatacaccccaagatggacggcacactgttaaaatcagcagtgggcccaacgtgcccagctaccgtcagctcacttgtcaagcccggactaaactgccccagtatacccaagcctacgctgccttctcctggccagatcttaaatgggaagggactacctgctcccccaacacttgaaaagaaaccagaagacaacagtaacaatagaaagttcctgaacaaacgattgagtgaaagggagtttgatcctgacattcactgtggagttatcgacctcgacaccaagaagccctgtactcggtccctgacctgtaaaacccattccctaacccaaaggcgggcagtccagggtagacgaaagcggttcgacgtgctccttgccgagcacaagaacaagactcgggagaaagagctgatacgacacccagactcccaacaacctccccagcccttgcgtgacccacaccccgctccacctcggaccagtcaggagcctcatcagaaccctcatggagtgataccgagtgaatctaaacccttcgtggcctcaaaacctaaaccgcacacacccagcttgccacgcccaccaggctgtccagctcagcaaggagggtccgcccctattgatccccctccagtgcacgagtccccccatcctccccttccagccactgaacctgcttctcgactgtcttctgaggagggggagggagatgataaagaggagtccgtggaaaagttggactgtcattactccggccatcaccctcagcccgcatcattttgtaccttcggctccagacagattgggagaggatactatgttttcgatagccgatggaatcgcctgaggtgcgctcttaatctgatggttgaaaaacacctgaacgcccagctttggaaaaagattccaccagtgcctagcactacctctcctattagcacaagaatcccccacagaacaaactccgtgcctaccagccagtgcggagttagctaccttgccgctgccaccgtcagtacgtcccctgtgctgctcagctcaacttgcatcagccccaattctaagagtgtgcctgcccatggcactaccctgaacgcgcagcctgcagctagcggggcaatggatccagtgtgttctatgcagtctcgccaagttagctccagttccagttccccctcaacacctagcggtctgtcaagtgtaccgagctcgccaatgagtagaaagccacagaaattgaaatcatctaaatcactgcgacctaaggaaagttccggtaattcaacaaactgccagaacgcgtcttcgtccaccagcgggggtagtgggaagaaacggaagaactctagtccactcttggtccatagcagctcaagctccagttcatctagttcctccagccactctatggagtctttccggaaaaactgtgtggctcattcaggacctccatacccatctacggtgacaagcagtcacagcattggtctgaattgcgttaccaataaagcgaacgcggtaaacgtgcggcacgaccagtcaggaaggggaccacccaccggcagccctgccgagagcatcaagcgaatgtcagtcatggtgaattccagcgatagcactttatccctcggcccattcattcatcaaagcaacgagcttcccgtgaacagccatgggtcattctctcattcacacaccccattggataagctgatcgggaagaagcggaagtgtagcccatcgagctcgtccattaacaatagttcttccaagcccacaaaggtcgctaaagtccccgctgtgaacaatgtgcacatgaagcatactggcactatcccgggagcacagggcttgatgaactcgagtctcctgcaccaggatatctcgtcaccctgcctgcgcactggaatatcagctaccagcccacagtctcctgatcttaaatctaaaggaacgtctctcactgccgagaatagtaccggacgaaataatgccgatacttttgaagacaaactgcatctgcattcagccctgtggaccccaaggtgtctttag

SEQ ID NO: 69559 - DNA, 81 bp, Artificial Sequence
  derived and/or modified sequence
atgtcagagagggccgctgatgacgtgcgcggagagcccaggagagctgcagccgctgctgggggtgcagctgctgcatag

SEQ ID NO: 69560 - DNA, 2838 bp, Artificial Sequence
  derived and/or modified sequence
atgtcagagagagcagctgatgacgtacgcggtgagcccaggcgcgcagcagctgcggcaggaggggcagctgcagcagcggctagacaacagcaacagcagcaacagcagcagcagccgcctcccccacagccccagcgtcagcaacaccccccacccccaccgagacgtaccaggccagaggatgggggaccaggcgcagcgtctacatccgctgcagctatggcaactgtaggagaacggagacctttgccttctccagaggtgatgctggggcagtcttggaatttgtgggtcgaagcatccaaactccctggcaaggatggcaccgagttagacgaatctttcaaagagttcgggaagaatcgcgaggtaatggggctctgccgggaagacatgcccatcttcggcttttgtcctgctcacgacgacttctatctcgtggtttgcaacgactgtaatcaggtcgttaagccccaggctttccagagccactatgagcgcaggcacagcagctcgtctaaacctccactcgccgtgccgcctacgagcgtattctccttcttcccaagtctttccaagtctaagggcggtagcgccagcggctctaaccgctccagctccggcggtgtgctaagtgcgtcttcgtcctcgtccaaactgttaaaaagccccaaggaaaaactccagttacgtgggaacacaagacccatgcatccaattcagcagtcccgcgtgccacatggtcggattatgaccccaagcgtgaaagtcgaaaaaatccacccgaaaatggatgggacactactgaagtcagccgtcggtcctacatgtccggctacagtgtcctcactggtgaaacctggtctgaattgcccctccatcccaaaaccaactcttccatccccagggcaaatcctgaatggaaaaggcctgcctgcaccccctactctagagaagaaaccagaagataattcgaacaatcggaaattcctgaataaacgactcagcgagcgggaatttgatcctgatatccattgtggcgttatagatctggacactaagaagccctgcacaagaagcctcacatgtaaaacccattcccttactcaacgaagagccgtccagggacggagaaagagatttgatgtgctcctcgcagagcacaagaacaaaacaagggagaaagagctgatccggcatcccgattcccagcagcctccccagccgttgagggacccccaccctgcgcctccacgcacttctcaagaaccacatcagaatccacacggagtcatcccttccgaatcgaaaccttttgttgcttcgaagcccaagccccacactccatcactgcctcggcctccaggatgccccgcacagcagggtgggagtgctccaattgaccctccccctgttcacgaatcaccccatcctcccctaccggctaccgagcccgcttctagattatcctctgaggaaggggagggggatgacaaagaggaatccgtagaaaaactcgattgtcattattccggccaccacccacagcccgcatccttttgcacctttgggtctcgacagatcggaaggggatactacgtcttcgattcaagatggaaccgtctgagatgtgctctgaatctgatggtggagaaacacctcaatgctcaactgtggaaaaaaattccacctgtcccatcgacaacttctcctatcagtacaagaatcccacaccgtacaaacagcgtgccgacttcccaatgtggcgtgtcatatttggccgcagcaactgtgtctacttcccctgtcctgctcagttcaacctgtatctcacccaattctaagtccgtaccagcccatggaactacattgaatgcgcagccagccgctagcggtgccatggaccctgtgtgctctatgcaaagtagacaggtgtccagctcctctagttcaccgtcaactccgagcggcttgtcaagcgtgcccagctcaccgatgagccgtaagcctcaaaagttaaagtcctcaaagagcctcaggccgaaggaatcgtctggaaacagtactaactgccagaatgcgtcatcaagtaccagcggcggatccgggaagaaacggaagaactccagtcctttgctggtgcatagctcctcaagctcgagcagtagctcatctagcagccacagcatggagtccttcaggaagaattgtgtggctcatagtggacccccataccccagtactgtaacgagctcacactctatcggcttgaattgtgtgacaaataaagccaatgctgtcaatgtgcggcatgaccaatccgggagaggacctcccacagggagtcctgccgagagcattaaacgcatgtcagttatggtcaactcctcagatagtacccttagcctgggaccattcatacaccagtccaatgagctacctgtgaattctcatggaagtttcagtcattcccataccccactggataaactgatcggcaaaaagcgtaagtgtagcccttcatcttccagcatcaacaattcaagcagcaagcccaccaaggtggcgaaggtgcccgctgtgaataacgttcacatgaaacatacaggcacaattcccggtgctcagggcttaatgaacagctcacttttgcatcaggacatttcatccccatgtcttagaacgggtatcagcgccactagtccccagtcaccagacctcaagtccaaaggcactagcctgaccgccgaaaactcaaccgggaggaataacgccgacacatttgaggacaagctgcacctccatagcgcactgtggacgccacgatgtctttag

SEQ ID NO: 69561 - DNA, 7285 bp, Artificial Sequence
  derived and/or modified sequence
gaaaaagggtgaaagagaaacttggcgacctcccggaggagttcgcgaagcgaccaggagcgtgttgccatcgtcctcacccggcacccaattccaccacagagtcgggatttcgtcggtgatcgtgatggggtgcttttatttttctctttgattttcaaaaaatgtctatgtgactgtccctatcttaaggggaagttgaaagtgggggcgggggtgctcaatgagaaacgttgccttgtgtgtagttgtttggagcacactgcaaattatattggcatctctttccaaaagtcactttgattcaacttcgatagctttctcgtaaatggcacgtttaggtggtgagaggtggatgaggaaacaggcaccagtgcagctgatttgacctccagtgggatagatacgattagcaccaggatcgtgtctcattttgaacccagatctgaacagaattaagacgaacgagctttcacaattgcagcagatgaagatccattggtaaattgatcaggatttttggcctaccctccaaagaaaaggagcggaaagaatgtcggagcgggccgcggatgacgtcaggggggagccgcgccgcgcggcggcggcggcgggcggagcagcggccgcggccgcccggcagcagcagcagcagcagcagcagcagcagccgccgcctccgcagccccagcggcagcagcacccgccaccgccgccacggcgcacacggccggaggacggcgggcccggcgccgcctccacctcggccgccgcaatggcgacggtcggggagcgcaggcctctgcccagtcctgaagtgatgctgggacagtcgtggaatctgtgggttgaggcttccaaacttcctgggaaggacgggacagaattggacgaaagtttcaaggagtttgggaaaaaccgcgaagtcatggggctctgtcgggaagacatgccaatatttggtttctgtccagcccatgatgatttctacttggtggtgtgtaacgactgtaatcaggttgtcaaaccgcaggcatttcaatcacattatgaaagaagacatagctcatccagcaagccgcctttggccgttcctcccacttcagtattttccttcttcccttctctgtccaaaagcaaaggaggcagtgcaagtggaagcaaccgttcttccagtggaggtgttcttagcgcatcctcatcaagttccaagttgttgaaatcacccaaagagaaactgcagctcagggggaacaccaggccaatgcatcccattcagcaaagtagagttccccatggtagaatcatgacaccctctgtgaaagtggaaaagattcatccgaaaatggatggcacactactgaaatctgcggtggggccaacctgtcctgctactgtgagttccttagtcaagcctggccttaactgcccctcaataccaaagccaaccttgccttcacctggacagattctgaatggcaaagggcttcctgcaccgcccactctggaaaagaaacctgaagacaattccaataataggaaatttttaaataagagattatcagaaagagagtttgatcctgacatccactgtggggttattgatctcgacaccaagaagccctgcacccggtctttgacatgcaagacacattccttaacccagcgcagggctgtccagggtagaagaaaacgatttgatgtgttattagccgagcacaaaaacaaaaccagggaaaaggaattgattcgccatccggactctcagcaaccaccgcagcctctcagggacccgcatcccgcccctcctagaacgtcacaggagccgcaccaaaaccctcacggagtgattccttccgaatcaaagccttttgtagctagtaaacctaaacctcacacccccagtcttccaaggcctccaggctgccctgctcagcaaggtgggagtgcccccattgaccctcctccagtccatgaatctccacaccctcccctgcctgccactgagccagcttctcggttatccagtgaggagggcgaaggcgatgacaaagaagagtctgttgaaaaactggactgtcattattcaggtcatcatcctcagccagcatctttttgcacatttgggagccggcagataggaagaggctattacgtgtttgactccaggtggaatcgacttcgctgcgccctcaacctcatggtggagaagcatctgaatgcacagctatggaagaaaatcccaccagtgcccagtaccacctcacccatctccacacgtattcctcaccggacaaactctgtgccgacatcacaatgtggagtcagctatctggcagcagccaccgtctctacatccccagtcctgctctcatctacctgcatctccccaaatagcaaatcggtaccagctcatggaaccacactaaatgcacagcctgctgcttcaggggcgatggatcctgtgtgcagtatgcaatccagacaagtgtcctcttcatcctcatccccttccacgccctctggcctttcctcggttccttcctcccccatgtccaggaaacctcagaaattgaaatccagcaaatctttgaggcccaaggagtcttctggtaacagcactaactgtcaaaatgccagtagcagtaccagtggcggctcaggaaagaaacgcaaaaacagttccccactgttggttcactcttcctcctcctcttcctcctcctcctcttcttctcattccatggagtcttttaggaaaaactgtgtggctcactctgggcctccctacccctcaacggtaacatcttcccatagcatcggcctcaactgtgtgacgaataaagcaaatgcggtgaacgtccggcatgaccagtcagggaggggcccccccaccgggagccctgctgaatccatcaagaggatgagtgtgatggtgaacagcagtgattctactctttctcttgggccattcattcaccagtccaatgaactgcctgtcaactcccacggcagtttttcccactcacacactcctctagacaaactcataggaaagaaaagaaagtgctcacccagctcgagcagcatcaacaacagcagcagcaaacccacaaaggttgccaaagtgccagccgtgaacaatgtccacatgaaacacacaggcaccatcccaggggcacaaggactgatgaacagttccctccttcatcaggatatctcctcaccttgcttacgaacaggaatttcagcaacatcaccccagagccctgacttaaaatccaaaggcacgtccctgacagctgaaaatagcacggggaggaataatgcggacacttttgaggacaagttacacctccactcagcactctggactccacgatgcctttgagtctgttttcccaacctcctgtgggcctcaagggtagaaacctgccgggctgttgttttaacgaggatttccctgaagctatgtctctagcagtgagtactcataaaggacactggatcaagttcagccaccgaattgcttttatcagtgttaaagtggtctgaactgcttgctaccaatctgtgagaagtttttgtttttgttttgttttttaacttgcagtatatcacagagccactcttcaagtagattggctgggcaaaagaatgttttggcaagagcgttactgtagacctttctccctccttccttttactaccatttttttttaacactgtcatctgtaggtcactctccagcagttaggcaccttaactggagaccagaaaccttccagagaacacagggctgcatcccgagcaaccctctgaagaagggaattaggctttagattttgatagcaatgttccaggaatgaaatatagatgttagcccaagacaccatgacaaaatagcccagccttttgagagtaatttgggaaaagaagctgtcagaagtttctaacttacaaactggtttgaaatttttgatgcccagacagcaagtataaatcattttggaggcttacttttcatgatacaaaagcaattctgtgtgatttttttttttaagaagaaagaaaatgcaagctagttttgagaaaggaaggccaaattgggtcgggggagggtgggagtgaggaagttaaaatcactatagggagaaaaaacttttttcaagatttccaaagagatgaaattttcttaatccttttaagttttcatagtaaacagtatggcagattgggttggttgtcctacctggtctatttttaaaagtcaccttttaaagtgacattattagatacacttaaatgtttccaaggcactctctacattacccttgtttttctctttggatactgtcctgggactaagtgtagatttctgcttcaagcacttctggcattgtgtgtttttgtatgcactccccttcatgccacttcagatgtttatttggatgtggttggggacgagagcagacaccaaggaaagggagttggagagaatgtaagtcctgacctgaaggtcttttgtgatgcatgtataggattgccctgacacacaccctcctttcttgggattataccagccatcttcctgagagttttggagccctctaggatattttttctagtaccccaccccccacccctaaagaaagaccttaatatgttaaaacagcattgcttggagaaggtgtcattgaattccgggacgagccggagcctttaaatgggtgcttccaccactacaggctcctgacacgagtaacaggcactgttgcttagaagaacacacgaagttgccgaacacagggtaaaatttccaaggcgctgatcgttgccctggccagggcctgatgagagccagtcagtacattctttttttcctacagttcttgggtttcaaacttcagtttcagggaatttcaagtcaacaacaggtagaatgaataaacttggttaccagcctaataatgtgaattgctacagaattattcttattatgtaagaaaacaaaaactttatgcagatactttagctataaattgatgtaaaatactgatttttttaaaggaaggagagaacagtatcttgttcaattattatgcaatcaatcagtaaatgtttttaaaatgatactacaggagagcttagtaaggagagggcatggatgggccagtttggcatagttgggagaaatcagtctggtttccatcccagtcggggaagagagaggtgagagggaatcagaacgtacctagttgattccttggtgacaagtgcaatggggtatgggtagaatttattttcagagccaagaggacttgatggttataaataaagttgcctttagcaatggaatttacagatcgatcatgttgttccgaaagatgtgaataggatccacaataacaagttgattcagactaatgtagatatttagattagcaagtattgaacatttgatttcttagactgaggttttaaatgaatttcattatttctcccggtaatacacagagcatcgggattaggaaattagccattttggattctgtctgccacaaacagacctattctaaacagtgctattaaattttagactgttgttcaaatattttattttctcctaaactactttttatggtgatgaataattaagaccatttaaaacacgggagtacaagtatttttttgaattaaattaacttgcaaaaaccaaatttgcagtggttgggttgtttctagacagactttggtatcaatttaaaaccaagataatttttatattctttccaatagaatttcatgacaactcctgcagttttcttaacctacaaaaaaaaaaaaaaagtgctgcaatgatgaacaaagaattatacaaaacctacttttgtatctttattttggaatttcttgttctattataaatatggaagtatccctatttcagaagacatattttgttaaaaatgaattgtacatatttaaatatgtatttttgcacaggtctttttttctgatatcctgttttggtacaattgagatcatctagtatttatttattaattaataaaagtaaatacctttttataatttgaagtggttcactgccaagccaatagttctagaacctgcctcctttacagttttaagggatgcctctgttctgtgaaaagtctttgtcccttttagtgtctcgggagtggattcatacagatgaagtgggcattgcttcttcctggttgcctggtttcccgatagactacatgtaactaagtgacacactgcttttcttttgttagtattttatgtgtgggagtatgtgactgcgtgtgtgtgtgcctgtgcgtgtgtgtgtatactcagcacatgtatgttactatgtgatgtggtttaaaactaatggaaaaaactgaaagtgcctgaaactagttttaagcttagacagaatctctttaaaaagacttgaatgttcagttgaacttttggagtttgctttttccacctaaatattgtttctaaaattttaggggcggagttgaaaaccaccaatgctggtaattttataaggtattttaaaattaagacctcttggttcatagtaattcaattggtgatggattgcctggtggcaccaagggttacagatctttttgtcagccagcaacttacacgatgtgtccgttttgttattcactcatgaaatacaatttaaaatatttaaaatattttgtattccaaaaatataatacaaagaagtacctctgagaacattgaaaaaaatgtataatttgaaaaatgtaacttataagggcagctgtcttcctgcaagagttctgttgccaaggaatttcttaatgtcgctcattctgtccagggggtttggggcgattgggctttgaaaaaatattcttaaaagtttgtttagcagaaaataatcacttttacattttgtgcaaaacattttacattttcagataatttaaatgagcactacatactgtcagtgtgaatgtagggccttgaaagcattttgcttttttttttttttttttttttttgagcttggttataaaagcaatctcctgtgttaaaaacgtgtgaatagtttgataatttgtacacataatcaagagcatctcagctggactttgtgttggctgctgtatagaacatgaacaaatgtcaagggatagaaaattactttggatatttaaaagagaagaaatatatagtctatttgttttgtaacaagtttctgtaaataaaataatttatactattt

SEQ ID NO: 69562 - DNA, 6732 bp, Artificial Sequence
  derived and/or modified sequence
atgtcggagcgggccgcggatgacgtcaggggggagccgcgccgcgcggcggcggcggcgggcggagcagcggccgcggccgcccggcagcagcagcagcagcagcagcagcagcagccgccgcctccgcagccccagcggcagcagcacccgccaccgccgccacggcgcacacggccggaggacggcgggcccggcgccgcctccacctcggccgccgcaatggcgacggtcggggagcgcaggcctctgcccagtcctgaagtgatgctgggacagtcgtggaatctgtgggttgaggcttccaaacttcctgggaaggacgggacagaattggacgaaagtttcaaggagtttgggaaaaaccgcgaagtcatggggctctgtcgggaagacatgccaatatttggtttctgtccagcccatgatgatttctacttggtggtgtgtaacgactgtaatcaggttgtcaaaccgcaggcatttcaatcacattatgaaagaagacatagctcatccagcaagccgcctttggccgttcctcccacttcagtattttccttcttcccttctctgtccaaaagcaaaggaggcagtgcaagtggaagcaaccgttcttccagtggaggtgttcttagcgcatcctcatcaagttccaagttgttgaaatcacccaaagagaaactgcagctcagggggaacaccaggccaatgcatcccattcagcaaagtagagttccccatggtagaatcatgacaccctctgtgaaagtggaaaagattcatccgaaaatggatggcacactactgaaatctgcggtggggccaacctgtcctgctactgtgagttccttagtcaagcctggccttaactgcccctcaataccaaagccaaccttgccttcacctggacagattctgaatggcaaagggcttcctgcaccgcccactctggaaaagaaacctgaagacaattccaataataggaaatttttaaataagagattatcagaaagagagtttgatcctgacatccactgtggggttattgatctcgacaccaagaagccctgcacccggtctttgacatgcaagacacattccttaacccagcgcagggctgtccagggtagaagaaaacgatttgatgtgttattagccgagcacaaaaacaaaaccagggaaaaggaattgattcgccatccggactctcagcaaccaccgcagcctctcagggacccgcatcccgcccctcctagaacgtcacaggagccgcaccaaaaccctcacggagtgattccttccgaatcaaagccttttgtagctagtaaacctaaacctcacacccccagtcttccaaggcctccaggctgccctgctcagcaaggtgggagtgcccccattgaccctcctccagtccatgaatctccacaccctcccctgcctgccactgagccagcttctcggttatccagtgaggagggcgaaggcgatgacaaagaagagtctgttgaaaaactggactgtcattattcaggtcatcatcctcagccagcatctttttgcacatttgggagccggcagataggaagaggctattacgtgtttgactccaggtggaatcgacttcgctgcgccctcaacctcatggtggagaagcatctgaatgcacagctatggaagaaaatcccaccagtgcccagtaccacctcacccatctccacacgtattcctcaccggacaaactctgtgccgacatcacaatgtggagtcagctatctggcagcagccaccgtctctacatccccagtcctgctctcatctacctgcatctccccaaatagcaaatcggtaccagctcatggaaccacactaaatgcacagcctgctgcttcaggggcgatggatcctgtgtgcagtatgcaatccagacaagtgtcctcttcatcctcatccccttccacgccctctggcctttcctcggttccttcctcccccatgtccaggaaacctcagaaattgaaatccagcaaatctttgaggcccaaggagtcttctggtaacagcactaactgtcaaaatgccagtagcagtaccagtggcggctcaggaaagaaacgcaaaaacagttccccactgttggttcactcttcctcctcctcttcctcctcctcctcttcttctcattccatggagtcttttaggaaaaactgtgtggctcactctgggcctccctacccctcaacggtaacatcttcccatagcatcggcctcaactgtgtgacgaataaagcaaatgcggtgaacgtccggcatgaccagtcagggaggggcccccccaccgggagccctgctgaatccatcaagaggatgagtgtgatggtgaacagcagtgattctactctttctcttgggccattcattcaccagtccaatgaactgcctgtcaactcccacggcagtttttcccactcacacactcctctagacaaactcataggaaagaaaagaaagtgctcacccagctcgagcagcatcaacaacagcagcagcaaacccacaaaggttgccaaagtgccagccgtgaacaatgtccacatgaaacacacaggcaccatcccaggggcacaaggactgatgaacagttccctccttcatcaggatatctcctcaccttgcttacgaacaggaatttcagcaacatcaccccagagccctgacttaaaatccaaaggcacgtccctgacagctgaaaatagcacggggaggaataatgcggacacttttgaggacaagttacacctccactcagcactctggactccacgatgcctttgagtctgttttcccaacctcctgtgggcctcaagggtagaaacctgccgggctgttgttttaacgaggatttccctgaagctatgtctctagcagtgagtactcataaaggacactggatcaagttcagccaccgaattgcttttatcagtgttaaagtggtctgaactgcttgctaccaatctgtgagaagtttttgtttttgttttgttttttaacttgcagtatatcacagagccactcttcaagtagattggctgggcaaaagaatgttttggcaagagcgttactgtagacctttctccctccttccttttactaccatttttttttaacactgtcatctgtaggtcactctccagcagttaggcaccttaactggagaccagaaaccttccagagaacacagggctgcatcccgagcaaccctctgaagaagggaattaggctttagattttgatagcaatgttccaggaatgaaatatagatgttagcccaagacaccatgacaaaatagcccagccttttgagagtaatttgggaaaagaagctgtcagaagtttctaacttacaaactggtttgaaatttttgatgcccagacagcaagtataaatcattttggaggcttacttttcatgatacaaaagcaattctgtgtgatttttttttttaagaagaaagaaaatgcaagctagttttgagaaaggaaggccaaattgggtcgggggagggtgggagtgaggaagttaaaatcactatagggagaaaaaacttttttcaagatttccaaagagatgaaattttcttaatccttttaagttttcatagtaaacagtatggcagattgggttggttgtcctacctggtctatttttaaaagtcaccttttaaagtgacattattagatacacttaaatgtttccaaggcactctctacattacccttgtttttctctttggatactgtcctgggactaagtgtagatttctgcttcaagcacttctggcattgtgtgtttttgtatgcactccccttcatgccacttcagatgtttatttggatgtggttggggacgagagcagacaccaaggaaagggagttggagagaatgtaagtcctgacctgaaggtcttttgtgatgcatgtataggattgccctgacacacaccctcctttcttgggattataccagccatcttcctgagagttttggagccctctaggatattttttctagtaccccaccccccacccctaaagaaagaccttaatatgttaaaacagcattgcttggagaaggtgtcattgaattccgggacgagccggagcctttaaatgggtgcttccaccactacaggctcctgacacgagtaacaggcactgttgcttagaagaacacacgaagttgccgaacacagggtaaaatttccaaggcgctgatcgttgccctggccagggcctgatgagagccagtcagtacattctttttttcctacagttcttgggtttcaaacttcagtttcagggaatttcaagtcaacaacaggtagaatgaataaacttggttaccagcctaataatgtgaattgctacagaattattcttattatgtaagaaaacaaaaactttatgcagatactttagctataaattgatgtaaaatactgatttttttaaaggaaggagagaacagtatcttgttcaattattatgcaatcaatcagtaaatgtttttaaaatgatactacaggagagcttagtaaggagagggcatggatgggccagtttggcatagttgggagaaatcagtctggtttccatcccagtcggggaagagagaggtgagagggaatcagaacgtacctagttgattccttggtgacaagtgcaatggggtatgggtagaatttattttcagagccaagaggacttgatggttataaataaagttgcctttagcaatggaatttacagatcgatcatgttgttccgaaagatgtgaataggatccacaataacaagttgattcagactaatgtagatatttagattagcaagtattgaacatttgatttcttagactgaggttttaaatgaatttcattatttctcccggtaatacacagagcatcgggattaggaaattagccattttggattctgtctgccacaaacagacctattctaaacagtgctattaaattttagactgttgttcaaatattttattttctcctaaactactttttatggtgatgaataattaagaccatttaaaacacgggagtacaagtatttttttgaattaaattaacttgcaaaaaccaaatttgcagtggttgggttgtttctagacagactttggtatcaatttaaaaccaagataatttttatattctttccaatagaatttcatgacaactcctgcagttttcttaacctacaaaaaaaaaaaaaaagtgctgcaatgatgaacaaagaattatacaaaacctacttttgtatctttattttggaatttcttgttctattataaatatggaagtatccctatttcagaagacatattttgttaaaaatgaattgtacatatttaaatatgtatttttgcacaggtctttttttctgatatcctgttttggtacaattgagatcatctagtatttatttattaattaataaaagtaaatacctttttataatttgaagtggttcactgccaagccaatagttctagaacctgcctcctttacagttttaagggatgcctctgttctgtgaaaagtctttgtcccttttagtgtctcgggagtggattcatacagatgaagtgggcattgcttcttcctggttgcctggtttcccgatagactacatgtaactaagtgacacactgcttttcttttgttagtattttatgtgtgggagtatgtgactgcgtgtgtgtgtgcctgtgcgtgtgtgtgtatactcagcacatgtatgttactatgtgatgtggtttaaaactaatggaaaaaactgaaagtgcctgaaactagttttaagcttagacagaatctctttaaaaagacttgaatgttcagttgaacttttggagtttgctttttccacctaaatattgtttctaaaattttaggggcggagttgaaaaccaccaatgctggtaattttataaggtattttaaaattaagacctcttggttcatagtaattcaattggtgatggattgcctggtggcaccaagggttacagatctttttgtcagccagcaacttacacgatgtgtccgttttgttattcactcatgaaatacaatttaaaatatttaaaatattttgtattccaaaaatataatacaaagaagtacctctgagaacattgaaaaaaatgtataatttgaaaaatgtaacttataagggcagctgtcttcctgcaagagttctgttgccaaggaatttcttaatgtcgctcattctgtccagggggtttggggcgattgggctttgaaaaaatattcttaaaagtttgtttagcagaaaataatcacttttacattttgtgcaaaacattttacattttcagataatttaaatgagcactacatactgtcagtgtgaatgtagggccttgaaagcattttgcttttttttttttttttttttttttgagcttggttataaaagcaatctcctgtgttaaaaacgtgtgaatagtttgataatttgtacacataatcaagagcatctcagctggactttgtgttggctgctgtatagaacatgaacaaatgtcaagggatagaaaattactttggatatttaaaagagaagaaatatatagtctatttgttttgtaacaagtttctgtaaataaaataatttatactattt

SEQ ID NO: 69563 - DNA, 2792 bp, Artificial Sequence
  derived and/or modified sequence
atgtcggagcgggccgcggatgacgtcaggggggagccgcgccgcgcggcggcggcggcgggcggagcagcggccgcggccgcccggcagcagcagcagcagcagcagcagcagcagccgccgcctccgcagccccagcggcagcagcacccgccaccgccgccacggcgcacacggccggaggacggcgggcccggcgccgcctccacctcggccgccgcaatggcgacggtcggggagcgcaggcctctgcccagtcctgaagtgatgctgggacagtcgtggaatctgtgggttgaggcttccaaacttcctgggaaggacggggacagaattggacgaaagtttcaaggagtttggaaccgcgaagtcatggggctctgtcgggaagacatgccaatatttggtttctgtccagcccatgatgatttctacttggtggtgtgtaacgactgtaatcaggttgtcaaaccgcaggcatttcaatcacattatgaaagaagacatagctcatccagcaagccgcctttggccgttcctcccacttcagtattttccttcttcccttctctgtccaaaagcaaaggaggcagtgcaagtggaagcaaccgttcttccagtggaggtgttcttagcgcatcctcatcaagttccaagttgttgaaatcacccaaagagaaactgcagctcagggggaacaccaggccaatgcatcccattcagcaaagtagagttccccatggtagaatcatgacaccctctgtgaaagtggaaaagattcatccgaaaatggatggcacactactgaaatctgcggtggggccaacctgtcctgctactgtgagttccttagtcaagcctggccttaactgcccctcaataccaaagccaaccttgccttcacctggacagattctgaatggcaaagggcttcctgcaccgcccactctggaaaagaaacctgaagacaattccaataataggaaatttttaaataagagattatcagaaagagagtttgatcctgacatccactgtggggttattgatctcgacaccaagaagccctgcacccggtctttgacatgcaagacacattccttaacccagcgcagggctgtccagggtagaagaaaacgatttgatgtgttattagccgagcacaaaaacaaaaccagggaaaaggaattgattcgccatccggactctcagcaaccaccgcagcctctcagggacccgcatcccgcccctcctagaacgtcacaggagccgcaccaaaaccctcacggagtgattccttccgaatcaaagccttttgtagctagtaaacctaaacctcacacccccagtcttccaaggcctccaggctgccctgctcagcaaggtgggagtgcccccattgaccctcctccagtccatgaatctccacaccctcccctgcctgccactgagccagcttctcggttatccagtgaggagggcgaaggcgatgacaaagaagagtctgttgaaaaactggactgtcattattcaggtcatcatcctcagccagcatctttttgcacatttgggagccggcagataggaagaggctattacgtgtttgactccaggtggaatcgacttcgctgcgccctcaacctcatggtggagaagcatctgaatgcacagctatggaagaaaatcccaccagtgcccagtaccacctcacccatctccacacgtattcctcaccggacaaactctgtgccgacatcacaatgtggagtcagctatctggcagcagccaccgtctctacatccccagtcctgctctcatctacctgcatctccccaaatagcaaatcggtaccagctcatggaaccacactaaatgcacagcctgctgcttcaggggcgatggatcctgtgtgcagtatgcaatccagacaagtgtcctcttcatcctcatccccttccacgccctctggcctttcctcggttccttcctcccccatgtccaggaaacctcagaaattgaaatccagcaaatctttgaggcccaaggagtcttctggtaacagcactaactgtcaaaatgccagtagcagtaccagtggcggctcaggaaagaaacgcaaaaacagttccccactgttggttcactcttcctcctcctcttcctcctcctcctcttcttctcattccatggagtcttttaggaaaaactgtgtggctcactctgggcctccctacccctcaacggtaacatcttcccatagcatcggcctcaactgtgtgacgaataaagcaaatgcggtgaacgtccggcatgaccagtcagggaggggcccccccaccgggagccctgctgaatccatcaagaggatgagtgtgatggtgaacagcagtgattctactctttctcttgggccattcattcaccagtccaatgaactgcctgtcaactcccacggcagtttttcccactcacacactcctctagacaaactcataggaaagaaaagaaagtgctcacccagctcgagcagcatcaacaacagcagcagcaaacccacaaaggttgccaaagtgccagccgtgaacaatgtccacatgaaacacacaggcaccatcccaggggcacaaggactgatgaacagttccctccttcatcaggtaggaaatggactgtgagccccatgggaatgcccatttcttctcccttaagatcttttgtcagctcagaaatgtgtttggttgggttggttggttggtttgtaaacagatattcagcttcatggtgtcttctt

SEQ ID NO: 69564 - DNA, 2838 bp, Artificial Sequence
  derived and/or modified sequence
atgagcgagagagccgccgacgacgtgagaggcgagcccagaagagccgccgccgccgccggcggcgccgccgccgccgccgccagacagcagcagcagcagcagcagcagcagcagcccccccccccccagccccagagacagcagcaccccccccccccccccagaagaaccagacccgaggacggcggccccggcgccgccagcaccagcgccgccgccatggccaccgtgggcgagagaagacccctgcccagccccgaggtgatgctgggccagagctggaacctgtgggtggaggccagcaagctgcccggcaaggacggcaccgagctggacgagagcttcaaggagttcggcaagaacagagaggtgatgggcctgtgcagagaggacatgcccatcttcggcttctgccccgcccacgacgacttctacctggtggtgtgcaacgactgcaaccaggtggtgaagccccaggccttccagagccactacgagagaagacacagcagcagcagcaagccccccctggccgtgccccccaccagcgtgttcagcttcttccccagcctgagcaagagcaagggcggcagcgccagcggcagcaacagaagcagcagcggcggcgtgctgagcgccagcagcagcagcagcaagctgctgaagagccccaaggagaagctgcagctgagaggcaacaccagacccatgcaccccatccagcagagcagagtgccccacggcagaatcatgacccccagcgtgaaggtggagaagatccaccccaagatggacggcaccctgctgaagagcgccgtgggccccacctgccccgccaccgtgagcagcctggtgaagcccggcctgaactgccccagcatccccaagcccaccctgcccagccccggccagatcctgaacggcaagggcctgcccgccccccccaccctggagaagaagcccgaggacaacagcaacaacagaaagttcctgaacaagagactgagcgagagagagttcgaccccgacatccactgcggcgtgatcgacctggacaccaagaagccctgcaccagaagcctgacctgcaagacccacagcctgacccagagaagagccgtgcagggcagaagaaagagattcgacgtgctgctggccgagcacaagaacaagaccagagagaaggagctgatcagacaccccgacagccagcagcccccccagcccctgagagacccccaccccgccccccccagaaccagccaggagccccaccagaacccccacggcgtgatccccagcgagagcaagcccttcgtggccagcaagcccaagccccacacccccagcctgcccagaccccccggctgccccgcccagcagggcggcagcgcccccatcgaccccccccccgtgcacgagagcccccacccccccctgcccgccaccgagcccgccagcagactgagcagcgaggagggcgagggcgacgacaaggaggagagcgtggagaagctggactgccactacagcggccaccacccccagcccgccagcttctgcaccttcggcagcagacagatcggcagaggctactacgtgttcgacagcagatggaacagactgagatgcgccctgaacctgatggtggagaagcacctgaacgcccagctgtggaagaagatcccccccgtgcccagcaccaccagccccatcagcaccagaatcccccacagaaccaacagcgtgcccaccagccagtgcggcgtgagctacctggccgccgccaccgtgagcaccagccccgtgctgctgagcagcacctgcatcagccccaacagcaagagcgtgcccgcccacggcaccaccctgaacgcccagcccgccgccagcggcgccatggaccccgtgtgcagcatgcagagcagacaggtgagcagcagcagcagcagccccagcacccccagcggcctgagcagcgtgcccagcagccccatgagcagaaagccccagaagctgaagagcagcaagagcctgagacccaaggagagcagcggcaacagcaccaactgccagaacgccagcagcagcaccagcggcggcagcggcaagaagagaaagaacagcagccccctgctggtgcacagcagcagcagcagcagcagcagcagcagcagcagccacagcatggagagcttcagaaagaactgcgtggcccacagcggccccccctaccccagcaccgtgaccagcagccacagcatcggcctgaactgcgtgaccaacaaggccaacgccgtgaacgtgagacacgaccagagcggcagaggcccccccaccggcagccccgccgagagcatcaagagaatgagcgtgatggtgaacagcagcgacagcaccctgagcctgggccccttcatccaccagagcaacgagctgcccgtgaacagccacggcagcttcagccacagccacacccccctggacaagctgatcggcaagaagagaaagtgcagccccagcagcagcagcatcaacaacagcagcagcaagcccaccaaggtggccaaggtgcccgccgtgaacaacgtgcacatgaagcacaccggcaccatccccggcgcccagggcctgatgaacagcagcctgctgcaccaggacatcagcagcccctgcctgagaaccggcatcagcgccaccagcccccagagccccgacctgaagagcaagggcaccagcctgaccgccgagaacagcaccggcagaaacaacgccgacaccttcgaggacaagctgcacctgcacagcgccctgtggacccccagatgcctgtag

SEQ ID NO: 69565 - DNA, 81 bp, Artificial Sequence
  derived and/or modified sequence
atgagcgagagagccgccgacgacgtgagaggcgagcccagaagagccgccgccgccgccggcggcgccgccgccgcctag

SEQ ID NO: 69566 - protein, 15 aa, Artificial Sequence
  derived and/or modified sequence
MLITILGTVKPNANR

SEQ ID NO: 69567 - DNA, 372 bp, Artificial Sequence
  derived and/or modified sequence
atgcccgacgccagcctgggcagcctgggcatcacctggtgcttcctggagagccccctggaggtgagcagcggcagattcggcctggccagactgctgggcagccaggaccacggcgacgaccccgccgagagaggcagaaccgccaccgacgcctggggccccagcagatggggccagagccccggcaacggcggcggctactgcgacgccagcccccccagcgccctggcccccggcgacagagcctgggccctgcccgccagccccagcagcggcgcccccgccagccagcactgctgcctggagaaggccggcaccagaaccaaggccagccccgtgtggggcagagacggcaacacctggaactag

SEQ ID NO: 69568 - protein, 76 aa, Artificial Sequence
  derived and/or modified sequence
GKKRKKKVYTTPKKIKHKHKKVKLAVLSYYKVDAEGKVTKLRRECSNPTCGAGVFLANHKDRLYCGKCHSVYKVNA

SEQ ID NO: 69569 - protein, 156 aa, Artificial Sequence
  derived and/or modified sequence
MQIFVKTLTGKTITLEVEPSDTIENVKAKIQDKEGIPPDQQRLIFAGKQLEDGRTLSDYNIQKESTLHLVLRLRGGAKKRKKKSYTTPKKNKHKRKKVKLAVLKYYKVDENGKISRLRRECPSDECGAGVFMASHFDRHYCGKCCLTYCFNKPEDK

SEQ ID NO: 69570 - protein, 106 aa, Artificial Sequence
  derived and/or modified sequence
MQIFVKTLTGKTITLEVEPSDTIENVKAKIQDKEGIPPDQQRLIFAGKQLEDGRTLSDYNIQKESTLHLVLRLRGGAKKRKKKSYTTPKKNKHKRKKVKLAVLKYY

SEQ ID NO: 69571 - DNA, 471 bp, Artificial Sequence
  derived and/or modified sequence
atgcagatcttcgtgaagaccctgaccggcaagaccatcaccctggaggtggagcccagcgacaccatcgagaacgtgaaggccaagatccaggacaaggagggcatcccccccgaccagcagagactgatcttcgccggcaagcagctggaggacggcagaaccctgagcgactacaacatccagaaggagagcaccctgcacctggtgctgagactgagaggcggcgccaagaagagaaagaagaagagctacaccacccccaagaagaacaagcacaagagaaagaaggtgaagctggccgtgctgaagtactacaaggtggacgagaacggcaagatcagcagactgagaagagagtgccccagcgacgagtgcggcgccggcgtgttcatggccagccacttcgacagacactactgcggcaagtgctgcctgacctactgcttcaacaagcccgaggacaagtag

SEQ ID NO: 69572 - DNA, 321 bp, Artificial Sequence
  derived and/or modified sequence
atgcagatcttcgtgaagaccctgaccggcaagaccatcaccctggaggtggagcccagcgacaccatcgagaacgtgaaggccaagatccaggacaaggagggcatcccccccgaccagcagagactgatcttcgccggcaagcagctggaggacggcagaaccctgagcgactacaacatccagaaggagagcaccctgcacctggtgctgagactgagaggcggcgccaagaagagaaagaagaagagctacaccacccccaagaagaacaagcacaagagaaagaaggtgaagctggccgtgctgaagtactactag

SEQ ID NO: 69573 - DNA, 471 bp, Artificial Sequence
  derived and/or modified sequence
atgcagattttcgttaagacccttaccggaaagacgataacattagaagtcgaaccctcagatactatcgagaacgttaaagcaaaaattcaggacaaggaggggataccccctgatcagcagcgattgattttcgccggtaagcagcttgaagatggacggactttgtcagactacaacatccagaaggagtctactctgcatttagtgctacgccttagggggggcgcgaagaagagaaagaagaagagctacactaccccgaaaaagaacaagcataagagaaagaaggttaagctcgctgtgctgaaatactacaaggtcgacgagaacggtaaaatttccaggctccggcgggagtgcccatccgatgagtgcggcgccggcgtgttcatggcttctcacttcgatcgccattactgcggcaagtgctgtctgacgtattgctttaataagccagaagacaagtag

SEQ ID NO: 69574 - DNA, 471 bp, Artificial Sequence
  derived and/or modified sequence
atgcagatattcgtaaagaccctcacggggaaaaccatcacactggaggttgagccgagcgacaccatagaaaacgttaaggccaaaatccaagacaaggaaggcatcccaccagatcagcagcggttgatctttgcaggaaagcagctcgaggatgggcggaccctgagcgattataatatacagaaggaaagcacgctgcacctcgttctgcgtctaaggggaggcgctaaaaagagaaagaagaagagttataccactcccaagaagaacaaacacaaaaggaaaaaagttaagctcgcagtgctcaagtactacaaggtcgatgagaacggcaagatatcacgtctgcggagggagtgtccttcagacgaatgtggtgcaggggtcttcatggctagccacttcgatcggcattattgtggtaagtgctgcctaacttactgcttcaacaaaccagaggataaatag

SEQ ID NO: 69575 - DNA, 471 bp, Artificial Sequence
  derived and/or modified sequence
atgcagatttttgtgaaaacactcactggaaagacaataaccttggaggtggaaccctctgataccatcgagaacgtgaaagctaagatacaagataaagagggaatcccccctgatcagcagagactgatatttgccggaaaacagctcgaggatggtaggactttgagcgactacaatatacaaaaagagagcaccctgcacttggttctaaggctacgagggggcgccaagaaacggaaaaaaaagtcttatactaccccaaaaaagaacaagcataaacgtaagaaagtgaaacttgcagtcttgaagtattacaaagtcgacgaaaacggcaagataagccggctgaggcgagaatgtcctagcgacgagtgtggcgcaggtgtattcatggccagccatttcgaccgccattactgcggaaaatgttgcttaacctactgttttaataaaccggaggataaatag

SEQ ID NO: 69576 - DNA, 321 bp, Artificial Sequence
  derived and/or modified sequence
atgcaaatcttcgtgaagaccctgacgggtaagacgataaccttggaggtggagcctagcgatacaattgagaacgtgaaggccaagatccaggacaaggagggaataccgccggatcagcagcgattgatcttcgccggtaaacagttggaggatggccggactctcagcgattacaacatccagaaggaaagcaccctgcaccttgtgctccggcttcgtgggggggccaagaaacgcaaaaaaaagtcttacaccacaccaaaaaaaaataaacataagcggaaaaaggtgaaactggccgtattaaaatactattag

SEQ ID NO: 69577 - DNA, 471 bp, Artificial Sequence
  derived and/or modified sequence
atgcagatctttgtgaagaccctgaccgggaagaccatcaccctggaggtggagcccagcgacaccattgaaaatgtgaaggccaagatccaggacaaggagggcatccccccagaccagcagaggctcatctttgctgggaagcagctggaggatggccgcaccctgagtgactacaacatccagaaggagagcaccctgcacctggtgctgcggctgcggggcggggccaagaagaggaagaagaagagctacaccacccccaagaagaacaagcacaagaggaagaaggtgaagctggccgtgctgaagtactacaaggtggatgaaaatggcaagatcagccggctgcggcgggagtgccccagtgatgaatgtggggccggggtcttcatggccagccactttgacagacactactgtgggaagtgctgcctgacctactgcttcaacaagccagaggacaagtag

SEQ ID NO: 69578 - DNA, 321 bp, Artificial Sequence
  derived and/or modified sequence
atgcagatctttgtgaagaccctgaccgggaagaccatcaccctggaggtggagcccagcgacaccattgaaaatgtgaaggccaagatccaggacaaggagggcatccccccagaccagcagaggctcatctttgctgggaagcagctggaggatggccgcaccctgagtgactacaacatccagaaggagagcaccctgcacctggtgctgcggctgcggggcggggccaagaagaggaagaagaagagctacaccacccccaagaagaacaagcacaagaggaagaaggtgaagctggccgtgctgaagtactactag

SEQ ID NO: 69579 - DNA, 471 bp, Artificial Sequence
  derived and/or modified sequence
atgcagatcttcgtgaagaccctgaccggcaagaccatcaccctggaggtcgagccctcggatacgatcgaaaacgttaaggctaagattcaggataaagaaggtataccccctgaccaacaaaggctgatcttcgccgggaaacaactggaagacgggagaactctatccgattacaacatacaaaaggagagtactttgcacctggttctccgtctgagaggcggggccaagaagcgcaagaagaagagctacaccactcctaagaaaaataagcacaagaggaagaaggtgaaactggcggtgctgaagtactataaggtggatgagaatgggaagatcagccgcctgcggcgtgaatgcccatctgacgaatgtggcgcaggtgtgtttatggcctctcattttgatcgtcactattgtgggaagtgttgcttgacttactgctttaataaaccagaggacaaatag

SEQ ID NO: 69580 - DNA, 471 bp, Artificial Sequence
  derived and/or modified sequence
atgcagatcttcgtgaagaccctgaccggcaagaccatcaccctggaagtggagccaagtgatacaattgagaacgtgaaggccaaaattcaggacaaggagggcattccccctgatcaacagagacttatcttcgccggaaaacagctggaggacggacggactctgtccgactacaatattcagaaagaaagcacgctacacttagtgttgagactcaggggtggtgcgaagaaaagaaaaaaaaaaagttatactactcccaaaaagaacaagcacaagagaaaaaaggtaaaactggctgtcctcaaatactacaaggtcgatgagaacggcaaaattagccgactgagaagagagtgtccctccgatgagtgtggggcaggggtgttcatggcgtcccacttcgacaggcactattgcgggaagtgttgcttgacctattgcttcaataagccagaggacaagtag

SEQ ID NO: 69581 - DNA, 471 bp, Artificial Sequence
  derived and/or modified sequence
atgcagatcttcgtgaagaccctgaccggcaagaccatcaccctggaagtggagccctccgatacgattgaaaacgtcaaggcgaagattcaagacaaggaaggtatcccccctgatcaacagaggctgatcttcgctggcaagcaactggaagacggacggactttgtcagattacaacatccaaaaggagagcaccctgcatctggttttgcgactgagggggggagcgaagaaacggaagaaaaaaagttacaccacaccaaagaagaacaaacacaagcggaagaaagttaagctcgccgttctcaagtactacaaagtggatgaaaacggtaagatctcccgcctgagacgcgaatgcccctctgacgagtgcggcgcaggtgtattcatggcgtcccacttcgaccgccattattgtggcaagtgctgccttacctattgttttaacaagcctgaggataagtag

SEQ ID NO: 69582 - DNA, 321 bp, Artificial Sequence
  derived and/or modified sequence
atgcagatcttcgtgaagaccctgaccggcaagaccatcaccctggaggtcgagcccagcgatactattgagaacgtaaaggcaaagattcaggacaaggaaggcattccaccggaccagcaacgcttgattttcgccggcaaacagctggaagacggccggaccctatcggactataatattcagaaggagtccactcttcaccttgtacttcggcttcggggcggcgccaagaagcggaagaaaaaatcatacacaacgcccaagaaaaataaacataagagaaaaaaagtgaaactagccgttctaaaatattattag

SEQ ID NO: 69583 - DNA, 471 bp, Artificial Sequence
  derived and/or modified sequence
atgcagatctttgtgaagactctgaccggcaagaccatcaccctggaagttgagccatcagacacaatcgagaatgttaaagccaagatccaagacaaggagggtataccacccgaccaacaacggctaatctttgctggcaaacagctggaagatggcagaacacttagcgactacaacatacagaaggagtctactctgcacctggtgctgcggttgagaggaggggcaaagaagagaaaaaagaaatcgtatactacgcctaagaaaaacaagcacaagcggaagaaggtgaagctggctgtcttgaagtattataaggtggatgaaaatggtaaaatatccaggctgcggcgagagtgccccagtgatgaatgtggcgcaggggtgtttatggcaagtcacttcgaccgccactactgtggaaagtgttgtctcacatactgcttcaataaacccgaagacaagtag

SEQ ID NO: 69584 - DNA, 471 bp, Artificial Sequence
  derived and/or modified sequence
atgcagatttttgtcaagactttgacgggaaaaacaatcaccctggaggtggaaccctcggacacaattgaaaatgtcaaagcaaagatccaagacaaggaaggtatccctccagatcagcagcgcctgatcttcgctggtaagcaacttgaagacggacggacactgagcgactacaacatccagaaagagagtactcttcatctggttctgcggctgaggggaggcgctaaaaagagaaaaaagaagtcttatacaacgcctaaaaagaacaagcacaagaggaaaaaggtcaagcttgctgtattgaaatattataaagtcgatgagaacggcaagatttcccgtctgagacgagagtgcccatccgacgaatgcggcgcaggtgtgttcatggcaagccattttgatcggcattactgcggcaagtgctgtctcacatattgctttaacaagcccgaagataaatag

SEQ ID NO: 69585 - DNA, 471 bp, Artificial Sequence
  derived and/or modified sequence
atgcagatttttgtaaagacactcactgggaaaactattaccctggaagtcgaaccgagtgacactattgaaaacgtgaaagcgaaaatccaggacaaggaggggatccccccagatcagcagcgcctgatttttgctggcaaacagctcgaggacggtcgaaccctgtccgactacaatattcaaaaggaatccactctccacctggtgttgcggctgaggggcggagcaaagaaacggaaaaaaaagagttacaccacaccaaaaaagaataagcacaagaggaaaaaggtaaagctggccgtgctgaaatactataaggtcgacgaaaatggcaagattagtcggctgagacgcgagtgtccgtcagacgaatgtggggctggagtattcatggccagccattttgatagacattactgcggcaagtgttgtctgacgtactgcttcaataaacccgaggataaatag

SEQ ID NO: 69586 - DNA, 321 bp, Artificial Sequence
  derived and/or modified sequence
atgcaaatatttgtaaaaacgctgacaggaaagacgataacactggaagtggaaccttccgacactattgagaatgtgaaagctaaaattcaggataaggagggaatccctccagatcaacagcggcttatttttgccggaaagcaattggaagatggcaggactctgtctgattacaacatacagaaagaaagtacgctgcacctcgtactgagattgaggggcggtgccaagaagcggaagaaaaagagttacacgacaccaaaaaagaataaacacaaaagaaagaaagtgaaactagccgtcttgaaatactattag

SEQ ID NO: 69587 - DNA, 1071 bp, Artificial Sequence
  derived and/or modified sequence
cccctcgacctccttttaaaaattctcttagccacgttgattgtacgggaaaagcctttttaaaacatcttttacgttgcttaaacctacagtttcgaaagcattccgaaggctaaagtgagaaataagcccaggctagggagaggagaaacgaagttcacgtcctagtctggcaccgggttggattgtcgctgggacggcagtcaggcatttggtgtggtcgcctaaggggtgggtccttcggcgggagctccgggaaaccccgtgggcctgcgcggcgttcttccttttcgatccgccatctgcggtggagccgccaccaaaatgcagattttcgtgaaaacccttacggggaagaccatcaccctcgaggttgaaccctcggatacgatagaaaatgtaaaggccaagatccaggataaggaaggaattcctcctgatcagcagagactgatctttgctggcaagcagctggaagatggacgtactttgtctgactacaatattcaaaaggagtctactcttcatcttgtgttgagacttcgtggtggtgctaagaaaaggaagaagaagtcttacaccactcccaagaagaataagcacaagagaaagaaggttaagctggctgtcctgaaatattataaggtggatgagaatggcaaaattagtcgccttcgtcgagagtgcccttctgatgaatgtggtgctggggtgtttatggcaagtcactttgacagacattattgtggcaaatgttgtctgacttactgtttcaacaaaccagaagacaagtaactgtatgagttaataaaagacatgaactaacatttattgttgggttttattgcagtaaaaagaatggtttttaagcaccaaattgatggtcacaccatttccttttagtagtgctactgctatcgctgtgtgaatgttgcctctggggattatgtgacccagtggttctgtatacctgccaggtgccaaccacttgtaaaggtcttgatattttcaattcttagactacctatactttggcagaagttatatttaatgtaagttgtctaaatataa

SEQ ID NO: 69588 - DNA, 705 bp, Artificial Sequence
  derived and/or modified sequence
aagacccagactcttccctaggctgggagagactcggcggttgaaagcagggaggcgctacaggagagaaagggctgaacccccgcttccgcagatttcacctatttttcagtttgcctggagcaggccacgcaaattcccttcccttgaaggcccaaggagcgtctggtagattgctgattctctgcccatcaccgcttctggaagtggagccgccaccaaaatgcagattttcgtgaaaacccttacggggaagaccatcaccctcgaggttgaaccctcggatacgatagaaaatgtaaaggccaagatccaggataaggaaggaattcctcctgatcagcagagactgatctttgctggcaagcagctggaagatggacgtactttgtctgactacaatattcaaaaggagtctactcttcatcttgtgttgagacttcgtggtggtgctaagaaaaggaagaagaagtcttacaccactcccaagaagaataagcacaagagaaagaaggttaagctggctgtcctgaaatattataaggtggatgagaatggcaaaattagtcgccttcgtcgagagtgcccttctgatgaatgtggtgctggggtgtttatggcaagtcactttgacagacattattgtggcaaatgttgtctgacttactgtttcaacaaaccagaagacaagtaactgtatgagtt

SEQ ID NO: 69589 - DNA, 796 bp, Artificial Sequence
  derived and/or modified sequence
ggcgttcttccttttcgatccgccatctgcggtgggtgtctgcacttcggctgctctcgggttagcaccctatggtgccttctcttgtgatccctgacctaacctgtctcttccttttcctcaacctcaggtggagccgccaccaaaatgcagattttcgtgaaaacccttacggggaagaccatcaccctcgaggttgaaccctcggatacgatagaaaatgtaaaggccaagatccaggataaggaaggaattcctcctgatcagcagagactgatctttgctggcaagcagctggaagatggacgtactttgtctgactacaatattcaaaaggagtctactcttcatcttgtgttgagacttcgtggtggtgctaagaaaaggaagaagaagtcttacaccactcccaagaagaataagcacaagagaaagaaggttaagctggctgtcctgaaatattataaggtggatgagaatggcaaaattagtcgccttcgtcgagagtgcccttctgatgaatgtggtgctggggtgtttatggcaagtcactttgacagacattattgtggcaaatgttgtctgacttactgtttcaacaaaccagaagacaagtaactgtatgagttaataaaagacatgaactaacatttattgttgggttttattgcagtaaaaagaatggtttttaagcaccaaattgatggtcacaccatttccttttagtagtgctactgctatcgctgtgtgaatgttgcctctggggattatgtgacccagtggttctgtatacctg

SEQ ID NO: 69590 - DNA, 422 bp, Artificial Sequence
  derived and/or modified sequence
gccacgttgattgtacgggaaaagcctttttaaaacatcttttacgttgcttaaacctacagtttcgaaagcattccgaaggctaaagtggagccgccaccaaaatgcagattttcgtgaaaacccttacggggaagaccatcaccctcgaggttgaaccctcggatacgatagaaaatgtaaaggccaagatccaggataaggaaggaattcctcctgatcagcagagactgatctttgctggcaagcagctggaagatggacgtactttgtctgactacaatattcaaaaggagtctactcttcatcttgtgttgagacttcgtggtggtgctaagaaaaggaagaagaagtcttacaccactcccaagaagaataagcacaagagaaagaaggttaagctggctgtcctgaaatattat

SEQ ID NO: 69591 - protein, 837 aa, Artificial Sequence
  derived and/or modified sequence
MADSSEGPRAGPGEVAELPGDESGTPGDGRPNLRMKFQGAFRKGVPNPIDLLESTLYESSVVPGPKKAPMDSLFDYGTYRHHSSDNKRWRKKIIEKQPQSPKAPAPQPPPILKVFNRPILFDIVSRGSTADLDGLLPFLLTHKKRLTDEEFREPSTGKTCLPKALLNLSNGRNDTIPVLLDIAERTGNMREFINSPFRDIYYRGQTALHIAIERRCKHYVELLVAQGADVHAQARGRFFQPKDEGGYFYFGELPLSLAACTNQPHIVNYLTENPHKKADMRRQDSRGNTVLHALVAIADNTRENTKFVTKMYDLLLLKCARLFPDSNLEAVLNNDGLSPLMMAAKTGKIGIFQHIIRREVTDEDTRHLSRKFKDWAYGPVYSSLYDLSSLDTCGEEASVLEILVYNSKIENRHEMLAVEPINELLRDKWRKFGAVSFYINVVSYLCAMVIFTLTAYYQPLEGTPPYPYRTTVDYLRLAGEVITLFTGVLFFFTNIKDLFMKKCPGVNSLFIDGSFQLLYFIYSVLVIVSAALYLAGIEAYLAVMVFALVLGWMNALYFTRGLKLTGTYSIMIQKILFKDLFRFLLVYLLFMIGYASALVSLLNPCANMKVCNEDQTNCTVPTYPSCRDSETFSTFLLDLFKLTIGMGDLEMLSSTKYPVVFIILLVTYIILTFVLLLNMLIALMGETVGQVSKESKHIWKLQWATTILDIERSFPVFLRKAFRSGEMVTVGKSSDGTPDRRWCFRVDEVNWSHWNQNLGIINEDPGKNETYQYYGFSHTVGRLRRDRWSSVVPRVVELNKNSNPDEVVVPLDSMGNPRCDGHQQGYPRKWRTDDAPL

SEQ ID NO: 69592 - DNA, 2514 bp, Artificial Sequence
  derived and/or modified sequence
atggccgacagcagcgagggccccagagccggccccggcgaggtggccgagctgcccggcgacgagagcggcacccccggcgacggcagacccaacctgagaatgaagttccagggcgccttcagaaagggcgtgcccaaccccatcgacctgctggagagcaccctgtacgagagcagcgtggtgcccggccccaagaaggcccccatggacagcctgttcgactacggcacctacagacaccacagcagcgacaacaagagatggagaaagaagatcatcgagaagcagccccagagccccaaggcccccgccccccagcccccccccatcctgaaggtgttcaacagacccatcctgttcgacatcgtgagcagaggcagcaccgccgacctggacggcctgctgcccttcctgctgacccacaagaagagactgaccgacgaggagttcagagagcccagcaccggcaagacctgcctgcccaaggccctgctgaacctgagcaacggcagaaacgacaccatccccgtgctgctggacatcgccgagagaaccggcaacatgagagagttcatcaacagccccttcagagacatctactacagaggccagaccgccctgcacatcgccatcgagagaagatgcaagcactacgtggagctgctggtggcccagggcgccgacgtgcacgcccaggccagaggcagattcttccagcccaaggacgagggcggctacttctacttcggcgagctgcccctgagcctggccgcctgcaccaaccagccccacatcgtgaactacctgaccgagaacccccacaagaaggccgacatgagaagacaggacagcagaggcaacaccgtgctgcacgccctggtggccatcgccgacaacaccagagagaacaccaagttcgtgaccaagatgtacgacctgctgctgctgaagtgcgccagactgttccccgacagcaacctggaggccgtgctgaacaacgacggcctgagccccctgatgatggccgccaagaccggcaagatcggcatcttccagcacatcatcagaagagaggtgaccgacgaggacaccagacacctgagcagaaagttcaaggactgggcctacggccccgtgtacagcagcctgtacgacctgagcagcctggacacctgcggcgaggaggccagcgtgctggagatcctggtgtacaacagcaagatcgagaacagacacgagatgctggccgtggagcccatcaacgagctgctgagagacaagtggagaaagttcggcgccgtgagcttctacatcaacgtggtgagctacctgtgcgccatggtgatcttcaccctgaccgcctactaccagcccctggagggcacccccccctacccctacagaaccaccgtggactacctgagactggccggcgaggtgatcaccctgttcaccggcgtgctgttcttcttcaccaacatcaaggacctgttcatgaagaagtgccccggcgtgaacagcctgttcatcgacggcagcttccagctgctgtacttcatctacagcgtgctggtgatcgtgagcgccgccctgtacctggccggcatcgaggcctacctggccgtgatggtgttcgccctggtgctgggctggatgaacgccctgtacttcaccagaggcctgaagctgaccggcacctacagcatcatgatccagaagatcctgttcaaggacctgttcagattcctgctggtgtacctgctgttcatgatcggctacgccagcgccctggtgagcctgctgaacccctgcgccaacatgaaggtgtgcaacgaggaccagaccaactgcaccgtgcccacctaccccagctgcagagacagcgagaccttcagcaccttcctgctggacctgttcaagctgaccatcggcatgggcgacctggagatgctgagcagcaccaagtaccccgtggtgttcatcatcctgctggtgacctacatcatcctgaccttcgtgctgctgctgaacatgctgatcgccctgatgggcgagaccgtgggccaggtgagcaaggagagcaagcacatctggaagctgcagtgggccaccaccatcctggacatcgagagaagcttccccgtgttcctgagaaaggccttcagaagcggcgagatggtgaccgtgggcaagagcagcgacggcacccccgacagaagatggtgcttcagagtggacgaggtgaactggagccactggaaccagaacctgggcatcatcaacgaggaccccggcaagaacgagacctaccagtactacggcttcagccacaccgtgggcagactgagaagagacagatggagcagcgtggtgcccagagtggtggagctgaacaagaacagcaaccccgacgaggtggtggtgcccctggacagcatgggcaaccccagatgcgacggccaccagcagggctaccccagaaagtggagaaccgacgacgcccccctgtag

SEQ ID NO: 69593 - DNA, 2514 bp, Artificial Sequence
  derived and/or modified sequence
atggctgatagctcagagggacctcgcgcgggtccaggcgaggtggcagaactaccaggggacgagagcggtacccccggcgacggccgcccaaatctgcgcatgaagttccaaggtgccttccggaagggagtaccaaacccaatcgatttactggagagcactttgtatgaaagctcggtggtgcctgggcctaaaaaggccccgatggactcgctgtttgactatgggacctacaggcatcacagttctgataacaaacggtggagaaaaaaaattattgaaaaacagcctcaatctcccaaggccccagctcctcagcctccccctattctgaaagttttcaacagacccattctgtttgatattgtatctcgtggttccactgcagacctcgacggccttctgcctttcctgctgacacataagaaacggctaacagatgaggaattcagggagcccagcacaggcaagacgtgcctgcccaaagcgttgctcaacctatcaaatgggcgaaacgacaccatccccgtgttattagatatcgccgaaagaacaggtaacatgcgcgagttcattaactcaccctttagggatatttattataggggccagacagccttgcacatagccattgagcggcgctgcaagcattacgtggaattacttgtggcacagggcgctgatgttcacgctcaagcccgcggcaggtttttccagcccaaggatgaaggcggttacttttactttggcgagttacccctttctctggcagcatgcacgaaccaaccccatattgttaactatcttactgagaacccgcataagaaagcagacatgcgcagacaggactcgcgaggcaacaccgtgctccatgctctcgtggcaatcgcggacaacacccgggagaacaccaaatttgtgactaaaatgtacgatctgctgctgcttaaatgcgcccgattgttccctgattcaaacctagaagcagttcttaacaacgacggtctgtcccccttgatgatggctgcaaaaacaggaaagatcgggatcttccagcatattatcaggcgggaggttactgatgaggataccaggcatctttccaggaaatttaaagactgggcttacggcccggtttactcaagtctctacgatctgtcaagtctggatacatgtggagaagaagctagcgtgcttgagatcctggtgtataattccaaaatcgaaaatcggcacgaaatgctcgctgtcgagccaataaacgagctcttgcgggacaagtggagaaagtttggggcagtgagcttctatataaacgtcgtgagctacctttgcgctatggtgatcttcactctgacagcttactaccagccactggaaggcacccctccctatccctacagaacgaccgtagactacctgagacttgcaggagaagttataactctgttcacaggcgtcctcttttttttcactaatattaaagatctttttatgaaaaagtgtcctggggttaatagtctttttatcgacgggtcatttcagttactgtatttcatttattcagtactcgtcatcgtctcagcagctctctatctggctggcattgaggcctatctggctgtgatggtgtttgccttggtgctggggtggatgaatgcactgtactttacacggggcctgaagttgacaggaacttattccataatgatccaaaaaatcctgtttaaggacttgtttcggtttcttttggtgtacctcttattcatgatcggatatgctagcgctttagtatctctgttgaacccatgtgcaaatatgaaagtttgtaacgaggatcaaacaaactgcactgtaccaacctatccatcctgtagagacagtgaaacctttagcacattcctcctggacctgtttaaattaacaattggtatgggcgatctggaaatgctgtccagcactaagtacccagtcgtcttcatcattctcctggtgacatatattatattgacgtttgttcttttactcaatatgttaatcgccctaatgggtgagacggttggccaggtcagtaaagaatccaagcacatttggaagctccagtgggccacgacaatccttgatattgaacggtcatttcccgtgttcttgcgtaaagctttccggagcggcgagatggtgaccgtgggcaagagctctgacggcacaccagacaggcgttggtgctttagggtggacgaggtcaactggtctcactggaaccagaatctgggaatcatcaatgaggaccctggaaagaacgaaacttaccaatattacggattctcccatacggtggggagactgcggagggaccgatggtccagtgtggtcccgcgggtggtcgaactgaacaagaactctaacccggacgaggtagtagtgccgctggactccatgggaaatccccgttgtgacggccaccagcaagggtatccgcggaaatggagaactgatgacgcaccactctag

SEQ ID NO: 69594 - DNA, 2514 bp, Artificial Sequence
  derived and/or modified sequence
atggctgacagcagcgagggcccccgggccggccctggagaggtggccgagctgcctggagatgaaagtggcaccccaggagatggccggcccaacctgaggatgaagttccagggcgccttcagaaaaggagtgcccaaccccatcgacctgctggagagcaccctgtatgagagctctgtggtgcccggccccaagaaggcccccatggacagcctgtttgattatggcacctaccgccaccacagcagtgacaacaagcgctggaggaagaagatcatcgagaagcagccccagagccccaaggccccagccccccagcccccacccatcctgaaggtgttcaaccggcccatcctgtttgatattgtgtcccggggcagcacagctgacctggatggcctgctgcccttcctgctgacccacaagaagaggctgacagatgaggagttccgggagcccagcacaggcaagacctgcctgcccaaggccctgctgaacctgagcaatggaagaaatgacaccatccctgtgctgctggacattgctgagaggacaggcaacatgagggagttcatcaacagccccttccgggacatctactaccggggccagacagccctgcacatcgccatcgagcggcgctgcaagcactacgtggagctgctggtggcccagggcgcagatgtgcacgcccaggcccggggccgcttcttccagcccaaggatgaaggaggctacttctactttggagagctgcccctgagcctggccgcctgcaccaaccagccccacatcgtgaactacctgacagagaacccccacaagaaggctgacatgaggcggcaggacagccggggcaacacagtgctgcacgccctggtggccatcgctgacaacacccgggagaacaccaagtttgtgaccaagatgtatgacctgctgctgctgaagtgtgcccggctcttcccagacagcaacctggaggccgtgctgaacaatgatggcctgagccccctgatgatggccgccaagacaggcaagattggcatcttccagcacatcatcagaagagaggtgacagatgaggacaccaggcacctgagcaggaagttcaaggactgggcctacggccctgtgtacagcagcctgtatgacctgagcagcctggacacctgtggggaggaggcctctgtgctggagatcctggtgtacaacagcaagattgagaacagacatgagatgctggccgtggagcccatcaatgagctgctgcgggacaagtggaggaagtttggagctgtgtccttctacatcaacgtggtgtcctacctgtgtgccatggtgatcttcaccctgacagcctactaccagcccctggagggcaccccaccctacccctaccgcaccaccgtggactacctgcggctggccggggaggtgatcaccctcttcaccggggtgctcttcttcttcaccaacatcaaggacctcttcatgaagaagtgccctggggtgaacagcctcttcattgatggcagcttccagctgctgtacttcatctacagcgtgctggtgattgtgtctgctgccctgtacctggccggcatcgaggcctacctggccgtgatggtgtttgccctggtgctgggctggatgaatgccctgtacttcacccggggcctgaagctgaccggcacctacagcatcatgatccagaagatcctcttcaaggacctcttccgcttcctgctggtgtacctgctcttcatgattggctacgccagcgccctggtgtccctgctgaacccctgtgccaacatgaaggtgtgcaatgaagaccagaccaactgcaccgtgcccacctaccccagctgccgggacagcgagaccttcagcaccttcctgctggacctcttcaagctgaccatcggcatgggagacctggagatgctgagcagcaccaagtaccctgtggtgttcatcatcctgctggtgacctacatcatcctgacctttgtgctgctgctgaacatgctgattgccctgatgggagaaacagtgggccaggtgtccaaggagagcaagcacatctggaagctgcagtgggccaccaccatcctggacatcgagaggagcttccctgtgttcctgaggaaggccttccgcagcggggagatggtgacagtgggcaagagcagtgatggcaccccagaccggcgctggtgcttccgggtggatgaggtgaactggagccactggaaccagaacctgggcatcatcaatgaagatcctgggaagaatgagacctaccagtactacggcttcagccacacagtgggccgcctgcggcgggaccgctggagctctgtggtgccccgggtggtggagctgaacaagaacagcaacccagatgaggtggtggtgcccctggacagcatgggcaacccccgctgtgatggccaccagcagggctaccccaggaagtggaggacagatgatgcccccctgtag

SEQ ID NO: 69595 - DNA, 2514 bp, Artificial Sequence
  derived and/or modified sequence
atggccgacagcagcgagggcccccgggccggccccggcgaggtggccgagctgccgggggatgagtcagggacacctggagacggccgacctaatctccgcatgaaatttcagggcgcctttaggaaaggcgtgcctaacccaatcgacctgctggagtccactctgtacgaaagttctgtggtgccggggcccaaaaaagccccaatggacagcctcttcgattatggtacatacagacatcattcgagtgataataaaagatggcgtaagaaaatcatcgagaaacaaccccagagccccaaagcccctgcgcctcagcccccccccatccttaaggtcttcaaccgcccaatcctcttcgacatcgtgtctcgaggctccactgcagacctggatgggctcctgccctttctgctcacccataaaaaaagactcactgacgaggaattcagagaacccagtactgggaaaacatgcctccccaaggctttactcaacttgagcaatggcaggaatgacacaataccagtgctcctggacattgccgagagaactggcaacatgagagagttcatcaacagcccatttcgcgatatatactatcgaggccagacggctttgcatatcgcaattgaacggcggtgtaaacattatgtagaactgctggttgcacaaggtgcggatgtgcatgctcaggctaggggcaggttttttcagcctaaagatgagggaggttatttttattttggtgagctgcccctgtctttggctgcatgcaccaaccaaccacacatcgtgaactatttgactgagaacccccataagaaagcggacatgcgccgccaggacagcaggggcaacacagtactgcacgcgcttgtggcgatagccgataataccagggaaaacaccaaattcgtgactaagatgtacgacttgctactcctcaaatgtgcacgcctgtttcctgactccaacttggaggccgttctcaacaacgacggactgtctccactgatgatggctgccaagacaggtaaaattggtattttccagcatattattaggcgggaggtgacagacgaggatacgaggcacctaagcagaaagttcaaggactgggcatacggcccagtctattcttcgctgtatgatctcagctcgctcgatacatgtggcgaagaagcgagcgttctcgagatccttgtgtataactccaaaatcgaaaaccggcacgagatgctcgccgttgagccaatcaatgaactgctgcgcgataaatggaggaagttcggagccgtctccttctatattaatgttgttagctatctgtgcgccatggtcattttcacgctgactgcatactatcagccattggagggaacccctccttatccataccggaccacagtggactatttacgattggctggtgaagtgatcaccctgttcaccggcgtgttattcttttttactaatatcaaggatctgttcatgaagaagtgtcccggcgtcaatagtctcttcatcgatggctcgttccaactactctattttatctacagcgtccttgttatcgtgtctgccgcactctaccttgccgggatcgaagcctatttagccgtgatggtcttcgcactcgtgctgggttggatgaacgctctgtacttcacccgtggcctgaagctgactggaacttattctattatgatacaaaagatactctttaaggatctcttcaggttcttgctggtgtatctccttttcatgataggttacgcatccgccctggtcagcctcctcaacccgtgtgccaacatgaaggtctgcaatgaagaccaaaccaattgcactgtgcctacgtacccatcctgtagggatagtgaaaccttcagcacttttcttcttgatttattcaagcttaccatcggcatgggcgacctcgaaatgctatcttccaccaagtatcctgtcgtgtttataatccttctcgtcacatacatcatactgaccttcgtcctcctgttgaacatgctgatcgcccttatgggggagaccgtgggccaggtgtcgaaggagtcgaaacatatctggaaactgcagtgggccaccactatcctcgatattgagagaagctttcctgtgtttctgaggaaggctttcaggagtggagagatggtgactgtagggaagtcctctgacggcacaccggataggaggtggtgcttccgagtcgatgaagtgaactggagccactggaatcagaatctgggcatcatcaacgaagaccctggtaaaaacgaaacataccagtattatggattctctcacaccgtaggccggctgcgcagagatcgctggagctcagtggttcccagagtggtcgaactgaataaaaattcaaatcccgacgaagtcgtggttcccctggattcaatgggaaatccgcggtgtgatggccatcaacagggatatcccagaaagtggaggaccgacgatgcacctctttag

SEQ ID NO: 69596 - DNA, 2514 bp, Artificial Sequence
  derived and/or modified sequence
atggccgacagtagcgaaggccctagagcagggcctggggaggtcgccgagttacccggagacgaatccggaacaccaggcgatggaagacccaatctgcgcatgaagtttcagggcgcatttcggaaaggagtccctaatcctatcgatctcctggagtctactctgtatgaatctagtgtcgtgccagggccaaaaaaagcccctatggattccctcttcgattatggcacctatcggcaccactcttctgataacaaaaggtggagaaagaagatcattgagaaacaacctcagagccctaaggccccagcaccacaaccccctccaatcctgaaagtctttaatcgccctatcttgtttgacattgtcagcagaggtagcaccgcagacctcgatggcctgcttcccttcctgctgacgcacaagaagcgactaactgatgaggaatttagagagccttcaacgggcaagacctgcctcccaaaggctttgcttaatttgagtaacggaagaaacgataccattcccgtactattagacatcgccgaacgtactggaaatatgagggagttcatcaattcgcctttccgggatatctactatcgcggtcaaacagccctgcacattgcaatcgaaaggagatgtaagcactatgtggaactcctggtagctcaaggcgctgatgtacacgcacaagctcggggacgtttctttcagcctaaggacgaagggggatatttttatttcggggaattgcctctttcattggcggcatgcacaaatcagccacacatagtcaattatctcacagaaaatcctcacaaaaaagccgatatgcgacggcaggacagtcggggtaacactgtgctgcacgcactggtggccattgccgacaatacaagggagaacacgaagttcgtgacgaaaatgtacgatcttctgctgctgaaatgcgcacgactgttccccgattcaaatctggaggcagtcttgaacaatgacgggctttcacccctgatgatggccgctaagaccggtaagatcggaatcttccagcatatcatccgcagggaagtgaccgacgaggataccaggcatctctccaggaagtttaaggattgggcttacggtcccgtttatagcagtctctatgatctttcaagtttggatacatgtggcgaggaagcctccgtgttggagattctagtgtacaatagcaagatagaaaatcgccatgagatgctcgctgttgaacctatcaatgaactattgagagacaagtggcgtaaattcggcgctgtttccttctacattaacgtggtcagttacttgtgcgccatggtgatttttacacttaccgcttactatcagcctctggaagggactccgccttatccttaccggactaccgtggactatcttcgccttgctggcgaggtaatcaccctgtttacaggcgtgcttttcttcttcactaatataaaagatttgtttatgaaaaagtgccctggtgtaaacagcctgttcatcgacggcagcttccagctgctatacttcatctacagcgtactggttatcgtgtcagctgccctctacttggctggtatcgaggcctatcttgccgtgatggtctttgcccttgtgttgggatggatgaatgcactctattttactcggggactgaagctgacggggacgtatagcataatgattcagaaaatcttgttcaaggacctcttccgctttcttctggtgtacctcttgtttatgatcggctatgcatctgcccttgtcagtctgctgaatccctgtgccaatatgaaggtatgcaatgaggaccaaacgaattgtacagtcccgacttatccatcatgtagagatagcgaaacattttcaacatttcttctggacctcttcaagttaaccattggaatgggcgacctcgaaatgctttccagtactaaatacccagtggtgtttatcattcttttggtgacatacatcatcctcaccttcgtgctgttactcaatatgctcatagccctaatgggggaaaccgtcggccaagtttccaaagagtcgaaacatatctggaagctgcagtgggcaacaactatcctggacatagaaaggagctttccggtgttcctacggaaagcttttaggtcaggggagatggtgaccgtggggaagagctctgatggcaccccagaccgccgttggtgtttccgggttgacgaagttaactggagccactggaaccagaatctcggaatcatcaatgaagatcctgggaagaacgagacttaccagtactatggctttagccacaccgtgggacgtcttagaagggaccgttggtcatctgtagtgcctcgggtggtggagctgaacaagaacagcaatcctgatgaagtagtggtgcccttggacagtatgggaaaccctcggtgtgacggccaccagcaggggtatcctcggaagtggcgcacagatgacgcaccactgtag

SEQ ID NO: 69597 - DNA, 2514 bp, Artificial Sequence
  derived and/or modified sequence
atggcggattccagcgaaggcccccgcgcggggcccggggaggtggctgagctccccggggatgagagtggcaccccaggcgatgggcgaccaaatctgcgcatgaagttccagggcgccttccgcaagggggtgcccaaccccatcgatctgctggagtccaccctatatgagtcctcggtggtgcctgggcccaagaaagcacccatggactcactgtttgactacggcacctatcgtcaccactccagtgacaacaagaggtggaggaagaagatcatagagaagcagccgcagagccccaaagcccctgcccctcagccgccccccatcctcaaagtcttcaaccggcctatcctctttgacatcgtgtcccggggctccactgctgacctggacgggctgctcccattcttgctgacccacaagaaacgcctaactgatgaggagtttcgagagccatctacggggaagacctgcctgcccaaggccttgctgaacctgagcaatggccgcaacgacaccatccctgtgctgctggacatcgcggagcgcaccggcaacatgagggagttcattaactcgcccttccgtgacatctactatcgaggtcagacagccctgcacatcgccattgagcgtcgctgcaaacactacgtggaacttctcgtggcccagggagctgatgtccacgcccaggcccgtgggcgcttcttccagcccaaggatgaggggggctacttctactttggggagctgcccctgtcgctggctgcctgcaccaaccagccccacattgtcaactacctgacggagaacccccacaagaaggcggacatgcggcgccaggactcgcgaggcaacacagtgctgcatgcgctggtggccattgctgacaacacccgtgagaacaccaagtttgttaccaagatgtacgacctgctgctgctcaagtgtgcccgcctcttccccgacagcaacctggaggccgtgctcaacaacgacggcctctcgcccctcatgatggctgccaagacgggcaagattgggatctttcagcacatcatccggcgggaggtgacggatgaggacacacggcacctgtcccgcaagttcaaggactgggcctatgggccagtgtattcctcgctttatgacctctcctccctggacacgtgtggggaagaggcctccgtgctggagatcctggtgtacaacagcaagattgagaaccgccacgagatgctggctgtggagcccatcaatgaactgctgcgggacaagtggcgcaagttcggggccgtctccttctacatcaacgtggtctcctacctgtgtgccatggtcatcttcactctcaccgcctactaccagccgctggagggcacaccgccgtacccttaccgcaccacggtggactacctgcggctggctggcgaggtcattacgctcttcactggggtcctgttcttcttcaccaacatcaaagacttgttcatgaagaaatgccctggagtgaattctctcttcattgatggctccttccagctgctctacttcatctactctgtcctggtgatcgtctcagcagccctctacctggcagggatcgaggcctacctggccgtgatggtctttgccctggtcctgggctggatgaatgccctttacttcacccgtgggctgaagctgacggggacctatagcatcatgatccagaagattctcttcaaggaccttttccgattcctgctcgtctacttgctcttcatgatcggctacgcttcagccctggtctccctcctgaacccgtgtgccaacatgaaggtgtgcaatgaggaccagaccaactgcacagtgcccacttacccctcgtgccgtgacagcgagaccttcagcaccttcctcctggacctgtttaagctgaccatcggcatgggcgacctggagatgctgagcagcaccaagtaccccgtggtcttcatcatcctgctggtgacctacatcatcctcacctttgtgctgctcctcaacatgctcattgccctcatgggcgagacagtgggccaggtctccaaggagagcaagcacatctggaagctgcagtgggccaccaccatcctggacattgagcgctccttccccgtattcctgaggaaggccttccgctctggggagatggtcaccgtgggcaagagctcggacggcactcctgaccgcaggtggtgcttcagggtggatgaggtgaactggtctcactggaaccagaacttgggcatcatcaacgaggacccgggcaagaatgagacctaccagtattatggcttctcgcataccgtgggccgcctccgcagggatcgctggtcctcggtggtaccccgcgtggtggaactgaacaagaactcgaacccggacgaggtggtggtgcctctggacagcatggggaacccccgctgcgatggccaccagcagggttacccccgcaagtggaggactgatgacgccccgctctag

SEQ ID NO: 69598 - protein, 998 aa, Artificial Sequence
  derived and/or modified sequence
MDDWKSRLVIKSMLPHFAMVGNRQEPRKLQESGTVKRRQEEDHFQFPDMADGGYPNKIKRPCLEDVTLAMGPGAHPSTACAELQVPPLTINPSPAAMGVAGQSLLLENNPMNGNIMGSPFVVPQTTEVGLKGPTVPYYEKINSVPAVDQELQELLEELTKIQDPSPNELDLEKILGTKPEEPLVLDHPQATLSTTPKPSVQMSHLESLASSKEFASSCSQVTGMSLQIPSSSTGISYSIPSTSKQIVSPSSSMAQSKSQVQAMLPVALPPLPVPQWHHAHQLKALAASKQGSATKQQGPTPSWSGLPPPGLSPPYRPVPSPHPPPLPLPPPPPPFSPQSLMVSCMSSNTLSGSTLRGSPNALLSSMTSSSNAALGPAMPYAPEKLPSPALTQQPQFGPQSSILANLMSSTIKTPQGHLMSALPASNPGPSPPYRPEKLSSPGLPQQSFTPQCSLIRSLTPTSNLLSQQQQQQQQQQQANVIFKPISSNSSKTLSMIMQQGMASSSPGATEPFTFGNTKPLSHFVSEPGPQKMPSMPTTSRQPSLLHYLQQPTPTQASSATASSTATATLQLQQQQQQQQQQPDHSSFLLQQMMQQPQRFQRSVASDSMPALPRQQEEQRSGLMAMTPERQNAYISQQMSPFEAVQEQVTSKCSRIKASPPSSKHLMPPRTGLLQNNLSPGMIPLTRHQSCEGMGVISPTLGKRQGIFTSSPQCPILSHSGQTPLGRLDSVCQHMQSPKATPPEVPLPGFCPSSLGTQSLSPHQLRRPSVPRMPTAFNNAAWVTAAAAVTTAVSGKTPLSQVDNSVQQHSPSGQACLQRPSDWEAQVPAAMGTQVPLANNPSFSLLGSQSLRQSPVQGPVPVANTTKFLQQGMASFSPLSPIQGIEPPSYVAAAATAAAASAVAASQFPGPFDRTDIPPELPPADFLRQPQPPLNDLISSPDCNEVDFIEALLKGSCVSPDEDWVCNLRLIDDILEQHAAAQNATAQNSGQVTQDAGAL

SEQ ID NO: 69599 - DNA, 4413 bp, Artificial Sequence
  derived and/or modified sequence
ggcgcggagccgggcggtgggaatggagcgagcagattgaggccgccactgcagcgccgccagcatgaacttggccgcgagctgaagcggccggcggcgggcgggcgcgggggcaccggccgctagccagggggtgatctgcaacagggctgggttccttggcggccgcctgagtccaggctgcccgcgccggcggccgcccgcccctcggacactgcccccgccgccgccggagctctgcagcacgccctgtgtctaggtcgtttgggaaacgccttggagagtcaagaataaatttgcaggtcaaacaatggatgactggaaaagtcggcttgtaatcaagagcatgcttccccatttcgccatggtgggaaatcgtcaggagcccagaaagctccaggaatcgggaactgttaagaggagacaagaagaagaccacttccagtttccagacatggctgatgggggctaccctaataaaattaagaggccttgccttgaagatgtcacccttgcaatgggcccaggtgctcatcctagtactgcttgtgcagaactgcaggtccctccattgacaataaatcctagccctgcggctatgggagtggctggccagtcattactgctggagaataaccctatgaatggcaacatcatgggctcaccatttgtagtaccacagactacagaagtgggactgaaagggcccactgttccttactatgagaaaatcaacagcgtgccggctgtagaccaggagcttcaagagctgctagaggagctcaccaaaattcaagacccttctccaaatgagctagatcttgagaagatactggggacgaagccagaagagccactggttttagatcatccccaggcaaccctaagcacaactcccaagccttcggttcagatgtcacacttggagagcctggcttccagcaaggagtttgcttctagttgcagccaagttactggcatgtcacttcagatcccatcctcctccacagggatcagctattcgattccttccaccagtaagcagatagtgtcaccgagttcttcaatggcacagtccaagagccaggtccaggccatgctccctgtcgctctgccccccttaccagtgcctcagtggcatcacgcccaccagctgaaggcgttggcagccagcaagcaggggtctgctacaaagcagcaagggcccacccccagttggtctggtctgcctcctccaggactctctccaccttaccgcccagtgccatcaccacacccaccaccgctgccactgccaccaccaccacccccattcagcccccagagcctcatggtgtcctgcatgtcgtccaataccttgtcgggtagcactctccgaggctctcccaatgccttactgtcaagcatgacgtccagcagcaatgctgccctggggcccgccatgccctatgctcctgagaagctccccagccctgctctcactcaacagccgcagttcggccctcagagctccattcttgccaacctcatgtcctctaccatcaaaacccctcaaggacacctgatgtctgctctgcctgccagcaaccctgggccgtccccaccctatcgcccagagaagctctctagcccaggcttgccacagcagtccttcaccccacagtgttccctgatccgaagcctcactcccaccagtaatcttctaagccagcaacagcagcagcagcagcagcagcagcaagcaaatgtgatctttaagcccataagcagcaactcatccaaaaccctgagcatgatcatgcagcaggggatggcaagctccagcccaggagccacggagccatttacttttggcaacaccaagcccttgtcccattttgtttctgagccgggtccccagaagatgccctccatgcctaccacctctaggcagccttccctgctccactacctgcagcagccgacaccaacgcaggcctcctcagccactgcctcctccacggccactgccaccttgcagctgcagcagcagcagcagcaacagcagcagcagcctgaccattcttcattccttctgcagcagatgatgcagcaaccccagcgttttcagcgatcagtggcctcagattccatgcctgctctgcccagacagcaagaggaacagagatcaggtcttatggcaatgacccctgaacggcagaatgcatatatctcccaacagatgagtccatttgaagccgtccaagaacaagtcacctccaagtgtagccggatcaaggcaagccccccatctagcaagcacttgatgccacccagaactgggcttcttcagaacaatctgagtccaggaatgatcccactcaccaggcaccagagctgcgagggcatgggagtgatctcaccaactctggggaagcggcaaggaattttcacctccagcccccagtgtcccatcctctcacactcaggccagactcccctgggcagacttgactctgtctgccagcatatgcagagccccaaggccaccccaccagaagtgcccctgcctgggttctgtcccagctccctgggcacccagtccttgagtccccaccagctcagacggcctagtgtgccaagaatgcccactgcgttcaacaatgctgcatgggtcacagcggcagcagctgtgaccacagcagtttcggggaaaacacccctcagccaagtggataatagcgttcagcagcactcaccttctggccaggcctgccttcagaggccatctgattgggaggcacaagtgcccgctgcgatgggaacacaagtgcccctggccaacaaccccagcttcagcctgctgggcagccagagcctcaggcagagcccggtacagggcccggtgcctgtagcaaacaccaccaagttcctccagcagggtatggccagctttagtcccctgagccccatacagggcatcgagccaccaagctatgtggctgctgctgccaccgctgctgctgcttctgccgttgctgccagccagttcccaggtccgttcgacagaacggatattccccctgagctgccacctgccgactttttgcgccagccccaacccccactaaatgatctgatttcgtcacctgactgcaatgaggtagatttcattgaagctctcttgaaaggctcctgtgtgagcccagatgaagactgggtgtgcaacttgaggctgatcgacgacattttggaacagcatgctgctgctcaaaatgccacagcccagaattctgggcaagtcacccaggatgctggggcactttaaatctgagcaggatgcccatagaaacccccatggtgacatcactctaggaagtggtgtcgatccatacccgcagttgtctcccgttacaatttgagtggtgttgtcagcccatgcttatccctctctctacctgtgacaaaatggaaagctggtgatttttcaagctacgtgtacatatttgaaaattttgtaaatggttttcctaaacattaatgacagaagtatttatacttcattttgtgactttgtaaataaagcgacggcttttgtttcagtagagttgtgtttactatgcattgttttgtgtttattatacaatgttacaaatatgcagaccgtgttgtttgctccagtgataccttgttaagctaggtggctgagtcgcttatggttttaatgcaatgagcaatgtggatatgaccaagagttgttgtgcaagttgacaaatgccaaatagaaaaccacttggccatttatttctatgttcactaaaaatcctattgccttgtgtgattcttaatctcttttgcgaacctttcagtctccgctagctctttcctaatgagctttacagcagaagctgttttatcgttaagtgccccacagagacactttaccaggaggctgggagagttctccagatttgggagaggcgcagagacagtgtgtgagccgagccctgtctcagcaatccacctggaggagctagagtatcctcctccctttaccattcagaccgagagaaaaagcccagcttgtgtgcaccctcgtggggttaaggcgagctgttcctggtttaaagcctttcagtatttgttttgatgtaaggctctgtggtttgggggggaacatctgtaaacattattagttgatttggggtttgtctttgatggtttctatctgcaattatcgtcatgtatatttaagtgtctgttatagaaaacccacacccactgtcctgtaaacttttctcagtgtccagactttctgtaatcacattttaattgccacctcgtatttcacctctacatttgaaatctggcgtctgtttcaagccagtgtgttttttcttcgttctgtaataaacagccaggagaaaagtgcca

SEQ ID NO: 69600 - DNA, 2997 bp, Artificial Sequence
  derived and/or modified sequence
atggatgactggaagtccaggcttgtcatcaaatctatgctgccccacttcgccatggtaggaaataggcaggaaccacggaaacttcaggagtccggaactgtaaagcgtagacaggaggaagaccatttccagttcccagatatggcggatgggggatatcccaacaaaatcaagcgcccttgtctggaggatgtgacactagccatggggccgggcgctcacccttctaccgcttgtgccgagctgcaggtcccccccctgacaatcaatccttctcccgctgcaatgggcgtggctgggcaatccttactgctggagaacaatcctatgaacgggaacattatgggctcaccttttgtggtgccacaaacgacagaagtgggattaaaagggcctacagttccgtactacgaaaagatcaattcagtgcctgcggtagaccaggaactgcaagagctgcttgaggaactcacaaaaatacaggacccaagcccaaatgagctggatcttgagaaaatactgggcaccaaaccggaagagccactggtgctcgatcacccacaggctacacttagtaccactcctaagccctctgttcagatgtcacacctagagtccctggcgagttctaaggagttcgctagcagttgttcccaggtgaccggcatgagcctgcagatcccctcgagctcaactggcatatcctacagcatcccctccacctctaaacagatcgtctcccctagctcctccatggcacagtccaagtcacaggtgcaggccatgcttcctgtcgccctccctcccctcccggtccctcagtggcaccacgcccatcaactgaaggccctggctgcctctaaacaggggagcgcaaccaaacagcagggacctactccatcctggtccggattaccccccccgggactcagtcctccctacaggccagtcccctctccccatccaccacctcttcccctgccacctcccccccctccattctcaccccaatccctgatggttagttgcatgagttccaacacactatccggaagcactctgagaggtagtcccaatgctttgctgtccagcatgacctccagcagcaatgccgccctgggccctgctatgccctatgcaccagaaaagttgccctcgcctgcattgacacagcagccacaattcggaccacagtcaagcatccttgccaacctgatgagcagtacaattaaaacaccacaaggccacctcatgtcagccctgccggccagtaatccagggccctctcctccctataggcccgaaaagttgtcgtcaccaggactcccccagcagtctttcactccgcaatgttccctgattaggagcctgacacccactagcaacctgctgtctcagcagcagcaacagcagcaacaacaacagcaggccaacgtcatttttaagccaatctctagcaatagcagcaaaactcttagcatgataatgcagcagggcatggcctccagttcaccaggcgctaccgagccgttcacattcggcaataccaaaccgctgtctcactttgtgtccgagcccggcccacagaaaatgccaagcatgcctaccacttcgcgacaacctagcctcctgcattacctgcaacaaccaacaccaacccaggcatcctctgctaccgccagctccacggccaccgccaccctgcagctgcaacaacaacagcagcagcagcaacagcagccggaccacagttcctttctgctgcagcagatgatgcagcagccacagcggtttcagcggtccgtggccagcgactcgatgccagccctgccgcgacagcaggaggagcagaggtccggtctgatggctatgacacccgagcgccaaaacgcatacattagtcaacagatgagcccattcgaggcagtccaagagcaagttacctccaagtgctccagaatcaaagcctcgccccccagctctaagcacctcatgcccccacgcaccggcctactgcagaacaatttgagtccgggcatgatccccctgactcgccaccagtcatgtgagggaatgggagtgatcagtcctacactcgggaagcgacaagggatctttaccagcagtccgcagtgtcccatcctcagtcactcgggccagaccccccttggccgtttagatagcgtatgtcaacacatgcaaagccccaaggctactccccccgaggtacctctgcccggattctgcccctcatcccttggtacgcaaagcctctctcctcaccagcttcgccggccatctgttccccgaatgcccactgcgttcaataacgccgcttgggtgactgccgctgctgctgtgaccacggctgtgtctgggaaaactcccctatctcaagttgacaactctgtacagcaacattccccatccggccaagcttgtctgcagcgccccagcgactgggaagcacaggtgccagccgcaatgggcactcaggtgccactcgcaaataatccttccttctctttactggggagccagtcccttcgtcagagtcctgtgcagggacccgttcctgtcgccaatacaacaaagttcctgcaacaggggatggcttcatttagccctctgtcgcccatccagggtattgagcctccctcctacgtcgccgccgccgccacagcagccgctgccagcgcagtggccgccagccagttcccaggccctttcgaccgaaccgatattcctcccgagctacctcctgctgactttttgaggcagccgcagccccccctgaacgacctgatttcctccccagattgtaacgaggtcgatttcattgaggctctcctgaaagggtcctgcgtgtctcccgatgaagattgggtgtgcaatctgcggctcatcgatgatattttggagcagcacgcggctgcgcaaaacgcgacagcacaaaacagcgggcaagtgacgcaagacgccggcgctctttag

SEQ ID NO: 69601 - DNA, 2997 bp, Artificial Sequence
  derived and/or modified sequence
atggatgactggaagagccggctggtgatcaagtccatgctgccccactttgccatggtgggcaaccggcaggagcccaggaagctgcaggagagcggcaccgtgaagaggcggcaggaggaggaccacttccagttcccagacatggctgatggcggctaccccaacaagatcaagaggccctgcctggaggatgtgaccctggccatgggccctggggcccaccccagcacagcctgtgccgagctgcaggtgccccccctgaccatcaaccccagccctgctgccatgggcgtggccggccagagcctgctgctggagaacaaccccatgaatggaaacatcatgggcagcccctttgtggtgccccagaccacagaggtgggcctgaagggccccaccgtgccctactatgagaagatcaacagcgtgcctgctgtggaccaggagctgcaggagctgctggaggagctgaccaagatccaggaccccagccccaatgagctggacctggagaagatcctgggcaccaagccagaggagcccctggtgctggaccacccccaggccaccctgagcaccacccccaagcccagcgtgcagatgagccacctggagagcctggccagcagcaaggagtttgccagcagctgcagccaggtgacaggcatgagcctgcagatccccagcagcagcacaggcatctcctacagcatccccagcaccagcaagcagatcgtgagccccagcagctccatggcccagagcaagagccaggtgcaggccatgctgcctgtggccctgccccccctgcctgtgccccagtggcaccacgcccaccagctgaaggccctggccgccagcaagcagggcagcgccaccaagcagcagggccccacccccagctggagcggcctgcccccacctggcctgagccccccctacagacctgtgcccagcccccaccccccacccctgcccctgcccccacctcctccacccttcagcccccagagcctgatggtgtcctgcatgagcagcaacaccctgagcggcagcaccctgcggggcagccccaatgccctgctgagctccatgaccagcagcagcaatgctgccctgggccctgccatgccctatgcccctgagaagctgcccagccctgccctgacccagcagccccagtttggcccccagagcagcatcctggccaacctgatgagcagcaccatcaagaccccccagggccacctgatgtctgccctgcctgccagcaaccctggccccagccccccctacagacctgagaagctgagcagccctggcctgccccagcagagcttcaccccccagtgcagcctcatccgcagcctgacccccaccagcaacctgctgagccagcagcagcagcagcagcagcagcagcagcaggccaacgtcatcttcaagcccatcagcagcaacagcagcaagaccctgtccatgatcatgcagcagggcatggccagcagcagccctggggccacagagcccttcaccttcggcaacaccaagcccctgagccactttgtgtctgagcccggcccccagaagatgcccagcatgcccaccaccagccggcagcccagcctgctgcactacctgcagcagcccacccccacccaggccagcagcgccacagccagcagcacagccacagccaccctgcagctgcagcagcagcagcagcagcagcagcagcagcctgaccacagcagcttcctgctgcagcagatgatgcagcagccccagcgcttccagaggtctgtggccagtgacagcatgcctgccctgccccggcagcaggaggagcagaggagcggcctgatggccatgaccccagagcggcagaatgcctacatcagccagcagatgagcccctttgaagctgtgcaggagcaggtgaccagcaagtgcagccgcatcaaggccagcccccccagcagcaagcacctgatgccacccaggacaggcctgctgcagaacaacctgagccctggcatgatccccctgaccaggcaccagagctgtgagggcatgggcgtcatcagccccaccctgggcaagaggcagggcatcttcaccagcagcccccagtgccccatcctgagccacagcggccagacccccctgggccgcctggacagcgtgtgccagcacatgcagagccccaaggccaccccacctgaggtgcccctgcccggcttctgccccagcagcctgggcacccagagcctgagcccccaccagctgcggcggcccagcgtgcccaggatgcccacagccttcaacaatgctgcctgggtgacagctgctgctgctgtgaccacagctgtgtctgggaagacccccctgagccaggtggacaacagcgtgcagcagcacagccccagcggccaggcctgcctgcagaggcccagcgactgggaggcccaggtgcctgctgccatgggcacccaggtgcccctggccaacaaccccagcttcagcctgctgggcagccagagcctgcggcagagccctgtgcagggccctgtgcctgtggccaacaccaccaagttcctgcagcagggcatggccagcttcagccccctgagccccatccagggcatcgagccccccagctatgtggccgctgctgccacagctgctgctgccagcgctgtggccgccagccagtttcctggcccctttgacagaacagacatccccccagagctgcccccagctgacttcctgcggcagccccagccccccctgaatgacctgatcagcagcccagactgcaatgaggtggacttcatcgaggccctgctgaagggcagctgtgtgtccccagatgaggactgggtgtgcaacctgcggctgattgatgacatcctggagcagcacgccgccgcccagaatgccacagcccagaacagcggccaggtgacccaggatgctggggccctgtag

SEQ ID NO: 69602 - DNA, 3224 bp, Artificial Sequence
  derived and/or modified sequence
gatctgcaacagggctgggttccttggcggccgcctgagtccaggctgcccgcgccggcggccgcccgcccctcggacactgcccccgccgccgccggagctctgcagcacgccctgtgtctaggtcgtttgggaaacgccttggagagtcaagaataaatttgcaggtcaaacaatggatgactggaaaagtcggcttgtaatcaagagcatgcttccccatttcgccatggtgggaaatcgtcaggagcccagaaagctccaggaatcgggaactgttaagaggagacaagaagaagaccacttccagtttccagacatggctgatgggggctaccctaataaaattaagaggccttgccttgaagatgtcacccttgcaatgggcccaggtgctcatcctagtactgcttgtgcagaactgcaggtccctccattgacaataaatcctagccctgcggctatgggagtggctggccagtcattactgctggagaataaccctatgaatggcaacatcatgggctcaccatttgtagtaccacagactacagaagtgggactgaaagggcccactgttccttactatgagaaaatcaacagcgtgccggctgtagaccaggagcttcaagagctgctagaggagctcaccaaaattcaagacccttctccaaatgagctagatcttgagaagatactggggacgaagccagaagagccactggttttagatcatccccaggcaaccctaagcacaactcccaagccttcggttcagatgtcacacttggagagcctggcttccagcaaggagtttgcttctagttgcagccaagttactggcatgtcacttcagatcccatcctcctccacagggatcagctattcgattccttccaccagtaagcagatagtgtcaccgagttcttcaatggcacagtccaagagccaggtccaggccatgctccctgtcgctctgccccccttaccagtgcctcagtggcatcacgcccaccagctgaaggcgttggcagccagcaagcaggggtctgctacaaagcagcaagggcccacccccagttggtctggtctgcctcctccaggactctctccaccttaccgcccagtgccatcaccacacccaccaccgctgccactgccaccaccaccacccccattcagcccccagagcctcatggtgtcctgcatgtcgtccaataccttgtcgggtagcactctccgaggctctcccaatgccttactgtcaagcatgacgtccagcagcaatgctgccctggggcccgccatgccctatgctcctgagaagctccccagccctgctctcactcaacagccgcagttcggccctcagagctccattcttgccaacctcatgtcctctaccatcaaaacccctcaaggacacctgatgtctgctctgcctgccagcaaccctgggccgtccccaccctatcgcccagagaagctctctagcccaggcttgccacagcagtccttcaccccacagtgttccctgatccgaagcctcactcccaccagtaatcttctaagccagcaacagcagcagcagcagcagcagcagcaagcaaatgtgatctttaagcccataagcagcaactcatccaaaaccctgagcatgatcatgcagcaggggatggcaagctccagcccaggagccacggagccatttacttttggcaacaccaagcccttgtcccattttgtttctgagccgggtccccagaagatgccctccatgcctaccacctctaggcagccttccctgctccactacctgcagcagccgacaccaacgcaggcctcctcagccactgcctcctccacggccactgccaccttgcagctgcagcagcagcagcagcaacagcagcagcagcctgaccattcttcattccttctgcagcagatgatgcagcaaccccagcgttttcagcgatcagtggcctcagattccatgcctgctctgcccagacagcaagaggaacagagatcaggtcttatggcaatgacccctgaacggcagaatgcatatatctcccaacagatgagtccatttgaagccgtccaagaacaagtcacctccaagtgtagccggatcaaggcaagccccccatctagcaagcacttgatgccacccagaactgggcttcttcagaacaatctgagtccaggaatgatcccactcaccaggcaccagagctgcgagggcatgggagtgatctcaccaactctggggaagcggcaaggaattttcacctccagcccccagtgtcccatcctctcacactcaggccagactcccctgggcagacttgactctgtctgccagcatatgcagagccccaaggccaccccaccagaagtgcccctgcctgggttctgtcccagctccctgggcacccagtccttgagtccccaccagctcagacggcctagtgtgccaagaatgcccactgcgttcaacaatgctgcatgggtcacagcggcagcagctgtgaccacagcagtttcggggaaaacacccctcagccaagtggataatagcgttcagcagcactcaccttctggccaggcctgccttcagaggccatctgattgggaggcacaagtgcccgctgcgatgggaacacaagtgcccctggccaacaaccccagcttcagcctgctgggcagccagagcctcaggcagagcccggtacagggcccggtgcctgtagcaaacaccaccaagttcctccagcagggtatggccagctttagtcccctgagccccatacagggcatcgagccaccaagctatgtggctgctgctgccaccgctgctgctgcttctgccgttgctgccagccagttcccaggtccgttcgacagaacggatattccccctgagctgccacctgccgactttttgcgccagccccaacccccactaaatgatctgatttcgtcacctgactgcaatgaggtagatttcattgaagctctcttgaaaggctcctgtgtgagcccagatgaagactgggtgtgcaacttgaggctgatcgacgacattttggaacagcatgctgctgctcaaaatgccacagcccagaattctgggcaagtcacccaggatgctggggcactttaaatctgagcaggatgcccatagaaacccccatggtgacatcactctaggaagt

SEQ ID NO: 69603 - DNA, 2997 bp, Artificial Sequence
  derived and/or modified sequence
atggacgactggaagagccggctggtgatcaagagcatgctgccccacttcgccatggtaggcaaccgtcaggagccacggaaacttcaggagtccggaacagtgaaaagacgccaggaggaagaccatttccaatttcccgacatggctgatggcggatacccaaacaaaattaaacgaccttgccttgaagacgttacactggcaatgggccctggtgcacatccctccaccgcatgtgctgagctacaagtgccgccattgacaataaacccgtcaccagctgcgatgggggttgcaggacagtccctactgctcgagaataatccaatgaatggaaacataatgggaagcccctttgtcgtgcctcagactacagaggtgggtctcaaggggccaacggtgccatactatgaaaaaatcaactcagtcccagccgtcgatcaggagctgcaggaactactcgaggaacttacgaaaatccaagacccctctccaaatgaacttgatctggagaagattctgggcaccaagcccgaagaaccccttgtgcttgatcaccctcaggctactctaagcactacgcccaaaccttctgttcagatgagtcatctcgagagcctggcctcatcaaaggagttcgcttccagttgtagtcaggttacaggcatgagtctccagatcccgtcttcctctaccgggatttcttacagtatcccaagcaccagtaagcagatcgtatcacccagcagctcaatggctcagagtaagagccaggtgcaggctatgctgccagtcgcactgccgccactcccagtcccccaatggcaccacgcgcaccagctgaaggccctggcggcgtccaagcagggctctgctaccaaacagcaaggccctactccttcatggagcggcctgccgccgccgggactgtcaccgccgtatcgacccgtaccaagccctcaccccccaccccttcctcttcccccccctccccctcccttctctccacaatctttaatggtctcatgcatgtccagcaatacgctctcgggcagtactttgcgcggttcccctaacgcactgctcagtagtatgacgtcaagcagtaacgcagcattgggccccgcaatgccgtatgcccctgagaagttgcctagccccgccctcacccagcagccccagttcggaccccagagctcaatactagcaaacttaatgtcttctactataaagaccccccaaggccatctgatgtcggcactcccagctagcaatcctggaccctctcctccgtatcgccctgagaaactctcaagcccaggcctcccccaacaaagtttcacacctcagtgttccctgattaggtctctcacccctaccagtaacttactgtcgcagcagcaacaacagcaacagcagcaacagcaagctaatgtgatctttaaacccatttctagcaattcatccaaaacgctgagcatgattatgcagcaggggatggccagctcctctccgggggccacagaacccttcacttttggtaacaccaagccactgagccatttcgtgtctgagcctggtcctcagaaaatgccttctatgcctaccacgtcgcgacagccatccctcctccactacctacagcagccaaccccaacccaggcatcttcagccacagccagctcaaccgctacagccacactgcagctccagcagcagcaacagcagcagcagcaacaacctgaccactcttctttcctacttcagcagatgatgcagcagccccagagattccagcgctccgtcgcatccgattctatgccagccctgcctagacagcaggaagaacagagatccggactgatggccatgacacctgaaagacagaatgcctacattagtcagcaaatgtccccatttgaagcagtgcaggagcaagtgacaagcaagtgctctcgcatcaaggcaagtccaccatcaagcaaacaccttatgcctccgaggacgggtcttctgcaaaacaacttaagccccggcatgatccccttgacccgtcaccagtcatgtgagggaatgggggttatctccccaaccctgggaaaaaggcaaggcatttttacctcgtcaccacaatgtccaatcctgtcgcactcagggcagacccccctgggaaggctcgactccgtttgccagcatatgcaaagtcccaaagcaaccccccctgaggtgccactgccgggtttttgtccttctagccttggcacccagagcctgtcgccacaccagttgcgacgaccctccgtacctcgcatgccaactgcgttcaacaacgccgcctgggtgacagcagcagcggctgtgactacggctgtaagcgggaaaaccccactcagccaagtcgataacagtgttcaacaacactcaccgtctggccaggcctgcttacaacgcccctccgattgggaagcacaggtacctgccgctatgggaacccaggtgcctctggctaacaatccatctttcagcctgttaggctcccagtctttacggcagagtccagtgcagggtccggtgccggtcgccaacaccacgaaatttctgcaacagggtatggcttccttcagccccctcagtcccatccagggcatagagccgcccagttacgtggctgccgccgctactgcggctgccgcctccgcggtggcagcgtcccagttccccggtccattcgaccgaacagatattcctcctgagctgccgccagccgacttccttaggcaaccacagcctccccttaacgatttgatctcaagtcctgactgtaacgaagttgactttattgaagccctgttaaagggaagttgcgttagcccagacgaggattgggtttgcaatctgcggttgatagacgacattcttgaacagcatgcagccgcacaaaatgcgacagctcaaaacagtgggcaggtcactcaggacgcaggcgccctctag

SEQ ID NO: 69604 - DNA, 2997 bp, Artificial Sequence
  derived and/or modified sequence
atggatgattggaagtcacggctggtgattaagtccatgcttcctcatttcgctatggtcgggaataggcaggagcctagaaagttgcaggaaagcggaaccgttaaacgcagacaagaagaagaccactttcagtttccagacatggccgatggtggctaccctaacaagattaagagaccctgcctggaggacgtgactttggccatgggacctggggcacatccgtccaccgcctgtgcagagctccaggtaccgcctctgactatcaatccttctccggctgctatgggggttgcaggccaatccctgctgcttgagaataaccctatgaatgggaatatcatgggatcgccttttgtagtaccccagactaccgaggttggcctcaagggcccaactgtgccatactatgaaaaaattaattctgtgcctgctgttgatcaggagctccaggagctgttggaggagctgacgaaaatccaggaccctagcccaaacgagctggatctggagaagatcctcggcaccaaaccagaggaaccactcgtgctggaccacccccaggctacactgagcacgaccccaaagccctctgtccagatgagccatttggaatcacttgcctcttctaaggagttcgcgagcagctgtagccaggtcaccggcatgtcacttcagatcccttcgtccagcaccggcatttcttattccatcccctcgacttcaaagcagatcgtttctccttcaagctccatggctcagtctaaaagtcaggtgcaggcgatgctgccagtcgctctaccccctctccctgtgccacagtggcatcatgcccaccagctgaaagctctggccgcatcaaagcagggctctgcaacaaaacagcagggccctacaccctcctggagtgggctcccgcctccaggtctgtcacccccatacaggccagtcccatcaccacaccctcccccactcccactccctcccccaccccctcctttttctccccaaagtcttatggtatcctgtatgtccagtaacactctatccggatctacactcaggggaagccccaacgcattactctccagtatgacaagctcatctaatgcagcccttggccctgccatgccctacgcaccggagaaactgccctcccctgctctgacccagcagccacaattcggcccacagtcaagcatcctcgccaacctcatgtcctctacaatcaagacaccccaagggcatctcatgtccgctctgccggctagcaacccgggacccagcccaccttataggcctgagaaactgtcatcccctggattgccacagcagagttttaccccccaatgcagcttgatccgaagcctgacacccacgtcaaatctgctttcacagcagcagcagcagcaacagcagcagcagcaggctaacgttatcttcaagcccatctctagcaactctagcaagaccctctcgatgatcatgcaacagggtatggcctcttcttcaccaggcgctacagagccattcacctttggtaacaccaagccacttagtcactttgttagcgaaccgggtccacagaaaatgccatctatgccaacgacctctcggcaaccctccctattgcattatctgcaacagccgacccctacgcaagcttcaagcgcaactgccagttcaaccgccacggcaacattgcagctgcagcaacagcagcagcaacagcagcaacagccagatcacagctcgttcctcctgcaacagatgatgcagcaaccccagcggttccagcgtagcgtggcaagcgatagcatgcctgcccttccacgacagcaagaggaacagcgcagtgggctgatggccatgacccccgaaaggcaaaatgcctatatcagccaacagatgagccccttcgaggctgttcaggaacaagtcacttctaagtgcagcagaatcaaggcttcacctccatccagcaagcacttgatgccccctaggactgggctgctccagaacaacctttctcccggtatgataccacttacacggcatcagtcctgcgagggaatgggggtaatatctccaaccctgggtaaaaggcagggcatcttcactagctccccacagtgtcccattctgtctcattccgggcagaccccgcttggacgtttagacagtgtttgtcagcatatgcagagcccaaaggctacacccccagaagtgcctttgcccggattttgtccaagctccctcggaacacagtccctgtccccacaccagttgcgcagaccatcagtccctagaatgcccacagcgttcaacaacgctgcctgggtgaccgccgctgctgcggtgaccacggccgtgtccggcaaaactccgctgagtcaggttgacaatagcgtgcaacaacactccccatcgggacaggcctgccttcagcgcccatctgattgggaagctcaggttccggctgccatgggaacccaggtgccactggccaacaatccatccttcagtctattggggtcgcagtcattgcgccagtctcccgttcagggccctgtgcctgtcgcgaacactacaaaattcctgcagcaaggaatggcctccttctcacctctgtctccgattcagggtatcgaaccaccgtcttacgtcgcagcagccgcaactgccgctgcagcaagtgcagtagctgcaagccaatttcctggtccctttgacagaacggacatccctcccgagctcccaccggcagactttctgagacagccgcagcccccacttaacgaccttattagctcccctgactgtaatgaagtggatttcatcgaggctctgctgaaggggtcatgcgtgtctcctgatgaggactgggtgtgtaacctgcgcctcattgacgatatcttggaacagcatgcggcagcccagaacgccacagcccagaactcaggacaggtcacccaggacgccggagcgctctag

SEQ ID NO: 69605 - DNA, 2997 bp, Artificial Sequence
  derived and/or modified sequence
atggacgactggaagagcagactggtgatcaagagcatgctgccccacttcgccatggtgggcaacagacaggagcccagaaagctgcaggagagcggcaccgtgaagagaagacaggaggaggaccacttccagttccccgacatggccgacggcggctaccccaacaagatcaagagaccctgcctggaggacgtgaccctggccatgggccccggcgcccaccccagcaccgcctgcgccgagctgcaggtgccccccctgaccatcaaccccagccccgccgccatgggcgtggccggccagagcctgctgctggagaacaaccccatgaacggcaacatcatgggcagccccttcgtggtgccccagaccaccgaggtgggcctgaagggccccaccgtgccctactacgagaagatcaacagcgtgcccgccgtggaccaggagctgcaggagctgctggaggagctgaccaagatccaggaccccagccccaacgagctggacctggagaagatcctgggcaccaagcccgaggagcccctggtgctggaccacccccaggccaccctgagcaccacccccaagcccagcgtgcagatgagccacctggagagcctggccagcagcaaggagttcgccagcagctgcagccaggtgaccggcatgagcctgcagatccccagcagcagcaccggcatcagctacagcatccccagcaccagcaagcagatcgtgagccccagcagcagcatggcccagagcaagagccaggtgcaggccatgctgcccgtggccctgccccccctgcccgtgccccagtggcaccacgcccaccagctgaaggccctggccgccagcaagcagggcagcgccaccaagcagcagggccccacccccagctggagcggcctgcccccccccggcctgagccccccctacagacccgtgcccagcccccaccccccccccctgcccctgccccccccccccccccccttcagcccccagagcctgatggtgagctgcatgagcagcaacaccctgagcggcagcaccctgagaggcagccccaacgccctgctgagcagcatgaccagcagcagcaacgccgccctgggccccgccatgccctacgcccccgagaagctgcccagccccgccctgacccagcagccccagttcggcccccagagcagcatcctggccaacctgatgagcagcaccatcaagaccccccagggccacctgatgagcgccctgcccgccagcaaccccggccccagccccccctacagacccgagaagctgagcagccccggcctgccccagcagagcttcaccccccagtgcagcctgatcagaagcctgacccccaccagcaacctgctgagccagcagcagcagcagcagcagcagcagcagcaggccaacgtgatcttcaagcccatcagcagcaacagcagcaagaccctgagcatgatcatgcagcagggcatggccagcagcagccccggcgccaccgagcccttcaccttcggcaacaccaagcccctgagccacttcgtgagcgagcccggcccccagaagatgcccagcatgcccaccaccagcagacagcccagcctgctgcactacctgcagcagcccacccccacccaggccagcagcgccaccgccagcagcaccgccaccgccaccctgcagctgcagcagcagcagcagcagcagcagcagcagcccgaccacagcagcttcctgctgcagcagatgatgcagcagccccagagattccagagaagcgtggccagcgacagcatgcccgccctgcccagacagcaggaggagcagagaagcggcctgatggccatgacccccgagagacagaacgcctacatcagccagcagatgagccccttcgaggccgtgcaggagcaggtgaccagcaagtgcagcagaatcaaggccagcccccccagcagcaagcacctgatgccccccagaaccggcctgctgcagaacaacctgagccccggcatgatccccctgaccagacaccagagctgcgagggcatgggcgtgatcagccccaccctgggcaagagacagggcatcttcaccagcagcccccagtgccccatcctgagccacagcggccagacccccctgggcagactggacagcgtgtgccagcacatgcagagccccaaggccaccccccccgaggtgcccctgcccggcttctgccccagcagcctgggcacccagagcctgagcccccaccagctgagaagacccagcgtgcccagaatgcccaccgccttcaacaacgccgcctgggtgaccgccgccgccgccgtgaccaccgccgtgagcggcaagacccccctgagccaggtggacaacagcgtgcagcagcacagccccagcggccaggcctgcctgcagagacccagcgactgggaggcccaggtgcccgccgccatgggcacccaggtgcccctggccaacaaccccagcttcagcctgctgggcagccagagcctgagacagagccccgtgcagggccccgtgcccgtggccaacaccaccaagttcctgcagcagggcatggccagcttcagccccctgagccccatccagggcatcgagccccccagctacgtggccgccgccgccaccgccgccgccgccagcgccgtggccgccagccagttccccggccccttcgacagaaccgacatcccccccgagctgccccccgccgacttcctgagacagccccagccccccctgaacgacctgatcagcagccccgactgcaacgaggtggacttcatcgaggccctgctgaagggcagctgcgtgagccccgacgaggactgggtgtgcaacctgagactgatcgacgacatcctggagcagcacgccgccgcccagaacgccaccgcccagaacagcggccaggtgacccaggacgccggcgccctgtag

SEQ ID NO: 69606 - protein, 749 aa, Artificial Sequence
  derived and/or modified sequence
MDDWKSRLVIKSMLPHFAMVGNRQEPRKLQESGTVKRRQEEDHFQFPDMADGGYPNKIKRPCLEDVTLAMGPGAHPSTACAELQVPPLTINPSPAAMGVAGQSLLLENNPMNGNIMGSPFVVPQTTEVGLKGPTVPYYEKINSVPAVDQELQELLEELTKIQDPSPNELDLEKILGTKPEEPLVLDHPQATLSTTPKPSVQMSHLESLASSKEFASSCSQVTGMSLQIPSSSTGISYSIPSTSKQIVSPSSSMAQSKSQVQAMLPVALPPLPVPQWHHAHQLKALAASKQGSATKQQGPTPSWSGLPPPGLSPPYRPVPSPHPPPLPLPPPPPPFSPQSLMVSCMSSNTLSGSTLRGSPNALLSSMTSSSNAALGPAMPYAPEKLPSPALTQQPQFGPQSSILANLMSSTIKTPQGHLMSALPASNPGPSPPYRPEKLSSPGLPQQSFTPQCSLIRSLTPTSNLLSQQQQQQQQQQQANVIFKPISSNSSKTLSMIMQQGMASSSPGATEPFTFGNTKPLSHFVSEPGPQKMPSMPTTSRQPSLLHYLQQPTPTQASSATASSTATATLQLQQQQQQQQQQPDHSSFLLQQMMQQPQRFQRSVASDSMPALPRQGCCHLFAWTSAASSVKPQHQHGNSFTSRQDPQPGDVSPSNITHVDKACKLGEARHPQVSLGRQPPSCQALGSESFLPGSSFAHELARVTSSYSTSEAAPWGSWDPKAWRQVPAPLLPSCDATARGTEIRSYGNDP

SEQ ID NO: 69607 - DNA, 4533 bp, Artificial Sequence
  derived and/or modified sequence
ccctgtgtctaggtcgtttgggaaacgccttggagagtcaagaataaatttgcaggtcaaacaatggatgactggaaaagtcggcttgtaatcaagagcatgcttccccatttcgccatggtgggaaatcgtcaggagcccagaaagctccaggaatcgggaactgttaagaggagacaagaagaagaccacttccagtttccagacatggctgatgggggctaccctaataaaattaagaggccttgccttgaagatgtcacccttgcaatgggcccaggtgctcatcctagtactgcttgtgcagaactgcaggtccctccattgacaataaatcctagccctgcggctatgggagtggctggccagtcattactgctggagaataaccctatgaatggcaacatcatgggctcaccatttgtagtaccacagactacagaagtgggactgaaagggcccactgttccttactatgagaaaatcaacagcgtgccggctgtagaccaggagcttcaagagctgctagaggagctcaccaaaattcaagacccttctccaaatgagctagatcttgagaagatactggggacgaagccagaagagccactggttttagatcatccccaggcaaccctaagcacaactcccaagccttcggttcagatgtcacacttggagagcctggcttccagcaaggagtttgcttctagttgcagccaagttactggcatgtcacttcagatcccatcctcctccacagggatcagctattcgattccttccaccagtaagcagatagtgtcaccgagttcttcaatggcacagtccaagagccaggtccaggccatgctccctgtcgctctgccccccttaccagtgcctcagtggcatcacgcccaccagctgaaggcgttggcagccagcaagcaggggtctgctacaaagcagcaagggcccacccccagttggtctggtctgcctcctccaggactctctccaccttaccgcccagtgccatcaccacacccaccaccgctgccactgccaccaccaccacccccattcagcccccagagcctcatggtgtcctgcatgtcgtccaataccttgtcgggtagcactctccgaggctctcccaatgccttactgtcaagcatgacgtccagcagcaatgctgccctggggcccgccatgccctatgctcctgagaagctccccagccctgctctcactcaacagccgcagttcggccctcagagctccattcttgccaacctcatgtcctctaccatcaaaacccctcaaggacacctgatgtctgctctgcctgccagcaaccctgggccgtccccaccctatcgcccagagaagctctctagcccaggcttgccacagcagtccttcaccccacagtgttccctgatccgaagcctcactcccaccagtaatcttctaagccagcaacagcagcagcagcagcagcagcagcaagcaaatgtgatctttaagcccataagcagcaactcatccaaaaccctgagcatgatcatgcagcaggggatggcaagctccagcccaggagccacggagccatttacttttggcaacaccaagcccttgtcccattttgtttctgagccgggtccccagaagatgccctccatgcctaccacctctaggcagccttccctgctccactacctgcagcagccgacaccaacgcaggcctcctcagccactgcctcctccacggccactgccaccttgcagctgcagcagcagcagcagcaacagcagcagcagcctgaccattcttcattccttctgcagcagatgatgcagcaaccccagcgttttcagcgatcagtggcctcagattccatgcctgctctgcccagacagggctgttgccatctgtttgcatggacttctgcagctagctcggtgaagccccagcatcaacacgggaactctttcactagcaggcaagatcctcagcctggagacgtgtcaccgtctaacattactcatgtagacaaagcctgcaagcttggggaagccaggcacccccaggtcagcctcgggcgacagcccccgtcctgccaggccctggggagtgagtccttcctgcccggcagctcctttgctcatgagctggcccgagtcacctcctcgtacagcacctcagaggcagcgccctggggcagctgggatccgaaggcctggaggcaggtgcccgctccactactgcctagctgcgacgccacagcaagaggaacagagatcaggtcttatggcaatgacccctgaacggcagaatgcatatatctcccaacagatgagtccatttgaagccgtccaagaacaagtcacctccaagtgtagccggatcaaggcaagccccccatctagcaagcacttgatgccacccagaactgggcttcttcagaacaatctgagtccaggaatgatcccactcaccaggcaccagagctgcgagggcatgggagtgatctcaccaactctggggaagcggcaaggaattttcacctccagcccccagtgtcccatcctctcacactcaggccagactcccctgggcagacttgactctgtctgccagcatatgcagagccccaaggccaccccaccagaagtgcccctgcctgggttctgtcccagctccctgggcacccagtccttgagtccccaccagctcagacggcctagtgtgccaagaatgcccactgcgttcaacaatgctgcatgggtcacagcggcagcagctgtgaccacagcagtttcggggaaaacacccctcagccaagtggataatagcgttcagcagcactcaccttctggccaggcctgccttcagaggccatctgattgggaggcacaagtgcccgctgcgatgggaacacaagtgcccctggccaacaaccccagcttcagcctgctgggcagccagagcctcaggcagagcccggtacagggcccggtgcctgtagcaaacaccaccaagttcctccagcagggtatggccagctttagtcccctgagccccatacagggcatcgagccaccaagctatgtggctgctgctgccaccgctgctgctgcttctgccgttgctgccagccagttcccaggtccgttcgacagaacggatattccccctgagctgccacctgccgactttttgcgccagccccaacccccactaaatgatctgatttcgtcacctgactgcaatgaggtagatttcattgaagctctcttgaaaggctcctgtgtgagcccagatgaagactgggtgtgcaacttgaggctgatcgacgacattttggaacagcatgctgctgctcaaaatgccacagcccagaattctgggcaagtcacccaggatgctggggcactttaaatctgagcaggatgcccatagaaacccccatggtgacatcactctaggaagtggtgtcgatccatacccgcagttgtctcccgttacaatttgagtggtgttgtcagcccatgcttatccctctctctacctgtgacaaaatggaaagctggtgatttttcaagctacgtgtacatatttgaaaattttgtaaatggttttcctaaacattaatgacagaagtatttatacttcattttgtgactttgtaaataaagcgacggcttttgtttcagtagagttgtgtttactatgcattgttttgtgtttattatacaatgttacaaatatgcagaccgtgttgtttgctccagtgataccttgttaagctaggtggctgagtcgcttatggttttaatgcaatgagcaatgtggatatgaccaagagttgttgtgcaagttgacaaatgccaaatagaaaaccacttggccatttatttctatgttcactaaaaatcctattgccttgtgtgattcttaatctcttttgcgaacctttcagtctccgctagctctttcctaatgagctttacagcagaagctgttttatcgttaagtgccccacagagacactttaccaggaggctgggagagttctccagatttgggagaggcgcagagacagtgtgtgagccgagccctgtctcagcaatccacctggaggagctagagtatcctcctccctttaccattcagaccgagagaaaaagcccagcttgtgtgcaccctcgtggggttaaggcgagctgttcctggtttaaagcctttcagtatttgttttgatgtaaggctctgtggtttgggggggaacatctgtaaacattattagttgatttggggtttgtctttgatggtttctatctgcaattatcgtcatgtatatttaagtgtctgttatagaaaacccacacccactgtcctgtaaacttttctcagtgtccagactttctgtaatcacattttaattgccacctcgtatttcacctctacatttgaaatctggcgtctgtttcaagccagtgtgttttttcttcgttctgtaataaacagccaggagaaaagtgcca

SEQ ID NO: 69608 - DNA, 2250 bp, Artificial Sequence
  derived and/or modified sequence
atggacgattggaaatcgaggttggtcattaaaagcatgctgccccacttcgccatggttggcaacagacaagaaccgaggaaactgcaagagtctggaaccgtcaagcgtaggcaggaggaagatcacttccaattccccgatatggccgacgggggatatccaaacaaaataaagcgaccttgtttggaggacgtgacattagccatgggccccggagcccacccaagtactgcttgtgcagaacttcaggtgccccccttgaccatcaatccctcgccagccgcaatgggggtcgccggccagtctctcctgttagagaataaccctatgaacggcaatataatgggatcaccctttgttgtcccccagaccaccgaggttggacttaaaggaccaactgttccatactacgaaaagatcaacagcgtgcctgcggtcgatcaagagctgcaggagctgctggaggagcttacgaaaatccaggatccgtctccaaacgagttggatctggagaaaatcctgggcactaaacctgaggagcctctggtcttggaccaccctcaggccacgctgtccactacccctaaaccatcagtccagatgtcacatcttgagagcctcgcctcatctaaagaatttgcgagttcatgtagtcaggtaacggggatgtccctgcagatcccctcatccagcacaggaatctcttattctatccctagtacctctaagcaaattgtgtcacctagttcaagcatggctcaatccaagagtcaggtccaggccatgttgcccgtggcgttgcccccactgccagttcctcagtggcaccacgctcatcagcttaaagcattggcagcaagcaagcagggtagtgccaccaagcagcagggaccgacaccatcatggagcggcttaccaccgccaggcctgtcaccgccctacagacctgtgccaagtccccatccgccgccccttccactcccccccccgccgcctcccttttctccacagagcctcatggtctcatgcatgtcgtccaatactttgtccggatccacactccgcggctctccgaacgctctgctgtcttctatgacatccagcagcaacgccgccctgggtcctgctatgccgtatgctcccgagaagctgccttcgccagcactgactcagcaaccccagtttggacctcagtcctcaattctcgctaatctcatgagctctacaattaaaacaccacagggacacttaatgtctgctctcccagcctcaaaccccggtccgtcacccccctaccgccccgagaagcttagcagtccagggttgccccagcagtctttcacacctcagtgctccttaatacggtctctaacaccaacaagtaatctgctatcccagcagcaacaacagcagcagcagcagcagcaagccaatgtgatcttcaagccaattagctctaattcctccaagactctgtctatgatcatgcagcagggaatggcgagctcctcaccaggggccaccgagccctttacattcgggaacactaagcctttatcgcattttgtaagcgagcctggcccacaaaagatgccatcaatgcctaccacctcacgccagccctctttgctgcattacctgcagcagccaactccaacgcaggcatcctcagccacggctagttcaactgctaccgcaacgctccagcttcagcagcagcagcagcagcaacagcaacaacctgatcacagcagctttcttttacagcagatgatgcagcagccacagaggtttcaaagatcagtggcatccgacagcatgcccgcgctgccccggcaaggctgctgtcatctcttcgcatggacatccgctgcctcttcggtcaagccccagcaccaacacggcaattccttcacatcccggcaggacccccagccgggcgacgtgagcccaagtaatattactcacgtggataaggcctgcaagctgggtgaagctcgacacccccaagtgtctcttggcagacagccacctagctgccaggccctgggttctgagtcgttcctccccggctcttccttcgcacacgaattggcaagggtgacctcttcatactctaccagtgaggctgccccttggggcagttgggatcccaaggcttggcggcaagtccccgcgcccctcctgccatcatgtgacgcaacagcccgtggtacagaaatacgctcttatggaaacgatccatag

SEQ ID NO: 69609 - DNA, 2250 bp, Artificial Sequence
  derived and/or modified sequence
atggatgactggaagagccggctggtgatcaagtccatgctgccccactttgccatggtgggcaaccggcaggagcccaggaagctgcaggagagcggcaccgtgaagaggcggcaggaggaggaccacttccagttcccagacatggctgatggcggctaccccaacaagatcaagaggccctgcctggaggatgtgaccctggccatgggccctggggcccaccccagcacagcctgtgccgagctgcaggtgccccccctgaccatcaaccccagccctgctgccatgggcgtggccggccagagcctgctgctggagaacaaccccatgaatggaaacatcatgggcagcccctttgtggtgccccagaccacagaggtgggcctgaagggccccaccgtgccctactatgagaagatcaacagcgtgcctgctgtggaccaggagctgcaggagctgctggaggagctgaccaagatccaggaccccagccccaatgagctggacctggagaagatcctgggcaccaagccagaggagcccctggtgctggaccacccccaggccaccctgagcaccacccccaagcccagcgtgcagatgagccacctggagagcctggccagcagcaaggagtttgccagcagctgcagccaggtgacaggcatgagcctgcagatccccagcagcagcacaggcatctcctacagcatccccagcaccagcaagcagatcgtgagccccagcagctccatggcccagagcaagagccaggtgcaggccatgctgcctgtggccctgccccccctgcctgtgccccagtggcaccacgcccaccagctgaaggccctggccgccagcaagcagggcagcgccaccaagcagcagggccccacccccagctggagcggcctgcccccacctggcctgagccccccctacagacctgtgcccagcccccaccccccacccctgcccctgcccccacctcctccacccttcagcccccagagcctgatggtgtcctgcatgagcagcaacaccctgagcggcagcaccctgcggggcagccccaatgccctgctgagctccatgaccagcagcagcaatgctgccctgggccctgccatgccctatgcccctgagaagctgcccagccctgccctgacccagcagccccagtttggcccccagagcagcatcctggccaacctgatgagcagcaccatcaagaccccccagggccacctgatgtctgccctgcctgccagcaaccctggccccagccccccctacagacctgagaagctgagcagccctggcctgccccagcagagcttcaccccccagtgcagcctcatccgcagcctgacccccaccagcaacctgctgagccagcagcagcagcagcagcagcagcagcagcaggccaacgtcatcttcaagcccatcagcagcaacagcagcaagaccctgtccatgatcatgcagcagggcatggccagcagcagccctggggccacagagcccttcaccttcggcaacaccaagcccctgagccactttgtgtctgagcccggcccccagaagatgcccagcatgcccaccaccagccggcagcccagcctgctgcactacctgcagcagcccacccccacccaggccagcagcgccacagccagcagcacagccacagccaccctgcagctgcagcagcagcagcagcagcagcagcagcagcctgaccacagcagcttcctgctgcagcagatgatgcagcagccccagcgcttccagaggtctgtggccagtgacagcatgcctgccctgccccggcagggctgctgccacctgtttgcctggaccagcgctgccagctctgtgaagccccagcaccagcacggcaacagcttcaccagccggcaggacccccagcctggagatgtgagccccagcaacatcacccacgtggacaaggcctgcaagctgggggaggcccggcacccccaggtgtccctgggccggcagccccccagctgccaggccctgggcagcgagagcttcctgcccggcagcagctttgcccacgagctggcccgggtgaccagcagctacagcaccagcgaggccgccccctggggctcctgggaccccaaggcctggaggcaggtgcctgcccccctgctgcccagctgtgatgccacagcccggggcacagagatccgctcctatggaaatgacccctag

SEQ ID NO: 69610 - DNA, 4532 bp, Artificial Sequence
  derived and/or modified sequence
ccctgtgtctaggtcgtttgggaaacgccttggagagtcaagaataaatttgcaggtcaaacaatggatgactggaaaagtcggcttgtaatcaagagcatgcttccccatttcgccatggtgggaaatcgtcaggagcccagaaagctccaggaatcgggaactgttaagaggagacaagaagaagaccacttccagtttccagacatggctgatgggggctaccctaataaaattaagaggccttgccttgaagatgtcacccttgcaatgggcccaggtgctcatcctagtactgcttgtgcagaactgcaggtccctccattgacaataaatcctagccctgcggctatgggagtggctggccagtcattactgctggagaataaccctatgaatggcaacatcatgggctcaccatttgtagtaccacagactacagaagtgggactgaaagggcccactgttccttactatgagaaaatcaacagcgtgccggctgtagaccaggagcttcaagagctgctagaggagctcaccaaaattcaagacccttctccaaatgagctagatcttgagaagatactggggacgaagccagaagagccactggttttagatcatccccaggcaaccctaagcacaactcccaagccttcggttcagatgtcacacttggagagcctggcttccagcaaggagtttgcttctagttgcagccaagttactggcatgtcacttcagatcccatcctcctccacagggatcagctattcgattccttccaccagtaagcagatagtgtcaccgagttcttcaatggcacagtccaagagccaggtccaggccatgctccctgtcgctctgccccccttaccagtgcctcagtggcatcacgcccaccagctgaaggcgttggcagccagcaagcaggggtctgctacaaagcagcaagggcccacccccagttggtctggtctgcctcctccaggactctctccaccttaccgcccagtgccatcaccacacccaccaccgctgccactgccaccaccaccacccccattcagcccccagagcctcatggtgtcctgcatgtcgtccaataccttgtcgggtagcactctccgaggctctcccaatgccttactgtcaagcatgacgtccagcagcaatgctgccctggggcccgccatgccctatgctcctgagaagctccccagccctgctctcactcaacagccgcagttcggccctcagagctccattcttgccaacctcatgtcctctaccatcaaaacccctcaaggacacctgatgtctgctctgcctgccagcaaccctgggccgtccccaccctatcgcccagagaagctctctagcccaggcttgccacagcagtccttcaccccacagtgttccctgatccgaagcctcactcccaccagtaatcttctaagccagcaacagcagcagcagcagcagcagcagcaagcaaatgtgatctttaagcccataagcagcaactcatccaaaaccctgagcatgatcatgcagcaggggatggcaagctccagcccaggagccacggagccatttacttttggcaacaccaagcccttgtcccattttgtttctgagccgggtccccagaagatgccctccatgcctaccacctctaggcagccttccctgctccactacctgcagcagccgacaccaacgcaggcctcctcagccactgcctcctccacggccactgccaccttgcagctgcagcagcagcagcagcaacagcagcagcagcctgaccattcttcattccttctgcagcagatgatgcagcaaccccagcgttttcagcgatcagtggcctcagattccatgcctgctctgcccagacagggctgttgccatctgtttgcatggacttctgcagctagctcggtgaagccccagcatcaacacgggaactctttcactagcaggcaagatcctcagcctggagacgtgtcaccgtctaacattactcatgtagacaaagcctgcaagcttggggaagccaggcacccccaggtcagcctcgggcgacagcccccgtcctgccaggccctggggagtgagtccttcctgcccggcagctcctttgctcatgagctggcccgagtcacctcctcgtacagcacctcagaggcagcgccctggggcagctgggatccgaaggcctggaggcaggtgcccgctccactactgcctagctgcgacgccacagcaagaggaacagagatcaggtcttatggcaatgacccctgaacggcagaatgcatatatctcccaacagatgagtccatttgaagccgtccaagaacaagtcacctccaagtgtagccggatcaaggcaagccccccatctagcaagcacttgatgccacccagaactgggcttcttcagaacaatctgagtccaggaatgatcccactcaccaggcaccagagctgcgagggcatgggagtgatctcaccaactctggggaagcggcaaggaattttcacctccagcccccagtgtcccatcctctcacactcaggccagactcccctgggcagacttgactctgtctgccagcatatgcagagccccaaggccaccccaccagaagtgcccctgcctgggttctgtcccagctccctgggcacccagtccttgagtccccaccagctcagacggcctagtgtgccaagaatgcccactgcgttcaacaatgctgcatgggtcacagcggcagcagctgtgaccacagcagtttcggggaaaacacccctcagccaagtggataatagcgttcagcagcactcaccttctggccaggcctgccttcagaggccatctgattgggaggcacaagtgcccgctgcgatgggaacacaagtgcccctggccaacaaccccagcttcagcctgctgggcagccagagcctcaggcagagcccggtacagggcccggtgcctgtagcaaacaccaccaagttcctccagcagggtatggccagctttagtcccctgagccccatacagggcatcgagccaccaagctatgtggctgctgctgccaccgctgctgctgcttctgccgttgctgccagccagttcccaggtccgttcgacagaacggatattccccctgagctgccacctgccgactttttgcgccagccccaacccccactaaatgatctgatttcgtcacctgactgcaatgaggtagatttcattgaagctctcttgaaaggctcctgtgtgagcccagatgaagactgggtgtgcaacttgaggctgatcgacgacattttggaacagcatgctgctgctcaaaatgccacagcccagaattctgggcaagtcacccaggatgctggggcactttaaatctgagcaggatgcccatagaaacccccatggtgacatcactctaggaagtggtgtcgatccatacccgcagttgtctcccgttacaatttgagtggtgttgtcagcccatgcttatccctctctctacctgtgacaaaatggaaagctggtgatttttcaagctacgtgtacatatttgaaaattttgtaaatggttttcctaaacattaatgacagaagtatttatacttcattttgtgactttgtaaataaagcgacggcttttgtttcagtagagttgtgtttactatgcattgttttgtgtttattatacaatgttacaaatatgcagaccgtgttgtttgctccagtgataccttgttaagctaggtggctgagtcgcttatggttttaatgcaatgagcaatgtggatatgaccaagagttgttgtgcaagttgacaaatgccaaatagaaaaccacttggccatttatttctatgttcactaaaaatcctattgccttgtgtgattcttaatctcttttgcgaacctttcagtctccgctagctctttcctaatgagctttacagcagaagctgttttatcgttaagtgccccacagagacactttaccaggaggctgggagagttctccagatttgggagaggcgcagagacagtgtgtgagccgagccctgtctcagcaatccacctggaggagctagagtatcctcctccctttaccattcagaccgagagaaaaagcccagcttgtgtgcaccctcgtggggttaaggcgagctgttcctggtttaaagcctttcagtatttgttttgatgtaaggctctgtggtttgggggggaacatctgtaaacattattagttgatttggggtttgtctttgatggtttctatctgcaattatcgtcatgtatatttaagtgtctgttatagaaaacccacacccactgtcctgtaaacttttctcagtgtccagactttctgtaatcacattttaattgccacctcgtatttcacctctacatttgaaatctggcgtctgtttcaagccagtgtgttttttcttcgttctgtaataaacagccaggagaaaagtgcc

SEQ ID NO: 69611 - DNA, 2250 bp, Artificial Sequence
  derived and/or modified sequence
atggacgactggaagagccggctggtgatcaagagcatgctgccccacttcgcgatggtgggcaacagacaagaacctcgaaagctgcaggagtccgggacagtaaaacggcgccaagaggaggaccacttccaatttcctgacatggctgacggagggtacccaaacaagatcaagcggccctgcctggaagacgttacgcttgctatgggtcctggggcgcacccctctactgcctgcgccgagctgcaagtgcctcccctcactataaaccctagtcctgcagccatgggggtcgccgggcagtccttgctcttagagaataatcctatgaatgggaatatcatgggtagcccctttgttgtgcctcagactacagaagtgggactgaaggggcccacggtgccctactacgaaaaaataaacagtgtcccagccgtagaccaagagctgcaggaacttctggaagagctcaccaaaattcaagatccaagtccgaacgagctggatctcgagaagatcctgggcacaaagccagaagagccactagtgctggaccatccccaggctaccctgagcactacacctaagccctcagtccaaatgagccatctggaaagtttagcaagctctaaggagttcgcctcatcttgtagccaggtgacaggaatgagcctacaaatcccgtcaagttccacgggcataagttattccattccctccacaagtaagcagatagtgtcacctagcagctctatggcacaaagtaaaagccaagtccaagccatgctccccgtcgccctgccccctctccccgtgcctcaatggcaccatgcacatcagttaaaagccctggcagcatccaaacagggctcggctaccaagcagcagggccctaccccttcatggagcggtttgcccccgcccggactcagccccccgtaccggcctgtgccatctcctcacccaccacccttgcctctgcctccacctccccctccattcagcccacaaagcttgatggtatcatgcatgagctccaacacacttagcggctccacccttcgggggtcccccaacgctcttctcagcagtatgacctcaagcagcaacgctgccttgggcccggcaatgccatacgcacctgaaaaactgcccagccccgccctcacacagcagccacagttcggccctcaatcgtctattctcgctaaccttatgtctagtaccattaagaccccgcaaggccacctgatgtcagctcttcctgcgtctaatcccggcccaagcccgccatacagacctgagaagctctcatcgccgggtctaccccaacagtctttcactccgcagtgcagtctgatccgaagccttactccaactagcaacctgctaagccagcagcagcagcaacagcagcagcagcaacaggccaacgtcatctttaagccaataagtagcaatagcagtaaaacactgtcaatgattatgcagcagggaatggccagcagctccccgggagctaccgaacccttcacatttggcaatactaagccgttgagtcactttgttagtgagccgggcccacagaaaatgccatcaatgccgactaccagccgccagccatcactgctgcactatttacagcagcccactccaacccaagcgtcaagcgccaccgcttcctctaccgccacggccactctgcaactgcagcaacaacagcagcagcagcagcaacagcctgatcacagcagctttctgttacagcaaatgatgcagcagccacagcggttccagcgcagtgtggctagcgacagcatgcctgcgctccccaggcagggctgctgtcatctgttcgcctggactagcgcagcctcgagtgtgaagcctcagcaccagcacggtaactcctttactagccgtcaggatcctcagccaggggacgttagtccatctaacattactcacgtcgataaggcttgtaagttgggtgaggctagacacccccaggtgagcctgggtcggcaacctcctagttgccaggccttggggagtgaatccttcctccctggcagttccttcgcacacgagctggcgcgggtcaccagttcatactcaacatcggaggccgcaccgtggggttcttgggaccctaaagcatggaggcaggtgcctgcaccactgttgccaagctgcgatgcaacggcgagggggactgaaatcaggtcgtatggcaatgatccctag

SEQ ID NO: 69612 - DNA, 2250 bp, Artificial Sequence
  derived and/or modified sequence
atggacgactggaaatctcggcttgtcatcaaatctatgctccctcactttgccatggtgggtaaccgacaggaacctaggaagcttcaggagtcaggaacagtgaagcgccgtcaagaggaggaccactttcagtttcctgatatggccgatggtggctatcctaacaaaataaagcgcccttgcctggaagacgtgaccctggccatgggcccaggcgctcaccctagtacagcctgtgcagagctgcaggtgccaccacttacaattaatccctctcccgcagccatgggcgttgcgggacagtcccttctgctcgaaaataatccaatgaacggaaatataatgggaagcccatttgtggttccccagaccactgaggtaggtcttaagggcccaactgtgccatattacgaaaaaatcaattccgtccccgcagtggaccaggagctgcaggaactgctcgaagagttgaccaaaatccaagacccttctccgaatgaattagatttggagaagattctcggcaccaaacccgaagagcctctcgtgctggaccacccccaggccacattatcgacaacacccaagccctcagttcagatgtcacacctggaatcactcgccagtagcaaagaatttgctagttcctgcagccaggtgacaggaatgagcctgcagatccccagcagttccacaggaatctcctacagtattccgagtacaagtaagcagatagttagccccagtagcagtatggcccagtcaaaatcccaggtgcaagctatgctgcccgtcgctctgccacccctgcctgtgccacagtggcaccacgctcatcagctcaaggctcttgccgctagcaagcagggttctgctactaagcagcagggacctactcctagctggagtggcctccccccacccggtctgtctccaccgtaccgaccagtgccctcaccacatcctccacccctgcctttgcccccacctccaccacctttctctccccagtcattgatggtatcctgtatgtcctcaaatacccttagcggtagtaccctgaggggtagtccaaatgcccttctgtcatcaatgacatcgtcttcaaatgcagctctgggaccagccatgccttatgccccagaaaagctcccttctcccgcactgacccagcagccgcaatttgggcctcaatcctcaattctcgccaacctaatgtcatctaccatcaaaactccccagggccaccttatgtcagccctgccagctagcaacccgggaccgagcccaccctataggcctgaaaagctctccagtcccggattgccacagcaaagtttcacaccccagtgcagccttataagaagcctgactccaacctctaacctgctgagccagcagcagcaacaacagcagcagcagcagcaagccaatgtcatctttaagcctatctcctctaattcctcaaagacgctgagtatgatcatgcagcaaggtatggcatcatcatcacccggagcgaccgagccattcactttcggaaataccaaacctctgtctcacttcgtatctgagccgggacctcagaagatgccatctatgcctacaacttccagacagccttcccttctacattacctccaacagccgacaccaacacaagcttctagcgctacagcaagttcaacagctaccgccacactgcagctgcagcagcagcagcaacagcagcagcaacagccagaccatagcagttttctactgcaacaaatgatgcaacagcctcagagattccagcggagcgtggcttcggactccatgcctgcccttcctcgccaaggttgttgtcatctattcgcctggacctcggccgcttcaagcgtgaaaccccagcatcagcacggcaactcattcacgtcaagacaagatccgcagcctggcgatgtctctccgtccaacataacccacgtggacaaggcgtgcaagttgggcgaggcccgacaccctcaggtgtcattaggcagacagcccccttcatgccaagctctgggctctgaatcctttctacccggtagcagtttcgcgcatgagttggcacgggtcacaagtagctactccacgtccgaggctgcgccatggggcagctgggacccgaaggcctggcggcaagtcccagccccactgctcccgagctgcgacgctactgcaaggggtacagaaatccgcagctacgggaacgatccatag

SEQ ID NO: 69613 - DNA, 2250 bp, Artificial Sequence
  derived and/or modified sequence
atggacgactggaagagcagactggtgatcaagagcatgctgccccacttcgccatggtgggcaacagacaggagcccagaaagctgcaggagagcggcaccgtgaagagaagacaggaggaggaccacttccagttccccgacatggccgacggcggctaccccaacaagatcaagagaccctgcctggaggacgtgaccctggccatgggccccggcgcccaccccagcaccgcctgcgccgagctgcaggtgccccccctgaccatcaaccccagccccgccgccatgggcgtggccggccagagcctgctgctggagaacaaccccatgaacggcaacatcatgggcagccccttcgtggtgccccagaccaccgaggtgggcctgaagggccccaccgtgccctactacgagaagatcaacagcgtgcccgccgtggaccaggagctgcaggagctgctggaggagctgaccaagatccaggaccccagccccaacgagctggacctggagaagatcctgggcaccaagcccgaggagcccctggtgctggaccacccccaggccaccctgagcaccacccccaagcccagcgtgcagatgagccacctggagagcctggccagcagcaaggagttcgccagcagctgcagccaggtgaccggcatgagcctgcagatccccagcagcagcaccggcatcagctacagcatccccagcaccagcaagcagatcgtgagccccagcagcagcatggcccagagcaagagccaggtgcaggccatgctgcccgtggccctgccccccctgcccgtgccccagtggcaccacgcccaccagctgaaggccctggccgccagcaagcagggcagcgccaccaagcagcagggccccacccccagctggagcggcctgcccccccccggcctgagccccccctacagacccgtgcccagcccccaccccccccccctgcccctgccccccccccccccccccttcagcccccagagcctgatggtgagctgcatgagcagcaacaccctgagcggcagcaccctgagaggcagccccaacgccctgctgagcagcatgaccagcagcagcaacgccgccctgggccccgccatgccctacgcccccgagaagctgcccagccccgccctgacccagcagccccagttcggcccccagagcagcatcctggccaacctgatgagcagcaccatcaagaccccccagggccacctgatgagcgccctgcccgccagcaaccccggccccagccccccctacagacccgagaagctgagcagccccggcctgccccagcagagcttcaccccccagtgcagcctgatcagaagcctgacccccaccagcaacctgctgagccagcagcagcagcagcagcagcagcagcagcaggccaacgtgatcttcaagcccatcagcagcaacagcagcaagaccctgagcatgatcatgcagcagggcatggccagcagcagccccggcgccaccgagcccttcaccttcggcaacaccaagcccctgagccacttcgtgagcgagcccggcccccagaagatgcccagcatgcccaccaccagcagacagcccagcctgctgcactacctgcagcagcccacccccacccaggccagcagcgccaccgccagcagcaccgccaccgccaccctgcagctgcagcagcagcagcagcagcagcagcagcagcccgaccacagcagcttcctgctgcagcagatgatgcagcagccccagagattccagagaagcgtggccagcgacagcatgcccgccctgcccagacagggctgctgccacctgttcgcctggaccagcgccgccagcagcgtgaagccccagcaccagcacggcaacagcttcaccagcagacaggacccccagcccggcgacgtgagccccagcaacatcacccacgtggacaaggcctgcaagctgggcgaggccagacacccccaggtgagcctgggcagacagccccccagctgccaggccctgggcagcgagagcttcctgcccggcagcagcttcgcccacgagctggccagagtgaccagcagctacagcaccagcgaggccgccccctggggcagctgggaccccaaggcctggagacaggtgcccgcccccctgctgcccagctgcgacgccaccgccagaggcaccgagatcagaagctacggcaacgacccctag

SEQ ID NO: 69614 - protein, 79 aa, Artificial Sequence
  derived and/or modified sequence
MAKSERRIYSMESMAPEISEDIGCPLAYMRESVCALLINQSFFSCVAEMYIPDMNRLEERTAALYPIGLVRQNGEPRRA

SEQ ID NO: 69615 - DNA, 240 bp, Artificial Sequence
  derived and/or modified sequence
atggccaagagcgagagaagaatctacagcatggagagcatggcccccgagatcagcgaggacatcggctgccccctggcctacatgagagagagcgtgtgcgccctgctgatcaaccagagcttcttcagctgcgtggccgagatgtacatccccgacatgaacagactggaggagagaaccgccgccctgtaccccatcggcctggtgagacagaacggcgagcccagaagagcctag

SEQ ID NO: 69616 - DNA, 240 bp, Artificial Sequence
  derived and/or modified sequence
atggcgaaaagcgagcgccgtatctattccatggaatcaatggcaccggaaataagcgaggacataggctgtccactggcgtatatgagagaaagtgtttgtgcactgctgatcaatcagtcattcttctcttgcgtggccgagatgtacatccccgatatgaataggctggaagaacggacggctgccctctatcccatcggattggtccgccagaatggtgagccacgaagggcctag

SEQ ID NO: 69617 - DNA, 240 bp, Artificial Sequence
  derived and/or modified sequence
atggccaagtctgagcggcgcatctacagcatggagagcatggcccctgagatcagcgaggacatcggctgccccctggcctacatgagggagagcgtgtgtgccctgctgatcaaccagagcttcttcagctgtgtggccgagatgtacatcccagacatgaaccggctggaggagaggacagctgccctgtaccccatcggcctggtgcggcagaatggagagccccggcgggcctag

SEQ ID NO: 69618 - DNA, 240 bp, Artificial Sequence
  derived and/or modified sequence
atggccaagagcgagcggcggatctacagcatggagagcatggcccctgagatatctgaggatattggttgtcccctggcttatatgcgcgaatccgtgtgcgcgttacttataaaccagtccttcttctcttgtgtggccgagatgtacattccagatatgaataggctcgaggaaaggaccgcagctctgtatccgatcggactggttcggcagaatggtgagcctagacgagcctag

SEQ ID NO: 69619 - DNA, 240 bp, Artificial Sequence
  derived and/or modified sequence
atggccaagtccgagaggcgcatctactcgatggaatccatggcacctgagatctctgaagacattggctgcccccttgcatacatgagggaaagtgtatgtgcgctccttatcaaccagtctttcttcagttgtgtcgccgaaatgtacatcccagacatgaatcgtctcgaggaacgaactgccgctttgtacccaataggtttagtccggcagaacggcgagccgaggagggcttag

SEQ ID NO: 69620 - protein, 686 aa, Artificial Sequence
  derived and/or modified sequence
MQSPWKILTVAPLFLLLSLQSSASPANDDQSRPSLSNGHTCVGCVLVVSVIEQLAQVHNSTVQASMERLCSYLPEKLFLKTTCYLVIDKFGSDIIKLLSADMNADVVCHTLEFCKQNTGQPLCHLYPLPKETWKFTLQKARQIVKKSPILKYSRSGSDICSLPVLAKICQKIKLAMEQSVPFKDVDSDKYSVFPTLRGYHWRGRDCNDSDESVYPGRRPNNWDVHQDSNCNGIWGVDPKDGVPYEKKFCEGSQPRGIILLGDSAGAHFHISPEWITASQMSLNSFINLPTALTNELDWPQLSGATGFLDSTVGIKEKSIYLRLWKRNHCNHRDYQNISRNGASSRNLKKFIESLSRNKVLDYPAIVIYAMIGNDVCSGKSDPVPAMTTPEKLYSNVMQTLKHLNSHLPNGSHVILYGLPDGTFLWDNLHNRYHPLGQLNKDMTYAQLYSFLNCLQVSPCHGWMSSNKTLRTLTSERAEQLSNTLKKIAASEKFTNFNLFYMDFAFHEIIQEWQKRGGQPWQLIEPVDGFHPNERKSILLKGILMTSQTLDNQEWTQLTSWIKGNLTCDSRTREWLCCCWRIISGKRCSSSGPKSWERRIRSTPRLNRCLETKAGTEPLRSMHPWGAQGGRGLGKLIPQLWGLPRHRPKGLFFSSIFKCLSLNEEHIWTTVQCCVLPGSVTLPLFLK

SEQ ID NO: 69621 - protein, 663 aa, Artificial Sequence
  derived and/or modified sequence
MQSPWKILTVAPLFLLLSLQSSASPANDDQSRPSLSNGHTCVGCVLVVSVIEQLAQVHNSTVQASMERLCSYLPEKLFLKTTCYLVIDKFGSDIIKLLSADMNADVVCHTLEFCKQNTGQPLCHLYPLPKETWKFTLQKARQIVKKSPILKYSRSGSDICSLPVLAKICQKIKLAMEQSVPFKDVDSDKYSVFPTLRGYHWRGRDCNDSDESVYPGRRPNNWDVHQDSNCNGIWGVDPKDGVPYEKKFCEGSQPRGIILLGDSAGAHFHISPEWITASQMSLNSFINLPTALTNELDWPQLSGATGFLDSTVGIKEKSIYLRLWKRNHCNHRDYQNISRNGASSRNLKKFIESLSRNKVLDYPAIVIYAMIGNDVCSGKSDPVPAMTTPEKLYSNVMQTLKHLNSHLPNGSHVILYGLPDGTFLWDNLHNRYHPLGQLNKDMTYAQLYSFLNCLQVSPCHGWMSSNKTLRTLTSERAEQLSNTLKKIAASEKFTNFNLFYMDFAFHEIIQEWQKRGGQPWQLIEPVDGFHPNERKSILLKGILMTSQTLDNQEWTQLTSWIKGNLTCDSRTREWLCCCWRIISGKRCSSSGPKSWERRIRSTPRLNRCLETKAGTEPLRSMHPWGAQGGRGLGKLIPQPYGGCHVTGPKDSSSAASLQMSFSQ

SEQ ID NO: 69622 - DNA, 84 bp, Artificial Sequence
  derived and/or modified sequence
gatattttgcagcacaaccatcctgtggtcggactattgcaagtgggaagcgaacacggtagcgaggaagctgccctctcctag

SEQ ID NO: 69623 - DNA, 2061 bp, Artificial Sequence
  derived and/or modified sequence
atgcagagcccgtggaaaattctcactgttgcacccctctttctgctgctgagtctgcagagctccgcgagtcctgccaacgacgaccaatcccgaccctccttaagcaatggacacacatgcgttggttgtgtcctcgttgtatcggtgattgagcaactggcacaggtccataactcaacggtccaggcttctatggaaagattgtgcagctatcttccagaaaaactgtttctaaaaaccacttgctacctggttattgacaagtttggcagcgatattataaaactcctgagcgcagacatgaatgcagacgtggtatgtcatactctcgagttctgcaaacaaaacacaggccagcccctatgccacctgtatccgctccccaaagaaacgtggaaattcactttgcaaaaggccagacaaatcgttaaaaagtccccaattctcaaatactcccgctcaggaagcgacatctgctctctgcctgtgctagccaaaatctgccagaagattaagctcgcaatggaacaatccgtgcccttcaaagacgtagattcagataagtacagtgtgtttcctacactgcggggttatcactggcgcggacgggattgcaatgactcggatgagtccgtttacccaggccgtagacccaataattgggatgtgcaccaagactccaactgcaacgggatttggggtgtcgacccaaaagacggtgtcccctatgaaaagaaattctgtgagggatcccaacctcgcggtatcatactgctgggagatagtgccggagctcacttccatatctctcctgaatggattacggcgagtcagatgagtttgaattctttcatcaatttgccaacagcacttacaaatgagttggactggccacagctgagcggggctaccggcttcctcgattccaccgtagggattaaggaaaagtctatctacctacgcctgtggaagcgcaaccattgtaaccatagggactatcagaacatcagccggaatggcgcaagcagccgaaacctcaagaagtttatcgagtctctgtccaggaataaggtcttagattaccccgccatagtgatatacgcaatgattggtaatgacgtttgcagcggaaagagcgaccctgtgccagctatgacaacaccagagaagctgtactctaacgtgatgcagacactcaaacatcttaattcccatcttcctaatggctcccatgtgattctgtacggcctacctgatggaacctttctctgggacaacctccacaacagatatcaccctttgggccagctcaacaaagacatgacttatgctcagctctacagttttctgaattgtcttcaggtgagcccatgccacgggtggatgtcctcaaacaagacactgaggaccttgaccagtgagcgggctgaacaactatctaataccctgaagaaaatcgccgcaagcgagaagttcacaaattttaatctcttttatatggatttcgccttccacgagataattcaggagtggcaaaagcggggcggtcagccttggcaactgatcgagccagttgatggctttcatcctaacgagaggaaaagcatcctgctgaaggggattctgatgactagccagaccctcgataatcaggagtggacccagcttacctcttggattaaggggaacctgacctgcgacagccgtacgcgggagtggctgtgctgttgttggagaatcatttctggaaaaaggtgctcgagtagtggccccaaatcatgggagcgcagaatcagaagcacacctcggcttaaccgatgtctcgagactaaggccggaacagaaccgttgcgtagcatgcatccatggggcgcccagggtggcaggggcctcggcaagctgatcccgcagctgtggggactgccacgtcatagacccaagggactttttttctcttcaatcttcaagtgcttgtcacttaatgaagagcacatttggacaactgtgcagtgttgcgtgttgcctggatcagtgacgctcccactgttcctgaagtag

SEQ ID NO: 69624 - DNA, 1992 bp, Artificial Sequence
  derived and/or modified sequence
atgcagagtccttggaaaatcctgactgtggccccccttttcctgctcctctccctccaatctagtgcctcccccgctaacgatgatcagtccagaccctccctgtccaatgggcatacctgcgtgggctgcgtcctggtcgtgagcgtaattgagcagctggctcaagtgcataactcaaccgtgcaggctagcatggagcggctctgcagttatctccccgaaaagctgttcctcaaaacaacatgctacctcgtcatcgacaagtttgggagtgacatcatcaaattgctgtcggccgacatgaacgctgacgtggtgtgccacaccttggaattctgcaagcaaaatacaggccaaccgctgtgccacctctacccgctccctaaggagacgtggaaatttacactgcagaaggccaggcagatcgtgaaaaaatctccaatccttaaatactcccgcagtgggtccgacatctgttctctgccagtgctggccaagatctgtcaaaaaatcaagctggccatggagcaatccgtgccttttaaagatgtagactccgacaagtatagcgtcttccccacccttagggggtatcactggcgcggcagagactgcaatgattcagacgagagcgtgtatcctggtaggaggccaaataactgggacgtccaccaagattcaaattgtaacggaatctggggcgtcgacccaaaggacggagtgccttacgaaaaaaagttttgtgaaggctcacagccacgtggcatcatattgctgggcgactcggcaggagcccatttccacattagccctgagtggatcactgccagtcaaatgagccttaactcctttattaacttacccacagccctgactaacgaactggactggcctcagctgtctggagcaacgggcttcctcgatagcacagttgggattaaagaaaaaagcatttacctcaggctgtggaagagaaaccactgcaatcatcgggactaccagaacatcagtcggaacggcgcatcatcgcgcaatctgaagaaatttatcgaaagtctcagcagaaataaggtcctggactaccctgccatcgtgatttacgccatgatcggcaatgatgtgtgcagcggaaaatctgatcctgtgcccgccatgaccactcctgagaagctctactcaaatgtgatgcagacactgaaacatttgaactcccacctgcccaacggatcacacgtgattctgtatggactgcccgacgggaccttcctctgggataatttgcataacaggtaccatcccctcggtcaattgaataaagacatgacctacgcacagttgtactcatttctgaattgcctccaggtctctccatgtcacggctggatgtctagtaacaagacactgaggactctcaccagtgaacgagccgaacagctgtctaataccctgaagaaaattgcagccagtgaaaagttcacgaacttcaacctgttttatatggactttgcattccacgagattattcaggagtggcagaaaagaggcgggcagccctggcaactcatcgaaccggttgatggcttccaccccaatgaacggaagagtatcctgctcaaaggaatactgatgacctcccagaccctggataatcaggagtggacccagctgactagctggattaaggggaacctgacgtgcgattcgagaacccgggaatggttatgttgttgttggcgtatcatttccgggaaaaggtgctcctcctccggccctaaatcttgggaaaggcggatccgtagtacaccccggctgaacagatgtttggagacaaaggccggcaccgagcctttgcgcagtatgcacccatggggagctcaggggggaagggggctgggtaagctgatcccccaaccttacggcggatgccacgtcacaggcccaaaggattctagttccgccgccagtctacaaatgagcttttcccagtag

SEQ ID NO: 69625 - DNA, 2061 bp, Artificial Sequence
  derived and/or modified sequence
atgcagagcccctggaagatcctgactgtggcccccctcttcctgctgctgagcctgcagagcagcgccagccctgccaatgatgaccagagccggcccagcctgagcaatggccacacctgtgtgggctgtgtgctggtggtgtctgtgattgagcagctggcccaggtgcacaacagcacagtgcaggcctccatggagcggctgtgcagctacctgcctgagaagctgttcctgaagaccacctgctacctggtgattgacaagtttggaagtgacatcatcaagctgctgtctgctgacatgaatgctgatgtggtgtgccacaccctggagttctgcaagcagaacacaggccagcccctgtgccacctgtaccccctgcccaaggagacctggaagttcaccctgcagaaggcccggcagatcgtgaagaagagccccatcctgaagtacagccgcagcggcagtgacatctgcagcctgcctgtgctggccaagatctgccagaagatcaagctggccatggagcagagcgtgcccttcaaggatgtggacagcgacaagtacagcgtcttccccaccctgcggggctaccactggaggggccgggactgcaatgacagtgatgagagcgtgtacccaggaagaagacccaacaactgggatgtgcaccaggacagcaactgcaatggcatctggggcgtggaccccaaggatggagtgccctatgagaagaagttctgtgagggcagccagccccggggcatcatcctgctgggggacagcgctggggcccacttccacatcagccctgagtggatcacagccagccagatgagcctgaacagcttcatcaacctgcccacagccctgaccaatgagctggactggccccagctgagcggggccaccggcttcctggacagcacagtgggcatcaaggagaagagcatctacctgcggctgtggaagaggaaccactgcaaccaccgggactaccagaacatcagcagaaatggagccagcagcaggaacctgaagaagttcatcgagagcctgagcaggaacaaggtgctggactacccagccatcgtcatctatgccatgattggaaatgatgtgtgcagcggcaagagtgaccctgtgcctgccatgaccaccccagagaagctgtacagcaatgtgatgcagaccctgaagcacctgaacagccacctgcccaacggcagccacgtgatcctgtatggcctgcctgatggcaccttcctgtgggacaacctgcacaaccgctaccaccccctgggccagctgaacaaggacatgacctacgcccagctgtacagcttcctgaactgcctgcaggtgagcccctgccacggctggatgagcagcaacaagaccctgcggaccctgaccagcgagagagctgagcagctgagcaacaccctgaagaagattgctgccagcgagaagttcaccaacttcaacctcttctacatggactttgccttccacgagatcatccaggagtggcagaagaggggcggccagccctggcagctgattgagcctgtggatggcttccaccccaatgaaaggaagagcatcctgctgaagggcatcctgatgaccagccagaccctggacaaccaggagtggacccagctgacctcctggatcaagggcaacctgacctgtgacagcaggacccgggagtggctgtgctgctgctggaggatcatcagcggcaagcgctgcagcagcagcggccccaagtcctgggagcggcgcatccgcagcaccccccggctgaaccgctgcctggagaccaaggccggcacagagcccctgcgctccatgcacccctggggcgcccagggcggccggggcctgggcaagctgatcccccagctgtggggcctgcccaggcaccggcccaagggcctcttcttcagcagcatcttcaagtgcctgagcctgaatgaggagcacatctggaccaccgtgcagtgctgcgtgctgcccggctctgtgaccctgcccctcttcctgaagtag

SEQ ID NO: 69626 - DNA, 1992 bp, Artificial Sequence
  derived and/or modified sequence
atgcagagcccctggaagatcctgactgtggcccccctcttcctgctgctgagcctgcagagcagcgccagccctgccaatgatgaccagagccggcccagcctgagcaatggccacacctgtgtgggctgtgtgctggtggtgtctgtgattgagcagctggcccaggtgcacaacagcacagtgcaggcctccatggagcggctgtgcagctacctgcctgagaagctgttcctgaagaccacctgctacctggtgattgacaagtttggaagtgacatcatcaagctgctgtctgctgacatgaatgctgatgtggtgtgccacaccctggagttctgcaagcagaacacaggccagcccctgtgccacctgtaccccctgcccaaggagacctggaagttcaccctgcagaaggcccggcagatcgtgaagaagagccccatcctgaagtacagccgcagcggcagtgacatctgcagcctgcctgtgctggccaagatctgccagaagatcaagctggccatggagcagagcgtgcccttcaaggatgtggacagcgacaagtacagcgtcttccccaccctgcggggctaccactggaggggccgggactgcaatgacagtgatgagagcgtgtacccaggaagaagacccaacaactgggatgtgcaccaggacagcaactgcaatggcatctggggcgtggaccccaaggatggagtgccctatgagaagaagttctgtgagggcagccagccccggggcatcatcctgctgggggacagcgctggggcccacttccacatcagccctgagtggatcacagccagccagatgagcctgaacagcttcatcaacctgcccacagccctgaccaatgagctggactggccccagctgagcggggccaccggcttcctggacagcacagtgggcatcaaggagaagagcatctacctgcggctgtggaagaggaaccactgcaaccaccgggactaccagaacatcagcagaaatggagccagcagcaggaacctgaagaagttcatcgagagcctgagcaggaacaaggtgctggactacccagccatcgtcatctatgccatgattggaaatgatgtgtgcagcggcaagagtgaccctgtgcctgccatgaccaccccagagaagctgtacagcaatgtgatgcagaccctgaagcacctgaacagccacctgcccaacggcagccacgtgatcctgtatggcctgcctgatggcaccttcctgtgggacaacctgcacaaccgctaccaccccctgggccagctgaacaaggacatgacctacgcccagctgtacagcttcctgaactgcctgcaggtgagcccctgccacggctggatgagcagcaacaagaccctgcggaccctgaccagcgagagagctgagcagctgagcaacaccctgaagaagattgctgccagcgagaagttcaccaacttcaacctcttctacatggactttgccttccacgagatcatccaggagtggcagaagaggggcggccagccctggcagctgattgagcctgtggatggcttccaccccaatgaaaggaagagcatcctgctgaagggcatcctgatgaccagccagaccctggacaaccaggagtggacccagctgacctcctggatcaagggcaacctgacctgtgacagcaggacccgggagtggctgtgctgctgctggaggatcatcagcggcaagcgctgcagcagcagcggccccaagtcctgggagcggcgcatccgcagcaccccccggctgaaccgctgcctggagaccaaggccggcacagagcccctgcgctccatgcacccctggggcgcccagggcggccggggcctgggcaagctgatcccccagccctacggcggctgccacgtgacaggccccaaggacagcagcagcgctgccagcctgcagatgtccttcagccagtag

SEQ ID NO: 69627 - DNA, 2061 bp, Artificial Sequence
  derived and/or modified sequence
atgcagagcccctggaagatcctgaccgtggcccccctgttcctgctgctgtctctgcaatccagtgcgtcccctgccaatgatgaccagtctaggccgtcacttagcaatggacatacctgtgtcggttgtgtgctcgtggtgtctgtcattgaacagctagctcaggtgcataactccacggtgcaggcctctatggagcggctatgcagctacctgcccgaaaagctgtttctgaaaaccacatgctatctcgtgatagataaatttggatccgatatcatcaaacttttgagcgctgatatgaatgcagatgttgtgtgccacaccttggaattctgtaagcaaaatacaggtcagcctctgtgtcacctgtatcccctgcccaaggaaacatggaaattcacactgcaaaaagcccggcagatcgtgaaaaaaagccctatccttaagtattctagatctggtagcgacatatgcagcttgcccgtgctcgctaagatctgccaaaagattaagctcgccatggaacaatcagtaccttttaaagatgtcgacagcgataagtactccgtatttcccactctcagaggatatcattggagggggagggattgcaacgactccgatgaatcggtctaccctggacggcgccccaataattgggacgtgcatcaggatagcaattgtaatggcatttggggggtggatccgaaggacggagtcccctatgaaaaaaagttttgcgaagggtctcagccgagaggaataatcttgctcggagactcagccggcgcccacttccacatttcaccagaatggattactgcttcacaaatgtcgctaaactctttcataaatttgcctactgccctcacaaatgagctggattggcctcagctgtctggggctactgggttccttgattctactgtcgggattaaggagaaatccatttacctcagactttggaaacgtaatcactgcaatcatagggattaccaaaatatctcaaggaacggcgccagctcccgcaacctgaagaagttcatagagtccctgagtaggaacaaagtgctcgattatcctgcaattgtgatttacgcaatgattggtaacgacgtgtgcagtgggaagtcagatcccgtgccagctatgaccacccccgagaagctttactctaatgtgatgcagacactgaaacacttaaattcacacctcccgaatgggagccacgttatcctgtacggcctgcccgacgggacattcttatgggacaatctccataatcgctaccatcccctaggccagctgaacaaagacatgacatatgcacagctgtactcattcctgaattgccttcaggtttcaccttgccatggatggatgtcctcaaataaaactctgcgaacgctgacatctgagcgggccgagcaactgagcaataccttaaagaaaatcgcagccagcgaaaagttcaccaatttcaacttgttctacatggattttgctttccatgagattatacaggaatggcaaaagaggggaggacagccatggcagctcatcgagccagttgatggctttcatccaaacgaacgtaagtctattcttctcaagggcatcctgatgaccagccagaccctggacaaccaggagtggactcagttaacctcatggatcaaggggaaccttacgtgtgactccaggactcgtgaatggttatgttgttgttggaggattattagtggtaaaagatgctcctcatcaggcccaaagagctgggaaaggagaatacggtcgactcctcgcctgaaccgctgcctagaaaccaaggccggaactgaacctctgaggagcatgcacccctggggggcccagggtgggcgtgggttaggcaaacttattccccaactgtggggtctaccgcgccaccgtcccaagggtctcttcttttctagtatatttaagtgcctgagccttaatgaagagcacatttggaccactgtccagtgttgcgtactgcccgggagtgtgacccttcccctctttttaaagtag

SEQ ID NO: 69628 - DNA, 1992 bp, Artificial Sequence
  derived and/or modified sequence
atgcagagcccctggaagatcctgaccgtggcccccctgttcctgcttctgagtcttcagagtagtgcaagccctgccaatgatgaccagtcaaggcctagcctctccaacggacacacctgtgtcgggtgcgtgctggtagtatcggtgattgagcagctggctcaggtccacaactcgacagtgcaggcttctatggaacggctctgcagttatttacccgagaaactgtttctgaagaccacttgttacctggtcatcgacaagttcggtagtgatataataaagttattgtcagcggatatgaatgccgacgtagtgtgccatactcttgaattctgcaaacagaatactggccagcctttgtgccacctgtaccccctgccaaaggaaacgtggaagtttacactacaaaaggcgcggcagattgtgaaaaagtcaccgattctgaaatactcacgctctggctcagacatttgttcccttccggtgctggctaagatctgccaaaagataaagctcgccatggagcagtctgtacccttcaaggatgtagactctgacaaatactccgtgttccctacccttcgtggctaccattggcgggggagggactgtaacgatagcgatgagtctgtgtaccctgggcgccggcctaacaattgggacgtccaccaagattctaattgtaacggcatatggggagtggaccccaaagacggcgtgccctacgagaagaaattctgtgagggaagccaaccgcgggggatcatccttctcggggattcagctggcgcccactttcacatcagccctgaatggattacagcctcccagatgagtctaaatagcttcatcaatcttcctactgctttaacaaacgagcttgactggccacagctctctggagccacagggtttctcgactctaccgtgggcatcaaggagaagagcatctacctcaggctatggaaaagaaatcactgcaaccaccgtgattaccagaacatcagtaggaacggagcctccagccgcaatctgaaaaagttcatcgagagtctgtcaaggaacaaggttttagactacccagccatcgtcatctacgcaatgataggcaacgacgtgtgctcaggcaagtcagaccctgtgccggccatgaccactcccgagaagctttattcaaacgtgatgcaaaccctgaaacatttgaactctcacctgcctaacgggagccacgtgatactctatggcctccccgacggtactttcttgtgggataaccttcacaaccgctatcatccactgggtcaactgaataaggacatgacatacgcgcaactgtactcatttctgaattgcttgcaggtgtcaccatgccatgggtggatgagcagtaataaaactctgagaaccttaaccagtgaacgtgccgagcagcttagcaatactctcaaaaagattgccgcttccgagaagttcacaaactttaacttgttctatatggacttcgcttttcatgaaatcattcaggagtggcaaaagaggggcggacaaccctggcagctcatagagccagtggatggctttcatcctaacgagcgcaagagtatcctcttgaaaggcatactgatgacttcccagactctggataaccaggagtggacgcagctgacaagttggattaagggaaatcttacctgcgatagccgtacaagagaatggctttgctgttgctggcgtattatttccggaaagcggtgcagctcttccgggccaaagagttgggaaaggcgcatacggagcacaccaagactcaaccgttgcttagaaactaaggctgggacagagccactgaggtccatgcacccctggggcgcccaagggggtcggggcctggggaaattgatcccccagccctacggcggatgccatgtcacaggtcccaaagactccagcagcgctgcctcactgcagatgtctttcagtcaatag

SEQ ID NO: 69629 - DNA, 2061 bp, Artificial Sequence
  derived and/or modified sequence
atgcaatcgccttggaaaatcctcaccgtggcaccccttttcctcctgcttagcttgcagtcctctgcctctcctgcgaatgacgaccagagccggccatctctgtcaaacggtcacacctgcgttgggtgcgtgctggtggtgagcgtaattgagcagttagcgcaggtccataacagcactgtgcaggcatccatggagcggttatgttcatacctgccagaaaaactgtttctgaaaacgacctgctatttggtgatagataagttcggctcggatataatcaaattgctcagcgcggacatgaatgcagacgtcgtatgccacacattagaattttgtaaacagaataccggccagccactttgccatctgtacccactgcccaaagagacgtggaagtttaccctccagaaggctcgccagatcgtgaaaaaaagtccgatcctgaagtattcgaggtcaggatctgacatttgttccttacccgtcctcgccaaaatctgccaaaaaatcaaactggctatggagcagagtgtcccctttaaggacgtggatagcgataaatactcagtttttcctacgctgagagggtatcattggcgtggaagagattgtaatgacagtgacgaaagtgtttaccccggtaggagaccgaacaactgggacgtgcatcaggattccaactgtaacgggatctggggagtggaccctaaggacggcgtcccttacgaaaagaaattctgtgagggttcccagcccaggggaattattcttctcggagatagtgccggagcccacttccatattagtcctgagtggataaccgccagtcagatgagcctgaacagttttattaatcttcccaccgctctcaccaatgaactcgattggcctcagctctcaggtgcaacaggattcctggacagcactgttggaatcaaggaaaagtccatttacctgcggctgtggaagcgtaaccattgtaatcacagggactaccaaaatatcagcagaaatggtgcctctagtcgcaacctgaagaaattcatcgaatccttatcacgcaacaaagtactggactatccagcaatcgtgatctacgctatgattggtaatgatgtttgctctggcaaaagtgatccggtcccggctatgaccacacctgaaaaattgtattctaacgtgatgcagactctcaagcacctcaattcccacctcccaaatgggagccacgtgatcctatacggactgccagacgggaccttcctttgggacaatctgcataatcgctatcatcctctgggtcagctgaataaagacatgacatacgctcagttatacagcttcctgaactgtctgcaggtttccccttgccacggctggatgtcttctaacaagacactgcggacgctgacatcagagagagccgagcagctgtcaaacacactgaagaagatcgcagcttcagagaagttcactaatttcaatttgttttacatggacttcgcgtttcatgagatcatacaagagtggcagaaaaggggaggtcaaccttggcagctgatagaacccgtcgacggcttccaccctaatgaacgcaagtcaatcctgctcaaagggatcctgatgacatcccagactttagacaatcaggaatggacacagttgacaagctggataaagggcaatcttacgtgtgactcccggaccagagagtggctgtgttgctgttggaggatcatctctggaaaacgatgttcatcctcaggcccaaaatcatgggagagacgcatccggagcacccctagacttaatcgctgtcttgagacaaaggcaggcactgagccgttgaggtccatgcacccatggggggctcaaggtggccgaggacttggtaagcttattccgcagctctggggcctccctagacacagacctaagggccttttcttcagctcgatttttaaatgtttgtcacttaatgaagagcacatctggaccaccgtccagtgctgcgtgctacccggatccgtgacgctgccactgttcctcaaatag

SEQ ID NO: 69630 - DNA, 1992 bp, Artificial Sequence
  derived and/or modified sequence
atgcagtccccctggaagattctgaccgtggctcccctgtttctgctgctttcgctgcagagcagcgcgtctccggctaacgacgaccagtccagaccaagtctaagcaatggccacacatgcgtcgggtgcgtgctagttgtgagtgtaatcgagcagctcgctcaggtccacaattccaccgtgcaggcaagcatggagaggctttgctcttaccttcccgagaagctgtttcttaaaaccacatgttacctagtgattgataaattcggaagtgacattatcaagctgctctcagccgacatgaatgctgacgttgtgtgccacacgctggaattctgcaaacagaatactggccagcctctgtgtcatttgtaccccctcccgaaggaaacttggaagttcaccctacagaaagcacgacagatcgttaagaaatctccaattttgaaatacagccgttccggaagcgacatctgtagtctccctgtgctggctaagatctgtcagaagattaaactggccatggaacagagtgtgcccttcaaagacgttgacagtgacaagtatagcgtcttccctacgctgagaggataccattggcggggacgcgattgtaacgatagtgatgagagcgtgtatcctgggcgacggccaaataactgggatgttcatcaggatagcaactgcaatggcatttggggggtggatcctaaggatggagttccatacgaaaagaagttctgtgagggcagccaaccacgcggaatcatcttgctgggcgactccgcgggagcccactttcacataagtccagaatggataaccgcctcccagatgagtttgaatagctttattaatttgcccaccgctttgactaacgagttagattggcctcagctgtccggtgccacaggttttctcgactctaccgtcggtattaaggaaaagtcgatttaccttagattatggaaacgcaatcattgcaatcacagagactaccagaatatctcacggaacggggcatctagccgaaatttaaagaagtttatcgaatctctctcccgcaacaaagtgctggactatcccgcaattgttatttatgcaatgatcggcaacgatgtctgtagcggtaaatcagaccccgtgcccgcaatgaccaccccagagaagttgtacagcaatgttatgcagaccctgaaacatctaaactcccaccttcccaacggctcacacgtcatcttatacggactgcctgacggaacctttctctgggacaacctgcataatcggtatcatcccctggggcagctgaacaaggatatgacatatgcgcagctatactcttttctcaattgcctgcaggtgagtccttgccacggctggatgagctccaataagaccttgcgcactctcacttcggaacgggcagaacaattgtcgaataccctcaagaaaatcgctgcgagtgaaaaattcaccaactttaacttgttctacatggatttcgcttttcacgagataatccaggaatggcaaaagagaggaggacagccatggcagttgatagagcccgtggacggattccatcccaatgaaagaaagtccatccttcttaaagggattctgatgacctcccagaccctcgacaatcaagaatggactcagctgacttcctggattaagggtaaccttacctgtgacagcagaacccgagaatggttgtgttgttgttggagaattatttccgggaaaagatgttcttcttctggaccgaaatcttgggagcggaggatacggtctacccctcgcctgaacaggtgcttggagacaaaagccggtaccgaacctctgcgatcaatgcacccttggggagcccaggggggaagaggactcggaaaattgatcccgcagccctatggcggatgtcacgtcaccggaccaaaggactctagctctgcagcctccctccagatgtcgttcagtcagtag

SEQ ID NO: 69631 - DNA, 2061 bp, Artificial Sequence
  derived and/or modified sequence
atgcagagcccctggaagatcctgaccgtggcccccctgttcctgctgctgagcctgcagagcagcgccagccccgccaacgacgaccagagcagacccagcctgagcaacggccacacctgcgtgggctgcgtgctggtggtgagcgtgatcgagcagctggcccaggtgcacaacagcaccgtgcaggccagcatggagagactgtgcagctacctgcccgagaagctgttcctgaagaccacctgctacctggtgatcgacaagttcggcagcgacatcatcaagctgctgagcgccgacatgaacgccgacgtggtgtgccacaccctggagttctgcaagcagaacaccggccagcccctgtgccacctgtaccccctgcccaaggagacctggaagttcaccctgcagaaggccagacagatcgtgaagaagagccccatcctgaagtacagcagaagcggcagcgacatctgcagcctgcccgtgctggccaagatctgccagaagatcaagctggccatggagcagagcgtgcccttcaaggacgtggacagcgacaagtacagcgtgttccccaccctgagaggctaccactggagaggcagagactgcaacgacagcgacgagagcgtgtaccccggcagaagacccaacaactgggacgtgcaccaggacagcaactgcaacggcatctggggcgtggaccccaaggacggcgtgccctacgagaagaagttctgcgagggcagccagcccagaggcatcatcctgctgggcgacagcgccggcgcccacttccacatcagccccgagtggatcaccgccagccagatgagcctgaacagcttcatcaacctgcccaccgccctgaccaacgagctggactggccccagctgagcggcgccaccggcttcctggacagcaccgtgggcatcaaggagaagagcatctacctgagactgtggaagagaaaccactgcaaccacagagactaccagaacatcagcagaaacggcgccagcagcagaaacctgaagaagttcatcgagagcctgagcagaaacaaggtgctggactaccccgccatcgtgatctacgccatgatcggcaacgacgtgtgcagcggcaagagcgaccccgtgcccgccatgaccacccccgagaagctgtacagcaacgtgatgcagaccctgaagcacctgaacagccacctgcccaacggcagccacgtgatcctgtacggcctgcccgacggcaccttcctgtgggacaacctgcacaacagataccaccccctgggccagctgaacaaggacatgacctacgcccagctgtacagcttcctgaactgcctgcaggtgagcccctgccacggctggatgagcagcaacaagaccctgagaaccctgaccagcgagagagccgagcagctgagcaacaccctgaagaagatcgccgccagcgagaagttcaccaacttcaacctgttctacatggacttcgccttccacgagatcatccaggagtggcagaagagaggcggccagccctggcagctgatcgagcccgtggacggcttccaccccaacgagagaaagagcatcctgctgaagggcatcctgatgaccagccagaccctggacaaccaggagtggacccagctgaccagctggatcaagggcaacctgacctgcgacagcagaaccagagagtggctgtgctgctgctggagaatcatcagcggcaagagatgcagcagcagcggccccaagagctgggagagaagaatcagaagcacccccagactgaacagatgcctggagaccaaggccggcaccgagcccctgagaagcatgcacccctggggcgcccagggcggcagaggcctgggcaagctgatcccccagctgtggggcctgcccagacacagacccaagggcctgttcttcagcagcatcttcaagtgcctgagcctgaacgaggagcacatctggaccaccgtgcagtgctgcgtgctgcccggcagcgtgaccctgcccctgttcctgaagtag

SEQ ID NO: 69632 - DNA, 1992 bp, Artificial Sequence
  derived and/or modified sequence
atgcagagcccctggaagatcctgaccgtggcccccctgttcctgctgctgagcctgcagagcagcgccagccccgccaacgacgaccagagcagacccagcctgagcaacggccacacctgcgtgggctgcgtgctggtggtgagcgtgatcgagcagctggcccaggtgcacaacagcaccgtgcaggccagcatggagagactgtgcagctacctgcccgagaagctgttcctgaagaccacctgctacctggtgatcgacaagttcggcagcgacatcatcaagctgctgagcgccgacatgaacgccgacgtggtgtgccacaccctggagttctgcaagcagaacaccggccagcccctgtgccacctgtaccccctgcccaaggagacctggaagttcaccctgcagaaggccagacagatcgtgaagaagagccccatcctgaagtacagcagaagcggcagcgacatctgcagcctgcccgtgctggccaagatctgccagaagatcaagctggccatggagcagagcgtgcccttcaaggacgtggacagcgacaagtacagcgtgttccccaccctgagaggctaccactggagaggcagagactgcaacgacagcgacgagagcgtgtaccccggcagaagacccaacaactgggacgtgcaccaggacagcaactgcaacggcatctggggcgtggaccccaaggacggcgtgccctacgagaagaagttctgcgagggcagccagcccagaggcatcatcctgctgggcgacagcgccggcgcccacttccacatcagccccgagtggatcaccgccagccagatgagcctgaacagcttcatcaacctgcccaccgccctgaccaacgagctggactggccccagctgagcggcgccaccggcttcctggacagcaccgtgggcatcaaggagaagagcatctacctgagactgtggaagagaaaccactgcaaccacagagactaccagaacatcagcagaaacggcgccagcagcagaaacctgaagaagttcatcgagagcctgagcagaaacaaggtgctggactaccccgccatcgtgatctacgccatgatcggcaacgacgtgtgcagcggcaagagcgaccccgtgcccgccatgaccacccccgagaagctgtacagcaacgtgatgcagaccctgaagcacctgaacagccacctgcccaacggcagccacgtgatcctgtacggcctgcccgacggcaccttcctgtgggacaacctgcacaacagataccaccccctgggccagctgaacaaggacatgacctacgcccagctgtacagcttcctgaactgcctgcaggtgagcccctgccacggctggatgagcagcaacaagaccctgagaaccctgaccagcgagagagccgagcagctgagcaacaccctgaagaagatcgccgccagcgagaagttcaccaacttcaacctgttctacatggacttcgccttccacgagatcatccaggagtggcagaagagaggcggccagccctggcagctgatcgagcccgtggacggcttccaccccaacgagagaaagagcatcctgctgaagggcatcctgatgaccagccagaccctggacaaccaggagtggacccagctgaccagctggatcaagggcaacctgacctgcgacagcagaaccagagagtggctgtgctgctgctggagaatcatcagcggcaagagatgcagcagcagcggccccaagagctgggagagaagaatcagaagcacccccagactgaacagatgcctggagaccaaggccggcaccgagcccctgagaagcatgcacccctggggcgcccagggcggcagaggcctgggcaagctgatcccccagccctacggcggctgccacgtgaccggccccaaggacagcagcagcgccgccagcctgcagatgagcttcagccagtag

SEQ ID NO: 69633 - DNA, 2462 bp, Artificial Sequence
  derived and/or modified sequence
aacagatcagttccggcaagcctcgaggctcacggggtttatgcacactaacttcactgagccagggagcacggaagttgtgccactgtgcaacttgggttttctttatcctgcagtctttacctcagcagaaccgcacaccacagactccctccagctctttgtgtgtggctctctcagggtccaacaagagcaagctgtgggtctgtgagtgtttatgtgtgcttttattcacttcacacttattgaaaagtgtgtatgtgagagggtggggtgtgtgtgtcaaagagagtgaggaagagaaggagagagagatcaattgattctgcagcctcagctccagcatccctcagttgggagcttccaaagccgggtgatcacttggggtgcatagctcggagatgcagtccccctggaaaatccttacggtggcgcctctattcttgctcctgtctcttcagtcctcggcctctccagccaacgatgaccagtccaggcccagcctctcgaatgggcacacctgtgtagggtgtgtgctggtggtgtctgtaatagaacagcttgctcaagttcacaactcgacggtccaggcctcgatggagagactgtgcagctacctgcctgaaaaactgttcttgaaaaccacctgctatttagtcattgacaagtttggatcagacatcataaaactgcttagcgcagatatgaatgctgatgtggtatgtcacactctggagttttgtaaacagaacactggccaaccattgtgtcatctctaccctcttcccaaggagacatggaaatttacactacagaaggcaagacaaattgtcaagaagtccccgattctgaaatattctagaagtggttctgacatttgttcactcccggttttggccaagatctgccagaaaattaaattagctatggaacagtctgtgccattcaaagatgtggattcagacaaatacagcgttttcccaacactgcggggctatcactggcgggggagagactgtaatgacagcgacgagtcagtgtacccaggtagaaggccgaacaactgggatgtccatcaggattcaaactgtaatggcatttggggtgtcgatccaaaagatggagttccatatgagaagaaattctgtgaaggttcacagcccaggggaatcattttgctgggagactcagctggggctcattttcacatctctcctgaatggatcacagcgtcgcagatgtctttgaactctttcatcaatctaccaacagcccttaccaacgagcttgactggccccaactctctggtgctacaggatttctggactccactgttggaattaaagaaaaatctatttaccttcgcttatggaaaagaaaccactgtaatcacagggactaccagaatatttcaagaaatggtgcatcttcccgaaacctgaagaaatttatagaaagcttgtctagaaacaaggtgttggactatcccgccatcgttatatatgccatgattggaaatgatgtctgcagtgggaagagtgacccagtcccagccatgaccactcctgagaaactctactccaacgtcatgcagactctgaagcatctaaattcccacctgcccaatggcagccatgttattttgtatggcttaccagatggaacctttctctgggataatttgcacaacagatatcatcctctcggccagctaaataaagacatgacctatgcgcagttgtactccttcctgaactgcctccaggtcagcccctgccacggctggatgtcttccaacaagacgttgcggactctcacttcagagagagcagagcaactctccaacacactgaaaaaaattgcagccagtgagaaatttacaaacttcaatcttttctacatggattttgccttccatgaaatcatacaggagtggcagaagagaggcggacagccctggcagctcatcgagcccgtggatggattccaccccaacgagagaaagagcatcctcctcaaaggcatattaatgacaagccagacactggacaaccaagaatggacccagctaacatcatggataaagggaaacctgacatgcgacagcagaaccagagagtggctttgctgttgttggcggatcatttctggaaaaaggtgcagctccagtggccccaaatcctgggaaaggagaatccgttcaacccccagattaaacaggtgtttggagaccaaggcgggcactgagcctctcaggagcatgcacccctggggagcacagggaggcagaggcttgggtaaactcattccacaactatgggggctgccacgtcacaggcccaaaggactcttcttcagcagcatctttaaatgtctttctctcaatgaagagcatatctggacgactgtgcaatgctgtgtgctcccgggatcagtaacccttccgctgttcctgaaataa

SEQ ID NO: 69634 - DNA, 2396 bp, Artificial Sequence
  derived and/or modified sequence
tttctttatcctgcagtctttacctcagcagaaccgcacaccacagactccctccagctctttgtgtgtggctctctcagggtccaacaagagcaagctgtgggtctgtgagtgtttatgtgtgcttttattcacttcacacttattgaaaagtgtgtatgtgagagggtggggtgtgtgtgtcaaagagagtgaggaagagaaggagagagagatcaattgattctgcagcctcagctccagcatccctcagttgggagcttccaaagccgggtgatcacttggggtgcatagctcggagatgcagtccccctggaaaatccttacggtggcgcctctattcttgctcctgtctcttcagtcctcggcctctccagccaacgatgaccagtccaggcccagcctctcgaatgggcacacctgtgtagggtgtgtgctggtggtgtctgtaatagaacagcttgctcaagttcacaactcgacggtccaggcctcgatggagagactgtgcagctacctgcctgaaaaactgttcttgaaaaccacctgctatttagtcattgacaagtttggatcagacatcataaaactgcttagcgcagatatgaatgctgatgtggtatgtcacactctggagttttgtaaacagaacactggccaaccattgtgtcatctctaccctcttcccaaggagacatggaaatttacactacagaaggcaagacaaattgtcaagaagtccccgattctgaaatattctagaagtggttctgacatttgttcactcccggttttggccaagatctgccagaaaattaaattagctatggaacagtctgtgccattcaaagatgtggattcagacaaatacagcgttttcccaacactgcggggctatcactggcgggggagagactgtaatgacagcgacgagtcagtgtacccaggtagaaggccgaacaactgggatgtccatcaggattcaaactgtaatggcatttggggtgtcgatccaaaagatggagttccatatgagaagaaattctgtgaaggttcacagcccaggggaatcattttgctgggagactcagctggggctcattttcacatctctcctgaatggatcacagcgtcgcagatgtctttgaactctttcatcaatctaccaacagcccttaccaacgagcttgactggccccaactctctggtgctacaggatttctggactccactgttggaattaaagaaaaatctatttaccttcgcttatggaaaagaaaccactgtaatcacagggactaccagaatatttcaagaaatggtgcatcttcccgaaacctgaagaaatttatagaaagcttgtctagaaacaaggtgttggactatcccgccatcgttatatatgccatgattggaaatgatgtctgcagtgggaagagtgacccagtcccagccatgaccactcctgagaaactctactccaacgtcatgcagactctgaagcatctaaattcccacctgcccaatggcagccatgttattttgtatggcttaccagatggaacctttctctgggataatttgcacaacagatatcatcctctcggccagctaaataaagacatgacctatgcgcagttgtactccttcctgaactgcctccaggtcagcccctgccacggctggatgtcttccaacaagacgttgcggactctcacttcagagagagcagagcaactctccaacacactgaaaaaaattgcagccagtgagaaatttacaaacttcaatcttttctacatggattttgccttccatgaaatcatacaggagtggcagaagagaggcggacagccctggcagctcatcgagcccgtggatggattccaccccaacgagagaaagagcatcctcctcaaaggcatattaatgacaagccagacactggacaaccaagaatggacccagctaacatcatggataaagggaaacctgacatgcgacagcagaaccagagagtggctttgctgttgttggcggatcatttctggaaaaaggtgcagctccagtggccccaaatcctgggaaaggagaatccgttcaacccccagattaaacaggtgtttggagaccaaggcgggcactgagcctctcaggagcatgcacccctggggagcacagggaggcagaggcttgggtaaactcattccacaaccctatgggggctgccacgtcacaggcccaaaggactcttcttcagcagcatctttgcaaatgtctttctctcaatgaagagcatatctggacgactgtgcaatgctgtgtgctcccgggatcagtaacccttccgctgttcctgaaataacctttcataaagtgctttgggtgccattcc

SEQ ID NO: 69635 - protein, 543 aa, Artificial Sequence
  derived and/or modified sequence
MQSPWKILTVAPLFLLLSLQSSASPANDDQSRPSLSNGHTCVEKLFLKTTCYLVIDKFGSDIIKLLSADMNADVVCHTLEFCKQNTGQPLCHLYPLPKETWKFTLQKARQIVKKSPILKYSRSGSDICSLPVLAKICQKIKLAMEQSVPFKDVDSDKYSVFPTLRGYHWRGRDCNDSDESVYPGRRPNNWDVHQDSNCNGIWGVDPKDGVPYEKKFCEGSQPRGIILLGDSAGAHFHISPEWITASQMSLNSFINLPTALTNELDWPQLSGATGFLDSTVGIKEKSIYLRLWKRNHCNHRDYQNISRNGASSRNLKKFIESLSRNKVLDYPAIVIYAMIGNDVCSGKSDPVPAMTTPEKLYSNVMQTLKHLNSHLPNGSHVILYGLPDGTFLWDNLHNRYHPLGQLNKDMTYAQLYSFLNCLQVSPCHGWMSSNKTLRTLTSERAEQLSNTLKKIAASEKFTNFNLFYMDFAFHEIIQEWQKRGGQPWQLIEPVDGFHPNEVALLLLADHFWKKVQLQWPQILGKENPFNPQIKQVFGDQGGH

SEQ ID NO: 69636 - DNA, 1632 bp, Artificial Sequence
  derived and/or modified sequence
atgcagtctccgtggaaaatccttacagtggcccccctcttcctacttctgtcgttgcaatcatctgccagtcctgcgaatgacgatcagtcccggccaagtctgagcaatggacatacctgcgtggagaagctctttctgaagacaacctgctatttggtgattgataagtttgggtccgacatcattaagctgttgtccgctgatatgaatgctgacgtagtgtgccatacactggagttttgtaagcagaatacaggacagccactgtgtcacctgtatcctcttcccaaggagacctggaaatttaccctccaaaaagctagacaaattgttaaaaagagtccgatcctcaagtactcccggtctggctctgatatctgttcacttcctgtcctggccaagatatgtcagaagatcaagcttgctatggaacagagcgtaccgttcaaagacgtggattctgataagtatagtgtgtttcctactctgcgggggtaccattggcggggacgtgactgtaatgactctgacgagtcggtgtatccaggacgccgaccgaacaactgggatgtgcaccaggactctaactgtaacggtatctggggtgtggaccccaaagatggagttccttatgaaaaaaagttctgcgagggatcacaaccgcgaggtatcattctgctgggcgactcggcgggagctcatttccatatcagccccgaatggatcaccgcctctcagatgagcctaaactcattcataaatctgcccaccgctctcaccaacgaactcgattggcctcagctatctggtgccacagggttcttggatagtaccgtagggatcaaggaaaaaagcatatacttgagactgtggaagcgcaatcactgcaaccaccgcgactatcaaaacatcagccgcaatggtgcttctagccggaaccttaaaaagttcatcgagtcgctgtcaaggaataaagtcttggattaccctgctatagtgatctatgctatgatcgggaacgatgtgtgcagcgggaagtctgaccccgtccctgcaatgacaactccagagaagttgtatagcaacgtaatgcagaccctgaagcacctcaacagccatctgcccaatggaagtcacgttattctttatgggctacctgatggtactttcctgtgggacaatcttcataacagataccaccctttgggccagctcaacaaggacatgacttatgctcagctatacagttttctaaactgcctacaggtcagcccatgtcacgggtggatgagctcgaacaagacactgcggaccctgactagcgaaagagcagagcagctcagtaatacattaaagaagatcgccgcgagcgagaaattcaccaatttcaacttgttctatatggacttcgcttttcatgagatcattcaggaatggcagaagcgtggcggacagccatggcaacttattgagccggtggacggattccacccaaacgaggtggcactactcctgctcgctgaccacttttggaaaaaggtccagctgcaatggcctcagatccttggaaaggagaaccctttcaacccccaaattaagcaggtgttcggtgatcagggcggtcattag

SEQ ID NO: 69637 - DNA, 894 bp, Artificial Sequence
  derived and/or modified sequence
atgaagctgaaaaattcattcatcaacctgcctacagcactgactaacgagcttgactggcctcaactgtcaggagctactggattcttagactcaaccgtgggaattaaggaaaagtccatttacttgcgtctgtggaagcggaaccattgtaaccaccgcgattaccagaatattagtagaaacggggcttcatccaggaatctcaaaaaatttatcgagtcgctctctaggaacaaagtgctggactaccccgcaatcgtcatttacgcgatgatcggaaatgacgtgtgctccggcaaatcagaccccgtgccagcaatgactacccctgaaaaactttattcaaatgtgatgcagactttaaaacacctcaactcccacctgcctaatgggtcacacgtgatactgtacggactgcccgacggtacttttctgtgggacaatctgcataaccgatatcacccgttaggccagctaaacaaggatatgacttacgcacagctatactcctttttgaactgcctacaagtcagcccgtgccatggttggatgtcctctaataagacactacggacacttacctcagagagggcagaacagctctcaaatacactgaagaagatcgcagcatcagagaaattcacgaatttcaatctgttttatatggacttcgccttccacgagattatccaggaatggcaaaagaggggagggcagccatggcaactgatcgagccagtggatgggttccacccgaatgaagttgccctgcttctcttggccgaccacttttggaagaaggtgcaactgcagtggccccaaattttgggcaaggaaaatccgtttaacccccagatcaagcaggtattcggcgaccaaggaggccactag

SEQ ID NO: 69638 - DNA, 1632 bp, Artificial Sequence
  derived and/or modified sequence
atgcagagcccctggaagatcctgactgtggcccccctcttcctgctgctgagcctgcagagcagcgccagccctgccaatgatgaccagagccggcccagcctgagcaatggccacacctgtgtggagaagctgttcctgaagaccacctgctacctggtgattgacaagtttggaagtgacatcatcaagctgctgtctgctgacatgaatgctgatgtggtgtgccacaccctggagttctgcaagcagaacacaggccagcccctgtgccacctgtaccccctgcccaaggagacctggaagttcaccctgcagaaggcccggcagatcgtgaagaagagccccatcctgaagtacagccgcagcggcagtgacatctgcagcctgcctgtgctggccaagatctgccagaagatcaagctggccatggagcagagcgtgcccttcaaggatgtggacagcgacaagtacagcgtcttccccaccctgcggggctaccactggaggggccgggactgcaatgacagtgatgagagcgtgtacccaggaagaagacccaacaactgggatgtgcaccaggacagcaactgcaatggcatctggggcgtggaccccaaggatggagtgccctatgagaagaagttctgtgagggcagccagccccggggcatcatcctgctgggggacagcgctggggcccacttccacatcagccctgagtggatcacagccagccagatgagcctgaacagcttcatcaacctgcccacagccctgaccaatgagctggactggccccagctgagcggggccaccggcttcctggacagcacagtgggcatcaaggagaagagcatctacctgcggctgtggaagaggaaccactgcaaccaccgggactaccagaacatcagcagaaatggagccagcagcaggaacctgaagaagttcatcgagagcctgagcaggaacaaggtgctggactacccagccatcgtcatctatgccatgattggaaatgatgtgtgcagcggcaagagtgaccctgtgcctgccatgaccaccccagagaagctgtacagcaatgtgatgcagaccctgaagcacctgaacagccacctgcccaacggcagccacgtgatcctgtatggcctgcctgatggcaccttcctgtgggacaacctgcacaaccgctaccaccccctgggccagctgaacaaggacatgacctacgcccagctgtacagcttcctgaactgcctgcaggtgagcccctgccacggctggatgagcagcaacaagaccctgcggaccctgaccagcgagagagctgagcagctgagcaacaccctgaagaagattgctgccagcgagaagttcaccaacttcaacctcttctacatggactttgccttccacgagatcatccaggagtggcagaagaggggcggccagccctggcagctgattgagcctgtggatggcttccaccccaatgaggtggccctgctgctgctggccgaccacttctggaagaaggtgcagctgcagtggccccagatcctgggcaaggagaaccccttcaacccccagatcaagcaggtgtttggagaccagggcggccactag

SEQ ID NO: 69639 - DNA, 894 bp, Artificial Sequence
  derived and/or modified sequence
atgaagctgaagaacagcttcatcaacctgcccacagccctgaccaatgagctggactggccccagctgagcggggccaccggcttcctggacagcacagtgggcatcaaggagaagagcatctacctgcggctgtggaagaggaaccactgcaaccaccgggactaccagaacatcagcagaaatggagccagcagcaggaacctgaagaagttcatcgagagcctgagcaggaacaaggtgctggactacccagccatcgtcatctatgccatgattggaaatgatgtgtgcagcggcaagagtgaccctgtgcctgccatgaccaccccagagaagctgtacagcaatgtgatgcagaccctgaagcacctgaacagccacctgcccaacggcagccacgtgatcctgtatggcctgcctgatggcaccttcctgtgggacaacctgcacaaccgctaccaccccctgggccagctgaacaaggacatgacctacgcccagctgtacagcttcctgaactgcctgcaggtgagcccctgccacggctggatgagcagcaacaagaccctgcggaccctgaccagcgagagagctgagcagctgagcaacaccctgaagaagattgctgccagcgagaagttcaccaacttcaacctcttctacatggactttgccttccacgagatcatccaggagtggcagaagaggggcggccagccctggcagctgattgagcctgtggatggcttccaccccaatgaggtggccctgctgctgctggccgaccacttctggaagaaggtgcagctgcagtggccccagatcctgggcaaggagaaccccttcaacccccagatcaagcaggtgtttggagaccagggcggccactag

SEQ ID NO: 69640 - DNA, 1632 bp, Artificial Sequence
  derived and/or modified sequence
atgcagagcccctggaagatcctgaccgtggcccccctgttcctgctgctgtcactccaaagctctgcctcccctgctaacgatgaccagagtcgccctagtttatcaaatggacatacttgcgtggagaagctatttcttaagaccacctgctacctggtaatcgacaaatttggctctgatattataaagctcttgagtgccgatatgaatgccgacgtggtgtgccacaccctggaattctgcaagcagaataccggccagcccttgtgccacctgtatccactaccgaaggagacttggaaatttacgctccagaaagcccgccagatagttaagaaaagccctatcctgaagtatagtagatcaggctccgacatctgctctttgcctgtgttggcgaagatttgtcagaagattaagctggctatggagcaatctgtccccttcaaagatgtggattcggacaaatacagtgtgttccccactctccggggctaccattggcgcggaagagattgcaacgactcagacgagagtgtgtacccggggcgtagacccaacaactgggacgttcaccaggatagcaattgtaacggtatttggggagtcgaccccaaagatggcgtgccatatgaaaagaagttttgcgaggggtcccaaccgcgtggaattattttactgggggattccgcaggagcgcacttccatattagccctgaatggataaccgcaagccagatgagtcttaatagcttcatcaatctgcccacagcactcacaaatgagcttgactggcctcagctctcgggagccacaggatttcttgactctactgttggcattaaggagaaaagcatttacctgaggttgtggaagcgcaaccactgcaaccacagagattatcagaatatctcaagaaacggcgcctccagtaggaacctgaagaagtttattgaaagcctcagtagaaataaggtactggattatcccgccattgtaatatatgctatgattgggaacgatgtctgcagtgggaagagcgatccagtccccgccatgacgacacctgagaagctctactcaaacgtgatgcagactctcaagcacctgaacagccatcttcccaacgggtcccatgttatcctctatggcctgcccgatggtacgttcttgtgggataacttgcacaatcgctatcaccctttggggcaactgaacaaggatatgacatacgcccagctttacagtttcttgaattgcttgcaggtgagtccttgccatggctggatgtctagcaataaaacgctcagaaccctcacttcagaaagagctgaacagcttagtaatacactgaaaaaaatcgcggcctcagagaaattcacaaatttcaacctcttctatatggacttcgcattccatgagatcatccaggagtggcaaaagcggggtggacagccgtggcagctaattgagcctgtggatgggttccaccctaacgaggtggccctgttgcttctcgccgatcatttttggaagaaggttcagcttcagtggccacagatactgggcaaggagaatccattcaaccctcagattaaacaggtgttcggggatcaagggggacactag

SEQ ID NO: 69641 - DNA, 894 bp, Artificial Sequence
  derived and/or modified sequence
atgaagctgaagaacagcttcatcaacctgcccaccgccctgaccaatgagcttgactggcctcagctctccggcgcgacaggtttccttgatagcaccgtcggcataaaagaaaagtctatttatttgcggctgtggaaacgtaatcactgcaaccatagggactatcagaacatcagccgcaacggtgcctccagtagaaacctaaaaaaatttatcgaaagtctttccagaaacaaggtacttgactacccagcgatcgtgatttacgcaatgatcggaaacgacgtatgctccggtaagagcgatcctgtaccagcgatgacaacgccagagaaattgtacagcaacgttatgcaaaccctgaaacatctcaactctcatctcccgaacggctcgcatgtgatcctgtatggattacccgatggtacatttctgtgggataatctccacaacaggtatcatcctctcggacaactgaataaagacatgacctacgcccagctgtacagttttctcaactgcctgcaggtttccccttgccacggttggatgagctccaataagactttgaggaccttgacctctgagcgtgctgagcagctgagtaatacactgaagaaaatcgctgccagcgagaaatttacaaatttcaatcttttctacatggacttcgcattccacgaaattatccaggaatggcaaaaacggggtgggcaaccgtggcagttgatcgaaccagttgatgggttccatccgaacgaagtggcattgttgctgcttgcggatcacttttggaaaaaagtccagctgcagtggccacagattctaggcaaagagaaccctttcaatccacaaatcaagcaggtgttcggcgatcagggcggtcactag

SEQ ID NO: 69642 - DNA, 1632 bp, Artificial Sequence
  derived and/or modified sequence
atgcaatctccttggaaaattcttactgtggctcctttgtttctgctcctgtctttgcagtcatccgccagtccagcaaacgacgaccaatctagaccatcactcagtaatggacatacttgcgtggaaaagcttttcctgaaaactacatgctatctcgtgattgacaagtttggatcagacattatcaagcttttaagtgccgatatgaacgcagacgtcgtttgccatactttagaattctgtaagcagaataccggacagcctctttgccacctctatcctctgcccaaggagacttggaaatttacgctgcagaaagccaggcagattgtcaaaaaatctcctatcctcaaatacagccgtagtggtagtgacatctgcagtctgcccgttttagccaaaatttgtcagaaaatcaagttagccatggaacagtccgttccatttaaagatgttgattcggataagtacagcgtcttccctactctgcgcggataccattggcggggaagggattgtaacgattctgacgagtctgtatatcctggaaggaggcccaataactgggatgttcatcaggactcaaattgtaacggcatttggggtgtggaccccaaggatggagttccatacgagaagaaattttgcgagggatcccagccgagagggattatcctgttgggagattctgccggtgcccatttccacatttcccccgaatggatcactgcctcacagatgagtctgaacagtttcatcaacctccctacagcattaaccaacgaactcgattggcctcaattgtctggagccacagggtttctggatagtactgtcggtatcaaagagaagagtatatacctgcggttatggaagaggaatcactgtaaccaccgggactaccagaacattagcagaaatggggcaagtagcaggaacctcaaaaaattcatcgagtccctgtccaggaacaaggtcctggactaccctgctattgtgatctacgcaatgatcgggaatgacgtctgtagcggaaagtccgatcctgtgcccgcaatgacaaccccagaaaagttgtattcaaacgtgatgcagactctgaaacacctaaactcgcacctcccgaacggatcccacgtgatcctgtacggtctcccagacggcacattcctttgggacaacttgcacaatcgctaccatcctctagggcagctaaacaaggacatgacatatgcacagttatacagcttcctgaactgccttcaggtctccccttgtcatggctggatgagctccaataagaccctgagaacccttacttctgaaagagctgagcaacttagcaatacattgaagaaaatagccgcttcggagaagttcacaaatttcaatcttttttacatggatttcgcttttcacgagatcatccaggaatggcaaaagaggggcggacagccatggcagctgattgaacccgtagatggctttcatcctaacgaagtcgctctgctcttactcgccgatcacttctggaaaaaggtgcagctgcagtggccccaaatactcggcaaagagaatcctttcaacccacagattaaacaggtttttggggaccaaggaggacattag

SEQ ID NO: 69643 - DNA, 894 bp, Artificial Sequence
  derived and/or modified sequence
atgaaactgaaaaacagttttattaacttaccaaccgcactaacgaatgagctggattggccgcagctcagcggggctacaggctttctagattcgactgtgggcataaaggagaaatcaatctacttaaggctgtggaaacgtaaccactgtaatcaccgagactatcagaatatttcacgaaatggcgcttccagccggaacctgaagaagttcattgagagtttgagcagaaataaggtgctcgactaccctgccatcgttatttatgccatgatcgggaatgatgtctgcagcggcaagagcgaccccgtccctgctatgactacgccggaaaagctgtactcaaatgtgatgcaaactctgaagcacttgaattctcatctgccaaatggcagccatgtaatcttgtacgggttgccagatggtacttttctatgggacaatctccacaatcggtatcacccccttggacaactcaataaggatatgacatacgctcagttatactcctttctgaattgcctgcaggtctctccttgtcatggatggatgagtagtaataagaccctgcgaaccctcaccagtgaacgtgctgagcagctgtcaaacactctgaaaaaaattgccgcttctgaaaagtttactaatttcaatctgttctacatggatttcgcttttcatgagatcattcaggagtggcagaagaggggcggtcagccctggcagctgatagaaccagtggatggatttcacccaaatgaagtagctctgctgcttctggctgaccacttctggaagaaggtgcagctacagtggcctcagatcctgggaaaagagaatccgtttaatccgcagatcaagcaggtgttcggcgatcagggtggtcactag

SEQ ID NO: 69644 - DNA, 1632 bp, Artificial Sequence
  derived and/or modified sequence
atgcagagcccctggaagatcctgaccgtggcccccctgttcctgctgctgagcctgcagagcagcgccagccccgccaacgacgaccagagcagacccagcctgagcaacggccacacctgcgtggagaagctgttcctgaagaccacctgctacctggtgatcgacaagttcggcagcgacatcatcaagctgctgagcgccgacatgaacgccgacgtggtgtgccacaccctggagttctgcaagcagaacaccggccagcccctgtgccacctgtaccccctgcccaaggagacctggaagttcaccctgcagaaggccagacagatcgtgaagaagagccccatcctgaagtacagcagaagcggcagcgacatctgcagcctgcccgtgctggccaagatctgccagaagatcaagctggccatggagcagagcgtgcccttcaaggacgtggacagcgacaagtacagcgtgttccccaccctgagaggctaccactggagaggcagagactgcaacgacagcgacgagagcgtgtaccccggcagaagacccaacaactgggacgtgcaccaggacagcaactgcaacggcatctggggcgtggaccccaaggacggcgtgccctacgagaagaagttctgcgagggcagccagcccagaggcatcatcctgctgggcgacagcgccggcgcccacttccacatcagccccgagtggatcaccgccagccagatgagcctgaacagcttcatcaacctgcccaccgccctgaccaacgagctggactggccccagctgagcggcgccaccggcttcctggacagcaccgtgggcatcaaggagaagagcatctacctgagactgtggaagagaaaccactgcaaccacagagactaccagaacatcagcagaaacggcgccagcagcagaaacctgaagaagttcatcgagagcctgagcagaaacaaggtgctggactaccccgccatcgtgatctacgccatgatcggcaacgacgtgtgcagcggcaagagcgaccccgtgcccgccatgaccacccccgagaagctgtacagcaacgtgatgcagaccctgaagcacctgaacagccacctgcccaacggcagccacgtgatcctgtacggcctgcccgacggcaccttcctgtgggacaacctgcacaacagataccaccccctgggccagctgaacaaggacatgacctacgcccagctgtacagcttcctgaactgcctgcaggtgagcccctgccacggctggatgagcagcaacaagaccctgagaaccctgaccagcgagagagccgagcagctgagcaacaccctgaagaagatcgccgccagcgagaagttcaccaacttcaacctgttctacatggacttcgccttccacgagatcatccaggagtggcagaagagaggcggccagccctggcagctgatcgagcccgtggacggcttccaccccaacgaggtggccctgctgctgctggccgaccacttctggaagaaggtgcagctgcagtggccccagatcctgggcaaggagaaccccttcaacccccagatcaagcaggtgttcggcgaccagggcggccactag

SEQ ID NO: 69645 - DNA, 894 bp, Artificial Sequence
  derived and/or modified sequence
atgaagctgaagaacagcttcatcaacctgcccaccgccctgaccaacgagctggactggccccagctgagcggcgccaccggcttcctggacagcaccgtgggcatcaaggagaagagcatctacctgagactgtggaagagaaaccactgcaaccacagagactaccagaacatcagcagaaacggcgccagcagcagaaacctgaagaagttcatcgagagcctgagcagaaacaaggtgctggactaccccgccatcgtgatctacgccatgatcggcaacgacgtgtgcagcggcaagagcgaccccgtgcccgccatgaccacccccgagaagctgtacagcaacgtgatgcagaccctgaagcacctgaacagccacctgcccaacggcagccacgtgatcctgtacggcctgcccgacggcaccttcctgtgggacaacctgcacaacagataccaccccctgggccagctgaacaaggacatgacctacgcccagctgtacagcttcctgaactgcctgcaggtgagcccctgccacggctggatgagcagcaacaagaccctgagaaccctgaccagcgagagagccgagcagctgagcaacaccctgaagaagatcgccgccagcgagaagttcaccaacttcaacctgttctacatggacttcgccttccacgagatcatccaggagtggcagaagagaggcggccagccctggcagctgatcgagcccgtggacggcttccaccccaacgaggtggccctgctgctgctggccgaccacttctggaagaaggtgcagctgcagtggccccagatcctgggcaaggagaaccccttcaacccccagatcaagcaggtgttcggcgaccagggcggccactag

SEQ ID NO: 69646 - DNA, 2334 bp, Artificial Sequence
  derived and/or modified sequence
aacagatcagttccggcaagcctcgaggctcacggggtttatgcacactaacttcactgagccagggagcacggaagttgtgccactgtgcaacttgggttttctttatcctgcagtctttacctcagcagaaccgcacaccacagactccctccagctctttgtgtgtggctctctcagggtccaacaagagcaagctgtgggtctgtgagtgtttatgtgtgcttttattcacttcacacttattgaaaagtgtgtatgtgagagggtggggtgtgtgtgtcaaagagagtgaggaagagaaggagagagagatcaattgattctgcagcctcagctccagcatccctcagttgggagcttccaaagccgggtgatcacttggggtgcatagctcggagatgcagtccccctggaaaatccttacggtggcgcctctattcttgctcctgtctcttcagtcctcggcctctccagccaacgatgaccagtccaggcccagcctctcgaatgggcacacctgtgtagaaaaactgttcttgaaaaccacctgctatttagtcattgacaagtttggatcagacatcataaaactgcttagcgcagatatgaatgctgatgtggtatgtcacactctggagttttgtaaacagaacactggccaaccattgtgtcatctctaccctcttcccaaggagacatggaaatttacactacagaaggcaagacaaattgtcaagaagtccccgattctgaaatattctagaagtggttctgacatttgttcactcccggttttggccaagatctgccagaaaattaaattagctatggaacagtctgtgccattcaaagatgtggattcagacaaatacagcgttttcccaacactgcggggctatcactggcgggggagagactgtaatgacagcgacgagtcagtgtacccaggtagaaggccgaacaactgggatgtccatcaggattcaaactgtaatggcatttggggtgtcgatccaaaagatggagttccatatgagaagaaattctgtgaaggttcacagcccaggggaatcattttgctgggagactcagctggggctcattttcacatctctcctgaatggatcacagcgtcgcagatgtctttgaactctttcatcaatctaccaacagcccttaccaacgagcttgactggccccaactctctggtgctacaggatttctggactccactgttggaattaaagaaaaatctatttaccttcgcttatggaaaagaaaccactgtaatcacagggactaccagaatatttcaagaaatggtgcatcttcccgaaacctgaagaaatttatagaaagcttgtctagaaacaaggtgttggactatcccgccatcgttatatatgccatgattggaaatgatgtctgcagtgggaagagtgacccagtcccagccatgaccactcctgagaaactctactccaacgtcatgcagactctgaagcatctaaattcccacctgcccaatggcagccatgttattttgtatggcttaccagatggaacctttctctgggataatttgcacaacagatatcatcctctcggccagctaaataaagacatgacctatgcgcagttgtactccttcctgaactgcctccaggtcagcccctgccacggctggatgtcttccaacaagacgttgcggactctcacttcagagagagcagagcaactctccaacacactgaaaaaaattgcagccagtgagaaatttacaaacttcaatcttttctacatggattttgccttccatgaaatcatacaggagtggcagaagagaggcggacagccctggcagctcatcgagcccgtggatggattccaccccaacgaggtggctttgctgttgttggcggatcatttctggaaaaaggtgcagctccagtggccccaaatcctgggaaaggagaatccgttcaacccccagattaaacaggtgtttggagaccaaggcgggcactgagcctctcaggagcatgcacccctggggagcacagggaggcagaggcttgggtaaactcattccacaaccctatgggggctgccacgtcacaggcccaaaggactcttcttcagcagcatctttgcaaatgtctttctctcaatgaagagcatatctggacgactgtgcaatgctgtgtgctcccgggatcagtaacccttccgctgttcctgaaataacctttcataaagtgctttgggtgccattccaaacaagagagtatctgtgccctttacagctaattgttctaaaaggagtttct

SEQ ID NO: 69647 - DNA, 1352 bp, Artificial Sequence
  derived and/or modified sequence
acaagagctgagcggaagccaggtcaagggtggtgctgatcattgtgacttccctgatgaagttgaagaactctttcatcaatctaccaacagcccttaccaacgagcttgactggccccaactctctggtgctacaggatttctggactccactgttggaattaaagaaaaatctatttaccttcgcttatggaaaagaaaccactgtaatcacagggactaccagaatatttcaagaaatggtgcatcttcccgaaacctgaagaaatttatagaaagcttgtctagaaacaaggtgttggactatcccgccatcgttatatatgccatgattggaaatgatgtctgcagtgggaagagtgacccagtcccagccatgaccactcctgagaaactctactccaacgtcatgcagactctgaagcatctaaattcccacctgcccaatggcagccatgttattttgtatggcttaccagatggaacctttctctgggataatttgcacaacagatatcatcctctcggccagctaaataaagacatgacctatgcgcagttgtactccttcctgaactgcctccaggtcagcccctgccacggctggatgtcttccaacaagacgttgcggactctcacttcagagagagcagagcaactctccaacacactgaaaaaaattgcagccagtgagaaatttacaaacttcaatcttttctacatggattttgccttccatgaaatcatacaggagtggcagaagagaggcggacagccctggcagctcatcgagcccgtggatggattccaccccaacgaggtggctttgctgttgttggcggatcatttctggaaaaaggtgcagctccagtggccccaaatcctgggaaaggagaatccgttcaacccccagattaaacaggtgtttggagaccaaggcgggcactgagcctctcaggagcatgcacccctggggagcacagggaggcagaggcttgggtaaactcattccacaaccctatgggggctgccacgtcacaggcccaaaggactcttcttcagcagcatctttgcaaatgtctttctctcaatgaagagcatatctggacgactgtgcaatgctgtgtgctcccgggatcagtaacccttccgctgttcctgaaataacctttcataaagtgctttgggtgccattccaaacaagagagtatctgtgccctttacagctaattgttctaaaaggagtttctaaaaacacttaagtccagcgatgttcagcaatttacccagggtcttggcatgccaggggactgatcccccctgtgttgctgacttctttaaaatggccggg

SEQ ID NO: 69648 - protein, 264 aa, Artificial Sequence
  derived and/or modified sequence
MPPPALFLSSLYPRLEFQNDFYRSCIRRSSPQPPPNLAWRPESLYSGELAGGGYLSLSKVVPFSHYAGTLLLLLAGVACLRGIGRWTNPQYRQFITILEATHRNQSSENKRQLANYNFDFRSWPVDFHWEEPSSRKESRGGPSRRGVALLRPEPLHRGTADTLLNRVKKLPCQITSYLVAHTLGRRMLYPGSVYLLQKALMPVLLQGQARLVEECNGRRAKLLACDGNEIDTMFVDRRGTAEPQGQKLVICCEGNAGFYEVGCV

SEQ ID NO: 69649 - protein, 525 aa, Artificial Sequence
  derived and/or modified sequence
MPPPALFLSSLYPRLEFQNDFYRSCIRRSSPQPPPNLAWRPESLYSGELAGGGYLSLSKVVPFSHYAGTLLLLLAGVACLRGIGRWTNPQYRQFITILEATHRNQSSENKRQLANYNFDFRSWPVDFHWEEPSSRKESRGGPSRRGVALLRPEPLHRGTADTLLNRVKKLPCQITSYLVAHTLGRRMLYPGSVYLLQKALMPVLLQGQARLVEECNGRRAKLLACDGNEIDTMFVDRRGTAEPQGQKLVICCEGNAGFYEVGCVSTPLEAGYSVLGWNHPGFAGSTGVPFPQNEANAMDVVVQFAIHRLGFQPQDIIIYAWSIGGFTATWAAMSYPDVSAMILDASFDDLVPLALKVMPDSWRGLVTRTVRQHLNLNNAEQLCRYQGPVLLIRRTKDEIITTTVPEDIMSNRGNDLLLKLLQHRYPRVMAEEGLRVVRQWLEASSQLEEASIYSRWEVEEDWCLSVLRSYQAEHGPDFPWSVGEDMSADGRRQLALFLARKHLHNFEATHCTPLPAQNFQMPWHL

SEQ ID NO: 69650 - DNA, 1020 bp, Artificial Sequence
  derived and/or modified sequence
atgctttaccccggtagtgtctacctcctacagaaagcccttatgcctgtgttgctccagggacaggcccgcctggtcgaagaatgcaatgggcgcagggccaaattgctggcatgtgatggcaacgagatagacactatgttcgtagaccgtagaggaacagcagagcctcaaggtcagaagctcgtcatttgctgcgagggaaatgccggtttctacgaggtaggctgtgtgtccaccccactggaagccggctattcagtacttgggtggaatcatccaggatttgcaggctccacgggcgtgcctttcccccagaatgaggctaatgcaatggacgtggtggttcagtttgctatccatcgcctaggatttcagccgcaagacatcattatctatgcatggagcatcggcgggttcaccgctacatgggctgcgatgtcataccccgatgtgagtgccatgatcctagatgcatccttcgacgacttagtccctttagctcttaaggtgatgccagattcttggcgaggtttggtaacccgcactgttagacaacacctcaatctcaataatgctgagcaactgtgtcggtaccaaggaccggtgttactgatcaggcgtacaaaggacgagatcatcaccaccacggttccagaagacatcatgagtaaccgcggaaacgaccttctgctgaagcttttgcagcatcgatatccacgggtaatggccgaggagggcctgcgagtcgtacgtcagtggttagaggcgagtagtcaattagaggaggctagtatttactctagatgggaagtcgaagaggattggtgcttaagcgttctgcgttcgtaccaggctgagcatggtcctgacttcccttggtcagtcggcgaggatatgtcagctgatggtagacgtcagctggcactctttttagccagaaaacatctccataattttgaggctactcattgtacacccctccccgcccagaactttcagatgccttggcacctgtag

SEQ ID NO: 69651 - DNA, 795 bp, Artificial Sequence
  derived and/or modified sequence
atgccaccacctgccctgttcttaagctcactgtatccacggttagaattccagaatgacttttacagatcctgcattaggaggagctccccgcagccacctcccaacttggcatggcgtcctgagagcctgtactctggcgagctggcaggagggggctatctgagtttaagcaaagtggttccttttagccactacgcggggactctgctcctgctcctagcgggagtagcctgccttagggggatcggaagatggacaaacccccagtacagacagttcattaccattctcgaggccacgcacagaaaccagtccagtgagaacaagcgccaactagccaattataactttgacttccggtcctggcctgtggattttcactgggaagagcctagcagccgaaaggagagtaggggaggaccgtcccgtagaggtgtggctcttctgcggccagagccattgcaccgcggaacagccgatacactgctgaatcgtgtcaagaaactgccctgccagatcacatcctatctggtggcccatacgctcggtagacgcatgctgtaccctggtagcgtgtaccttctgcaaaaagcactcatgccagttttactgcagggacaggcccgtttagtggaggaatgtaatggacgcagggcgaagctactggcatgcgacggcaatgagatcgatactatgttcgtagaccggcggggcactgccgaacctcaggggcaaaagcttgtcatctgctgtgagggaaacgccggcttctacgaagttggatgtgtctag

SEQ ID NO: 69652 - DNA, 795 bp, Artificial Sequence
  derived and/or modified sequence
atgccaccgcctgctttattcctgtcttctctctatcccagactggagttccaaaatgatttttatcgatcatgtatacggcgctcatccccacagccacctcctaacctggcctggcgacctgagtcgctgtattccggtgagctggctggtggaggatacctgtctctttctaaagtcgtaccattctctcactatgcgggcacactactcttgctactggctggggtcgcttgccttcgggggatcgggcggtggactaatccacagtacaggcagtttatcacaatcctggaggcaactcacagaaatcagagctctgagaacaagaggcaactggcgaattataatttcgattttcggtcttggccagtggatttccactgggaagaacccagtagcaggaaagagagcagggggggaccaagtcgacggggcgtagctctgctgcgccccgaacccttacacagagggactgccgacacgctcctgaatagggtgaagaagctcccttgtcaaattacgtcatacctggtggcccatacgctagggcggcgcatgctgtaccctggcagcgtgtacctgcttcagaaagccctgatgccggttcttctacaaggacaggccagacttgtggaagaatgcaacggcaggcgcgccaagctgctcgcctgcgatgggaacgaaatagacacaatgttcgtagatcgccggggcactgccgagccacaggggcagaaattagtcatctgctgcgaaggaaacgccggattttacgaggtgggatgtgtgtag

SEQ ID NO: 69653 - DNA, 795 bp, Artificial Sequence
  derived and/or modified sequence
atgcctccccctgctttgttcctaagttccctataccccaggctcgaattccagaacgatttttatcgctcatgtatcaggaggagttcacctcaaccacctcctaatttggcatggagacccgagtctctgtatagcggggaactcgcagggggtggctatctttccctctctaaagtcgtccctttctcccactacgcagggaccctgttattactcctggcaggtgtggcctgtctccgtggcattggcagatggaccaatccgcagtatagacagtttattaccattctggaagcaactcaccggaatcagtcaagtgagaataagcgccaattagccaattataactttgactttcgtagctggcctgtggactttcactgggaggagcctagcagcaggaaggaaagtaggggggggccctccagaagaggcgtcgccctgctacgtccagagcctctgcacaggggtaccgccgacacattactgaacagggttaagaagctgccatgccagataacttcttaccttgtggctcatacccttggcaggagaatgctctaccccggctcagtgtatctcttgcagaaagccctcatgcccgtgttgctgcaggggcaagcgcggctcgtggaggaatgtaacgggcggagggccaagttgctcgcctgcgatggtaatgagatcgatacaatgtttgtggacagaagaggaacagccgagcctcagggccagaaactggtcatatgttgcgagggtaatgctggcttctatgaggtggggtgtgtgtag

SEQ ID NO: 69654 - DNA, 795 bp, Artificial Sequence
  derived and/or modified sequence
atgcctccccccgctctgttcctcagcagcttgtaccctaggctcgaatttcaaaacgatttctatagatcatgcatccgccggtccagtccgcaaccaccacctaacctagcatggagaccagaaagcctttactccggtgagcttgcaggaggtggttacctttctctgtctaaagtcgtgccgttcagtcactacgctgggactctgctgttgctcctggctggcgtcgcctgtttgagggggattgggcgctggaccaatcctcaatacagacagtttattaccattctagaagccacccacagaaatcagtcctccgaaaataagagacaattggccaattacaacttcgatttcaggtcatggccagtggatttccattgggaggaaccctcatcccgcaaagaatccaggggcgggccttccaggaggggagtggccctgctccgacccgaaccactccatcgcggaacggccgatactctacttaatagagtcaagaaacttccttgtcagattaccagctatctcgtggcacacactctgggacgcagaatgctgtacccgggatctgtgtacctattacagaaggcacttatgcccgttttacttcagggacaggctcgattggtcgaggaatgtaacggccgtcgggctaagctcttggcatgtgatggaaacgaaatagataccatgtttgtagatcgacgtgggaccgctgagccgcagggccagaagctggtaatctgctgcgaaggtaatgccgggttctacgaagtgggttgtgtctag

SEQ ID NO: 69655 - DNA, 795 bp, Artificial Sequence
  derived and/or modified sequence
atgcctccacccgccctttttctgtctagtttgtacccacgactggagttccagaacgacttctatcggtcttgtattcgacggtcatccccacaaccaccccctaacctggcctggagacctgaatccttatactctggagaactggctggaggaggatatttgagccttagtaaggtggtgccctttagtcattacgctggaactcttctgctgctactggccggagtggcttgcctgagaggaattgggcgatggaccaatcctcagtacaggcagtttatcaccatactagaagctacccataggaaccagagcagcgagaacaagaggcagcttgcaaactacaacttcgattttagatcctggcctgtggatttccattgggaagagccgtcctcccgaaaggagtcgaggggcggccccagtcggagaggtgtggcattattgaggccagagccattacatcggggtaccgccgatactctgttgaatcgggtgaagaagctgccgtgtcaaattactagttacctagtggctcacaccttaggaagacgcatgctgtatcctggtagcgtctacttattgcagaaagcccttatgcctgtgttgttgcaggggcaggctagacttgtggaggagtgtaatgggcgtcgcgccaagctgctagcatgcgacggtaatgagattgacacaatgttcgtagatcgcagaggcacagccgagccccaggggcaaaagctcgtgatatgctgcgaggggaatgcaggattctatgaggttggttgtgtgtag

SEQ ID NO: 69656 - DNA, 795 bp, Artificial Sequence
  derived and/or modified sequence
atgccccctcctgctctgttcctgtcctccctctatccccggctggagttccaaaacgatttttaccgttcatgtattagaagatcctccccccagccgcctcccaatttagcttggcgccccgagagcctgtactctggtgaactcgcagggggaggatatttaagtctttctaaggtcgtacctttctctcattatgccggaactcttcttctgttactagccggtgtggcgtgtcttagaggaattggaaggtggactaacccgcagtatcgccagttcatcacaatattggaagcaactcataggaatcaaagttcagaaaataaacgacagctagcaaactataatttcgactttcggtcttggcctgtcgacttccactgggaggaaccatcatcaaggaaggagtcccgtgggggcccatcaaggagaggagtggcgctgttgagacctgagcccctccatagagggaccgcggataccctcttgaatcgcgtgaagaagctgccgtgtcagatcacctcttatttggttgctcatacgctaggtcgtaggatgctgtatccaggatccgtgtatttactacagaaagctctgatgcccgtgctgttgcaagggcaagctcgcctggttgaagagtgtaatggtaggcgagcaaagttactagcttgcgatggaaatgagattgatacaatgttcgtggaccggcgtgggacggccgaacctcaaggccagaagttggtaatctgctgcgaggggaacgcaggtttttatgaggttggatgtgtatag

SEQ ID NO: 69657 - DNA, 438 bp, Artificial Sequence
  derived and/or modified sequence
atgttagggcactgctgctacttttggcaggtttggcccgcttccgaagccctagcagcaggccctacacctagtactggatcaagcagcccatcttggaagcagcacataggcacctctctgcagaaaacccgtggatccctgccaaccacgaccctgacatctggagcgggccagagtacctccacaggcaaaaatcctgccgctggtcggtcccttgaaggtgctctcccagcaggcgtctggccttgcttcgcacagtccccctgtaccggcgggcagcagaccccatctagcaccgggctgaggtcctgtctagtccgttctcctggaggaaaacaacagagaggcgaggcccactggggcggcggtgctatcagtggagtgctctgggagtgggccctgcattgcaagattgcggtgactcattgggcctag

SEQ ID NO: 69658 - DNA, 438 bp, Artificial Sequence
  derived and/or modified sequence
atgcttggacactgttgctatttctggcaggtgtggccagcatctgaggcgctcgccgccggtcctaccccttctacaggatcctcctcccctagctggaaacagcacattggaacttctctgcagaagaccaggggcagtcttccaaccaccaccctcacttctggagcaggccaatcaacttcaaccggcaagaaccctgccgctggacgctctctggaaggcgcccttccggcgggagtgtggccctgcttcgcccagagcccatgtactgggggtcagcaaactccgagctctaccggactgcggtcatgtctcgtgcgctcacctggcggcaagcagcaacggggggaagcacattggggaggcggagctatatccggagtgttgtgggagtgggctctgcactgtaaaattgctgtgactcattgggcgtag

SEQ ID NO: 69659 - DNA, 438 bp, Artificial Sequence
  derived and/or modified sequence
atgctgggacactgttgttacttctggcaagtgtggcctgcttccgaggctcttgcagccggaccgacacctagcaccgggtcaagttccccttcatggaaacagcacataggtacttctctgcagaaaacgcgcgggtcactccccaccaccacgttaacttctggtgcgggacagtcgacttccacagggaagaaccccgccgccgggaggagtctggagggggcccttcccgccggagtctggccctgcttcgctcagtcaccttgcacagggggacagcagactccttcgtctaccggactgagatcgtgtctggtcaggagcccaggggggaaacagcaaaggggggaggctcactggggcggaggcgccatctccggcgtgttgtgggaatgggccttgcattgtaagattgcagtcactcattgggcctag

SEQ ID NO: 69660 - DNA, 438 bp, Artificial Sequence
  derived and/or modified sequence
atgctgggacattgttgctatttctggcaagtttggcctgcctccgaagccctcgctgccgggcctactccctctaccgggtcgtcctctcccagctggaagcagcacatcggcacgtctcttcagaaaactagggggagcctgcccactacaaccctgacgtccggtgctggccaaagtacctccactgggaaaaaccccgcagccgggagaagccttgaaggtgctctaccagctggcgtttggccgtgtttcgctcagagcccttgcaccgggggtcagcagaccccctccagcaccgggctgcgctcgtgccttgtgcggagccctggggggaagcaacagcgcggcgaggctcactgggggggtggagccattagcggcgttctgtgggaatgggccctccattgtaaaatagctgtcacacattgggcttag

SEQ ID NO: 69661 - DNA, 1578 bp, Artificial Sequence
  derived and/or modified sequence
atgccacccccagccctcttcctgtcatccctgtacccaaggctggagttccagaacgatttctacaggtcctgtattcgcaggagttccccccagccacctcccaacctggcttggcggccagagtcactgtacagcggcgagctcgcaggcggcggatatctgtccttgtcgaaggtggtcccattctcccactacgccggaacactgcttctcctcctggctggggtggcctgtctgcgagggataggccgatggaccaatccgcagtacagacagttcattaccattcttgaggctactcatcggaatcagtcatccgaaaacaaaagacaactcgccaactacaacttcgattttcggagctggccggttgattttcattgggaagaaccctcatcaagaaaagagtctcgtggcggcccatctcggcggggtgtggccctgcttagaccagaaccactccacaggggcacagccgatacactactaaaccgcgttaaaaagctcccctgtcaaatcacctcttacctcgtggcccacaccttgggtcggagaatgctctacccgggatctgtatatctgctccagaaagctctcatgccggtgctgctccagggtcaagcccggttagtcgaagagtgtaacgggcgaagagccaaacttcttgcctgcgatggaaatgaaattgacaccatgtttgttgacagaagggggactgcagagccgcaaggacagaaactggtgatctgttgcgagggcaatgccggcttttatgaggtgggctgtgtttccacacctctggaagctgggtatagtgtgttgggctggaaccacccaggattcgcaggatcaacgggtgttccttttccccagaacgaggccaacgcaatggacgtggttgtccagttcgctattcatcggctgggctttcagcctcaagacatcataatttacgcttggtccatcggtggcttcaccgccacttgggccgccatgagctaccctgatgtcagtgccatgattctagacgcttcattcgatgacctggtgccactagccctcaaggtgatgcctgactcctggagggggttggtgacgaggactgtaagacagcatcttaacctcaacaatgcggaacagctttgccgataccaaggaccagttcttttgatcaggcggaccaaagatgagattatcacaacaacagtgcccgaggacatcatgagcaatcggggtaatgacttgctacttaagctcctgcagcatcgatatccacgtgtgatggcagaggaaggactaagggtcgtgcggcagtggcttgaagcctcctcacaactggaggaagcgtcgatctactcgcgctgggaggtggaggaggactggtgtttgtcagtccttcggagctatcaggccgagcatgggccagactttccttggtcagtcggcgaagacatgtctgctgatggcaggcggcagctcgccctgtttctcgcgcggaagcaccttcataacttcgaagcaacccactgtacccctctcccagcccagaacttccaaatgccctggcacctctag

SEQ ID NO: 69662 - DNA, 1578 bp, Artificial Sequence
  derived and/or modified sequence
atgcccccacctgcactattcctgagcagtttgtacccccgcctcgagttccagaatgacttttatcgctcctgcatcaggcgctcatctccccagcctccacccaacctggcctggaggcctgaatcattatattccggagaattggctggtgggggatatctgtccctgagcaaagtcgttcccttctctcactacgccggaaccctgctgctattactggctggagtcgcatgcttacgtggtattggcagatggacaaacccccagtatcggcaattcataacgatcctcgaggcaacccataggaaccagagctctgagaacaaaaggcagctggctaattacaacttcgatttccgctcctggcccgtggatttccactgggaagagccttcctcacgcaaagagagccgcggagggcctagccgacgaggggtggccctgctccgtcccgagcccctgcatagaggcaccgctgacactctgctgaaccgtgttaagaagctgccatgtcagattacatcctacctagtggcccacaccctggggcgaagaatgttgtatcccggatcagtctatctgctgcaaaaggccctcatgcccgtgctcctgcagggccaggccaggctggtggaagagtgcaatggccgccgtgcgaaattgctggcatgtgatgggaatgaaatcgacaccatgtttgtggaccgtaggggcaccgctgagcctcagggccagaaacttgtgatttgctgcgaggggaatgccggcttttatgaggtgggctgcgtttctacaccgctagaggctggctactccgtgctaggatggaaccaccctggattcgctggcagtactggcgttccatttcctcagaatgaggccaacgcgatggacgttgtggtgcaatttgccattcaccggctcggttttcagccccaggatatcattatctatgcttggtctatcggaggtttcacagccacatgggccgctatgagttatcctgatgtgtcagctatgatcctcgatgcctcatttgacgatttggtgccactggcattgaaggtcatgcccgactcttggagaggtcttgttacacggacagtcagacaacacctgaaccttaacaacgccgaacagctgtgtcgttaccagggtccggtgctccttattagacggactaaggatgaaatcattacaaccaccgtaccggaggacattatgtctaatcgtggcaatgacctgcttcttaaacttctccagcacagataccctagagtcatggccgaagagggactgagagtcgtcaggcagtggcttgaagccagctctcaactggaggaggcctctatttattcccgctgggaggttgaagaggattggtgcctctcagtgctacgctcctatcaagcagaacacggacccgacttcccctggtcagtcggggaagatatgtccgccgatggtaggcggcaactcgctcttttcctggcaaggaagcatctgcacaacttcgaagctacgcattgcacacctcttcctgcacagaactttcagatgccatggcacctctag

SEQ ID NO: 69663 - DNA, 1578 bp, Artificial Sequence
  derived and/or modified sequence
atgcctccgcccgccctgtttctgtcaagcctgtatcctagactagaattccagaacgatttctatagatcctgcatccggaggtccagtccacagcctcccccgaacctggcttggcgtccagaatctctttacagtggggagttagcaggaggcggatatctgagcctgtcaaaagttgtccctttcagtcactatgccggtaccctgctgctgctgctcgcaggggtggcatgtttgcgggggattggacggtggaccaaccctcaataccgccagttcattaccatcctggaagccacccatcggaatcaatcctctgagaacaaaagacagttggccaactacaacttcgacttcagatcttggccagttgattttcattgggaggagcccagttcgcgcaaagaatcccgaggtgggcccagccgcagaggggttgcgctcctgcggcctgaacccctgcatagagggacagcggacactctgcttaaccgggtgaagaagttgccctgccagatcacctcctacctggtggcacacactttagggagaaggatgctctatccgggctctgtctatcttttgcaaaaagccctcatgccagtgttgttacaggggcaggctaggctggtcgaagaatgtaacggacgtcgcgcgaagctgctggcttgcgacggcaacgaaattgataccatgttcgttgatcgcagaggcaccgcagaacctcagggccagaagctcgtgatttgctgcgagggaaatgcgggattctacgaggtcggttgcgtcagtacacctcttgaggccggatatagtgtgctggggtggaaccacccaggattcgcgggaagcacgggagtgccattcccccagaatgaggctaacgccatggacgttgtcgtccagttcgcaatacacaggctcggctttcaacctcaggacattattatatacgcttggtccataggagggttcaccgctacctgggccgccatgagctatccagatgtgagtgctatgatattggatgcaagctttgatgacctggtccctctcgcactaaaggtgatgccagatagctggcgagggctcgtcacacgaacagtacggcaacacctgaatctcaacaacgccgaacagctgtgtagataccagggccccgtcttgctgattcgtcgcacgaaagatgagattattaccacgaccgtaccggaggatataatgtccaatcgaggcaatgatcttcttctgaagttactgcagcacagatatcctcgggtaatggctgaagaagggctgcgggtagtacggcagtggctggaagccagttctcagttggaggaggcaagcatctattccaggtgggaggttgaagaggattggtgcctgagtgtgctgagatcttaccaagccgagcatgggcctgatttcccgtggtctgtgggcgaagatatgagcgcggatggaaggcgccaactggccctcttcttggctcgaaaacacctacacaacttcgaggccacccattgcacgcctctccctgctcagaatttccaaatgccttggcacctatag

SEQ ID NO: 69664 - DNA, 438 bp, Artificial Sequence
  derived and/or modified sequence
atgttgggacactgctgctatttctggcaggtgtggcctgcatctgaagctcttgctgccggcccgactcccagcacgggctcctcatccccttcgtggaaacagcatatcggtacatccctgcagaagacaaggggcagccttcctacaacaactctcactagtggggctgggcaatccacgagcaccgggaaaaatcccgctgccgggcggtcgctggagggcgctctgcctgcaggcgtgtggccatgtttcgcacagtccccatgtacaggtggccagcagacaccttcctcaactggcctccggtcctgcctggtgcggtcccccgggggaaagcagcagaggggagaggcacactgggggggcggcgccatctcaggcgttctttgggagtgggcactccattgcaaaatcgcggttactcactgggcctag

SEQ ID NO: 69665 - DNA, 1578 bp, Artificial Sequence
  derived and/or modified sequence
atgccaccccctgccctattcctaagcagcctgtatcctcgactcgaatttcagaacgacttttatcgatcctgcatcaggaggtcgtctccccagccgccacccaacctcgcatggcgcccagaatctctgtactccggcgagctcgccggtgggggttatctgtcactttctaaagtcgttcccttctcacactacgctgggactctcttactgctgttagcgggggtggcttgccttagaggcatcggcaggtggacaaacccgcagtatcgtcagttcatcactatactcgaagccacacaccggaatcagtctagcgaaaacaaacggcagcttgctaactacaacttcgacttcagaagttggccagtcgactttcactgggaggaaccaagctcacgaaaagaaagccgcggaggcccttctcgacgcggtgtggccctcctccgacctgagcctctacaccgaggaactgccgataccctgctcaatcgagtgaaaaagttaccgtgtcagataacaagttacctggtggcgcataccttggggcgcaggatgctctatcccggctccgtctacttactgcagaaggcactcatgcccgtcctcctgcaagggcaggcccgcttggtagaggaatgcaatgggagacgggctaaattactggcttgtgatggaaacgaaatcgataccatgttcgtggaccgcagagggaccgccgagccccaaggccagaagctggttatctgttgcgagggaaatgccggcttctacgaagtgggatgcgtgtctacccccctggaagctggttactcggtgttgggatggaatcatcccggcttcgccggcagtacgggcgtcccttttccccagaacgaggcaaacgctatggacgtggtggtgcagttcgccattcatcgcttggggttccaacctcaggatatcatcatttatgcttggagcatcggggggtttacagcgacatgggccgctatgtcatatcccgacgtatctgcgatgatccttgacgcttcattcgatgatttggtgcccctagcgttgaaagtgatgcctgattcatggcgggggctggtcacccgcacggtaaggcagcacttgaacctaaacaatgctgaacagctgtgccgataccaaggcccagtcctgctgatccgcagaaccaaagatgaaattatcaccaccacagtaccggaggatatcatgagcaatcgcggcaatgacctcctgctgaaactcctacagcaccggtaccctagggtgatggccgaggaaggtctgcgggtggtcaggcaatggctcgaggccagctctcaactcgaggaagcatctatttactctagatgggaagttgaggaagactggtgcttgagtgtgttgcggtcctatcaagccgaacatggtcctgatttcccgtggtcggtcggtgaagatatgtctgccgatgggaggcgccagctcgcactgttcttggcccgaaagcacttgcataacttcgaggctacacattgtactcctttgccagcacagaatttccagatgccttggcatctgtag

SEQ ID NO: 69666 - DNA, 1578 bp, Artificial Sequence
  derived and/or modified sequence
atgcctcctcctgccctgtttttgtcttctctctacccacggctcgagttccagaatgacttttatcgatcttgcattcgccgctcgtcaccccagcccccgccaaatctggcctggcgtcccgaatccttatactcaggtgagctcgccggcggcggctacctgagtctgtcaaaggtggtcccatttagccactacgccggtaccctcctgctcctgctagccggcgttgcctgtttaagagggattggcaggtggactaatccccagtaccgccagttcatcactatactcgaggcaacccatcggaaccagagctcagaaaataaacgacagctggccaactacaactttgacttcaggagctggccggtagactttcattgggaagagcctagtagcaggaaagagtcacgcggcgggccatccaggcgtggcgtcgcacttctgcgaccagaacctctccatcgcggaaccgcagatacactccttaatcgcgtcaaaaaactgccttgccagatcacttcttatctcgtcgcacacactctcggacgacgcatgctgtatccgggtagcgtctatctcctccagaaggcactcatgccagtcttattgcagggccaagccaggcttgtcgaagagtgtaatggcaggcgcgcgaagttgttagcatgtgacggaaacgaaattgatactatgttcgtcgatcgccgcggaacggccgagcctcagggccagaagttggtcatctgttgcgagggtaacgcaggtttctatgaagtggggtgtgtttcgacccctctagaggccggatacagtgtcctaggctggaaccacccagggttcgctggctccacgggtgtacctttcccccagaacgaggctaatgccatggacgttgtagtccagttcgctatccatcggctgggcttccagcctcaggatatcatcatatacgcgtggtcaattggaggattcaccgccacctgggccgcaatgtcttaccccgatgtgtccgcgatgatcctcgacgcgtccttcgatgacctcgtgccacttgcccttaaggtcatgcctgactcctggcgtggactagtgacacggactgttcggcagcaccttaacttaaataatgcggagcaattgtgccgttaccagggacctgtgctgttgatccggcgcactaaggacgaaatcatcaccactactgttccagaggacatcatgtccaatcgcgggaatgatctgctcctgaagctccttcagcaccggtaccccagggttatggccgaggagggccttagggtggtccgccaatggttggaggcaagttctcagttggaagaggccagcatatactcaaggtgggaggttgaagaagactggtgtctatcagttctccggagctaccaggcagagcacgggcccgattttccctggagcgtgggagaggatatgtccgctgatggtagacggcagctagcactatttctggcaaggaaacacctgcataacttcgaggcgactcactgtacacctctgccggcacagaactttcagatgccatggcacctctag

SEQ ID NO: 69667 - DNA, 438 bp, Artificial Sequence
  derived and/or modified sequence
atgctcgggcactgctgctatttttggcaagtgtggcccgcctccgaggccctggctgcagggccgacccctagcacaggaagttcttccccttcctggaagcagcacattggaaccagtcttcagaaaacaagggggagtctgcccacgaccaccctcacgagtggtgcaggtcagtctacctctacgggcaagaaccccgctgccggccggtcgctcgaaggtgcattgccagcaggtgtgtggccatgcttcgcgcagagcccctgtacaggaggccagcaaactccatcgtccaccggactccgttcgtgtcttgtgcgcagtcctggcggaaaacagcaacggggcgaagcacattgggggggaggcgccatatctggcgtactttgggaatgggcactgcactgcaagatcgcagtgacgcactgggcttag

SEQ ID NO: 69668 - DNA, 1578 bp, Artificial Sequence
  derived and/or modified sequence
atgccacccccggctctatttctgagcagcctctatcctcggctcgagttccagaacgacttttaccgcagctgcatccgcagaagctctccgcagccaccgccaaatttagcctggaggccagagagtctatatagcggcgagctggccggaggaggatacctcagcttgagtaaagtggtccccttcagccactatgccgggactctgctgctgttactggcgggtgtcgcttgcttgcgtggcatcggacgatggacaaatccacaatatagacagttcattaccatcctggaggctacccaccgcaaccagagttccgagaataagcgccagctcgcaaattataactttgactttaggagttggccggtggattttcattgggaggagccttcaagtcgcaaagagtctagaggcgggccatcaagacggggagtcgcactcctccgccccgagccattgcacagaggcacagcggacactctgctgaacagggtaaaaaagctaccctgtcagattacttcttatcttgtggcccacacccttggccgacggatgctctaccccggaagcgtttacctgttgcaaaaggccctgatgcctgtcctcctacaagggcaggccaggctcgtcgaagagtgtaacggacggcgggctaaactgctcgcctgtgatggaaacgaaattgataccatgttcgttgaccgacgggggactgctgaacctcaagggcagaagctggtgatctgctgcgagggcaatgccggattctatgaagtcggatgcgtgtctactccactggaggccgggtactccgtgctcggttggaatcatccaggctttgctggtagcactggggtcccattcccccagaacgaggccaacgccatggatgtagtggtgcagtttgccattcaccggttaggctttcagcctcaggatataattatttacgcatggtctattggcgggtttacggcaacttgggcagccatgtcgtatcctgacgtgtctgccatgatactggacgccagctttgatgacctggtgcccctggcacttaaagtgatgccggactcttggaggggactggtaacccgcacagtgcgccagcatttaaatctgaacaacgccgaacagctgtgtcggtaccagggccctgtcctgttgatcagacggacaaaggacgaaattattaccactacagttcccgaggacatcatgtccaatcgtggcaatgatttacttctaaagttactgcagcacagatacccccgcgttatggctgaggaaggcctgcgagtcgtacgacagtggctcgaagcaagttcacaattagaagaggcttccatttactcaagatgggaggttgaggaggactggtgcctctcggtgctgcgttcctaccaggccgaacacggacccgattttccatggtcagttggagaagacatgagtgctgacggcagacgccagcttgcactgtttctcgccaggaagcacctgcacaacttcgaagctacccattgcactccattgcctgctcaaaattttcagatgccttggcatctctag

SEQ ID NO: 69669 - DNA, 438 bp, Artificial Sequence
  derived and/or modified sequence
atgcttggtcattgttgttacttctggcaggtgtggcctgcaagcgaggccttagctgccggcccaactccatccaccgggtctagctctcccagctggaagcaacatattgggacctccttgcaaaaaactcgcggctctctcccaacgacaaccctgacaagcggcgccggccaaagcaccagcacagggaaaaatcccgcagctggccgcagccttgaaggtgcattgcccgcgggcgtctggccttgcttcgcccagtccccctgtacaggcggccagcagaccccgtcatcaaccggcctgagatcatgcctggttaggagtcccggggggaagcagcaacggggagaagcccactggggcggcggagcaatatctggagtcctctgggagtgggcgcttcactgcaaaatcgctgtgactcattgggcctag

SEQ ID NO: 69670 - DNA, 1578 bp, Artificial Sequence
  derived and/or modified sequence
atgcctccacctgctcttttcttatctagcctatatccgcgcctggaattccagaacgacttttatcgaagctgcatcagaaggagcagtccgcagcctcctcccaatcttgcctggcgacctgaatccctctactcaggggaactggcaggaggcggctatctgtcattgagcaaggtagtgcctttctcacactatgccgggaccctactccttctgctggccggagtggcttgcctgcgagggataggcagatggaccaaccctcaataccgtcaattcattaccatcctagaggccacccatagaaaccagagttctgagaacaaacgacaactagcaaattacaattttgattttcgatcctggccggtcgatttccactgggaggaaccctcaagtcggaaggagagcagaggcggtccaagtcgccggggtgttgccctcttgagaccagagccacttcacaggggaaccgcagatactctgctgaatcgcgtgaagaagttaccctgtcaaatcacaagctacttggtggctcatacattggggcggcgtatgttgtatcccggtagcgtctatctgctccagaaagccctgatgcccgtcttgttgcagggacaggcaagactggttgaagaatgcaacggtcgacgtgctaaactgcttgcatgcgatggaaacgagatagacacaatgttcgtcgatcggagggggaccgctgagcctcagggccagaaacttgtgatatgctgcgagggaaacgccgggttctacgaggttggctgcgtcagcacacctttagaggccggttactctgtgctgggatggaaccacccaggcttcgcgggcagcacgggtgtgcccttcccccagaacgaggctaacgctatggacgttgtggtgcagtttgctattcaccgcctgggtttccagccgcaggacataattatttacgcatggtccattgggggcttcacagccacttgggcggccatgagttacccggacgtttccgccatgattctagatgcctctttcgacgatttagtgccactggctttgaaagtgatgcccgacagctggcggggactcgtaactcggaccgttcgccagcatctgaacttgaataacgcggaacagctgtgcagataccaggggcctgtgcttttgattcggaggacaaaagatgagatcattactacaaccgtgcctgaggatattatgagtaatagggggaatgatctgttgctgaagctgctgcagcaccgctaccccagggtgatggctgaagaaggattacgggtggttcgccagtggctggaagcaagctcacagctggaggaggctagtatctactcacggtgggaggttgaagaagactggtgtttaagcgttctccggagctaccaggccgaacatggaccggatttcccttggagtgtgggggaggacatgagcgccgatggaagacggcagctggctcttttcttggcccgaaaacatctacacaactttgaggcgacacattgcacgccccttccagcacagaatttccagatgccgtggcacttgtag

SEQ ID NO: 69671 - DNA, 1020 bp, Artificial Sequence
  derived and/or modified sequence
atgctgtacccaggctctgtgtacctgctgcagaaggccctgatgcctgtgctgctgcagggccaggcccggctggtggaggagtgcaatggccggcgggccaagctgctggcctgtgatggaaatgaaattgacaccatgtttgtggacagaagaggaacagctgagccccagggccagaagctggtgatctgctgtgagggcaatgccggcttctatgaggtgggctgtgtgtccacccccctggaggccggctacagcgtgctgggctggaaccaccctggctttgctggcagcactggagtgcccttcccccagaatgaggccaatgccatggatgtggtggtgcagtttgccatccaccggctgggcttccagccccaggacatcatcatctatgcctggagcattggaggcttcaccgccacctgggccgccatgagctacccagatgtgtctgccatgatcctggatgccagctttgatgacctggtgcccctggccctgaaggtgatgccagacagctggaggggcctggtgaccaggacagtgcggcagcacctgaacctgaacaatgctgagcagctgtgccgctaccagggccctgtgctgctgatccggaggaccaaggatgagatcatcaccaccaccgtgcctgaggacatcatgagcaacagaggaaatgacctgctgctgaagctgctgcagcaccgctacccccgggtgatggccgaggagggcctgcgggtggtgcggcagtggctggaggccagcagccagctggaggaggccagcatctacagccgctgggaggtggaggaggactggtgcctgtctgtgctgcggagctaccaggccgagcacggccctgacttcccctggagcgtgggggaggacatgtctgcagatggaagacggcagctggccctcttcctggccaggaagcacctgcacaactttgaggccacccactgcacccccctgcctgcccagaacttccagatgccctggcacctgtag

SEQ ID NO: 69672 - DNA, 795 bp, Artificial Sequence
  derived and/or modified sequence
atgcctcctccagccctcttcctgagcagcctgtacccccggctggagttccagaatgacttctaccgcagctgcatcagaagaagcagcccccagcccccacccaacctggcctggaggcctgagagcctgtacagcggggagctggccggcggcggctacctgagcctgagcaaggtggtgcccttcagccactacgccggcaccctgctgctgctgctggccggcgtggcctgcctgcggggcatcggccgctggaccaacccccagtaccggcagttcatcaccatcctggaggccacccacaggaaccagagcagcgagaacaagaggcagctggccaactacaactttgacttccgctcctggcctgtggacttccactgggaggagcccagcagcaggaaggagagccggggcggccccagccggcggggcgtggccctgctgcggcctgagcccctgcaccggggcacagctgacaccctgctgaacagagtgaagaagctgccctgccagatcaccagctacctggtggcccacaccctgggccgcaggatgctgtacccaggctctgtgtacctgctgcagaaggccctgatgcctgtgctgctgcagggccaggcccggctggtggaggagtgcaatggccggcgggccaagctgctggcctgtgatggaaatgaaattgacaccatgtttgtggacagaagaggaacagctgagccccagggccagaagctggtgatctgctgtgagggcaatgccggcttctatgaggtgggctgtgtgtag

SEQ ID NO: 69673 - DNA, 438 bp, Artificial Sequence
  derived and/or modified sequence
atgctgggccactgctgctacttctggcaggtgtggccagccagcgaggccctggccgccggccccacccccagcacaggcagcagcagccccagctggaagcagcacatcggcaccagcctgcagaagacccggggcagcctgcccaccaccaccctgaccagcggggccggccagagcaccagcacaggcaagaacccagctgctggccgcagcctggagggcgccctgcctgctggggtgtggccctgctttgcccagagcccctgcacaggaggccagcagacccccagcagcacaggcctgcggagctgcctggtgcgcagccctgggggcaagcagcagagaggagaggcccactggggcggcggggccatctctggagtgctgtgggagtgggccctgcactgcaagattgctgtgacccactgggcctag

SEQ ID NO: 69674 - DNA, 1578 bp, Artificial Sequence
  derived and/or modified sequence
atgcctcctccagccctcttcctgagcagcctgtacccccggctggagttccagaatgacttctaccgcagctgcatcagaagaagcagcccccagcccccacccaacctggcctggaggcctgagagcctgtacagcggggagctggccggcggcggctacctgagcctgagcaaggtggtgcccttcagccactacgccggcaccctgctgctgctgctggccggcgtggcctgcctgcggggcatcggccgctggaccaacccccagtaccggcagttcatcaccatcctggaggccacccacaggaaccagagcagcgagaacaagaggcagctggccaactacaactttgacttccgctcctggcctgtggacttccactgggaggagcccagcagcaggaaggagagccggggcggccccagccggcggggcgtggccctgctgcggcctgagcccctgcaccggggcacagctgacaccctgctgaacagagtgaagaagctgccctgccagatcaccagctacctggtggcccacaccctgggccgcaggatgctgtacccaggctctgtgtacctgctgcagaaggccctgatgcctgtgctgctgcagggccaggcccggctggtggaggagtgcaatggccggcgggccaagctgctggcctgtgatggaaatgaaattgacaccatgtttgtggacagaagaggaacagctgagccccagggccagaagctggtgatctgctgtgagggcaatgccggcttctatgaggtgggctgtgtgtccacccccctggaggccggctacagcgtgctgggctggaaccaccctggctttgctggcagcactggagtgcccttcccccagaatgaggccaatgccatggatgtggtggtgcagtttgccatccaccggctgggcttccagccccaggacatcatcatctatgcctggagcattggaggcttcaccgccacctgggccgccatgagctacccagatgtgtctgccatgatcctggatgccagctttgatgacctggtgcccctggccctgaaggtgatgccagacagctggaggggcctggtgaccaggacagtgcggcagcacctgaacctgaacaatgctgagcagctgtgccgctaccagggccctgtgctgctgatccggaggaccaaggatgagatcatcaccaccaccgtgcctgaggacatcatgagcaacagaggaaatgacctgctgctgaagctgctgcagcaccgctacccccgggtgatggccgaggagggcctgcgggtggtgcggcagtggctggaggccagcagccagctggaggaggccagcatctacagccgctgggaggtggaggaggactggtgcctgtctgtgctgcggagctaccaggccgagcacggccctgacttcccctggagcgtgggggaggacatgtctgcagatggaagacggcagctggccctcttcctggccaggaagcacctgcacaactttgaggccacccactgcacccccctgcctgcccagaacttccagatgccctggcacctgtag

SEQ ID NO: 69675 - DNA, 1020 bp, Artificial Sequence
  derived and/or modified sequence
atgctgtaccccggcagcgtgtacctgctgcagaaggccctgatgccggttcttttgcagggccaggcccgacttgttgaagagtgtaatggaaggcgtgcgaagctgctggcttgcgatggtaatgagatcgatactatgttcgttgacaggcgcggaacggccgagccgcaaggacagaaacttgtgatatgctgtgaaggaaacgctgggttctatgaagttggctgtgtgtccacacctttagaagccggatatagcgttttaggatggaatcaccctggctttgcgggatcgacgggtgtgcctttcccacagaacgaggccaacgccatggatgttgtagtgcagttcgctatacaccggctgggattccagccccaggatattatcatctacgcttggagcatcgggggcttcactgccacctgggccgctatgtcctaccccgatgtgagcgccatgatcctggacgccagtttcgatgatctggttccgcttgcgttgaaggtcatgccagattcttggcgtggcctcgttacaagaacagtgagacagcacctgaacctgaacaacgcagaacagctttgccgctatcaaggaccggttttgttgattagaagaacaaaagatgaaatcatcactaccactgttcccgaggatattatgagcaacagaggtaatgatctcctcctgaagctgcttcagcataggtatccccgggtgatggcggaagaggggttaagagtggtgcgtcagtggctagaagcctcttcacagctggaggaagcctcaatatactccagatgggaggtcgaggaggactggtgtttatctgtccttcgcagctatcaggctgagcacgggcccgactttccttggagtgtgggtgaagacatgtctgctgatggtcggagacagcttgccctgtttctggcacgcaaacatctgcataacttcgaggccactcattgcactccgctgcccgcccagaatttccaaatgccatggcacttgtag

SEQ ID NO: 69676 - DNA, 795 bp, Artificial Sequence
  derived and/or modified sequence
atgcccccccccgccctgttcctgagcagcctgtacccccggctggagttccaaaacgatttctatcgatcttgtattcggcggagctccccccagccgccgccaaatctggcctggcggccagagagtctgtatagtggggaactggcagggggaggctacctatctctgtccaaagtcgtgcccttctcccactatgccgggactctgttgctgctgctggctggggtcgcatgtcttcgcggaattggaaggtggactaatccccaataccgacagtttattactattttggaggcaacacaccgcaatcagtcgtctgagaataagcggcagcttgccaattacaatttcgatttccgatcttggccagtagactttcattgggaagaacccagcagcagaaaggagtccaggggggggccttccaggaggggcgtggcccttcttcgccccgaacctcttcatcgaggaaccgctgacacattgttgaaccgagtgaagaagctgccttgccagattacatcgtacttagttgcccacaccttagggcgtagaatgttgtatccaggcagcgtttatctgcttcaaaaggccctgatgccagtactcctccaggggcaggcgcggctcgtcgaagaatgcaacggacggagggccaaactgctggcctgcgatggtaatgaaatcgatacaatgttcgtagatcgtaggggaaccgctgaaccacagggccagaagctcgtgatctgctgcgaaggtaatgctggcttttacgaagttggctgtgtgtag

SEQ ID NO: 69677 - DNA, 795 bp, Artificial Sequence
  derived and/or modified sequence
atgcccccccccgccctgttcctgagcagcctgtacccccggctggagttccagaacgacttttatcgaagttgtattagaaggagttctccccaacctccacctaacctcgcatggcggcctgaaagcctctattcaggtgagctggccgggggagggtatctatctttgtccaaagtggtgcctttttcacattacgcgggtacactgctccttctgctggccggcgtggcctgccttagaggaatcgggcgctggaccaatccccagtatagacagttcattacaattttggaagccacacatcgtaaccagtccagcgagaacaaacgtcaattggcaaattacaatttcgacttcagatcttggcccgtggattttcactgggaagagcctagctccagaaaagagagccgagggggaccctctcgaagaggagtggctctgctgaggcctgaacccctacaccgaggcactgccgacacacttctgaatcgagttaaaaagctcccctgccagattaccagctacctggtggctcacacactgggaaggcggatgctgtatcccggctcggtgtacctactgcagaaagcgcttatgccggtcctgctgcaggggcaggccaggctggtcgaagagtgtaatggtcgccgagctaagctactggcttgcgacggtaatgagatcgacactatgtttgtggaccgcagaggcacagctgaacctcagggccagaaactggtcatctgttgcgaaggtaacgccggattctacgaagtcggatgtgtgtag

SEQ ID NO: 69678 - DNA, 795 bp, Artificial Sequence
  derived and/or modified sequence
atgcccccccccgccctgttcctgagcagcctgtacccccggctggaattccagaatgatttttaccgttcctgtatacggcggtcctccccacagcctccaccaaatctcgcttggcgcccagagagtctttattccggggaactggcgggagggggctacctcagtctttccaaagtggtgccattctcacactatgcggggacactgctgctactgctggccggtgtagcatgcctgagaggaattggacggtggactaatccccagtaccggcaatttatcaccatcttggaagccacacataggaatcaatcctcagagaacaaacgtcagctggccaactacaatttcgatttcagaagttggcccgtagatttccactgggaggagccgtctagcaggaaagagtcacggggtgggccttcacgacgcggtgtcgccctccttaggcccgagccccttcatagagggaccgccgataccctactaaatagggtgaagaaattaccctgccaaatcacttcctacctggtggctcatacactaggcagaaggatgctctaccctggttccgtgtacttactgcaaaaggcactcatgcccgtgctcctccaggggcaggctcgtctcgtcgaggagtgtaacggccgccgggcgaaactcttagcttgcgatggcaatgagatcgataccatgtttgttgatcgtcgcggaacagcggagccccagggacaaaaacttgtcatttgctgcgaaggtaacgctggattctacgaagtgggctgcgtgtag

SEQ ID NO: 69679 - DNA, 795 bp, Artificial Sequence
  derived and/or modified sequence
atgcccccccccgccctgttcctgagcagcctgtacccccggctggagtttcagaatgacttttaccgctcttgtatacggaggagttccccgcaaccacctcccaatcttgcttggcgccccgaatccttgtacagtggcgaactggcaggtgggggctacctgtccctgagtaaggtcgtgccattcagtcactacgctggtaccttgttacttctcctggcaggcgtagcctgcctgcgaggtattggaaggtggactaacccacagtacaggcaattcatcacgatcttagaagccacacaccggaaccagagtagtgagaacaagaggcaactcgctaattataactttgattttcgctcctggcccgtagacttccattgggaagagcccagcagccgcaaggaatctcgggggggtccctccagacgaggggtagctttgctgcggccagaaccattgcaccgggggacagccgacaccctgctgaatagggtaaagaaattgccttgtcagatcacttcctacctggtcgctcacacactcggacggaggatgctttatcctggttcagtgtacctgttacagaaagctctcatgccggtgttgcttcaaggtcaagctaggttagtggaagaatgtaatggaaggagggccaagctgctcgcctgtgacggtaacgagattgatactatgttcgtcgaccgccgggggaccgcagagcctcagggtcagaagctggtgatctgctgcgaaggaaacgctggattctacgaagttggctgtgtgtag

SEQ ID NO: 69680 - DNA, 795 bp, Artificial Sequence
  derived and/or modified sequence
atgcccccccccgccctgttcctgagcagcctgtacccccggctggagttccagaatgacttctaccgcagctgcataagaaggtctagtcctcaacccccccccaacttggcctggcggccagagtctctgtacagcggcgaactggccggaggcgggtacctgtctctcagtaaggtggtccccttctctcactatgcaggcactctgctcttattgctggccggcgtggcgtgcctgaggggaataggtcggtggactaatccgcaataccgtcagttcattaccattctggaggctacacacaggaatcagtccagtgagaacaagaggcagctcgctaactacaacttcgacttcagatcgtggcccgtggatttccattgggaggaacccagctctcggaaagaaagtagaggaggcccaagcagacgtggcgtggctctcctgaggccagagccactgcatcgtggcaccgctgataccttattaaaccgcgtgaaaaagttgccctgccaaatcacatcctatctcgtggcccacacgctcggcagaagaatgctgtaccccggaagcgtatacctactgcagaaggccctcatgcctgttctcctgcaggggcaggctagactcgtggaggagtgtaacggtcgcagggcaaagcttctagcctgtgacggaaacgagatcgacacgatgttcgtggaccgtaggggcacggcagagcctcaagggcagaaactcgtgatttgttgcgaaggtaatgcaggattctacgaggttggttgtgtatag

SEQ ID NO: 69681 - DNA, 795 bp, Artificial Sequence
  derived and/or modified sequence
atgcccccccccgccctgttcctgagcagcctgtacccccggctggagttccagaatgacttttaccggagctgcattaggaggtccagtccgcaacctccgccaaatttggcttggaggcctgagtccctgtactccggcgaactggctgggggcggctatctctcattaagcaaggttgtgcccttttcccactacgccggtaccctgctgcttctgctcgcgggcgtcgcgtgcctgagaggtatcgggcgctggactaatcctcagtacaggcagtttattactatcttggaagccacccatcggaaccagtccagtgagaacaagcgccagctggcaaactacaacttcgactttaggagctggccagttgactttcattgggaagaaccgagctctaggaaggaaagccgaggaggaccttcacgacgaggggtggcactcctgagacccgaacctttgcataggggcacagccgacactctgctgaaccgagtaaagaagctcccttgccaaatcacttcttatctcgttgcacatacactgggacgccggatgctgtacccaggatcagtctacctgctgcagaaagccctgatgcccgtcttgttgcaaggtcaggcacggctcgtggaagaatgtaacggaagacgtgcaaagctgctggcctgcgacggaaatgagatagacacgatgttcgtagacaggaggggtactgccgagccccagggccagaagctggtgatttgctgcgagggcaatgcgggcttttatgaggtgggctgtgtttag

SEQ ID NO: 69682 - DNA, 438 bp, Artificial Sequence
  derived and/or modified sequence
atgctgggccactgctgctacttctggcaggtgtggcccgccagcgaagccttggcagcaggcccaaccccctccacagggagcagttccccctcgtggaagcagcacataggaacttccctccagaaaaccagaggttctctgccaaccaccacactaacatcgggcgccgggcagtcaacaagcaccggcaagaatccagccgcaggacgctccttggagggggccctcccagctggagtctggccttgctttgcgcagtcaccatgtactggcggtcagcagaccccctcctctaccggcctccggtcttgcttagtcaggagcccaggcgggaagcaacagcgcggagaggcccactgggggggtggggcaatatcaggcgtgttatgggagtgggcccttcattgcaaaatcgcagtgacccactgggcctag

SEQ ID NO: 69683 - DNA, 438 bp, Artificial Sequence
  derived and/or modified sequence
atgctgggccactgctgctacttctggcaggtgtggcccgccagcgaagctctggctgccgggcccacaccttccaccggtagctccagcccatcttggaagcagcacatcggaacaagcctccaaaaaacaaggggctccctgccgaccactacactcacaagtggagcgggacaatccacaagcaccggcaaaaatcccgctgcaggtcggtctctggagggcgccctcccagccggtgtttggccgtgctttgcacaaagcccatgcacaggaggccaacagacccccagctccaccggacttcgatcctgcttggtacgcagccctgggggaaagcagcagcgcggtgaggctcactggggcgggggagccatcagcggagtgctctgggagtgggccctgcattgcaaaattgccgtgacccactgggcctag

SEQ ID NO: 69684 - DNA, 438 bp, Artificial Sequence
  derived and/or modified sequence
atgctgggccactgctgctacttctggcaggtgtggcccgccagcgaggccctggccgccggccctacccctagcacagggagcagttcaccaagctggaagcagcatattggcaccagcctgcaaaagacacgcgggtccttgcccaccaccaccttaaccagtggggctggccagagtacatctacagggaaaaaccctgccgctggtaggtcactggaaggcgcattaccagcaggcgtgtggccttgcttcgcacaaagtccatgtacgggagggcaacagactccctcatccacagggttacgttcgtgcttggtacgcagcccaggcggaaaacagcagaggggggaggcacattggggaggcggggccatttctggagtgctctgggagtgggctctgcattgtaaaattgcagtgacgcattgggcctag

SEQ ID NO: 69685 - DNA, 438 bp, Artificial Sequence
  derived and/or modified sequence
atgctgggccactgctgctacttctggcaggtgtggcccgccagcgaagccctagccgcgggccctacccctagcaccggttcatcatctcccagttggaaacagcatatcggaactagcctccaaaaaacccggggtagcctcccaacaacaactctcaccagtggtgcaggtcagtcaacctctacaggcaagaatccggcagctggacgatccctagagggcgctttgccagctggggtctggccatgtttcgcacagtcaccatgtaccggaggccagcagaccccatcctcaaccggactgcgcagctgcctcgttcgctcccccggcggtaaacagcagcgtggagaggctcattggggggggggtgcaatctccggcgtgctatgggagtgggctcttcactgtaaaattgctgtgacacattgggcttag

SEQ ID NO: 69686 - DNA, 1578 bp, Artificial Sequence
  derived and/or modified sequence
atgcccccccccgccctgttcctgagcagcctgtacccccggctggagtttcagaacgacttctacaggtcctgcataagacgcagtagcccccagccccctcctaacctggcatggaggcccgagagcttgtatagcggcgaattggctggtggcggctacctttcactttctaaggtggtccccttctctcactacgctggtacacttctgctcctgctggccggggtcgcttgtctccgcggtattggtcgatggaccaaccctcagtaccgtcagttcatcacaatcctggaggctacacacaggaatcaatccagtgagaacaagaggcagttagccaattataacttcgactttcgttcctggcctgttgacttccattgggaagagccaagtagccgcaaggagtcccgagggggtcccagcaggaggggtgtggctttgctgcggcccgagccccttcataggggcaccgcagatactctgctgaacagagtcaaaaagctaccatgccagattacctcctatctcgtggcccacactctcgggcggcgcatgctttacccgggatccgtctatctattacagaaagccctgatgcccgtgctcctccaaggccaggcccggcttgtggaggagtgcaacggacgaagggccaagcttctcgcctgcgacgggaatgagatcgacaccatgttcgtggaccggagagggaccgcagagccacagggacagaagttagtgatttgctgtgaaggcaatgctggtttttatgaagttgggtgcgtgtcaactcctctggaggccggatacagtgttcttggatggaatcacccgggtttcgccggttccaccggcgtaccctttccccaaaatgaggctaacgctatggacgtggttgtacagtttgctatccacagactcgggtttcagcctcaggatataatcatatatgcttggtctatcgggggcttcacagccacctgggccgctatgagctaccccgacgtgagtgcgatgatcctggacgccagttttgatgacctggttcccctcgctctcaaagtgatgccagactcttggcggggactagtcactagaacagtgcggcagcacctgaacctaaacaacgccgagcaactgtgtagatatcaggggccagtgttgttgattagaagaacaaaggatgagattattacaacaacggtgcccgaggatataatgtcaaacaggggaaatgatcttctgctgaaactgttgcaacacagataccctagagtgatggctgaggaggggctcagggttgttaggcagtggctcgaggcaagtagccaactcgaggaagcgagcatctactcacgctgggaagtggaagaggactggtgcctgtcagtgctacgatcttaccaggctgagcatggccccgacttcccctggtcggtgggggaagacatgtcagccgatgggagaagacagctggccctctttcttgctaggaaacatctccacaattttgaagccacccactgtacccctctgccggcccagaactttcagatgccatggcatctgtag

SEQ ID NO: 69687 - DNA, 1578 bp, Artificial Sequence
  derived and/or modified sequence
atgcccccccccgccctgttcctgagcagcctgtacccccggctggagttccagaacgatttttataggagctgcatccggcgaagctcacctcagccaccacctaacctcgcttggaggcccgaaagtttgtactccggagaactggcaggggggggatatctttccctctcaaaggtggtaccgttctcccattacgccggtactctgctcctgctgctggcaggggtcgcttgcctgcgggggattggccgttggaccaaccctcaataccgccagtttataaccatcctggaagccacacatcggaatcagagttcggagaacaaaagacagcttgcaaactacaatttcgattttcgatcgtggcctgtggacttccattgggaggagccttcctctcggaaggaaagtcgcgggggcccaagccgccggggggtcgctctgctgcgccccgagcccctacatcgaggaacggccgacactctgctgaaccgagtgaagaagcttccatgtcaaattacctcttacctggtggctcacactctcgggagaagaatgctctatccagggagcgtgtatttactccagaaagccctgatgcctgtgctgctgcagggacaggctcgtcttgtggaagaatgcaacggcagacgggcaaaattgttggcgtgcgacggtaacgagatcgataccatgttcgtagatcgccgtggaacggccgaacctcaggggcagaagttggtgatttgctgcgaaggcaacgcgggtttctacgaagtcgggtgcgtctccacccctctcgaggccggatatagtgtccttggttggaaccatccaggctttgcagggtccacgggagtccccttccctcagaacgaggctaatgcaatggacgtggtggttcaatttgccatccatagactgggcttccagccccaggacatcatcatatacgcttggagcatcggtggtttcacagccacgtgggctgccatgtcctaccccgacgtgtcagctatgatcctggacgcgtctttcgacgaccttgtacccctcgccttaaaagtcatgcctgattcctggagggggctggtaacccggactgtcagacagcacctgaatcttaacaacgccgaacagctctgccgatatcaggggcccgtgctgctcattagaaggacaaaagatgaaatcattactacaactgttccagaggatatcatgtcgaatcggggaaacgatctccttctaaaactgcttcagcaccgctatcctcgagtgatggccgaggaggggcttcgggtcgtgaggcaatggcttgaagctagcagtcagctggaggaagcgagcatctatagccgttgggaagttgaagaggattggtgcctgtccgtcttgcggtcttaccaggcagaacacgggcccgatttcccctggtctgtcggcgaggatatgtcagcggacgggcgccgacagttggctctttttcttgccaggaagcatctccacaactttgaggcaacacattgcactcctctgcccgcccagaattttcagatgccgtggcacctctag

SEQ ID NO: 69688 - DNA, 1578 bp, Artificial Sequence
  derived and/or modified sequence
atgcccccccccgccctgttcctgagcagcctgtacccccggctggaatttcagaacgatttctatcgcagttgtatcagacgctcgagcccccagcctccgcccaatctggcatggcggccggagagcctgtactcgggagagctagcaggtggtgggtacctatcattgagcaaggttgtgcctttttctcactacgccggcaccctgctgttgcttctcgctggcgtcgcttgcctccgaggaattggacggtggacaaatccacaatataggcaattcatcacaattctggaggcaacgcatagaaaccagagcagtgaaaacaagaggcagttggccaactataattttgatttcaggagctggccggtggacttccactgggaagagccctcaagcaggaaggaatctcgggggggcccgagccggaggggggtggctctacttcgtccagagccactgcacaggggaaccgctgatacactcttgaatcgcgtgaagaagctgccctgccagatcacatcttacctcgtcgcacatactttggggcggcgcatgttataccccgggagtgtatatttgctgcagaaggcactgatgcccgtcctgctacagggccaagctaggttagtggaagagtgtaatggtcgtcgcgccaagctcctcgcctgtgacgggaatgagatcgacactatgtttgtggacaggcgaggtaccgccgaaccgcaaggacaaaagctcgtgatctgttgcgagggtaatgctggtttttatgaggttggatgcgtcagcacccccttggaggctggatatagcgtgttaggctggaaccaccctggttttgctggttctacgggcgttccctttccacagaatgaggccaacgctatggacgtggttgtacagtttgctattcaccgtctgggtttccagccccaggacattattatctacgcgtggagcattggcggcttcacagcaacctgggccgctatgagctatcctgatgtgtcagcaatgattttggacgccagctttgacgacctcgtccctctcgctctgaaggtgatgcctgactcctggagaggcctggtcacccgcactgtccggcagcatctcaatctgaataatgcggagcagttatgccggtaccagggacctgtactgctgatccgtaggactaaagatgaaatcatcacaacaaccgtccctgaggacatcatgagtaacagggggaatgacttactgttgaaactcctgcagcatcgctacccccgggtgatggctgaggagggcttgagggtggtcagacagtggcttgaggcttcctctcagttagaagaagcatccatttactcccgttgggaggtagaggaggattggtgtttgagtgtgctccgctcctatcaagcagaacacgggccagacttcccatggtccgtaggggaagacatgagtgctgatgggcgcagacagcttgctctcttcctggcgaggaagcacctgcacaacttcgaggccacacattgcacgcctctaccggctcaaaacttccagatgccctggcacttgtag

SEQ ID NO: 69689 - DNA, 438 bp, Artificial Sequence
  derived and/or modified sequence
atgctgggccactgctgctacttctggcaggtgtggcccgccagcgaggcactggctgccgggccaacaccctcaaccggaagctccagcccgtcctggaaacagcatataggcaccagcctgcagaagacaagggggagccttcccacaaccacgctgacgagcggcgccgggcagagcaccagcacagggaagaatcccgcggccggcaggtctctcgagggagctctccctgccggggtatggccatgcttcgcccagagcccttgcaccggcgggcagcaaaccccctcttcgactgggctgcgctcttgcctggttcgctccccaggcggcaagcaacagaggggcgaagcacactggggcggaggcgcgatttccggagtgctctgggagtgggcactgcattgcaagatcgccgtgacacattgggcctag

SEQ ID NO: 69690 - DNA, 1578 bp, Artificial Sequence
  derived and/or modified sequence
atgcccccccccgccctgttcctgagcagcctgtacccccggctggagtttcagaatgatttttatcggtcgtgcatccggaggtctagcccccagcctcctccaaaccttgcctggaggccggagagcctatattccggagagctcgcaggtggagggtacctgtctcttagtaaggtcgttcccttctctcattatgcaggcaccctgctcctcctgctggccggtgtcgcatgcctgaggggcatcgggcggtggacgaatccacagtaccggcagttcatcaccatcctggaggccactcacaggaaccaatcctctgaaaataagcggcaactcgccaattacaattttgatttcagaagttggcctgttgatttccattgggaagagccctcttcacgcaaagagagtagggggggcccctcccgacgtggggttgccctgctcagaccggagcccctgcataggggcacagcagataccttactcaatcgggtgaagaagttgccgtgccaaatcacaagttacctggtcgcccataccctggggaggcggatgttgtacccaggctcagtctatctgctgcaaaaagctctgatgcctgtgttgctacaaggtcaggccagacttgttgaagaatgcaatggacgaagagctaagctgctggcatgtgatggcaacgagattgacacaatgttcgtggacagacgagggacagccgaaccacaggggcagaaacttgttatttgttgtgaaggcaacgcaggattctatgaagtcggctgtgtcagtactcccctggaagcgggctattcagtgctcggctggaatcacccgggcttcgcggggagcacaggtgtgccgttcccccaaaacgaggccaacgctatggatgtggtggtgcagttcgctatacacaggcttggcttccagccacaggacatcataatctacgcatggagtatcggggggttcacagcaacatgggcggcgatgagttatccagatgtgagcgctatgattctcgacgcgtcttttgatgatctggttccattggccctgaaggtgatgcccgactcttggcgaggacttgtgaccaggaccgtccgccagcatctaaatctcaataatgctgagcaactgtgtcgctaccaagggcccgtcctcctcatacggaggaccaaggatgagatcataactacaacggttccagaagacataatgagtaaccgaggtaacgatctgttgctaaagctgcttcagcatagatacccgcgcgtcatggccgaggagggcctgagggtcgtcaggcagtggttggaagccagctcacagttggaggaagcctctatatattcccggtgggaggtggaagaagattggtgcttatccgtgctgagatcttatcaggcggaacacggccctgactttccttggtctgtcggtgaagatatgtccgccgacggccggcgccagcttgcactgttcctggcccgcaaacacctgcacaactttgaagctacacattgcacccccctgccggcccagaattttcagatgccatggcatctttag

SEQ ID NO: 69691 - DNA, 1578 bp, Artificial Sequence
  derived and/or modified sequence
atgcccccccccgccctgttcctgagcagcctgtacccccggctggagtttcagaatgacttctaccgaagctgcatccgaagaagcagtcctcagcccccccccaatctcgcgtggcgacccgagtccctttactccggcgaactagcaggcggggggtacttgtccctgagcaaggttgtgccgtttagtcattacgcaggcaccctgctgctcctgttagccggagttgcatgcctgaggggaatcgggcgttggaccaatcctcagtatcgtcagtttattactattttggaggccactcatcgaaatcagtcatctgagaacaagcgccagttagcaaattacaatttcgattttcgatcttggcctgtagacttccattgggaggagccctccagccgcaaagagtctcgtgggggacccagccgtcggggggttgcactgttgagacccgagccacttcatagagggactgcggacacactgctgaaccgggtcaagaagctgccctgtcagattaccagctatctggttgctcatacgctgggcaggcgtatgctctatccaggttcggtgtatctgctgcagaaggcacttatgcctgtgctcctgcaggggcaggcccgcctggttgaagaatgcaatggcaggcgagccaagttgttagcctgcgacggaaatgagattgacaccatgttcgttgaccggcggggcactgcggagccgcaaggtcagaaacttgtcatctgctgcgagggaaatgctgggttctatgaggtcggctgtgtctccacccccttggaggctggatacagcgtactaggctggaaccatcctggattcgcaggttctacaggggtgcccttcccacagaacgaggccaacgcgatggacgtagtggtgcagttcgctatacacagacttggctttcaaccccaggacatcatcatctatgcttggtctattggcggattcaccgcaacatgggcagcaatgtcctatccggatgtaagtgcgatgattctggatgcaagtttcgatgacctggttccccttgccctcaaagtaatgccggattcttggcgcgggctagtcactcgaaccgtccggcagcatctgaatctaaacaatgcagagcagctgtgccggtaccagggcccagtcttattgatcagacgcacgaaggatgaaattataacaacaacagttcccgaagacattatgtcgaatagaggtaacgatctcctgctgaagcttctgcaacatcgctaccccagggtgatggctgaggaagggttacgggtggtccggcagtggctcgaggccagttcacagcttgaggaagcaagtatctatagccgatgggaggttgaggaagactggtgtctcagcgttctaaggtcgtaccaggccgaacacgggcctgacttcccctggagcgtgggcgaagacatgtcggccgacggccggagacagctggccttgttcctggccaggaagcacctccataactttgaagcaacacactgtactcctctgcctgcccagaattttcagatgccctggcatctgtag

SEQ ID NO: 69692 - DNA, 438 bp, Artificial Sequence
  derived and/or modified sequence
atgctgggccactgctgctacttctggcaggtgtggcccgccagcgaagccctggccgctggcccgacgccaagcacgggtagctcaagcccttcgtggaaacagcacatcggcacgagcctgcaaaagactagaggctcattgccgacaactaccctgacttcaggggccggccaatccactagcaccgggaaaaaccctgcggccggtagatccttggagggagctttaccagcaggagtgtggccctgttttgctcagtccccatgtacaggcggacagcaaacgcctagtagtactggcctgcgttcctgcctcgtgagaagtcccggagggaagcagcagcgcggcgaggcacactggggcgggggagccatcagtggagtactgtgggagtgggccctgcactgtaaaatcgccgtgacccattgggcatag

SEQ ID NO: 69693 - DNA, 1578 bp, Artificial Sequence
  derived and/or modified sequence
atgcccccccccgccctgttcctgagcagcctgtacccccggctggaatttcagaatgatttttacaggtcatgtattcgccggtcttcccctcaaccacccccaaatttggcttggaggcccgagtcattatacagtggcgagctagccggaggtggctatttaagcctgagtaaagtggtgcccttttcccactacgccggaaccttgctcttactcctggcgggagtggcttgcctgcgcggcatcgggcggtggacaaatccgcagtacaggcagttcattactatactcgaggcaacacatcgcaaccagtctagcgagaacaagagacagctcgctaactataattttgattttcggagttggccagtcgatttccattgggaagaaccctcttcaagaaaggaaagtcgggggggcccgtctcgccggggggtcgccctacttagaccggagccattacatcgcgggacagccgacacccttctgaatagagtcaagaaattgccctgccaaataacgtcgtaccttgtagctcacaccctgggcagacgcatgctgtaccccggatcggtgtatttgctgcaaaaggcgctgatgccagttttgctgcagggccaagcacgcctggtcgaggagtgtaacgggagaagggctaagttattggcctgtgatggcaacgagattgataccatgttcgtcgatcggcggggaacagctgaaccacagggacagaagcttgttatttgttgcgaaggaaacgccgggttttacgaggtaggttgcgtttccacccccctcgaggcaggatactctgtgcttggttggaatcatcccgggttcgccggctctactggtgttccattcccccaaaacgaagccaacgccatggatgttgttgtgcaattcgccattcatagactgggcttccagcctcaagacattatcatatatgcctggtccataggggggtttactgccacttgggccgcaatgagctaccccgacgtttctgctatgatactagacgcctctttcgacgatctggtccctcttgctctcaaagtgatgcccgactcatggcgcggcctggttacgcgtacggtgcgccagcatctcaacctgaataacgctgagcaactttgtcgataccaggggccggtcttgctgatcagaagaactaaggacgagattatcacaacaaccgtcccagaagatatcatgtctaatagagggaatgatctgctgctgaagctattgcagcaccgctaccctcgcgtgatggccgaggaggggctacgggtggttcggcagtggctggaggcatcctcacagctggaagaagcttcgatctacagccggtgggaagtggaagaggattggtgcttaagcgttttgcgcagctaccaggccgaacatggcccagacttcccctggtccgtgggggaggacatgtctgccgacggaaggcgccagttggcccttttcctggctcggaaacatctgcacaacttcgaggcaacacactgtacgccattacctgctcagaactttcagatgccctggcacctttag

SEQ ID NO: 69694 - DNA, 438 bp, Artificial Sequence
  derived and/or modified sequence
atgctgggccactgctgctacttctggcaggtgtggcccgccagcgaagcattggcggccgggcctacaccgtccaccggcagttcctccccttcctggaaacagcacatcggaacgagtctacagaagacccgcggatcactccctaccacaacactgaccagcggcgctgggcagtcgacatccaccggtaagaacccagccgctgggcgatcgctggaaggggcccttcctgctggagtgtggccatgttttgcacaaagcccgtgtacaggcgggcagcagacacctagcagtaccggactccgttcatgcctggtaagatccccggggggcaagcagcagcggggcgaagcccattggggtggcggagccatcagcggggtgctgtgggaatgggccctgcactgtaaaattgccgtgacccactgggcatag

SEQ ID NO: 69695 - DNA, 1578 bp, Artificial Sequence
  derived and/or modified sequence
atgcccccccccgccctgttcctgagcagcctgtacccccggctggagttccaaaatgacttctatcggtcttgtatccgccgctccagccctcaaccaccgcccaaccttgcctggaggcctgaaagtctgtacagtggcgagctagctggaggcggatatctgagcctttctaaggtggtcccatttagccattatgccggaaccctgttgctgctgttagcaggggtggcatgtctccgagggattggacggtggacgaatccccaataccgtcagtttattaccatcttggaggcaactcacagaaatcagtccagcgaaaacaagcgtcagcttgccaactataactttgacttccgcagttggcccgtggacttccactgggaggaaccctcttccagaaaggaaagccgcggtggcccaagccggcggggcgtggctctgctaagaccagagccacttcaccgcgggaccgctgacacattgcttaaccgtgttaaaaagctgccatgccagattacctcgtatctagtggcccatactctcggccggagaatgctgtatcccgggtcagtctatctactccagaaggcccttatgcccgtgctcctgcagggccaggcgcgattagtggaagaatgtaatggaagaagagcaaaactcctcgcctgtgatggtaacgagatcgatacaatgttcgtggatagaagagggacggccgaaccccaggggcagaagctggtaatttgctgcgagggtaatgccggcttctatgaagtgggctgcgtgtctacaccacttgaggctggttattcagtactcggatggaaccacccgggatttgctgggtccactggcgtcccgttcccccaaaatgaagcaaatgccatggacgtcgtggttcaatttgccattcatcgactaggcttccagccccaagatatcataatctacgcatggagtattgggggcttcactgccacatgggctgccatgtcttacccagacgtttcagccatgatcctagatgcctcattcgatgatctggtccccctggcacttaaagttatgccggactcatggagggggcttgtgaccagaactgtccgtcagcaccttaatctgaacaacgcagaacagctttgtcgctatcagggcccagtcctgctaataagaagaacgaaggatgagatcattacgacgaccgttcccgaagacatcatgagtaaccgcggcaacgacctgctcctgaagctgttacaacatcggtatccaagggtgatggcggaagagggcttgcgcgtggttagacagtggcttgaagcaagctctcagctcgaggaggcttctatctattcgcggtgggaggtcgaagaagactggtgtctctcagtcctcaggtcctatcaagccgaacacggccccgactttccctggagtgtcggagaggacatgagcgcagacggaagacgccagctggctcttttcctcgcgagaaaacacctacataactttgaggcgacccactgcacgcccctgcctgcacaaaattttcagatgccatggcacctctag

SEQ ID NO: 69696 - DNA, 1020 bp, Artificial Sequence
  derived and/or modified sequence
atgctgtatcccggaagcgtctacttattacagaaggccctgatgccagtgcttttacaggggcaagcgaggctggtggaagaatgcaacggcaggcgtgccaaactcctggcatgcgacggcaatgaaattgacactatgttcgtggacagaaggggcacagccgaaccccagggtcaaaaattagtgatttgttgtgaaggaaatgccggattctatgaagtgggctgtgtgagtactccgctcgaagctggttacagtgtgcttggctggaatcaccccggtttcgcagggtccaccggtgttccatttccccaaaatgaggcaaatgcgatggacgtggtcgtgcagtttgccatccaccgactcggctttcagcctcaggatatcattatttacgcatggtcaatcggcggattcacagcgacgtgggccgcaatgtcttatcctgacgtcagcgccatgattctggatgcttctttcgatgatctggtcccactcgcactgaaggttatgccagactcttggagaggtctggttacccggaccgtgaggcagcatctcaatctgaacaatgctgagcagctttgtcgttaccaaggccctgtattactgatcaggcgaactaaagacgagatcattaccaccactgtccctgaggatattatgtcgaaccgaggaaacgacctccttcttaaattgctccaacatcgatatccccgtgtgatggcggaggaaggacttagagtggtgcgtcagtggctggaggcctcttctcagctggaggaggcttcaatctacagtagatgggaggtggaggaagactggtgtttaagcgtcctccggagctatcaggccgaacacgggccagattttccatggagcgtgggcgaagatatgagcgcggatggacggagacaactggccctcttcttggctcgtaaacacctgcacaatttcgaggctacccactgtacacccttgcccgcacaaaactttcaaatgccttggcacctctag

SEQ ID NO: 69697 - DNA, 795 bp, Artificial Sequence
  derived and/or modified sequence
atgccaccaccagccctctttctctcctccctgtaccccaggcttgagttccaaaatgatttctatcggtcctgcattcgacggtcctctccacaacctcctccaaaccttgcttggaggccagaatcactttattccggagaattggcaggcggtggctatctaagtctctcaaaggtggtgcccttctcacactatgctggcaccctgctcctgcttcttgccggagtggcctgtttacgcggtattggccgttggactaatcctcagtaccgccagtttattacaattctcgaagcaacacaccgtaaccagagctcagagaataagcgtcagctcgcaaactataattttgactttcggagctggccagtggatttccactgggaagagccctctagccgcaaggaaagcaggggcggacccagccggcgaggtgttgccctgctgaggccggaacccctacaccgtggtacagctgataccttgctgaacagggtgaagaaactaccatgtcagatcacttcctatttggtggctcacacccttgggaggagaatgctttatcccggaagtgtgtacctcctgcagaaggccttaatgccggtcttattacaagggcaggcgaggctagtggaagagtgcaacggaagaagggccaaacttctggcttgtgatgggaatgaaattgacacaatgttcgtcgataggcgcggaaccgccgaaccacagggccagaagttggtgatttgctgtgagggcaacgccggattttacgaggtcggatgcgtctag

SEQ ID NO: 69698 - DNA, 795 bp, Artificial Sequence
  derived and/or modified sequence
atgccacctccggctttgttcctctcctctctttacccgaggttggaattccagaatgacttctatcgttcctgtatacgacgtagttctccccagcctccacctaatctcgcctggcggcctgaaagcctgtacagcggcgaactggctggagggggttacctctccctttctaaagtggtgcctttttcccattatgctgggaccctactgctgctcctggctggcgtggcgtgtctcaggggaattggcaggtggacaaatcctcagtatcgccagtttatcacgattctggaagccacccacagaaatcaatcctcagaaaataaacggcagctggccaattacaatttcgactttcgttcttggcccgtcgacttccactgggaggagccctcttcccgcaaggagtccaggggtggtcccagcaggcgcggtgtggccctgctcagacctgaacccctccaccgtggcactgctgacactctactgaatcgcgtgaagaagctcccctgtcaaattacctcatatctggtcgcccacactctgggcagaagaatgttgtaccctggttcagtgtacttgttgcagaaggcacttatgcctgtgctccttcaggggcaggctagactcgtagaggagtgcaacggcaggagagcgaagctgctggcctgtgatggaaatgagatcgacactatgttcgtggacagacggggaactgctgagccgcagggccagaagctagtcatctgttgtgaggggaatgccggattctacgaggtgggctgtgtatag

SEQ ID NO: 69699 - DNA, 795 bp, Artificial Sequence
  derived and/or modified sequence
atgccccctcccgctctgttcctgtcctcgctttacccgaggctcgagttccagaacgacttttacaggtcttgcattcggcgaagctcccctcagccgccaccaaatcttgcatggcgcccagaaagtctgtattctggagaactagccggaggtggctacctgagcctgtctaaggtggtgcctttttctcactacgcaggaaccctattactcctgctggccggtgtcgcatgccttagggggatcgggagatggactaacccccaatatcgtcaatttatcaccatcctggaggcaactcaccgaaaccagtcaagcgagaacaaaagacagttggccaattacaacttcgatttcagatcatggcccgtggactttcattgggaagagccatccagcaggaaggagagtagagggggaccttcaagaaggggcgtagcactgttacggcctgaacccctccatcgaggcacggctgacacgttacttaacagggtgaagaagcttccatgccagatcacttcttacttggtggcacatacccttgggaggaggatgttataccccggttctgtgtacctgctgcagaaagcgctgatgccagtcctcctgcaaggacaggcaaggctggtggaagagtgcaacggacgccgagccaaactacttgcttgtgatggtaatgagatcgacactatgttcgttgacaggcggggaaccgcggagccacagggtcagaaactcgtcatctgttgtgagggcaacgccggattttatgaagttgggtgcgtgtag

SEQ ID NO: 69700 - DNA, 795 bp, Artificial Sequence
  derived and/or modified sequence
atgccacctccggcacttttcctgagttctttataccctcgacttgagttccagaatgacttctacagatcctgcattaggcgctcgagtccccaacccccacccaacctggcatggcgccctgagagtctctatagcggagagctggccggtggcggttatttgagcctgtctaaagtggtgcctttctcacactacgctggcaccctgttgcttctgttggcaggggtcgcttgtttgagaggaattggcaggtggaccaacccacagtatcgtcaatttattaccattctagaggctacacacaggaaccagagtagtgagaataagcgccaattggccaactataattttgacttcagatcctggcctgtcgactttcattgggaggaaccaagttcaagaaaagagtctaggggaggtccaagtagacggggagttgcgcttcttcggcctgaacccctgcacagggggacggccgatacccttttgaaccgcgtaaagaagcttccttgtcagattacgtcctatctggtggcccacacacttggcagacgcatgctatacccaggaagcgtgtacctgctgcagaaagcgctcatgcccgttttgctgcaaggccaggcacgccttgtggaggagtgcaatggcagacgtgccaagctgctcgcttgcgatgggaatgagatcgacacaatgtttgtggacagaagaggtacggctgaacctcagggccagaaactggtcatttgctgcgaaggcaacgctgggttctatgaagtggggtgtgtatag

SEQ ID NO: 69701 - DNA, 795 bp, Artificial Sequence
  derived and/or modified sequence
atgccccctcccgctcttttcctctcaagcctgtaccccagacttgaattccagaacgatttctatcgatcctgtatccggaggtcgagcccccagcctccaccaaatcttgcttggcgtcctgagtccctctattcaggcgagcttgctgggggtggttacctcagcctgagcaaggtcgtgccattcagccactatgccggaactctgctcctgctgcttgctggcgtcgcatgcctccgaggcattggcaggtggaccaatccacagtacaggcaatttatcaccatactggaggccactcaccgtaatcagtcctctgagaacaagaggcagctcgccaactataatttcgactttaggtcctggccagtagacttccactgggaggaaccttctagcagaaaggaaagccgcggtggcccttcccgcaggggggtggccctcctgcggcctgagcctctgcatagaggtactgccgatacgctcttgaatcgagtcaaaaagttgccttgccagatcacatcctacctggtggcccataccttggggaggagaatgctgtacccagggtccgtctatcttttgcaaaaggcccttatgccggtcctgctacagggccaagctcgactggtggaagagtgcaatggaagacgcgctaagttgctggcctgtgatggtaacgaaattgacaccatgtttgtggaccggcgtggcaccgctgagccacagggccagaagctggtaatttgctgcgagggtaacgccggattttatgaggtgggctgtgtgtag

SEQ ID NO: 69702 - DNA, 795 bp, Artificial Sequence
  derived and/or modified sequence
atgcctccgcctgccttgttcctatctagcctctacccccgacttgagttccagaacgacttttataggagctgcattcgcagaagctctcctcagcctccacctaacctcgcctggcggcctgaatctttatactctggtgagctggcaggtggcggatacctgtccctgtcgaaagttgtaccctttagtcactacgccggtacactgctcctgcttctcgcgggtgtggcatgtctgagagggattggcagatggaccaacccgcagtaccgtcagttcattacaatcttagaagcaacccaccgaaatcaatcatctgaaaacaaaaggcagttggcgaattataactttgactttcgctcctggcccgtagattttcattgggaggagccgtcctccaggaaagagagtcggggaggcccaagtcgcaggggagttgcattgctaaggcccgagcccctgcaccgcggtacggcagacactctgcttaaccgcgtgaagaaactgccttgtcagattacatcatatctcgtcgcgcacactttgggcaggcggatgctgtaccctggatccgtgtacctcctacaaaaggcgctcatgcctgtgttgctgcagggccaggcgaggctggtggaagagtgcaacggcagaagggctaaactattagcttgcgacggaaatgaaatcgacactatgttcgtcgatcgacggggaactgccgagccacaagggcagaagctggtgatctgctgtgaaggtaacgcagggttctacgaggtcggctgcgtttag

SEQ ID NO: 69703 - DNA, 438 bp, Artificial Sequence
  derived and/or modified sequence
atgttggggcattgctgctacttctggcaggtatggcccgctagcgaagcgcttgcggcagggcctacaccctccaccggaagttccagccccagctggaaacagcatataggaactagtctccagaagactaggggttccctccctacgacaaccctaacctcgggtgcaggccaaagcacttcaactggcaagaaccccgctgccggtcgcagcctcgagggagcgctccctgccggagtatggccatgctttgcgcagagcccatgcacagggggacaacagacgccaagcagcaccggactgcgtagttgtctggtgagaagccctggtggcaagcagcagagaggggaagctcattggggcggtggtgccatatcgggtgtgctttgggaatgggcgctccactgcaagattgccgtcacacattgggcatag

SEQ ID NO: 69704 - DNA, 438 bp, Artificial Sequence
  derived and/or modified sequence
atgcttgggcactgctgctacttttggcaggtttggccagcctcggaggctctggctgcagggccaaccccttccactggctcctcctctccttcctggaaacagcatatcggcacctcattgcagaagacaagaggaagccttccaacaactacgttaacctctggggcaggccaaagtacatcaacaggcaaaaaccccgcagctgggcgaagtctcgagggcgcacttccggctggcgtctggccttgtttcgcccagagcccttgtacgggcggacagcaaaccccttcaagcacaggattgaggtcctgtcttgttagatcacctggcggaaagcaacaaagaggggaggcccactggggaggaggagctatctccggagtgctctgggaatgggctctgcactgcaagattgctgttactcactgggcttag

SEQ ID NO: 69705 - DNA, 438 bp, Artificial Sequence
  derived and/or modified sequence
atgcttggccattgttgttacttttggcaggtgtggcctgcgagtgaagccctcgcagctggaccaacccccagcacaggcagttcttctcccagctggaaacagcacattggaacctcattgcagaagacgagaggatccctgcccactaccaccctgaccagtggagcaggccagtccaccagtactggcaaaaatccagcagccggaagatcgcttgaaggcgcactaccagccggagtatggccatgcttcgctcaaagcccatgcacgggagggcagcagaccccttcctccaccggcctgcgaagctgtcttgtgcggtccccagggggtaagcaacagaggggggaagctcattgggggggaggggctataagtggagtgctgtgggaatgggctctgcactgtaagatagccgtcacccattgggcttag

SEQ ID NO: 69706 - DNA, 438 bp, Artificial Sequence
  derived and/or modified sequence
atgcttggccactgctgttatttttggcaggtctggccagctagtgaggccttggcagctgggccaactccaagcacagggagctcttctcccagctggaagcaacacatcggaacctcactgcagaaaactcggggatccctgcctacaaccacgctcacctctggagctggccaaagtacctcaactggaaagaaccccgctgcaggccgttccctggaaggagccctcccagccggtgtttggccctgttttgcgcagtcgccatgcactggcggtcagcagactccatcgtctacgggcctccgtagctgtctggtgcggagccctggtggcaagcaacagcgcggagaggcccattggggaggcggagcaatcagtggggtcttgtgggaatgggctctgcactgtaagatcgccgtgacacactgggcatag

SEQ ID NO: 69707 - DNA, 1578 bp, Artificial Sequence
  derived and/or modified sequence
atgcctcctccggcactctttctctcgtccctttatccacgacttgagtttcaaaatgatttctatagaagctgtattaggagaagtagtccccagccgcctccaaatctggcttggaggcccgaatcactctattccggagagttagcgggaggcggatacttgtctctgagtaaagttgttccattctcacactacgcagggactctgctcctccttttagcgggtgtggcctgtctcaggggcattggccgttggacaaacccccagtacaggcagttcatcaccattcttgaggctacacataggaaccagagcagcgagaataagaggcagctggcaaactataatttcgactttagatcctggccagtagatttccactgggaagagccttcaagccgaaaggaatcaagagggggaccttcccgacggggtgtggcgctgttgaggccagagcctctgcatcgtggtactgccgatacattgctgaaccgcgtcaaaaaactcccttgtcagatcacgtcatacctcgtggcccatacgttaggcagaaggatgctgtatcctggtagcgtctatcttctccagaaagctctcatgcccgtacttctgcaaggacaggcgcgattggtggaggaatgcaacggcagacgggctaagttactcgcatgcgatggcaatgagattgataccatgtttgtcgatcggcgagggaccgccgagcctcagggccagaaactcgttatttgctgtgaggggaatgcgggattttatgaagtaggatgcgtgtccaccccgctcgaggctggctatagtgtgctgggatggaatcatcccggatttgccggaagcacaggtgtgccattccctcagaacgaggcaaacgccatggatgttgtggtccagttcgctattcatcgcctgggttttcagccacaggatatcattatctacgcatggtccatcggtggcttcacggcaacttgggctgccatgagctaccccgacgtgagtgccatgatcctggatgctagctttgacgacttagttcccctggccctgaaggtgatgcctgacagctggcgcggtctggtcacaaggaccgtgcggcaacacctgaatcttaacaatgcagagcagttgtgcaggtaccaggggcctgtgctcttgatccgaagaacaaaagacgagatcatcactaccaccgttcctgaggatattatgtcgaatcgcggtaatgatctgcttttaaagctactccagcatcgttatccgagagttatggctgaggaaggtctgcgggtggtgagacaatggcttgaagcctccagccagctcgaagaggcttccatctatagcagatgggaggtcgaggaagactggtgcctgtctgtgttgcgaagctaccaggccgagcatggcccagacttcccttggtctgtgggcgaggacatgtccgccgacggacggaggcagctggctctttttctggccaggaagcatctccacaatttcgaagcgactcactgcacacccctccccgctcagaacttccagatgccgtggcacctttag

SEQ ID NO: 69708 - DNA, 1578 bp, Artificial Sequence
  derived and/or modified sequence
atgcccccacctgccctgttcctgtcctctctttatccgagactcgagtttcaaaatgacttttatcgctcttgcattaggcggtctagtccccagccccctcccaatctcgcctggaggcctgagagtctgtactccggggaactcgcaggcggaggttacctctccctctcaaaagttgttccatttagccattacgccggaacattgttgttgttattggcaggcgtcgcctgcctccgtgggatcggcagatggaccaatccccagtacaggcaattcattaccatcctggaggccacacaccgcaatcagtcatctgaaaacaaaaggcagctcgcaaattacaactttgacttccggtcttggccggtggacttccactgggaagagccttccagcaggaaggagtcccgaggtggaccatcccggagaggagttgcactgttaagaccagaaccactgcaccggggaacggcagatacgctgctcaatcgggttaagaagctgccatgccaaattaccagctacttagtcgcccataccctcggcagaagaatgctttaccctggatccgtgtaccttctacagaaagcgctgatgcctgtgctcttgcaggggcaggcaagacttgtggaagagtgtaacggaaggcgcgctaaactgctggcatgtgatggcaacgaaatcgacaccatgttcgtggatcgtaggggaacggcagaaccccagggccagaaattggtcatctgttgtgagggcaacgcaggtttctacgaggtggggtgcgtctcgacgccgctcgaggcaggatacagtgtcttaggctggaaccaccctgggttcgctggcagcaccggagttccttttccacaaaatgaggccaacgcaatggacgtagtggtgcaatttgcgatccaccgactgggatttcagccacaagacataataatctatgcttggtctatcggcggttttactgccacatgggccgctatgtcatatccggacgtttcagccatgatcttggacgccagctttgatgacctagtgcctctcgcactcaaggtgatgcctgactcctggagggggttagtaacgaggacggttcgacaacatttaaacctgaacaacgcggaacaactttgtcgctatcaggggccagtgcttctaatccgcaggacgaaagacgagataattaccaccactgtacccgaagacatcatgagtaatagggggaacgacctgctgcttaaactactacagcaccgctatccccgagtgatggccgaggaaggcctgagagtggtgagacagtggctagaagcatctagccagctggaggaggccagtatctattctagatgggaagtggaggaagactggtgtttatcggtccttcgatcctaccaagccgagcatggcccagacttcccctggtccgtaggtgaagacatgtctgccgacggaaggaggcagctcgcgttattcctggcgagaaagcacctgcacaactttgaggctacccattgtacccctctccctgcccagaactttcagatgccatggcatctgtag

SEQ ID NO: 69709 - DNA, 1578 bp, Artificial Sequence
  derived and/or modified sequence
atgccacctcctgctcttttcctctcttccctttatccaaggctggagtttcagaacgacttctaccggtcttgtatccggagatcttccccccagccacctcccaacttagcatggagacccgagtccctatactcaggagagctggccggtggagggtacctgtccctttcaaaagtcgtgcccttttcacactatgccggtaccttactgttgctgctagcaggtgttgcctgtctcaggggcatcggacgctggacaaatccgcagtaccgacagttcattaccatcttggaggccactcatcggaatcagagcagtgagaacaaacgccaactcgcgaactacaacttcgacttcaggagctggcctgtcgattttcactgggaggaaccctcaagcagaaaggagtcccgtggcggaccctctcgcagaggggtggcactcttgcggccagagcccttgcatcggggtacagcggacactctgctaaaccgcgtcaagaagttgccttgccagattacaagctacctagtcgcccataccctggggaggcggatgctgtaccccggaagtgtctatctcctccagaaggcattaatgccagtgctgctgcaaggacaagcaagacttgtggaagagtgtaatgggaggcgggctaaactgctggcatgtgacggtaatgaaattgataccatgttcgtggatagacggggaacagcagaaccccaaggccaaaaactggtcatttgctgcgaaggaaacgctggtttctatgaagtcgggtgcgtctccactccgctggaggcagggtactctgtgctagggtggaatcaccccggtttcgccggatcgactggcgtgcccttcccccagaacgaagcgaacgccatggacgttgtagtccaattcgccatccacagattaggcttccagcctcaggacatcatcatctatgcttggtcaatagggggattcacggccacctgggcggctatgtcttaccccgacgtgtctgcaatgatccttgacgctagcttcgacgatctggtacctctggcactgaaagtgatgcccgacagctggcgagggctcgtcactcggaccgtaagacagcatctgaatttgaataacgcagaacaactgtgcagataccagggacctgtcctcctgatccgtcggaccaaggatgaaatcattaccaccactgtaccggaggatataatgtcaaatcggggaaatgatctcctgctgaaactattacagcaccggtaccccagagtcatggccgaagaggggctgagagtcgtgagacagtggttggaggcctccagccagctggaagaggccagcatctatagcaggtgggaagtagaggaagactggtgcctctcagttcttaggagttatcaggctgaacatggacctgacttcccgtggagcgttggcgaagacatgagcgccgacgggaggcgtcagctggctctcttcctggccagaaagcatctgcacaactttgaggccacacactgtacgccgctccccgcacagaatttccagatgccctggcacctctag

SEQ ID NO: 69710 - DNA, 438 bp, Artificial Sequence
  derived and/or modified sequence
atgctcgggcactgttgttatttttggcaggtatggccagcgagtgaagcactggcagccggacctacaccctcaacgggatcttcatcaccaagctggaaacagcatattggaacatcccttcagaagactcgcggttccctccctaccaccaccttaacctcgggagctggtcagtcaacctccaccgggaaaaaccccgcagctggacgctcccttgagggcgctctcccagctggtgtatggccgtgcttcgcacaatccccttgcaccggcggacagcaaacacccagctctacaggcttacgctcatgtttggtcagatctcccggaggtaagcagcagaggggagaggcgcattgggggggtggcgcaatctcaggcgtcctatgggaatgggcgctccattgcaaaattgcagtcacccactgggcttag

SEQ ID NO: 69711 - DNA, 1578 bp, Artificial Sequence
  derived and/or modified sequence
atgccccctcccgcattgttcctgagttcattgtacccgaggctcgagtttcagaatgatttttacaggagctgcattagacgaagctctcctcaaccccctcccaacctggcctggcgccctgagagcctttatagtggagaactggctgggggaggatatctcagcctgtcaaaagtggttccctttagccactacgctgggacccttttactcctgctagcaggagtagcctgtctgcgaggcatcgggaggtggaccaatcctcagtaccgccaattcattactatccttgaagcaactcatagaaaccagagcagcgagaataagaggcagctggctaattacaacttcgactttcgatcttggccagtggattttcattgggaggagcccagtagccgtaaggaatcaaggggtggcccatccagaagaggcgtggccctactccgccctgagccattgcaccgcggtaccgctgataccctgctgaaccgggttaagaagctgccttgccagatcacaagctatctggtcgcccatacactgggtcggaggatgctgtacccgggaagtgtgtaccttctccagaaggctctcatgcctgtactattgcaaggccaggctaggctggttgaggagtgtaatggcaggcgtgccaagctccttgcctgtgacgggaacgagatcgacaccatgttcgtcgatcgcaggggtaccgccgaaccccagggacaaaagctcgtgatatgctgcgaaggcaatgccggtttctatgaggttggatgtgttagtacccccctcgaggccggatactcagttctcggctggaaccatcccggatttgcgggttccactggcgtgccatttccccagaatgaagccaatgccatggatgtagttgttcaatttgccattcatagattaggcttccagcctcaggatattataatctatgcatggtcaatcggaggatttacagcaacctgggccgctatgtcctatccggatgtgagcgctatgatcctcgatgccagctttgatgatctggtgccactagccctgaaggttatgcccgactcatggcggggactggtcacgcggactgtccgacagcacctgaatctgaacaatgctgagcagctgtgtcgctatcagggccctgtgctgcttattcggcgtacgaaagacgagatcattaccacaaccgtgccagaggacattatgagtaacaggggcaacgacctcctgctgaaactacttcagcatcgctatcccagagtcatggccgaagagggactgagagtggtgagacagtggttggaggccagttcccaactggaagaggctagtatctactctcggtgggaggtagaagaggactggtgcctttccgtcctcagatcataccaggcagaacacggaccagatttcccctggtcagtgggagaagatatgtcagccgacggtagaagacaactggcactgttcctcgccagaaaacatctgcataactttgaggcaacgcactgcacccctctccctgcacagaatttccagatgccgtggcatttatag

SEQ ID NO: 69712 - DNA, 1578 bp, Artificial Sequence
  derived and/or modified sequence
atgccaccacccgcactctttttgagttccttatatccacgccttgaattccagaatgatttttacaggtcttgcattcgaaggtccagccctcaaccccctccaaatctggcctggagaccagaaagtctatactcaggggaattagcaggcggtggataccttagtctctctaaagtggtgccctttagccactatgccggaacccttctgctactgctggcaggagtcgcgtgccttagagggataggacgatggaccaacccacaatacaggcagttcattacaattctggaggccacacacagaaatcagtcgagcgagaacaaaagacagctcgctaactataattttgacttccgttcttggcctgtggactttcattgggaggagcctagctctaggaaagagtcccggggaggcccaagcaggcgcggagtggccctgctcaggcccgagcctttgcacagaggcactgcggatactctgctgaatcgggtgaaaaaactgccatgtcagatcaccagctacctggtggctcatactcttgggaggcggatgctttacccaggaagcgtgtatctgctgcagaaagcgctgatgcctgtcctgcttcagggccaggcacgcttggtggaagagtgcaatggacgcagggccaagctgctggcctgtgacggaaacgaaatagacaccatgtttgtggataggcgtggcactgccgaaccacaagggcagaaactggtaatctgctgcgaggggaatgcagggttttatgaggtcgggtgtgtgtcaactccactggaggccggttactcagttctgggatggaaccaccctggattcgctggctccaccggagtgccttttccccagaacgaagccaacgcgatggacgtcgtggttcagttcgcaatccaccggttgggcttccagcctcaggatatcatcatctacgcttggtccatcggaggcttcactgcaacctgggccgcaatgtcttaccccgacgtatctgccatgatacttgatgctagttttgatgaccttgtgcccctggctttaaaggtgatgcctgattcctggagggggctggtcacaagaacggtgcgccagcatctgaacctgaacaatgccgagcaactatgcagataccaggggccagttctccttattcgaagaactaaagacgagataatcacgaccactgtgcccgaagacatcatgagcaaccgagggaatgacctcctgttgaagcttctgcagcacagatacccaagagttatggccgaggagggacttagggtggtgcgtcaatggctcgaggcctcttctcagctagaagaagccagcatttattcaagatgggaagtggaagaggactggtgtttgtctgttctccgtagttaccaggccgagcacggccctgattttccctggagcgttggcgaagatatgagcgctgacggacgacgccaacttgcactgtttctagcacgtaaacatctgcataactttgaggcaacccattgcacaccattaccagcacagaattttcagatgccttggcatctgtag

SEQ ID NO: 69713 - DNA, 438 bp, Artificial Sequence
  derived and/or modified sequence
atgctcgggcactgttgttacttttggcaggtttggcctgcatcggaggcattggccgcaggtccaacgcccagcactggctctagctcccccagttggaagcagcatataggtacttccttacagaagacgcggggttctctccctacaacgaccctgacttccggagctggacagtctacttccaccggaaagaaccccgctgccggacgtagtttggagggcgcactgcctgcaggagtgtggccatgttttgctcagagcccctgtacaggaggtcagcagacccccagtagtactgggctgcgttcttgtttggtgagaagtcccggaggcaagcagcagagaggtgaggcccactggggaggtggcgcaatatccggtgtgctgtgggagtgggccctgcattgcaaaatagcagtcacccattgggcctag

SEQ ID NO: 69714 - DNA, 1578 bp, Artificial Sequence
  derived and/or modified sequence
atgccaccccctgccctcttcttgagtagcctttacccaagacttgaattccagaatgatttctaccgctcttgcatccggaggagttccccccagcctccccctaacctggcgtggcggccagagagtctctattccggagagctggccggtgggggttacctgagcctatccaaagtggttccatttagccattacgccggaacactcctgctcttgctggccggtgtggcctgtttgagaggcatcgggaggtggaccaatccccaatatcgccagtttatcacgattctggaggctactcaccgaaaccagtcctcagaaaataagagacagctcgctaactataactttgacttccggtcttggcccgtcgattttcattgggaagaacccagcagtcggaaagagtctcgcggaggcccatctcgaagaggcgtagctttgctcaggcccgagccacttcaccggggaaccgccgacactctgctgaaccgggtgaagaagctaccatgtcagattacttcctaccttgttgcacataccctcggcagacgcatgctgtaccccggaagcgtatacctgctgcagaaagctctgatgcctgttctactgcaaggccaggcacggcttgtggaggaatgcaatggacgacgagcgaaattactggcttgcgacgggaatgaaatcgacacaatgtttgtggatcgccgagggacggccgaaccacaagggcagaagctggtgatctgttgcgagggaaatgctggattttacgaggtgggctgcgtctcaactccactggaagccggatacagcgtgcttggatggaatcatcctggcttcgctggttccaccggggtacccttcccgcagaacgaagccaacgcaatggacgtggtggtccaattcgccatccaccgactcggatttcaaccccaggatataatcatttatgcatggtccatcggtggattcactgctacttgggcagctatgtcataccctgatgtctccgcgatgatcctggacgcatccttcgacgacctcgtccccctggcgctaaaggtaatgcctgatagctggagaggactcgtgaccagaaccgtccgccaacacctcaatctgaacaacgctgagcagctctgcaggtatcaaggtcccgtgttgctgattcggagaaccaaggacgaaatcattacaacaactgtccctgaggacattatgagcaatcgcggtaacgatctcctactaaaactcctgcagcaccgataccctcgggtgatggccgaggaggggttaagagtagtccgtcagtggcttgaagcctctagccagttggaggaagcttctatctacagtcggtgggaggttgaagaggattggtgcctgagcgtactccggagttatcaggctgagcatggtcccgatttcccgtggagcgttggcgaggacatgagcgctgatggacggagacagcttgctttgttcctggcccgaaaacatctgcataactttgaggcaacccactgtaccccactcccagctcaaaatttccagatgccctggcacctgtag

SEQ ID NO: 69715 - DNA, 438 bp, Artificial Sequence
  derived and/or modified sequence
atgctcggccattgttgttacttctggcaggtgtggcccgcttccgaagcactggccgcaggaccaaccccatccaccgggagctcaagtccgtcatggaagcagcatatcggcacttctcttcagaagacacgaggctctttgccgacgaccaccctgacaagtggggctggacagtccacatccactggaaagaaccctgccgctggtcgcagcctggaaggggctctacccgcaggtgtttggccatgttttgctcaaagcccatgtacgggcggacagcagaccccatcgtccacaggtctcagatcgtgtctggttcgttcccccggtggcaagcagcagcgcggtgaggcccattggggcggaggcgctatctcaggagttctgtgggagtgggcattgcactgtaaaatagccgtgacccattgggcctag

SEQ ID NO: 69716 - DNA, 1578 bp, Artificial Sequence
  derived and/or modified sequence
atgccgcctcccgctctgtttctgtcatcattgtatcccaggctggaattccagaacgatttttatcggtcttgtattcggaggtcctcccctcagccgccaccaaatctcgcttggcggcctgaaagcctgtacagtggagaactcgctggagggggatacctgtctctctccaaggttgtgcctttttcgcactacgccggaacactactgctcctgctggctggcgtcgcatgcctacgcggaatcgggagatggactaacccccagtataggcaatttataaccatactcgaggctacccatcgcaaccagagcagcgaaaataaacggcaactcgcaaattataactttgactttcgcagctggcccgtggacttccattgggaggaaccatcttcgagaaaagagagccgcggaggcccatcccgccgaggcgtggccttacttcgaccagaaccattgcatcggggaaccgctgacacccttctcaatcgagtgaagaagctaccttgtcagataacctcctacctcgtcgcacatacgctgggtcgacgtatgctgtacccgggatcagtttacctgctccagaaagcactgatgcctgtgctgttgcagggccaggctaggctcgttgaagagtgtaatggtagaagagccaagttgttggcatgcgacggcaatgagatcgacacaatgtttgtagataggcggggaaccgccgagcctcaggggcagaagctggttatttgctgtgagggcaacgccggtttttacgaggtgggatgcgtcagtacccccctggaggcgggatactcagtcctcggttggaatcaccccggattcgccggatcaacaggagtcccgtttcctcaaaatgaggcaaacgccatggatgttgtggtgcagtttgccatccaccggcttggcttccaacctcaggatattattatctacgcctggagcatcggaggctttacagcaacatgggccgctatgtcttacccagatgtaagcgccatgattctggacgccagcttcgatgacctggtgcccctcgccttaaaagttatgcccgatagttggaggggcctcgtcacaagaaccgttcgtcagcacctaaatctgaataatgctgaacagctgtgtaggtaccaggggcctgtgctgctgattagaagaacaaaagacgagatcatcactactacagtgccagaggatatcatgtctaataggggtaatgacttgttgttaaagcttctgcaacatagataccccagggttatggctgaagaggggcttcgtgtggtcaggcagtggctcgaggcttcatctcaacttgaagaggcctccatctattcacgatgggaggtggaggaggactggtgtctgtccgttctgcggtcctatcaggccgaacatgggcctgactttccttggtccgtcggcgaggacatgagtgcagacggcaggcgccagctggctctttttctcgccagaaaacaccttcacaacttcgaagccactcattgtacccccctcccagcccagaactttcagatgccatggcatctgtag

SEQ ID NO: 69717 - DNA, 889 bp, Artificial Sequence
  derived and/or modified sequence
agttgagtcttgagtcccgggaagagaccctgcgcggactggggagccgttgaattttgctgtcagactcccagtttcctcttcttcagtgcctcttcatgcctcccccggctctgtttttatcttccctttaccctcgccttgaatttcagaatgacttttacagatcctgtatccgtcggtcctcccctcaacccccgcccaacctagcctggagacccgagtcattgtattctggagagctggcgggtggtggttacttgagtttgtccaaagtggtgccgttttctcactatgctgggacattgctgctacttctggcaggtgtggcctgcctccgaggcattggccgctggaccaacccccagtaccggcagttcatcaccatcttggaagcaacacatcggaaccagtcttcagaaaacaagaggcagcttgccaactacaactttgacttccggagctggccagtcgacttccactgggaagaacccagcagccggaaggagtctcgagggggcccttcccgccggggtgtggccctgcttcgcccagagcccctgcaccgggggacagcagacaccctcctcaaccgggttaagaagctgccttgtcagatcaccagctacctggtggcgcacaccctagggcgccggatgctgtatccaggctctgtgtacctgctgcagaaggccctcatgcctgtgctgctgcagggccaggcccgactggtggaagagtgtaatgggcgccgggcaaagctgctggcctgtgatggcaatgagattgacaccatgtttgtggaccggcgggggacagctgagccccagggacagaagctggtgatctgctgtgaggggaatgctgggttttatgaggtgggctgcgt

SEQ ID NO: 69718 - DNA, 2146 bp, Artificial Sequence
  derived and/or modified sequence
cataatgggaaataaggggagcctgcttgtcaagccagttatccgcaaaatctgcgctctgtgtgcttcctgagttaaagtcacgcctacggactggccgcctcctttctttttcgctctttaccgctttctcattccgactgccactctttgttctttcctctccgcgtccccccgaccctgtgtgtcgtggttcgtgccggtcccagttgagtcttgagtcccgggaagagaccctgcgcggactggggagccgttgaattttgctgtcagactcccagtttcctcttcttcagtgcctcttcatgcctcccccggctctgtttttatcttccctttaccctcgccttgaatttcagaatgacttttacagatcctgtatccgtcggtcctcccctcaacccccgcccaacctagcctggagacccgagtcattgtattctggagagctggcgggtggtggttacttgagtttgtccaaagtggtgccgttttctcactatgctgggacattgctgctacttctggcaggtgtggcctgcctccgaggcattggccgctggaccaacccccagtaccggcagttcatcaccatcttggaagcaacacatcggaaccagtcttcagaaaacaagaggcagcttgccaactacaactttgacttccggagctggccagtcgacttccactgggaagaacccagcagccggaaggagtctcgagggggcccttcccgccggggtgtggccctgcttcgcccagagcccctgcaccgggggacagcagacaccctcctcaaccgggttaagaagctgccttgtcagatcaccagctacctggtggcgcacaccctagggcgccggatgctgtatccaggctctgtgtacctgctgcagaaggccctcatgcctgtgctgctgcagggccaggcccgactggtggaagagtgtaatgggcgccgggcaaagctgctggcctgtgatggcaatgagattgacaccatgtttgtggaccggcgggggacagctgagccccagggacagaagctggtgatctgctgtgaggggaatgctgggttttatgaggtgggctgcgtctccacgcccctggaagctggatattcagtcctgggctggaatcatccaggctttgctggaagcacgggggtgccattcccgcagaatgaggctaatgccatggatgtggtggtccagtttgccatccaccgcctgggcttccagccccaggacatcatcatctacgcctggtccatcggcggcttcactgccacgtgggcagccatgtcctacccagatgttagtgccatgatcctggatgcctcctttgatgacctggtgcccttggccttgaaggtcatgccagacagctggaggggcctggtgaccaggaccgtgaggcagcatctcaatctaaacaacgcggagcagctgtgcagataccagggtcctgtactgctgatccggagaaccaaggatgagatcatcaccaccacggttcctgaggacatcatgtccaaccgaggcaatgacctcctgctgaagctcctgcagcatcggtatccccgggtgatggcagaggagggtcttcgagtggtgaggcagtggttggaggcctcctcacagctggaggaagcctcaatttatagccgatgggaggtggaagaggactggtgtctgtctgtcctccgctcctaccaggcagaacacgggcctgacttcccctggagcgtgggggaggacatgagtgcagatggacggcggcagctggctttgtttctggctcggaagcatctgcacaactttgaggccactcactgcaccccactcccagcccagaacttccagatgccctggcacctctagggaccaactgggactcattatggaagaatggggtgagaggagacatgaggaaagaccctcttatttgtgattctctgtgttcatgttgctgtttatagtttgtggaaagtgggggaccatcccccttctcaccactgttcctcttgcacgtttcccctcattcatgtggctgtacttaaccttctccaacatacatcctgcattacatgaatggattattcctaataattaataaaaaggtattttttctactatctggctaa

SEQ ID NO: 69719 - DNA, 2146 bp, Artificial Sequence
  derived and/or modified sequence
cataatgggaaataaggggagcctgcttgtcaagccagttatccgcaaaatctgcgctctgtgtgcttcctgagttaaagtcacgcctacggactggccgcctcctttctttttcgctctttaccgctttctcattccgactgccactctttgttctttcctctccgcgtccccccgaccctgtgtgtcgtggttcgtgccggtcccagttgagtcttgagtcccgggaagagaccctgcgcggactggggagccgttgaattttgctgtcagactcccagtttcctcttcttcagtgcctcttcatgcctcccccggctctgtttttatcttccctttaccctcgccttgaatttcagaatgacttttacagatcctgtatccgtcggtcctcccctcaacccccgcccaacctagcctggagacccgagtcattgtattctggagagctggcgggtggtggttacttgagtttgtccaaagtggtgccgttttctcactatgctgggacattgctgctacttctggcaggtgtggcctgcctccgaggcattggccgctggaccaacccccagtaccggcagttcatcaccatcttggaagcaacacatcggaaccagtcttcagaaaacaagaggcagcttgccaactacaactttgacttccggagctggccagtcgacttccactgggaagaacccagcagccggaaggagtctcgagggggcccttcccgccggggtgtggccctgcttcgcccagagcccctgcaccgggggacagcagacaccctcctcaaccgggttaagaagctgccttgtcagatcaccagctacctggtggcgcacaccctagggcgccggatgctgtatccaggctctgtgtacctgctgcagaaggccctcatgcctgtgctgctgcagggccaggcccgactggtggaagagtgtaatgggcgccgggcaaagctgctggcctgtgatggcaatgagattgacaccatgtttgtggaccggcgggggacagctgagccccagggacagaagctggtgatctgctgtgaggggaatgctgggttttatgaggtgggctgcgtctccacgcccctggaagctggatattcagtcctgggctggaatcatccaggctttgctggaagcacgggggtgccattcccgcagaatgaggctaatgccatggatgtggtggtccagtttgccatccaccgcctgggcttccagccccaggacatcatcatctacgcctggtccatcggcggcttcactgccacgtgggcagccatgtcctacccagatgttagtgccatgatcctggatgcctcctttgatgacctggtgcccttggccttgaaggtcatgccagacagctggaggggcctggtgaccaggaccgtgaggcagcatctcaatctaaacaacgcggagcagctgtgcagataccagggtcctgtactgctgatccggagaaccaaggatgagatcatcaccaccacggttcctgaggacatcatgtccaaccgaggcaatgacctcctgctgaagctcctgcagcatcggtatccccgggtgatggcagaggagggtcttcgagtggtgaggcagtggttggaggcctcctcacagctggaggaagcctcaatttatagccgatgggaggtggaagaggactggtgtctgtctgtcctccgctcctaccaggcagaacacgggcccgacttcccctggagcgtgggggaggacatgagtgcagatggacggcggcagctggctttgtttctggctcggaagcatctgcacaactttgaggccactcactgcaccccactcccagcccagaacttccagatgccctggcacctctagggaccaactgggactcattatggaagaatggggtgagaggagacatgaggaaagaccctcttatttgtgattctctgtgttcatgttgctgtttatagtttgtggaaagtgggggaccatcccccttctcaccactgttcctcttgcacgtttcccctcattcatgtggctgtacttaaccttctccaacatacatcctgcattacatgaatggattattcctaataattaataaaaaggtattttttctactatcaggctaa

SEQ ID NO: 69720 - DNA, 2146 bp, Artificial Sequence
  derived and/or modified sequence
cataatgggaaataaggggagcctgcttgtcaagccagttatccgcaaaatctgcgctctgtgtgcttcctgagttaaagtcacgcctacggactggccgcctcctttctttttcgctctttaccgctttctcattccgactgccactctttgttctttcctctccgcgtccccccgaccctgtgtgtcgtggttcgtgccggtcccagttgagtcttgagtcccgggaagagaccctgcgcggactggggagccgttgaattttgctgtcagactcccagtttcctcttcttcagtgcctcttcatgcctcccccggctctgtttttatcttccctttaccctcgccttgaatttcagaatgacttttacagatcctgtatccgtcggtcctcccctcaacccccgcccaacctagcctggagacccgagtcattgtattctggagagctggcgggtggtggttacttgagtttgtccaaagtggtgccgttttctcactatgctgggacattgctgctacttctggcaggtgtggcctgcctccgaggcattggccgctggaccaacccccagtaccggcagttcatcaccatcttggaagcaacacatcggaaccagtcttcagaaaacaagaggcagcttgccaactacaactttgacttccggagctggccagtcgacttccactgggaagaacccagcagccggaaggagtctcgagggggcccttcccgccggggtgtggccctgcttcgcccagagcccctgcaccgggggacagcagacaccctcctcaaccgggttaagaagctgccttgtcagatcaccagctacctggtggcgcacaccctagggcgccggatgctgtatccaggctctgtgtacctgctgcagaaggccctcatgcctgtgctgctgcagggccaggcccgactggtggaagagtgtaatgggcgccgggcaaagctgctggcctgtgatggcaatgagattgacaccatgtttgtggaccggcgggggacagctgagccccagggacagaagctggtgatctgctgtgaggggaatgctgggttttatgaggtgggctgcgtctccacgcccctggaagctggatattcagtcctgggctggaatcatccaggctttgctggaagcacgggggtgccattcccgcagaatgaggctaatgccatggatgtggtggtccagtttgccatccaccgcctaggcttccagccccaggacatcatcatctacgcctggtccatcggcggcttcactgccacgtgggcagccatgtcctacccagatgttagtgccatgatcctggatgcctcctttgatgacctggtgcccttggccttgaaggtcatgccagacagctggaggggcctggtgaccaggaccgtgaggcagcatctcaatctaaacaacgcggagcagctgtgcagataccagggtcctgtactgctgatccggagaaccaaggatgagatcatcaccaccacggttcctgaggacatcatgtccaaccgaggcaatgacctcctgctgaagctcctgcagcatcggtatccccgggtgatggcagaggagggtcttcgagtggtgaggcagtggttggaggcctcctcacagctggaggaagcctcaatttatagccgatgggaggtggaagaggactggtgtctgtctgtcctccgctcctaccaggcagaacacgggcccgacttcccctggagcgtgggggaggacatgagtgcagatggacggcggcagctggctttgtttctggctcggaagcatctgcacaactttgaggccactcactgcaccccactcccagcccagaacttccagatgccctggcacctctagggaccaactgggactcattatggaagaatggggtgagaggagacatgaggaaagaccctcttatttgtgattctctgtgttcatgttgctgtttatagtttgtggaaagtgggggaccatcccccttctcaccactgttcctcttgcacgtttcccctcattcatgtggctgtacttaaccttctccaacatacatcctgcattacatgaatggattattcctaataattaataaaaaggtattttttctactatcaggctaa

SEQ ID NO: 69721 - DNA, 1906 bp, Artificial Sequence
  derived and/or modified sequence
aatgggaaataaggggagcctgcttgtcaagccagttatccgcaaaatctgcgctctgtgtgcttcctgagttaaagtcacgcctacggactggccgcctcctttctttttcgctctttaccgctttctcattccgactgccactctttgttctttcctctccgcgtccccccgaccctgtgtgtcgtggttcgtgccggtcccagttgagtcttgagtcccgggaagagaccctgcgcggactggggagccgttgaattttgctgtcagactcccagtttcctcttcttcagtgcctcttcatgcctcccccggctctgtttttatcttccctttaccctcgccttgaatttcagaatgacttttacagatcctgtatccgtcggtcctcccctcaacccccgcccaacctagcctggagacccgagtcattgtattctggagagctggcgggtggtggttacttgagtttgtccaaagtggtgccgttttctcactatgctgggacattgctgctacttctggcaggtgtggcctgcctccgaggcattggccgctggaccaacccccagtaccggcagttcatcaccatcttggaagcaacacatcggaaccagtcttcagaaaacaagaggcagcttgccaactacaactttgacttccggagctggccagtcgacttccactgggaagaacccagcagccggaaggagtctcgagggggcccttcccgccggggtgtggccctgcttcgcccagagcccctgcaccgggggacagcagacaccctcctcaaccgggttaagaagctgccttgtcagatcaccagctacctggtggcgcacaccctagggcgccggatgctgtatccaggctctgtgtacctgctgcagaaggccctcatgcctgtgctgctgcagggccaggcccgactggtggaagagtgtaatgggcgccgggcaaagctgctggcctgtgatggcaatgagattgacaccatgtttgtggaccggcgggggacagctgagccccagggacagaagctggtgatctgctgtgaggggaatgctgggttttatgaggtgggctgcgtctccacgcccctggaagctggatattcagtcctgggctggaatcatccaggctttgctggaagcacgggggtgccattcccgcagaatgaggctaatgccatggatgtggtggtccagtttgccatccaccgcctaggcttccagccccaggacatcatcatctacgcctggtccatcggcggcttcactgccacgtgggcagccatgtcctacccagatgttagtgccatgatcctggatgcctcctttgatgacctggtgcccttggccttgaaggtcatgccagacagctggaggggcctggtgaccaggaccgtgaggcagcatctcaatctaaacaacgcggagcagctgtgcagataccagggtcctgtactgctgatccggagaaccaaggatgagatcatcaccaccacggttcctgaggacatcatgtccaaccgaggcaatgacctcctgctgaagctcctgcagcatcggtatccccgggtgatggcagaggagggtcttcgagtggtgaggcagtggttggaggcctcctcacagctggaggaagcctcaatttatagccgatgggaggtggaagaggactggtgtctgtctgtcctccgctcctaccaggcagaacacgggcccgacttcccctggagcgtgggggaggacatgagtgcagatggacggcggcagctggctttgtttctggctcggaagcatctgcacaactttgaggccactcactgcaccccactcccagcccagaacttccagatgccctggcacctctagggaccaactgggactcattatggaag

SEQ ID NO: 69722 - DNA, 1020 bp, Artificial Sequence
  derived and/or modified sequence
atgctgtaccccggcagcgtgtacctgctgcagaaggccctgatgcccgtgctgctgcagggccaggccagactggtggaggagtgcaacggcagaagagccaagctgctggcctgcgacggcaacgagatcgacaccatgttcgtggacagaagaggcaccgccgagccccagggccagaagctggtgatctgctgcgagggcaacgccggcttctacgaggtgggctgcgtgagcacccccctggaggccggctacagcgtgctgggctggaaccaccccggcttcgccggcagcaccggcgtgcccttcccccagaacgaggccaacgccatggacgtggtggtgcagttcgccatccacagactgggcttccagccccaggacatcatcatctacgcctggagcatcggcggcttcaccgccacctgggccgccatgagctaccccgacgtgagcgccatgatcctggacgccagcttcgacgacctggtgcccctggccctgaaggtgatgcccgacagctggagaggcctggtgaccagaaccgtgagacagcacctgaacctgaacaacgccgagcagctgtgcagataccagggccccgtgctgctgatcagaagaaccaaggacgagatcatcaccaccaccgtgcccgaggacatcatgagcaacagaggcaacgacctgctgctgaagctgctgcagcacagataccccagagtgatggccgaggagggcctgagagtggtgagacagtggctggaggccagcagccagctggaggaggccagcatctacagcagatgggaggtggaggaggactggtgcctgagcgtgctgagaagctaccaggccgagcacggccccgacttcccctggagcgtgggcgaggacatgagcgccgacggcagaagacagctggccctgttcctggccagaaagcacctgcacaacttcgaggccacccactgcacccccctgcccgcccagaacttccagatgccctggcacctgtag

SEQ ID NO: 69723 - DNA, 795 bp, Artificial Sequence
  derived and/or modified sequence
atgcccccccccgccctgttcctgagcagcctgtaccccagactggagttccagaacgacttctacagaagctgcatcagaagaagcagcccccagcccccccccaacctggcctggagacccgagagcctgtacagcggcgagctggccggcggcggctacctgagcctgagcaaggtggtgcccttcagccactacgccggcaccctgctgctgctgctggccggcgtggcctgcctgagaggcatcggcagatggaccaacccccagtacagacagttcatcaccatcctggaggccacccacagaaaccagagcagcgagaacaagagacagctggccaactacaacttcgacttcagaagctggcccgtggacttccactgggaggagcccagcagcagaaaggagagcagaggcggccccagcagaagaggcgtggccctgctgagacccgagcccctgcacagaggcaccgccgacaccctgctgaacagagtgaagaagctgccctgccagatcaccagctacctggtggcccacaccctgggcagaagaatgctgtaccccggcagcgtgtacctgctgcagaaggccctgatgcccgtgctgctgcagggccaggccagactggtggaggagtgcaacggcagaagagccaagctgctggcctgcgacggcaacgagatcgacaccatgttcgtggacagaagaggcaccgccgagccccagggccagaagctggtgatctgctgcgagggcaacgccggcttctacgaggtgggctgcgtgtag

SEQ ID NO: 69724 - DNA, 438 bp, Artificial Sequence
  derived and/or modified sequence
atgctgggccactgctgctacttctggcaggtgtggcccgccagcgaggccctggccgccggccccacccccagcaccggcagcagcagccccagctggaagcagcacatcggcaccagcctgcagaagaccagaggcagcctgcccaccaccaccctgaccagcggcgccggccagagcaccagcaccggcaagaaccccgccgccggcagaagcctggagggcgccctgcccgccggcgtgtggccctgcttcgcccagagcccctgcaccggcggccagcagacccccagcagcaccggcctgagaagctgcctggtgagaagccccggcggcaagcagcagagaggcgaggcccactggggcggcggcgccatcagcggcgtgctgtgggagtgggccctgcactgcaagatcgccgtgacccactgggcctag

SEQ ID NO: 69725 - DNA, 1578 bp, Artificial Sequence
  derived and/or modified sequence
atgcccccccccgccctgttcctgagcagcctgtaccccagactggagttccagaacgacttctacagaagctgcatcagaagaagcagcccccagcccccccccaacctggcctggagacccgagagcctgtacagcggcgagctggccggcggcggctacctgagcctgagcaaggtggtgcccttcagccactacgccggcaccctgctgctgctgctggccggcgtggcctgcctgagaggcatcggcagatggaccaacccccagtacagacagttcatcaccatcctggaggccacccacagaaaccagagcagcgagaacaagagacagctggccaactacaacttcgacttcagaagctggcccgtggacttccactgggaggagcccagcagcagaaaggagagcagaggcggccccagcagaagaggcgtggccctgctgagacccgagcccctgcacagaggcaccgccgacaccctgctgaacagagtgaagaagctgccctgccagatcaccagctacctggtggcccacaccctgggcagaagaatgctgtaccccggcagcgtgtacctgctgcagaaggccctgatgcccgtgctgctgcagggccaggccagactggtggaggagtgcaacggcagaagagccaagctgctggcctgcgacggcaacgagatcgacaccatgttcgtggacagaagaggcaccgccgagccccagggccagaagctggtgatctgctgcgagggcaacgccggcttctacgaggtgggctgcgtgagcacccccctggaggccggctacagcgtgctgggctggaaccaccccggcttcgccggcagcaccggcgtgcccttcccccagaacgaggccaacgccatggacgtggtggtgcagttcgccatccacagactgggcttccagccccaggacatcatcatctacgcctggagcatcggcggcttcaccgccacctgggccgccatgagctaccccgacgtgagcgccatgatcctggacgccagcttcgacgacctggtgcccctggccctgaaggtgatgcccgacagctggagaggcctggtgaccagaaccgtgagacagcacctgaacctgaacaacgccgagcagctgtgcagataccagggccccgtgctgctgatcagaagaaccaaggacgagatcatcaccaccaccgtgcccgaggacatcatgagcaacagaggcaacgacctgctgctgaagctgctgcagcacagataccccagagtgatggccgaggagggcctgagagtggtgagacagtggctggaggccagcagccagctggaggaggccagcatctacagcagatgggaggtggaggaggactggtgcctgagcgtgctgagaagctaccaggccgagcacggccccgacttcccctggagcgtgggcgaggacatgagcgccgacggcagaagacagctggccctgttcctggccagaaagcacctgcacaacttcgaggccacccactgcacccccctgcccgcccagaacttccagatgccctggcacctgtag

SEQ ID NO: 69726 - protein, 332 aa, Artificial Sequence
  derived and/or modified sequence
MGLGPVFLLLAGIFPFAPPGAAAEPHSLRYNLTVLSWDGSVQSGFLAEVHLDGQPFLRYDRQKCRAKPQGQWAEDVLGNKTWDRETRDLTGNGKDLRMTLAHIKDQKEGLHSLQEIRVCEIHEDNSTRSSQHFYYDGELFLSQNLETEEWTVPQSSRAQTLAMNVRNFLKEDAMKTKTHYHAMHADCLQELRRYLESGVVLRRTVPPMVNVTRSEASEGNITVTCRASSFYPRNIILTWRQDGVSLSHDTQQWGDVLPDGNGTYQTWVATRICRGEEQRFTCYMEHSGNHSTHPVPSGKVLVLQSHWQTFHVSAVAAGCCYFCYYYFLCPLL

SEQ ID NO: 69727 - protein, 289 aa, Artificial Sequence
  derived and/or modified sequence
MGLGPVFLLLAGIFPFAPPGAAAEPHSLRYNLTVLSWDGSVQSGFLAEVHLDGQPFLRYDRQKCRAKPQGQWAEDVLGNKTWDRETRDLTGNGKDLRMTLAHIKDQKEVPQSSRAQTLAMNVRNFLKEDAMKTKTHYHAMHADCLQELRRYLESGVVLRRTVPPMVNVTRSEASEGNITVTCRASSFYPRNIILTWRQDGVSLSHDTQQWGDVLPDGNGTYQTWVATRICRGEEQRFTCYMEHSGNHSTHPVPSGKVLVLQSHWQTFHVSAVAAGCCYFCYYYFLCPLL

SEQ ID NO: 69728 - protein, 332 aa, Artificial Sequence
  derived and/or modified sequence
MGLGPVFLLLAGIFPFAPPGAAAEPHSLRYNLTVLSWDGSVQSGFLAEVHLDGQPFLRYDRQKCRAKPQGQWAEDVLGNKTWDRETRDLTGNGKDLRMTLAHIKDQKEGLHSLQEIRVCEIHEDNSTRSSQHFYYDGELFLSQNVETEEWTVPQSSRAQTLAMNVRNFLKEDAMKTKTHYHAMHADCLQELRRYLESSVVLRRRVPPMVNVTRSEASEGNITVTCRASSFYPRNITLTWRQDGVSLSHDTQQWGDVLPDGNGTYQTWVATRICQGEEQRFTCYMEHSGNHSTHPVPSGKVLVLQSHWQTFHVSAVAACCCYFCYYYFLCPLL

SEQ ID NO: 69729 - protein, 41 aa, Artificial Sequence
  derived and/or modified sequence
MGLGRVLLFLAVAFPFAPPAAAAVEMGFHRVSQDGLDLLTS

SEQ ID NO: 69730 - DNA, 999 bp, Artificial Sequence
  derived and/or modified sequence
atgggactaggaccggtattcctgctcctggcgggcattttcccatttgcgcccccaggcgccgcggccgagcctcactctcttaggtacaatttgacagttctctcttgggacggatccgttcagagcggattccttgcagaagtgcatctcgacggacaacctttcctgcgctatgaccgtcagaaatgcagggctaaaccacaaggccagtgggccgaggacgttttggggaacaaaacttgggacagggaaaccagagacctgactgggaacgggaaggatcttcggatgactctggcacacattaaagatcagaaggaaggcctgcattccttacaggaaattcgcgtttgtgagatccatgaagacaattcaaccagaagcagtcagcatttctattacgatggggaactctttctgtcacagaaccttgagactgaagaatggaccgtgccgcaatcatcccgagcccaaaccttggccatgaacgttcgcaactttttgaaggaagatgccatgaaaacgaagacccactaccacgctatgcacgcagattgccttcaggaattgcggaggtaccttgaatcaggtgtcgtattaagacggaccgttccgccaatggtgaacgtgaccagaagtgaggcttccgaggggaacattacagtcacctgcagagcgtcaagcttctatcctagaaatataatcctgacctggcggcaggacggtgttagcctttctcatgatacacagcagtggggagacgtactacctgatggcaacggtacctaccagacctgggtagccacccgcatctgcaggggagaggaacaacgctttacgtgttatatggagcattcaggcaatcattctacgcacccagtgcccagcggcaaagtcctagtgctccaaagtcactggcagaccttccacgtgagcgcggtagctgccggatgctgttacttctgttattattatttcctttgcccgcttctctag

SEQ ID NO: 69731 - DNA, 870 bp, Artificial Sequence
  derived and/or modified sequence
atgggcctcggaccagtattccttttattagctgggattttccctttcgcccctccaggcgcagctgctgaacctcattcgctgcggtacaatctaaccgtgctgagctgggatggatccgttcagagcgggtttctggccgaggtgcacctggatggccagccgtttttaaggtacgaccgacaaaaatgccgggcgaagcctcaggggcaatgggctgaggacgtcttgggaaataagacatgggaccgagagacccgcgatctgacaggcaacggaaaggatctccgcatgaccctcgcccacatcaaggaccagaaagaagtgccccagtcatctcgggcacagaccctggccatgaatgtacggaactttttgaaggaagatgcaatgaaaacaaagactcactaccacgcgatgcacgccgattgtctgcaagagctgaggcgctacctggaatccggggtggtgctgcgtcgaaccgtgccaccgatggtgaatgtgaccagatcagaggcttcagaaggtaacatcaccgtcacttgtcgggcttccagtttttatccccgtaatattatcttaacctggagacaggacggcgtgagcctgagccacgacacccaacagtggggagatgtgctgccagatgggaatgggacttaccaaacatgggtagcaacacggatctgccggggagaagaacaacggtttacctgctatatggaacattctggcaaccacagcactcatccggttccatccggtaaggtcctcgtgcttcagtctcattggcagactttccacgtgtccgccgtcgcagcaggttgttgctatttctgttactactacttcctttgccctctcctctag

SEQ ID NO: 69732 - DNA, 870 bp, Artificial Sequence
  derived and/or modified sequence
atggggctcgggcccgtattcctcctgctagccggtatttttccctttgcacctcctggagcagccgcggagccccatagtctgaggtacaatctgaccgtgctgagttgggacgggtcagtccagtcaggcttcctggccgaagtccacctggacggccagccctttttgcgctacgatcgccaaaagtgcagggccaagcctcaaggacagtgggcagaggacgtattgggtaacaagacctgggacagggaaactcgggacctcacaggcaacggaaaagacttacggatgaccctagcgcacattaaagatcagaaggaagtgccccagagttctcgtgctcagactcttgctatgaatgtgcggaacttcctgaaggaggatgcaatgaaaaccaagacacactaccacgcgatgcatgctgactgtcttcaagagttacgcaggtatcttgaatcaggcgtcgttctgcggcggactgtgccgccaatggtcaacgtcactcggagtgaagcgagtgagggcaacataaccgtgacctgccgcgcctcttccttctaccccaggaatatcatcctaacttggagacaagacggcgtgagcctcagccacgacacccagcagtggggtgatgtcctccccgatggaaacgggacttaccagacctgggtagccactcggatatgccgaggagaggaacagcgcttcacctgttatatggagcattctggcaaccacagtactcaccccgtcccctctggtaaggtcctggtcctgcaatcgcattggcaaacatttcatgtgtctgcggttgctgctgggtgctgctatttctgttattattatttcctctgccccctcctgtag

SEQ ID NO: 69733 - DNA, 999 bp, Artificial Sequence
  derived and/or modified sequence
atggggctgggacctgtatttctcctgctcgcagggatctttccatttgcaccacctggagcagctgctgagccacatagccttagatacaacctgacagtcctgtcctgggacggtagcgtgcagtccggtttcctggccgaggtgcacctcgacggtcaacccttccttcgctacgacaggcagaagtgcagagccaaaccccagggccagtgggccgaggatgtgctaggtaataagacatgggatagggagaccagagatcttaccggcaatggcaaagatctccggatgacactggcacacattaaagatcagaaagaagggctgcacagtctgcaggagatccgcgtctgcgagattcacgaagataactcaaccaggagctcacagcacttctactacgatggcgagctgtttctgagtcagaatctggagactgaggagtggaccgtcccccagtcatccagggcccagacactggccatgaacgtacggaactttctaaaggaggatgccatgaaaacaaaaactcattaccatgccatgcacgctgattgcctgcaggaacttcgcagatacttggagtcgggggtggtgcttaggagaactgtgccaccaatggtcaacgtaacccgaagcgaggcctccgaaggtaatataaccgtgacatgccgcgcatcctcgttctacccccgcaacattattttaacctggcggcaggacggggtctccttatcacatgacacacagcaatggggcgatgtgctccccgacggcaacggaacctaccagacatgggtagcgacacgaatatgccgcggtgaggagcagcgctttacttgctacatggagcactcaggaaaccacagcacacatcctgttccttctggtaaagttctcgttctgcagtctcattggcagactttccacgtgagtgcagttgcagctggttgctgttatttttgctactattacttcctgtgtcccttgctgtag

SEQ ID NO: 69734 - DNA, 999 bp, Artificial Sequence
  derived and/or modified sequence
atgggtcttgggccggtgttcttgctgctggcgggaatcttcccattcgctccccccggagcagccgccgagccccatagcctccgctataacctaacagtgctgtcgtgggacggttctgtgcaaagcgggttcctcgccgaggtgcacctggacgggcaacccttcctgcggtacgatagacagaagtgccgcgccaagccccagggacagtgggctgaggacgttttaggaaacaagacatgggatagagagaccagggatctgaccggaaacggcaaggatcttcgtatgacactcgcgcacatcaaggaccaaaaggaaggattgcattccctgcaggagatcagggtttgcgaaatacacgaggacaactctactagaagcagtcagcatttttactacgacggagaactgttcttgtcccagaatctcgaaactgaggagtggactgtgcctcagtcctctcgtgctcagacgctggctatgaatgtcagaaacttcctcaaggaagacgccatgaagacaaagacgcactatcacgctatgcatgccgactgtctgcaggagttgcggaggtatctggagtccggtgtagtcttacggagaacagttccccctatggtgaatgtgactcgatcagaggccagcgaagggaatattacagttacctgccgcgccagcagcttctatcctaggaacatcatactgacatggcggcaggacggagttagtctgtctcatgatacccagcagtggggcgacgtgcttccggacggcaacgggacctatcaaacgtgggttgctacaagaatttgccgcggagaggaacagagatttacgtgctacatggaacactctgggaaccacagtacccatcccgtgccatctggcaaagtgctggtgttgcagtcccactggcagacatttcacgtctcggcagttgccgcgggctgctgttatttctgctactactattttctctgccctctgctgtag

SEQ ID NO: 69735 - DNA, 870 bp, Artificial Sequence
  derived and/or modified sequence
atggggctcggtccggtgttcctgctactggccggtatctttccgttcgctccaccgggtgccgccgctgagcctcattccctgcggtataaccttaccgtgctttcatgggacggctctgtgcagagcggctttctggctgaggtccacctcgatgggcagccattcttgaggtatgatcggcaaaaatgccgagcaaagcctcagggtcagtgggctgaggatgtgctgggcaataaaacttgggatagagagacacgagacctgactggtaacggcaaagatttgcgcatgacgctggcgcatattaaggatcagaaggaagtgccccaaagcagccgagctcagacattagcaatgaatgtccggaatttcctgaaagaggacgctatgaaaaccaagacacattaccacgctatgcatgctgattgtttacaggagctccgacggtatctggaatctggggtcgtcttgcggaggactgtgccacccatggttaacgtgacccgcagtgaagcatcagaaggaaatattaccgttacttgtcgagcgtccagcttctatcctcgcaacatcatactgacatggcgccaggacggggtgtcactgtcccatgacacccagcagtggggcgacgtactgccggatggaaatgggacataccaaacttgggttgcgacccgtatctgccggggggaggagcaacgatttacatgttacatggagcactctggcaaccatagcactcatcctgtcccctctgggaaagtgctggtgctccagtcccactggcaaaccttccacgtgagcgcggtagctgcaggctgctgctacttttgttactattactttctgtgtccattactgtag

SEQ ID NO: 69736 - DNA, 999 bp, Artificial Sequence
  derived and/or modified sequence
atgggcctcgggcccgtgttcctgctcctcgccggtatcttcccctttgcaccgcctggcgccgctgccgagccgcatagcctgcgctacaatctgactgtcctgagctgggacggttcagtacaaagcggctttctggccgaagtgcacctggacggacaacccttcttaaggtacgacaggcagaaatgtcgagcaaagcctcaggggcagtgggccgaggacgtgttaggcaacaagacttgggatcgggagacaagggacctcactgggaatggaaaggatctgaggatgaccctcgcccatattaaagaccagaaagaaggcctccactccctgcaggaaatacgagtgtgtgaaatccacgaagacaactctacgcggtccagtcagcacttctattatgacggcgagctgttcctgagtcagaatctggagactgaagaatggactgtgccacagagcagcagagcacagaccttagccatgaatgtaaggaatttcctgaaggaggatgcgatgaagacaaaaacacattaccacgcaatgcacgcagactgcctgcaggagctccgccgatacctcgagtccggcgtcgtgctgagaaggacggtgccccccatggtaaacgtgactcgatctgaggcctccgagggaaacattaccgtaacctgccgagcaagttctttttatcccagaaatattatcctgacctggaggcaagatggagtgtccctttcccacgatacacaacagtggggtgacgtcctgcctgatggtaatggtacgtaccagacctgggtcgctaccagaatatgtcgcggagaagaacagaggttcacctgctacatggagcacagtgggaatcatagcactcatcctgttccgtctggaaaggtgcttgtcctgcagagccattggcagaccttccacgtgtcagccgtcgccgccggctgctgttatttctgttattactacttcctctgccccttactctag

SEQ ID NO: 69737 - DNA, 999 bp, Artificial Sequence
  derived and/or modified sequence
atgggcctagggcctgttttccttttactcgctggcatttttccgtttgctccgcccggggcagctgcggagccccatagcctgcggtataatctgacggtgctgtcttgggatggatctgttcagagcggatttctggctgaggtccacctggacggtcagcctttcttaagatatgaccgccagaagtgtcgcgcaaagccccagggacagtgggctgaggacgtgctcggcaataagacctgggatagagaaacccgggacctcacaggaaacgggaaagatttgagaatgactttggcacacatcaaggaccagaaggagggcctgcactccctgcaggaaatcagggtttgcgaaatccatgaggacaattccactcggagctcccagcatttctattacgacggagagctgttcctctctcagaatctagagacagaggaatggacagtaccacagtcctcacgggcgcaaacactcgctatgaatgtgcgcaacttcctgaaagaggatgccatgaagaccaagacccactaccacgcaatgcacgctgactgtcttcaggagctgcgccgctatctggagtcaggggtggtgctgagacggactgttcccccaatggtaaatgttaccaggtcagaagcctccgaaggcaatatcactgtcacttgtagagcatcctctttctacccaagaaatattattcttacctggcgccaagatggcgtttccctttcacacgacactcagcaatggggggatgtcttgcctgatgggaacggaacatatcaaacatgggtagccacaagaatttgccgaggcgaagaacagaggttcacctgttacatggaacattccggcaatcattccacccatccagtcccctccggaaaagttctggtcctccagtctcactggcaaaccttccatgtatcggccgtcgccgccggatgttgctacttctgctactattacttcctatgccctctgctctag

SEQ ID NO: 69738 - DNA, 999 bp, Artificial Sequence
  derived and/or modified sequence
atgggattaggccctgtcttcctccttctcgccggcattttccccttcgcacccccaggtgcagccgcagagccgcacagcttgagatataacttgaccgtcctgtcttgggacggctctgtgcaatccggcttcttggccgaggtccatctggacggacagcccttcctccgctatgatcgccagaaatgccgggccaagccacaggggcaatgggctgaggatgtgctgggaaacaagacctgggatagggaaacaagggacttgactggcaacggtaaggaccttaggatgaccctggctcatatcaaggaccaaaaggaggggctgcactccctgcaggagattcgcgtgtgtgaaattcacgaggacaatagcacccgttcaagccagcacttctactacgacggggagctcttcctgtcccaaaacctggagacagaggagtggaccgtgccccagtcttcccgtgctcagaccctcgctatgaatgttcggaattttctgaaggaagatgcaatgaaaaccaagacacactaccatgctatgcacgcagattgtttgcaggaactgagaagatacctcgaatcaggcgtggtgttgagaagaaccgtaccccccatggtgaatgtcacaaggtccgaggcgtcggaagggaacatcaccgtgacctgccgcgcatcatccttttaccctaggaatattatccttacttggcgacaggatggagtctctctgtcccacgatactcaacagtggggcgatgttctgcccgacggcaacggaacctaccaaacctgggtggccacgagaatttgccggggggaggagcagagatttacttgctacatggaacacagcgggaaccacagcactcaccccgtgccatcaggcaaagtgttggtcttacagagccactggcagaccttccacgtgtccgctgtcgcggccggatgttgctatttctgctactattattttctttgccccctgctgtag

SEQ ID NO: 69739 - DNA, 999 bp, Artificial Sequence
  derived and/or modified sequence
atgggtttggggcccgtatttcttctgttagcgggcattttcccattcgccccccctggcgctgccgcagaaccccactccctccgatataacctgaccgtcctgagttgggatggaagcgttcagagcggtttccttgctgaagtccacttggacgggcagcccttcctgagatatgatcggcaaaaatgccgtgccaagcctcagggtcagtgggctgaggatgtactgggcaataaaacttgggacagagaaaccagagacctcacaggcaatgggaaggatctgagaatgacgctcgcccatataaaggaccagaaagaggggcttcactcactccaggaaatccgagtatgcgaaattcatgaggataactccacccggagtagtcagcacttttactacgacggtgaactgtttctaagtcagaatgtggaaacggaagagtggaccgtgccccagtcgtccagagctcagactctggcaatgaacgtgaggaacttcttgaaggaagacgccatgaaaaccaaaacacactatcacgcgatgcacgcagactgcctgcaggagctcagaagatatctggaaagtagtgtggtactaagacggcgtgtgcccccaatggtgaacgtgacaaggtctgaggctagtgaaggcaacatcacagtgacgtgtcgggcatcttccttctatccccgcaacattaccctcacctggcgccaggatggagtttcactctcccatgatacccagcaatggggcgatgtgctgcctgatggtaatggaacctatcagacctgggtggctacacgcatttgtcaaggagaagaacagcgctttacatgctacatggaacattctggcaatcactccacccacccggttccatctgggaaagtactggtactgcagtcacactggcagacattccacgtttcagcggtcgcggcatgttgctgttatttttgctactactatttcttatgtcctctcttgtag

SEQ ID NO: 69740 - DNA, 999 bp, Artificial Sequence
  derived and/or modified sequence
atgggcctgggccctgtgttcctgctgctggccggcatcttcccctttgcccctcctggagctgctgctgagccccacagcctgcgctacaacctgactgtgctgtcctgggatggctctgtgcagagcggcttcctggccgaggtgcacctggatggccagcccttcctgcgctatgaccggcagaagtgccgggccaagccccagggccagtgggccgaggatgtgctgggcaacaagacctgggaccgggagacccgggacctgactggaaatggcaaggacctgaggatgaccctggcccacatcaaggaccagaaggagggcctgcacagcctgcaggagatccgggtgtgtgagatccacgaggacaacagcaccaggagcagccagcacttctactatgatggagagctgttcctgagccagaacctggagacagaggagtggacagtgccccagagcagccgggcccagaccctggccatgaatgtgaggaacttcctgaaggaggatgccatgaagaccaagacccactaccacgccatgcatgctgactgcctgcaggagctgcggcgctacctggagagcggcgtggtgctgcggaggacagtgccccccatggtgaatgtgaccaggtctgaggccagcgagggcaacatcaccgtgacctgccgggccagcagcttctaccccaggaacatcatcctgacctggaggcaggatggagtgtccctgagccatgacacccagcagtggggagatgtgctgcctgatggaaatggcacctaccagacctgggtggccacccgcatctgccgcggggaggagcagcgcttcacctgctacatggagcacagcggcaaccacagcacccaccctgtgcccagcggcaaggtgctggtgctgcagagccactggcagaccttccacgtgtctgctgtggccgccggctgctgctacttctgctactactacttcctgtgccccctgctgtag

SEQ ID NO: 69741 - DNA, 870 bp, Artificial Sequence
  derived and/or modified sequence
atgggcctgggccctgtgttcctgctgctggccggcatcttcccctttgcccctcctggagctgctgctgagccccacagcctgcgctacaacctgactgtgctgtcctgggatggctctgtgcagagcggcttcctggccgaggtgcacctggatggccagcccttcctgcgctatgaccggcagaagtgccgggccaagccccagggccagtgggccgaggatgtgctgggcaacaagacctgggaccgggagacccgggacctgactggaaatggcaaggacctgaggatgaccctggcccacatcaaggaccagaaggaggtgccccagagcagccgggcccagaccctggccatgaatgtgaggaacttcctgaaggaggatgccatgaagaccaagacccactaccacgccatgcacgccgactgcctgcaggagctgcggcgctacctggagagcggcgtggtgctgcggaggacagtgccccccatggtgaatgtgaccaggtctgaggccagcgagggcaacatcaccgtgacctgccgggccagcagcttctaccccaggaacatcatcctgacctggaggcaggatggagtgtccctgagccatgacacccagcagtggggagatgtgctgcctgatggaaatggcacctaccagacctgggtggccacccgcatctgccgcggggaggagcagcgcttcacctgctacatggagcacagcggcaaccacagcacccaccctgtgcccagcggcaaggtgctggtgctgcagagccactggcagaccttccacgtgtctgctgtggccgccggctgctgctacttctgctactactacttcctgtgccccctgctgtag

SEQ ID NO: 69742 - DNA, 999 bp, Artificial Sequence
  derived and/or modified sequence
atgggcctgggccctgtgttcctgctgctggccggcatcttcccctttgcccctcctggagctgctgctgagccccacagcctgcgctacaacctgactgtgctgtcctgggatggctctgtgcagagcggcttcctggccgaggtgcacctggatggccagcccttcctgcgctatgaccggcagaagtgccgggccaagccccagggccagtgggccgaggatgtgctgggcaacaagacctgggaccgggagacccgggacctgactggaaatggcaaggacctgaggatgaccctggcccacatcaaggaccagaaggagggcctgcacagcctgcaggagatccgggtgtgtgagatccacgaggacaacagcaccaggagcagccagcacttctactatgatggagagctgttcctgagccagaatgtggagacagaggagtggacagtgccccagagcagccgggcccagaccctggccatgaatgtgaggaacttcctgaaggaggatgccatgaagaccaagacccactaccacgccatgcatgctgactgcctgcaggagctgcggcgctacctggagagctctgtggtgctgcggaggagagtgccccccatggtgaatgtgaccaggtctgaggccagcgagggcaacatcaccgtgacctgccgggccagcagcttctaccccaggaacatcaccctgacctggaggcaggatggagtgtccctgagccatgacacccagcagtggggagatgtgctgcctgatggaaatggcacctaccagacctgggtggccacccgcatctgccagggcgaggagcagcgcttcacctgctacatggagcacagcggcaaccacagcacccaccctgtgcccagcggcaaggtgctggtgctgcagagccactggcagaccttccacgtgtctgctgtggccgcctgctgctgctacttctgctactactacttcctgtgccccctgctgtag

SEQ ID NO: 69743 - DNA, 1735 bp, Artificial Sequence
  derived and/or modified sequence
gtcgcctctgtgctcgctagtcaagtgaaacagtgggagtgaagaagaaacaaagacatctataactggttgtgatcaattagttgtaaacactgcactcagaccagcctgggaagattttaaggatatggtgtggtctgatgggttccaaggcagaggttacaatagcctggaagagggagactgcttaggcagtggcatcctggtgggatagggtctccagcccactggaattttctcttccaagcgtggccccgccctctccgctcgtgattggccctaagttccgggccccagtttcattggatgagcggtcgggggaccgggccaggtgactaagtttccgcggcgccttctccccggccactgcttgagccgctgagagggtggcgacgtcggggccatggggctgggcccggtctttctgcttctggctggcatcttcccttttgcacctccgggagctgctgctgagccccacagtcttcgttataacctcacggtgctgtcctgggatggatctgtgcagtcagggtttcttgctgaggtacatctggatggtcagcccttcctgcgctatgacaggcagaaatgcagggcaaagccccagggacagtgggcagaagatgtcctgggaaataagacatgggacagagagaccagggacttgacagggaacggaaaggacctcaggatgaccctggctcatatcaaggaccagaaagaaggcttgcattccctccaggagattagggtctgtgagatccatgaagacaacagcaccaggagctcccagcatttctactacgatggggagctcttcctctcccaaaacctggagactgaggaatggacagtgccccagtcctccagagctcagaccttggccatgaacgtcaggaatttcttgaaggaagatgccatgaagaccaagacacactatcacgctatgcatgcagactgcctgcaggaactacggcgatatctagaatccggcgtagtcctgaggagaacagtgccccccatggtgaatgtcacccgcagcgaggcctcagagggcaacatcaccgtgacatgcagggcttccagcttctatccccggaatatcatactgacctggcgtcaggatggggtatctttgagccacgacacccagcagtggggggatgtcctgcctgatgggaatggaacctaccagacctgggtggccaccaggatttgccgaggagaggagcagaggttcacctgctacatggaacacagcgggaatcacagcactcaccctgtgccctctgggaaagtgctggtgcttcagagtcattggcagacattccatgtttctgctgttgctgctggctgctgctatttttgttattattattttctatgtccgttgttgtaagaagaaaacatcagctgcagagggtccagagctcgtgagcctgcaggtcctggatcaacacccagttgggacgagtgaccacagggatgccacacagctcggatttcagcctctgatgtcagctcttgggtccactggctccactgagggcacctagactctacagccaggcggctggaattgaattccctgcctggatctcacaagcactttccctcttggtgcctcagtttcctgacctatgaaacagagaaaataaaagcacttatttattgttgttggaggctgcaaaatgttagtagatatgaggcatttgcagctgtgccatattaa

SEQ ID NO: 69744 - DNA, 2221 bp, Artificial Sequence
  derived and/or modified sequence
agcggtcgggggaccgggccaggtgactaagtttccgcggcgccttctccccggccactgcttgagccgctgagagggtggcgacgtcggggccatggggctgggcccggtctttctgcttctggctggcatcttcccttttgcacctccgggagctgctgctgagccccacagtcttcgttataacctcacggtgctgtcctgggatggatctgtgcagtcagggtttcttgctgaggtacatctggatggtcagcccttcctgcgctatgacaggcagaaatgcagggcaaagccccagggacagtgggcagaagatgtcctgggaaataagacatgggacagagagaccagggacttgacagggaacggaaaggacctcaggatgaccctggctcatatcaaggaccagaaagaagtgccccagtcctccagagctcagaccttggccatgaacgtcaggaatttcttgaaggaagatgccatgaagaccaagacacactatcacgctatgcatgcagactgcctgcaggaactacggcgatatctagaatccggcgtagtcctgaggagaacagtgccccccatggtgaatgtcacccgcagcgaggcctcagagggcaacatcaccgtgacatgcagggcttccagcttctatccccggaatatcatactgacctggcgtcaggatggggtatctttgagccacgacacccagcagtggggggatgtcctgcctgatgggaatggaacctaccagacctgggtggccaccaggatttgccgaggagaggagcagaggttcacctgctacatggaacacagcgggaatcacagcactcaccctgtgccctctgggaaagtgctggtgcttcagagtcattggcagacattccatgtttctgctgttgctgctggctgctgctatttttgttattattattttctatgtccgttgttgtaagaagaaaacatcagctgcagagggtccagagctcgtgagcctgcaggtcctggatcaacacccagttgggacgagtgaccacagggatgccacacagctcggatttcagcctctgatgtcagctcttgggtccactggctccactgagggcacctagactctacagccaggcggctggaattgaattccctgcctggatctcacaagcactttccctcttggtgcctcagtttcctgacctatgaaacagagaaaataaaagcacttatttattgttgttggaggctgcaaaatgttagtagatatgaggcatttgcagctgtgccatattaattggtgtcattgtttttgttgttttcgtattattattttttttttttaagacagagtctcaggccaggcacggtggctcacgcctgtaatcccaacactttgggaggccgaggcgggcggatcacaaggtcaagagatcgagaccatcctgatcaacatggtgaaaccctgtctctactaaaaatacaaaaaattagctgggcctggtggcgtgtgcctgtagtcccagctactcaggagctgaggcaggaaaatcacttgaacctgggaggtggaggttgcagtgagctgagatcacaccactgcactccagcctggcgacagagcgagactctgtctcaaaaaaaaaaaaaaaaaaagacagagtctcactctgtcacccaggctgcagttcagtgacatgatctcagctcgttgcagcctccgcctcccgggttcaagcacttctcttgcctcagcctcccgagtagctggggttacagacatgcaccaccatacccggctaatttttgcatttttcatagagacaggattttgccatgttggccaggctggtctcaaactcctgacctcaggtgatctgcctgcctcagcctcccaaagtgctgggattacaagcatgagccaccatacccggcctattttattacattttaatttattttattttattatatcatccaccatgtctggcctattttattatattttaagatattttaatatattacgtgtgttgtaattggattatcatcggtgagctttgtgagtgagtgtcttggagatgactcctcctgaccagcccaggaccagctttcttgtcaccttgaggtcccctcgccccatcacactcttacgcattactctatgtctactgttatgggtgtgtaattttataccatagatgtttactctttaaacaga

SEQ ID NO: 69745 - DNA, 2221 bp, Artificial Sequence
  derived and/or modified sequence
agcggtcgggggaccgggccaggtgactaagtttccgcggcgccttctccccggccactgcttgagccgctgagagggtggcgacgtcggggccatggggctgggcccggtcttcctgcttctggctggcatcttcccttttgcacctccgggagctgctgctgagccccacagtcttcgttataacctcacggtgctgtcctgggatggatctgtgcagtcagggtttcttgctgaggtacatctggatggtcagcccttcctgcgctatgacaggcagaaatgcagggcaaagccccagggacagtgggcagaagatgtcctgggaaataagacatgggacagagagaccagggacttgacagggaacggaaaggacctcaggatgaccctggctcatatcaaggaccagaaagaagtgccccagtcctccagagctcagaccttggccatgaacgtcaggaatttcttgaaggaagatgccatgaagaccaagacacactatcacgctatgcatgcagactgcctgcaggaactacggcgatatctagaatccggcgtagtcctgaggagaacagtgccccccatggtgaatgtcacccgcagcgaggcctcagagggcaacatcaccgtgacatgcagggcttccagcttctatccccggaatatcatactgacctggcgtcaggatggggtatctttgagccacgacacccagcagtggggggatgtcctgcctgatgggaatggaacctaccagacctgggtggccaccaggatttgccgaggagaggagcagaggttcacctgctacatggaacacagcgggaatcacagcactcaccctgtgccctctgggaaagtgctggtgcttcagagtcattggcagacattccatgtttctgctgttgctgctggctgctgctatttttgttattattattttctatgtccgttgttgtaagaagaaaacatcagctgcagagggtccagagctcgtgagcctgcaggtcctggatcaacacccagttgggacgagtgaccacagggatgccacacagctcggatttcagcctctgatgtcagctcttgggtccactggctccactgagggcacctagactctacagccaggcggctggaattgaattccctgcctggatctcacaagcactttccctcttggtgcctcagtttcctgacctatgaaacagagaaaataaaagcacttatttattgttgttggaggctgcaaaatgttagtagatatgaggcatttgcagctgtgccatattaattggtgtcattgtttttgttgttttcgtattattattttttttttttaagacagagtctcaggccaggcacggtggctcacgcctgtaatcccaacactttgggaggccgaggcgggcggatcacaaggtcaagagatcgagaccatcctgatcaacatggtgaaaccctgtctctactaaaaatacaaaaaattagctgggcctggtggcgtgtgcctgtagtcccagctactcaggagctgaggcaggaaaatcacttgaacctgggaggtggaggttgcagtgagctgagatcacaccactgcactccagcctggcgacagagcgagactctgtctcaaaaaaaaaaaaaaaaaaagacagagtctcactctgtcacccaggctgcagttcagtgacatgatctcagctcgttgcagcctccgcctcccgggttcaagcacttctcttgcctcagcctcccgagtagctggggttacagacatgcaccaccatacccggctaatttttgcatttttcatagagacaggattttgccatgttggccaggctggtctcaaactcctgacctcaggtgatctgcctgcctcagcctcccaaagtgctgggattacaagcatgagccaccatacccggcctattttattacattttaatttattttattttattatatcatccaccatgtctggcctattttattatattttaagatattttaatatattacgtgtgttgtaattggattatcatcggtgagctttgtgagtgagtgtcttggagatgactcctcctgaccagcccaggaccagctttcttgtcaccttgaggtcccctcgccccatcacactcttacgcattactctatgtctactgttatgggtgtgtaattttataccatagatgtttactctttaaacaga

SEQ ID NO: 69746 - DNA, 1735 bp, Artificial Sequence
  derived and/or modified sequence
gtcgcctctgtgctcgctagtcaagtgaaacagtgggagtgaagaagaaacaaagacatctataactggttgtgatcaattagttgtaaacactgcactcagaccagcctgggaagattttaaggatatggtgtggtctgatgggttccaaggcagaggttacaatagcctggaagagggagactgcttaggcagtggcatcctggtgggatagggtctccagcccactggaattttctcttccaagcgtggccccgccctctccgctcgtgattggccctaagttccgggccccagtttcattggatgagcggtcgggggaccgggccaggtgactaagtttccgcggcgccttctccccggccactgcttgagccgctgagagggtggcgacgtcggggccatggggctgggcccggtcttcctgcttctggctggcatcttcccttttgcacctccgggagctgctgctgagccccacagtcttcgttataacctcacggtgctgtcctgggatggatctgtgcagtcagggtttcttgctgaggtacatctggatggtcagcccttcctgcgctatgacaggcagaaatgcagggcaaagccccagggacagtgggcagaagatgtcctgggaaataagacatgggacagagagaccagggacttgacagggaacggaaaggacctcaggatgaccctggctcatatcaaggaccagaaagaaggcttgcattccctccaggagattagggtctgtgagatccatgaagacaacagcaccaggagctcccagcatttctactacgatggggagctcttcctctcccaaaacctggagactgaggaatggacagtgccccagtcctccagagctcagaccttggccatgaacgtcaggaatttcttgaaggaagatgccatgaagaccaagacacactatcacgctatgcatgcagactgcctgcaggaactacggcgatatctagaatccggcgtagtcctgaggagaacagtgccccccatggtgaatgtcacccgcagcgaggcctcagagggcaacatcaccgtgacatgcagggcttccagcttctatccccggaatatcatactgacctggcgtcaggatggggtatctttgagccacgacacccagcagtggggggatgtcctgcctgatgggaatggaacctaccagacctgggtggccaccaggatttgccgaggagaggagcagaggttcacctgctacatggaacacagcgggaatcacagcactcaccctgtgccctctgggaaagtgctggtgcttcagagtcattggcagacattccatgtttctgctgttgctgctggctgctgctatttttgttattattattttctatgtccgttgttgtaagaagaaaacatcagctgcagagggtccagagctcgtgagcctgcaggtcctggatcaacacccagttgggacgagtgaccacagggatgccacacagctcggatttcagcctctgatgtcagctcttgggtccactggctccactgagggcacctagactctacagccaggcggctggaattgaattccctgcctggatctcacaagcactttccctcttggtgcctcagtttcctgacctatgaaacagagaaaataaaagcacttatttattgttgttggaggctgcaaaatgttagtagatatgaggcatttgcagctgtgccatattaa

SEQ ID NO: 69747 - DNA, 1369 bp, Artificial Sequence
  derived and/or modified sequence
cactgcttgagccgctgagagggtggcgacgtcggggccatggggctgggcccggtctttctgcttctggctggcatcttcccttttgcacctccgggagctgctgctgagccccacagtcttcgttataacctcacggtgctgtcctgggatggatctgtgcagtcagggtttcttgctgaggtacatctggatggtcagcccttcctgcgctatgacaggcagaaatgcagggcaaagccccagggacagtgggcagaagatgtcctgggaaataagacatgggacagagagaccagggacttgacagggaacggaaaggacctcaggatgaccctggctcatatcaaggaccagaaagaaggcttgcattccctccaggagattagggtctgtgagatccatgaagacaacagcaccaggagctcccagcatttctactacgatggggagctcttcctctcccaaaacctggagactgaggaatggacagtgccccagtcctccagagctcagaccttggccatgaacgtcaggaatttcttgaaggaagatgccatgaagaccaagacacactatcacgctatgcatgcagactgcctgcaggaactacggcgatatctagaatccggcgtagtcctgaggagaacagtgccccccatggtgaatgtcacccgcagcgaggcctcagagggcaacatcaccgtgacatgcagggcttccagcttctatccccggaatatcatactgacctggcgtcaggatggggtatctttgagccacgacacccagcagtggggggatgtcctgcctgatgggaatggaacctaccagacctgggtggccaccaggatttgccgaggagaggagcagaggttcacctgctacatggaacacagcgggaatcacagcactcaccctgtgccctctgggaaagtgctggtgcttcagagtcattggcagacattccatgtttctgctgttgctgctggctgctgctatttttgttattattattttctatgtccgttgttgtaagaagaaaacatcagctgcagagggtccagagctcgtgagcctgcaggtcctggatcaacacccagttgggacgagtgaccacagggatgccacacagctcggatttcagcctctgatgtcagctcttgggtccactggctccactgagggcacctagactctacagccaggcggctggaattgaattccctgcctggatctcacaagcactttccctcttggtgcctcagtttcctgacctatgaaacagagaaaataaaagcacttatttattgttgttggaggctgcaaaatgttagtagatatgaggcatttgcagctgtgccatatt

SEQ ID NO: 69748 - DNA, 1369 bp, Artificial Sequence
  derived and/or modified sequence
cactgcttgagccgctgagagggtggcgacgtcggggccatggggctgggcccggtcttcctgcttctggctggcatcttcccttttgcacctccgggagctgctgctgagccccacagtcttcgttataacctcacggtgctgtcctgggatggatctgtgcagtcagggtttcttgctgaggtacatctggatggtcagcccttcctgcgctatgacaggcagaaatgcagggcaaagccccagggacagtgggcagaagatgtcctgggaaataagacatgggacagagagaccagggacttgacagggaacggaaaggacctcaggatgaccctggctcatatcaaggaccagaaagaaggcttgcattccctccaggagattagggtctgtgagatccatgaagacaacagcaccaggagctcccagcatttctactacgatggggagctcttcctctcccaaaacctggagactgaggaatggacagtgccccagtcctccagagctcagaccttggccatgaacgtcaggaatttcttgaaggaagatgccatgaagaccaagacacactatcacgctatgcatgcagactgcctgcaggaactacggcgatatctagaatccggcgtagtcctgaggagaacagtgccccccatggtgaatgtcacccgcagcgaggcctcagagggcaacatcaccgtgacatgcagggcttccagcttctatccccggaatatcatactgacctggcgtcaggatggggtatctttgagccacgacacccagcagtggggggatgtcctgcctgatgggaatggaacctaccagacctgggtggccaccaggatttgccgaggagaggagcagaggttcacctgctacatggaacacagcgggaatcacagcactcaccctgtgccctctgggaaagtgctggtgcttcagagtcattggcagacattccatgtttctgctgttgctgctggctgctgctatttttgttattattattttctatgtccgttgttgtaagaagaaaacatcagctgcagagggtccagagctcgtgagcctgcaggtcctggatcaacacccagttgggacgagtgaccacagggatgccacacagctcggatttcagcctctgatgtcagctcttgggtccactggctccactgagggcacctagactctacagccaggcggctggaattgaattccctgcctggatctcacaagcactttccctcttggtgcctcagtttcctgacctatgaaacagagaaaataaaagcacttatttattgttgttggaggctgcaaaatgttagtagatatgaggcatttgcagctgtgccatatt

SEQ ID NO: 69749 - DNA, 1369 bp, Artificial Sequence
  derived and/or modified sequence
cactgcttgagccgctgagagggtggcgacgtcggggccatggggctgggcccggtcttcctgcttctggctggcatcttcccttttgcacctccgggagctgctgctgagccccacagtcttcgttataacctcacggtgctgtcctgggatggatctgtgcagtcagggtttcttgctgaggtacatctggatggtcagcccttcctgcgctatgacaggcagaaatgcagggcaaagccccagggacagtgggcagaagatgtcctgggaaataagacatgggacagagagaccagggacttgacagggaacggaaaggacctcaggatgaccctggctcatatcaaggaccagaaagaaggcttgcattccctccaggagattagggtctgtgagatccatgaagacaacagcaccaggagctcccagcatttctactacgatggggagctcttcctctcccaaaacgtggagactgaggaatggacagtgccccagtcctccagagctcagaccttggccatgaacgtcaggaatttcttgaaggaagatgccatgaagaccaagacacactatcacgctatgcatgcagactgcctgcaggaactacggcgatatctagaatccagcgtagtcctgaggagaagagtgccccccatggtgaatgtcacccgcagcgaggcctcagagggcaacatcaccgtgacatgcagggcttccagcttctatccccggaatatcacactgacctggcgtcaggatggggtatctttgagccacgacacccagcagtggggggatgtcctgcctgatgggaatggaacctaccagacctgggtggccaccaggatttgccaaggagaggagcagaggttcacctgctacatggaacacagcgggaatcacagcactcaccctgtgccctctgggaaagtgctggtgcttcagagtcattggcagacattccatgtttctgctgttgctgcttgctgctgctatttttgttattattattttctatgtccgttgttgtaagaagaaaacatcagctgcagagggtccagagctcgtgagcctgcaggtcctggatcaacacccagttgggacgagtgaccacagggatgccacacagctcggatttcagcctctgatgtcagctcttgggtccactggctccactgagggcgcctagactctacagccaggcggctggaattgaattccctgcctggatctcacaagcactttccctcttggtgcctcagtttcctgacctatgaaacagagaaaataaaagcacttatttattgttgttggaggctgcaaaatgttagtagatatgaggcatttgcagctgtgccatatt

SEQ ID NO: 69750 - DNA, 999 bp, Artificial Sequence
  derived and/or modified sequence
atgggcctgggccccgtgttcctgctgctggccggcatcttcccctttgcaccaccaggcgcagctgctgagccccacagtctacggtacaatctgacagtgctcagctgggatgggagcgtgcagtctggtttcctcgcagaggtccatttggatggacaaccattcctgcggtacgaccgtcagaagtgtcgagctaaaccacaaggccaatgggccgaagacgtgctggggaacaaaacctgggaccgggagacccgggatttaacggggaacggcaaggaccttagaatgacgctggcccatatcaaagaccagaaggaggggctgcactctcttcaagaaatccgcgtatgcgagatccacgaggacaactcaactcggtcatcacaacacttctactacgatggagagcttttcctgagccagaatctggagacggaagaatggaccgtgccccagtcaagcagagcccagactcttgccatgaatgtccgcaatttcttgaaagaagacgccatgaagaccaaaacccattaccacgcaatgcacgctgattgcctgcaagaacttcgacgatacctcgagagtggagtcgtgttgcggagaaccgtcccaccaatggtcaacgtgacacggagtgaggcatcagaggggaacattacagtgacttgccgggctagttctttctaccctcgcaacataattctgacctggagacaggacggcgtgagtctcagccacgatacacagcagtggggcgacgttctacccgacggaaatggcacctatcagacatgggtggcaacaaggatttgcagaggtgaagagcagagatttacttgctacatggaacactccgggaatcacagtacacaccctgtgccctcagggaaggtgctggtcctacagtctcattggcaaaccttccatgtgtccgcggttgcagcagggtgctgttacttctgttactactacttcctgtgccctctgttgtag

SEQ ID NO: 69751 - DNA, 870 bp, Artificial Sequence
  derived and/or modified sequence
atgggcctgggccccgtgttcctgctgctggccggcatcttccccttcgccccccccggcgccgccgcagagccccatagtcttagatataatttaactgtcttgagttgggacggaagcgtgcaatctggatttctcgctgaagtccacctggatggtcaaccatttctaaggtatgaccgacagaagtgtagagcaaagccacagggccagtgggcagaggacgtgctggggaacaagacttgggatagagaaactcgagatctcacaggcaatgggaaggatctgcgcatgaccttggctcatatcaaggaccagaaagaggtaccacagtcctcgagagcccagacgcttgcaatgaatgtaaggaattttttaaaggaagatgccatgaagactaaaacccactaccacgctatgcacgctgactgcctgcaggaactcagacggtacctggaaagtggcgtggtgctgagacgcaccgtcccacccatggtgaatgtgacacgctctgaagcttctgaaggaaatattacggtgacctgccgtgcctcgtccttctaccctcgcaacatcatcctcacttggcggcaggacggagtctccctctcgcatgatactcagcagtggggagatgttctgcctgacggaaacgggacatatcagacatgggtagccaccaggatctgtcgcggggaggagcagaggtttacatgttacatggagcatagtggaaaccactccactcatccggtcccgtctggtaaggttctggttctgcagtcccattggcagacattccatgttagtgcagtggctgcggggtgctgttatttctgctactattactttctttgtccactcctttag

SEQ ID NO: 69752 - DNA, 870 bp, Artificial Sequence
  derived and/or modified sequence
atgggcctgggccccgtgttcctgctgctggccggcatcttcccctttgctcctcccggcgctgccgcggagccacacagtcttaggtacaatctgacagtcctgtcttgggatggctcagtacagtccggctttctggccgaagtgcatctagatggccaacccttcctgagatatgaccggcagaagtgtcgcgccaagcctcagggccagtgggcagaggatgtgctcggcaacaaaacctgggatagggaaacccgggacctgactggaaacggaaaagatctgagaatgaccttggcgcacatcaaagatcagaaggaagttccacaatcttcccgggcacagacactggccatgaatgtcagaaactttcttaaagaagatgccatgaagactaagacccattatcacgctatgcacgctgattgtctgcaagagctgcgccggtacctggagagcggtgtggtgctgagaaggactgtgccaccaatggtaaatgtgaccagatctgaggcctcggagggaaatattactgtcacatgcagagcctcgagcttttacccgcgcaatatcattctcacatggcggcaggacggcgtgagcctgtctcacgatacacagcagtggggcgatgtgctccccgatggaaatgggacctaccaaacgtgggttgcgactcggatttgcagaggagaggagcagaggtttacctgctacatggaacatagcggcaatcactccactcatccagtgccaagtggcaaggtcctcgtcctgcaaagtcactggcagacttttcacgtgtcggcggtggccgccggatgttgctatttttgctactattatttcctgtgtcctcttctgtag

SEQ ID NO: 69753 - DNA, 999 bp, Artificial Sequence
  derived and/or modified sequence
atgggcctgggccccgtgttcctgctgctggccggcatcttccccttcgcgccaccaggggctgccgccgaaccccactccttgaggtacaatctgaccgtgctcagctgggacggtagcgtacaaagcggcttcctggctgaggtgcatttggacggccagcctttcctcagatatgaccgccagaagtgccgggccaagccacagggccagtgggccgaggacgtgctggggaataagacatgggatcgagagactcgggacctgacaggtaatgggaaggacttgagaatgacactggcccacattaaagaccagaaggaaggcctacatagccttcaggaaatccgggtctgcgaaattcacgaggacaatagcacccgcagttcccagcatttctattatgacggcgagctctttttgtcacaaaacttggagactgaggagtggactgtgcctcaatcctccagagcacaaaccttggctatgaacgttcggaactttctcaaggaggatgcgatgaaaaccaaaacacattatcacgccatgcacgccgattgtctacaggaactcaggagatacctggagtctggcgtagtcctgagacggaccgtgccacctatggttaatgtcacccgatcagaagcatccgaggggaatattaccgtcacatgccgggcatcatcgttttatcccagaaatattatcctgacatggcgccaggatggtgtgagcctgtctcacgacacacaacagtggggcgatgtcttgcccgatggtaacggaacataccagacatgggtagctactcggatctgtaggggggaagaacaacggttcacatgttacatggagcattctggtaaccattctacacaccctgttccatctggcaaagttctggtgttgcagagccactggcagactttccacgtatccgccgtagcagcaggttgttgttacttctgttattattacttcttgtgccctctgttgtag

SEQ ID NO: 69754 - DNA, 999 bp, Artificial Sequence
  derived and/or modified sequence
atgggcctgggccccgtgttcctgctgctggccggcatcttccccttcgcacctccgggggccgcggctgagccgcactcgttgcgctacaatttaacagtgctatcctgggacgggagtgtccagtcaggttttcttgctgaggtgcacctggacggccagccttttcttagatatgatagacaaaagtgcagagctaagcctcaaggccaatgggctgaggatgtgctgggaaacaagacttgggaccgggaaacacgagacctaacgggaaacggaaaggatctgcgcatgacactcgcacatataaaggatcagaaagaaggcctacactcactccaggaaatccgggtttgtgagatccacgaggataactccactcgcagctcacagcacttttactatgacggcgaactgtttctctcacagaatctggaaacagaggaatggaccgtgcctcaaagttcaagagcgcaaaccctggcgatgaatgtgagaaatttcctcaaagaagacgctatgaagacgaagacccactatcatgccatgcacgccgactgccttcaggagctgcgccgatacctggaatcaggcgttgtcctgcgcagaaccgttcccccgatggtcaatgtgactcggagcgaggccagcgagggcaatatcactgtgacttgccgcgcttccagcttctatccccgtaacataattctgacatggcgtcaggatggtgtctcgctctcccacgacacgcagcagtggggggatgttctgcctgatggcaatgggacgtaccagacctgggttgctactagaatctgccggggagaggaacagaggttcacctgttacatggagcattcgggaaaccactctactcaccccgtgccgagcgggaaggttttggtgttacagtctcattggcaaacctttcatgtgtcagccgttgccgccgggtgttgctacttttgttactattattttctgtgccccctgctttag

SEQ ID NO: 69755 - DNA, 870 bp, Artificial Sequence
  derived and/or modified sequence
atgggcctgggccccgtgttcctgctgctggccggcatcttccccttcgcccctcctggcgcagcagccgagcctcattcactgcgctataatttgactgtgttgtcctgggacggtagcgtccagagcggatttcttgctgaagtgcacctggacggacagccttttctgaggtatgatcgccagaagtgccgggcaaagccacagggtcagtgggctgaggatgtgctgggcaacaagacctgggaccgggaaacaagggacctgacaggcaatggaaaagacctgcgaatgacactggcccatattaaggatcagaaagaggttccacagtcaagtagagctcagacactggcaatgaacgttcgaaactttctaaaagaagatgccatgaagacaaagacacactatcacgccatgcacgccgactgtctgcaagaactgagaagatacctggagagcggggtggttttgagacgaacagtgcctccaatggttaatgtaaccaggtcagaggccagcgaagggaatataacagtgacttgtagggcctcctccttctatcctaggaacatcattttgacctggcgtcaagatggagtgtcattgtcccatgatactcaacagtggggggacgtgctaccagacggcaatggcacttatcagacctgggtggcgacgaggatttgtagaggggaggagcagcgctttacctgctacatggagcatagcggaaaccactctacccatcccgtcccctctggcaaggtcctggtactccagagccactggcagacattccacgtgtctgcggtggccgccggatgctgctatttctgttattactacttcctgtgtcccctgctttag

SEQ ID NO: 69756 - DNA, 999 bp, Artificial Sequence
  derived and/or modified sequence
atgggcctgggccccgtgttcctgctgctggccggcatcttcccctttgcccctcctggcgccgccgctgagccgcatagcctgaggtataacctgaccgtgctctcatgggacggctctgtacaatctggcttcctggctgaggtgcatctggacggacaaccattcctccgctatgataggcaaaaatgcagggccaagccacaagggcagtgggcggaggatgtgttgggaaacaagacctgggacagggagacaagagatttgacgggtaatgggaaggacctccgcatgaccctcgcccacattaaggaccagaaagaaggcctccactccttacaggagatcagagtctgcgagatccacgaggacaatagtacccggtcaagccagcatttttattacgatggcgagctgtttttaagccagaacctggagaccgaagaatggacggtgccccagtcaagccgcgctcaaacacttgccatgaatgtcagaaacttcctgaaagaagatgccatgaaaaccaagacccattatcatgcaatgcatgccgattgtctgcaggaactccggcggtacctcgagtccggcgtcgtattgagacgaaccgtgccaccaatggtaaacgtcacacggagtgaggcttctgaagggaacatcaccgtgacctgcagagcttcaagtttctatcctcggaatattattctcacttggcgccaagatggggtcagtctgtcacatgacacacagcagtggggggacgtgctgccagatgggaacgggacctatcagacttgggtcgccacgagaatttgtcggggagaagagcagcgctttacatgctatatggagcattcaggcaatcactcaacccatcctgtgccaagtgggaaggtgctggtccttcaatcccactggcaaacattccacgtgtctgcagtggctgcggggtgctgctacttctgttattactactttttgtgccctttgttgtag

SEQ ID NO: 69757 - DNA, 999 bp, Artificial Sequence
  derived and/or modified sequence
atgggcctgggccccgtgttcctgctgctggccggcatcttccccttcgctcctccaggggccgcggctgaaccgcattccctgagatacaatctgacagtgctatcttgggatggctcggtccaatccgggtttctggccgaagtgcacctggacggacaacccttcctgcggtatgatcgacaaaaatgcagagccaaacctcaggggcaatgggccgaagatgtgctgggaaacaagacgtgggacagggaaacaagggatctgaccgggaacggtaaggacttgagaatgaccctggcacacattaaggaccagaaagagggattacactctctgcaggagatcagagtgtgtgagattcatgaggataacagtacccggtccagtcagcatttttactacgacggggagctgttcctgagtcaaaatctcgagacggaggaatggacagtgcctcaatcgagccgagctcaaaccctcgcaatgaatgtgcgaaatttccttaaggaggatgccatgaagaccaagacccactatcacgccatgcatgctgactgtcttcaagaactccggaggtacctggagagtggcgttgttcttcgaagaactgtgcctccaatggtcaacgtgacgaggagtgaggcatctgagggtaacataactgtcacttgcagagcatccagcttctatccacgaaatatcatcctcacatggaggcaggatggcgtcagtctctcacatgacacccaacagtggggcgacgtgctccccgacggcaacggcacctaccagacatgggtggctactcggatctgtagaggagaagagcaaaggttcacttgttatatggaacattccggaaatcattcgacccaccccgtgccctccggaaaggttctcgtgctgcaatcacattggcagacctttcatgtttctgctgtcgcagccggatgttgctacttctgctactactattttctgtgcccactgctatag

SEQ ID NO: 69758 - DNA, 999 bp, Artificial Sequence
  derived and/or modified sequence
atgggcctgggccccgtgttcctgctgctggccggcatcttcccctttgcgccgccaggggccgctgccgagcctcatagtttgcgctacaatctgactgttctgagttgggacggctccgtacagagcgggttcctggccgaagtccacctcgacgggcagccctttctaaggtacgacaggcaaaaatgccgggccaaacctcagggacaatgggctgaagatgtactcggcaataaaacttgggatcgcgaaacacgcgacctgaccggaaatggaaaagatctacgcatgaccctagctcacatcaaggaccaaaaagagggattgcacagcctccaggaaatcagggtgtgtgaaatacatgaagataactccactagaagttctcagcatttctactatgatggcgaattgttcttatcacagaacctcgagaccgaagagtggacagtgccgcagtctagcagggcacagacgctggccatgaacgtgcggaacttcttgaaagaagatgcgatgaaaacaaaaacccattaccacgcgatgcacgctgattgcctgcaggaattgcgccgctaccttgagtcaggggtggtactgagaagaacagtgcccccgatggtgaatgtcacaaggtccgaagccagtgagggaaacatcaccgtgacttgtcgggcctccagtttttacccacgcaatatcatcctgacgtggcgccaggacggtgtctctctgagccacgatacacagcaatggggtgacgttctgcccgacggcaacgggacgtatcagacatgggttgcaactcgcatctgcaggggtgaggaacagagattcacctgctatatggagcacagcggcaaccatagcactcaccccgtgccgagcggaaaggttcttgttcttcaatctcattggcagacctttcacgtatcagctgtcgccgctggctgttgttacttttgttattattacttcctgtgccctctgctctag

SEQ ID NO: 69759 - DNA, 999 bp, Artificial Sequence
  derived and/or modified sequence
atgggcctgggccccgtgttcctgctgctggccggcatcttccccttcgccccgccaggagccgccgccgagcctcactctctgaggtacaatctcactgtgttgtcctgggacggctccgtgcagtcaggctttctggcagaggtgcacctggatggccagcctttccttcgatacgatcgacagaaatgtagagccaaacctcagggacagtgggcagaggatgtccttggcaataagacctgggatagggaaacaagggatctgacgggcaacggtaaggatcttcggatgacgctcgcccatattaaggaccagaaggagggcctgcactccctgcaggaaattcgggtctgcgaaattcacgaagacaacagcacccgtagcagtcagcacttctattacgacggcgaactgtttctgagccagaacgtcgagacagaggaatggaccgttccacagtcaagccgggcgcagaccctggcaatgaacgtacgcaacttcctgaaggaggatgctatgaagacgaaaacacattatcacgctatgcatgccgactgccttcaggaattgaggcgctatctggaaagcagcgtcgttcttcggagacgggtgcccccgatggttaatgttacaagaagtgaggcctcagaggggaacattactgtgacatgccgggcatcatctttctaccccaggaacatcacccttacctggaggcaggacggggtctcactcagccacgatacccagcagtggggtgacgtgctccctgacgggaacgggacctaccagacctgggtcgccactcggatctgtcagggggaggaacaaaggtttacatgttacatggagcactccggcaatcacagcacacatccggtacctagtggaaaagtgctggtactgcaatcccattggcagacatttcacgtcagtgctgtcgcagcatgctgttgctacttttgctactactatttcctgtgccctcttctgtag

SEQ ID NO: 69760 - DNA, 999 bp, Artificial Sequence
  derived and/or modified sequence
atggggctgggcccagtgttcctactgctggcgggtatttttcccttcgccccacctggcgctgcggctgagccgcactccttgcggtataacctcacagttctgtcgtgggatgggtccgtccagagcggatttttagctgaggtgcacttggacgggcagcctttcttaagatatgacaggcagaagtgccgcgcaaaaccccagggccagtgggctgaagacgtgctaggtaacaagacttgggatagagaaacccgggacctcaccggaaatggtaaggatcttcgcatgaccctggcgcacatcaaggatcagaaggaggggttgcacagtctgcaagagattagagtgtgcgaaattcacgaggataactcaactcgcagttcccagcatttctactacgacggcgaacttttcctgtcccagaacttggagacagaggaatggactgtgccccaatcctctagagctcagacactggctatgaacgtccgaaatttcctgaaggaggatgctatgaagacaaaaacccactaccacgctatgcacgccgattgcctgcaggaactccggaggtacctggagagtggggttgttctgcggcgtacagtgccccctatggtgaatgtgacacgttccgaagcctcagagggaaacatcactgttacatgtcgggcatcatccttttatcctaggaacataatcctgacctggagacaggatggtgtgtctctgagccatgacacccagcaatggggggatgtgctgcctgatggcaacggaacataccagacatgggtggctactaggatctgtcggggtgaggagcaaagatttacatgttacatggaacattctggcaatcactccacacatccagtgccaagtgggaaagtgctcgtgttgcagagccactggcagactttccatgtgtcagctgtagccgcaggatgttgctacttctgctattattatttcctatgtccactgctctag

SEQ ID NO: 69761 - DNA, 870 bp, Artificial Sequence
  derived and/or modified sequence
atgggccttggccctgtgttcctcctgttggctggaatcttccccttcgccccacctggggcagccgctgagcctcactccctccggtacaaccttaccgtcctttcatgggacggatccgtgcagagcggttttcttgccgaggtgcaccttgatgggcagccattcttgcggtatgatcggcagaagtgtcgagccaaaccgcaagggcagtgggccgaagacgtgctcggtaataaaacctgggatagggaaacgagagacctgaccggtaacggaaaggatctgcggatgaccctagcacacatcaaggatcagaaggaagtgcctcagtctagtcgggctcaaaccttggcaatgaacgtgcggaactttctcaaggaggatgccatgaaaaccaaaacccactatcatgccatgcatgccgactgtctacaggagctgcggaggtacctcgagagtggagtcgttctgcgccgaacagtgcctcctatggtgaatgtgactcgtagcgaggcttctgaagggaacatcactgtcacatgcagggcttccagcttttatcctcggaatataattctgacttggagacaggacggtgtttcactcagccatgatacacaacagtggggagacgtcctacccgacggaaacggcacttatcagacctgggtggccactcgaatctgtaggggtgaggagcagaggttcacgtgttatatggaacatagtgggaatcattccacacaccctgtgccatccggcaaagtcctggttttgcaatctcattggcaaacctttcacgtcagcgcagtggctgccggatgctgttatttctgctactattacttcttatgcccgcttctgtag

SEQ ID NO: 69762 - DNA, 870 bp, Artificial Sequence
  derived and/or modified sequence
atgggcctcggtcctgtgttcctcctgctggctggtatctttccctttgcaccccctggagctgccgctgagccccactcattaaggtataacctgaccgtgctgtcctgggacggatctgtacaatcaggctttttggcagaggtgcatctggatggacagccattccttagatatgacaggcagaaatgccgagccaagccccagggacagtgggcagaagatgtcttgggaaataaaacctgggatcgggagacaagggacctcaccggtaacgggaaggacctccgcatgaccctggctcacattaaggatcagaaagaagtcccccaaagctctcgcgctcagacactcgcgatgaacgtccggaatttccttaaggaagatgccatgaagaccaagactcattatcacgccatgcacgctgactgtctgcaggagctcagacggtacttggagagcggtgtagtgcttaggcgaacagtccctccaatggtgaacgtcacccgcagcgaagcgtcagagggcaatatcaccgtaacatgtcgtgcgtcatctttttatcctcggaacatcattttgacctggcgtcaggatggcgtctctttgtcccacgacacccaacaatggggagacgtgttacctgatggtaatgggacataccagacttgggtcgctacaaggatatgcagaggcgaagaacagcggtttacatgttatatggagcattcaggtaaccactctacccatcccgtcccttccggcaaggtccttgtgcttcagtcccattggcagacctttcacgtttctgcagtcgctgcgggatgttgttatttttgctactactactttctgtgcccactgctgtag

SEQ ID NO: 69763 - DNA, 999 bp, Artificial Sequence
  derived and/or modified sequence
atgggcttagggcctgtctttctgttacttgccggtatcttcccttttgccccacccggtgccgctgcagagccccacagtctgcgttataatctgacggtgctatcttgggatggatcggtgcagtccggttttctggccgaagtccacttggatggccagcccttcttgcgatatgacaggcagaagtgtcgtgctaagcctcagggacagtgggctgaagacgttctcggcaataaaacatgggatcgcgagaccagggacctcaccggaaatgggaaggatctgagaatgaccctagcgcacatcaaagaccagaaagaaggcctccactcactgcaggagataagagtgtgcgagatccatgaagataacagtactcgctcctcccagcacttttactatgacggggaactctttctctctcagaatctggagacggaagagtggaccgtgccacagagttctcgagcccagacactggctatgaacgtgcggaactttctaaaggaagacgccatgaaaacaaaaacacactatcatgccatgcatgccgattgcttacaggaactccgtaggtatctggaaagcggcgtggtgctgcgtaggaccgtaccacctatggtgaatgtgacccgatctgaagcgtccgagggcaacatcaccgtgacctgtagagcttcttctttttatcccaggaacatcatccttacctggaggcaagacggagtgtctctcagccatgacacacaacagtggggagacgtgctgcctgacggaaatggcacatatcagacttgggtggcgactaggatctgtaggggcgaggagcagcgttttacctgctacatggaacactcggggaaccactccacccacccagtaccatctggaaaggtgctggtgctccagtcccactggcaaactttccatgtgtctgccgttgcagccggatgctgttatttttgttattattattttctgtgcccactgttgtag

SEQ ID NO: 69764 - DNA, 999 bp, Artificial Sequence
  derived and/or modified sequence
atgggcctcgggcctgtttttctgctactcgctggaatcttcccatttgcgcctcccggtgctgctgctgagccccattccctcagatacaatctcacagtcctgtcttgggacgggtccgtccagtcagggtttttggccgaggtgcacttagacggccagcctttcctgcgttatgaccgacaaaaatgtagagcgaaaccccaaggccagtgggccgaggatgttctggggaataagacgtgggatagagaaactcgtgatctgaccgggaatgggaaggacctgcggatgactttggcccacatcaaggatcaaaaagaaggtctccactctctgcaagaaatcagggtctgtgagatccacgaagacaactctaccagaagctcacagcacttttactacgacggagaactgtttctctctcagaacttagaaacagaagagtggactgtcccacagtcttcccgcgctcaaactctggcaatgaatgttcgtaacttcctgaaagaggatgctatgaagacaaagacacactaccatgccatgcatgcggattgcctccaggagctgcgaaggtatctggagagtggagtcgtccttagaagaactgtcccccctatggtgaacgttactcggagcgaagcctctgaagggaacatcaccgttacttgtcgtgcgagctcattttaccctcgcaacattatcctgacttggcgacaagacggggtgtccctttctcacgatacccagcagtggggagacgtgctgcccgatggcaacggcacataccagacttgggtcgccacaagaatttgccgaggggaggaacaaaggtttacctgttacatggaacatagtggaaaccatagcacgcaccccgtgccatctggcaaagtgctagtcctccaatcgcactggcagacattccacgtgtccgccgtggctgccggttgctgttacttttgctactattactttctgtgtccgttgctctag

SEQ ID NO: 69765 - DNA, 870 bp, Artificial Sequence
  derived and/or modified sequence
atgggcctaggaccagtatttttgctgctagctggaattttccccttcgctcccccaggcgctgccgcagaaccacacagcctgcgctataacctgaccgtgttgtcctgggatgggagcgttcagtctggatttctcgctgaagtgcatctggatggccagcctttcctgcgctacgaccgccagaagtgcagagcgaaaccacagggccagtgggctgaggatgttctgggcaataagacctgggaccgagagacacgcgatctgaccggcaacggcaaagatcttcggatgacactcgcacacattaaagaccagaaggaggtccctcagagtagtagagctcagacactggctatgaatgtcaggaacttcctgaaagaagatgcaatgaagactaagacccactatcatgctatgcacgctgactgcctgcaagaactccggcgttacctggagagcggggtggtgcttcgcagaactgttccccctatggtgaacgttacacggtccgaagcctccgaaggtaatattaccgtcacctgccgcgcttcctccttctaccctagaaatatcattctgacctggagacaggacggagtatctctgagccatgacactcagcaatggggcgatgttttgccagatgggaacgggacctatcagacatgggtcgccacccgaatatgtagaggcgaggagcagaggtttacctgctacatggagcattcagggaaccatagcacccatcctgtgccctcaggaaaagttctggttctgcagtcccattggcaaacattccatgtttccgcggttgctgcagggtgctgttatttctgttactactactttctgtgccctttactatag

SEQ ID NO: 69766 - DNA, 999 bp, Artificial Sequence
  derived and/or modified sequence
atggggcttggacctgtgttcctcctgttggcgggtatcttcccattcgctccccctggcgctgctgctgaaccacattcactcagatacaatcttacagttctcagctgggatggatccgtgcaatctgggtttctcgctgaagtgcatcttgacggacagccatttctgagatacgacaggcaaaaatgtagagcaaaaccgcagggacagtgggccgaagatgttctgggaaataagacatgggatcgcgagacacgtgacctgacaggaaacggaaaggacttacgaatgactctcgctcacattaaggatcagaaggaaggtctgcactcgttgcaggaaatccgggtttgcgagatccacgaggacaactcaacccggtcctcacagcatttttattatgatggcgaactatttctgagccaaaacctggagactgaggagtggaccgtcccacagtctagccgagcacagacactggccatgaacgtgcggaatttcttaaaagaggatgccatgaagactaagactcactaccacgccatgcatgcagattgtttgcaagagctcagacgctatttggaatcgggcgtggtgctgaggagaacggtgccccctatggttaatgtgacgcgaagtgaggcatcagaaggaaacatcacagtgacctgtagagcatcaagtttttacccccgaaacatcattctgacttggagacaggatggtgtcagcctaagccatgacactcagcagtggggagacgttctgcctgatgggaacggcacctatcagacatgggttgcaacccggatttgccgcggagaagagcagaggttcacatgttacatggagcactccggtaatcattctacccaccctgtgccaagcggcaaggtcttggtattgcaatcgcactggcagacattccacgtttctgccgtcgcggctgggtgctgttatttctgctactactacttcctatgccctctcctgtag

SEQ ID NO: 69767 - DNA, 999 bp, Artificial Sequence
  derived and/or modified sequence
atggggctgggccctgttttccttttgctcgcaggcatcttcccattcgcacctcctggcgcagccgcagaacctcattctctaagatacaatctgactgtcttgagctgggatgggtcagtccagtctggctttctggccgaggtgcacctcgatggacagccatttttaaggtacgataggcaaaagtgcagagcaaagccacaggggcagtgggctgaagacgtgctgggcaataagacctgggaccgcgaaacacgcgacttgacgggcaacgggaaggatctgagaatgacactggcacacattaaagatcagaaagaagggctccattccttgcaagagattcgagtgtgcgagattcacgaagataattctacacggtcttctcagcacttctattacgacggcgaactgttcttgtcacagaacttggaaacagaagaatggaccgttccacaatcctcccgcgcacaaacactggccatgaacgtgaggaactttctgaaagaggacgctatgaaaacaaagacccattaccatgccatgcatgcagattgtttgcaggaactacggaggtatctagaatcgggggttgtactcaggagaacagtgccccctatggttaatgtgacccgttctgaagcgagcgagggtaacatcacggtcacctgtcgagcgagtagcttttaccccagaaacattattctgacctggcgacaagatggagttagtctcagccacgacacccagcagtggggagacgtcctcccagatgggaacggaacataccagacttgggtcgcaacccgaatatgtcgtggcgaagaacagcggtttacatgttatatggagcacagcggaaatcattcaacccatcctgtgccgtcagggaaagttctcgtgttacagagtcattggcaaactttccatgtgagtgccgttgcagctggctgctgctatttctgttactactattttctgtgccctctgttgtag

SEQ ID NO: 69768 - DNA, 999 bp, Artificial Sequence
  derived and/or modified sequence
atgggtcttggacctgtgtttttgctgctggcaggcatcttcccttttgcgcctccgggagccgcagcagagccccacagtcttagatataacttgaccgttctgagttgggacggttccgtacagtcaggcttcctggccgaggtccacctggacgggcagccatttctgaggtacgaccgacagaaatgccgggctaagccacaaggtcaatgggcagaggatgtactgggcaataagacatgggatcgggaaacccgcgatctgactggcaacggcaaggaccttcggatgacacttgctcatatcaaggatcagaaggaggggctgcactctctgcaagagatacgtgtgtgtgagatccacgaagacaatagcaccagatcctcccagcatttctactacgatggggagctattcttgtctcagaatctggagactgaagagtggacagtcccccagtcgagtagagctcagaccctcgccatgaatgtgaggaatttcctgaaggaagacgccatgaagactaagactcactatcatgccatgcacgcggattgcctgcaggaactgagaaggtacctggagtcaggcgtggtgctgcggagaacagtgcccccaatggtcaatgtcacgaggagcgaggctagtgaaggaaacattacggtcacctgccgggctagctcattctatcccagaaatatcatactgacatggagacaggatggtgtcagtttatctcacgatacacaacagtggggcgatgtgctccctgatggcaatggaacctaccagacgtgggtcgctacacggatttgtcgcggagaggaacaacggtttacttgttacatggagcactcaggtaatcactctacccacccagttccctctgggaaagtcctggtgctgcaaagtcattggcagactttccacgtgagtgcagtggctgccggatgttgttacttctgttattattacttcctctgcccccttctgtag

SEQ ID NO: 69769 - DNA, 999 bp, Artificial Sequence
  derived and/or modified sequence
atggggctgggccctgtgttcctcctattagccggtatattcccctttgcccctcctggagcagctgccgaaccccatagtttaaggtataacctgacagttctctcttgggatggcagtgtgcaatccggttttctagcagaagtgcatctggacggtcagccgtttcttcggtatgaccgtcaaaaatgtagggcgaagccacagggacaatgggccgaggatgtgctggggaacaagacctgggaccgtgagacccgggacctgacgggtaacgggaaggatcttcggatgacattggcccacatcaaagatcaaaaagaagggctgcacagtctgcaggaaatccgcgtctgcgagatccatgaagataacagcactcgcagctcccaacatttttactacgatggagaattgtttctgtctcagaacgtcgagactgaggaatggactgtcccgcagagcagccgagcgcagacgttggccatgaacgtgaggaatttcctgaaagaggatgccatgaagacaaagacccactatcacgccatgcacgctgattgcctccaggagctaagaagatatctcgagagttccgtcgtactccggagacgcgtccctcctatggtgaatgttacccgctcagaagcatctgaaggaaatatcaccgttacctgccgagccagcagtttctaccctcgaaacatcacactgacatggcgtcaggatggggtgtctctctcccacgacactcagcaatggggggacgtcctgcctgatggaaatggcacctaccagacatgggttgctaccaggatttgccagggcgaagaacagagattcacctgctacatggaacattctggtaaccattccactcatccagtgccaagtggaaaagtgctggtgctgcagagccattggcaaaccttccacgttagtgctgtcgcagcttgctgctgctacttttgttattactacttcctttgccctctgctatag

SEQ ID NO: 69770 - DNA, 999 bp, Artificial Sequence
  derived and/or modified sequence
atgggcctgggccccgtgttcctgctgctggccggcatcttccccttcgccccccccggcgccgccgccgagccccacagcctgagatacaacctgaccgtgctgagctgggacggcagcgtgcagagcggcttcctggccgaggtgcacctggacggccagcccttcctgagatacgacagacagaagtgcagagccaagccccagggccagtgggccgaggacgtgctgggcaacaagacctgggacagagagaccagagacctgaccggcaacggcaaggacctgagaatgaccctggcccacatcaaggaccagaaggagggcctgcacagcctgcaggagatcagagtgtgcgagatccacgaggacaacagcaccagaagcagccagcacttctactacgacggcgagctgttcctgagccagaacctggagaccgaggagtggaccgtgccccagagcagcagagcccagaccctggccatgaacgtgagaaacttcctgaaggaggacgccatgaagaccaagacccactaccacgccatgcacgccgactgcctgcaggagctgagaagatacctggagagcggcgtggtgctgagaagaaccgtgccccccatggtgaacgtgaccagaagcgaggccagcgagggcaacatcaccgtgacctgcagagccagcagcttctaccccagaaacatcatcctgacctggagacaggacggcgtgagcctgagccacgacacccagcagtggggcgacgtgctgcccgacggcaacggcacctaccagacctgggtggccaccagaatctgcagaggcgaggagcagagattcacctgctacatggagcacagcggcaaccacagcacccaccccgtgcccagcggcaaggtgctggtgctgcagagccactggcagaccttccacgtgagcgccgtggccgccggctgctgctacttctgctactactacttcctgtgccccctgctgtag

SEQ ID NO: 69771 - DNA, 870 bp, Artificial Sequence
  derived and/or modified sequence
atgggcctgggccccgtgttcctgctgctggccggcatcttccccttcgccccccccggcgccgccgccgagccccacagcctgagatacaacctgaccgtgctgagctgggacggcagcgtgcagagcggcttcctggccgaggtgcacctggacggccagcccttcctgagatacgacagacagaagtgcagagccaagccccagggccagtgggccgaggacgtgctgggcaacaagacctgggacagagagaccagagacctgaccggcaacggcaaggacctgagaatgaccctggcccacatcaaggaccagaaggaggtgccccagagcagcagagcccagaccctggccatgaacgtgagaaacttcctgaaggaggacgccatgaagaccaagacccactaccacgccatgcacgccgactgcctgcaggagctgagaagatacctggagagcggcgtggtgctgagaagaaccgtgccccccatggtgaacgtgaccagaagcgaggccagcgagggcaacatcaccgtgacctgcagagccagcagcttctaccccagaaacatcatcctgacctggagacaggacggcgtgagcctgagccacgacacccagcagtggggcgacgtgctgcccgacggcaacggcacctaccagacctgggtggccaccagaatctgcagaggcgaggagcagagattcacctgctacatggagcacagcggcaaccacagcacccaccccgtgcccagcggcaaggtgctggtgctgcagagccactggcagaccttccacgtgagcgccgtggccgccggctgctgctacttctgctactactacttcctgtgccccctgctgtag

SEQ ID NO: 69772 - DNA, 999 bp, Artificial Sequence
  derived and/or modified sequence
atgggcctgggccccgtgttcctgctgctggccggcatcttccccttcgccccccccggcgccgccgccgagccccacagcctgagatacaacctgaccgtgctgagctgggacggcagcgtgcagagcggcttcctggccgaggtgcacctggacggccagcccttcctgagatacgacagacagaagtgcagagccaagccccagggccagtgggccgaggacgtgctgggcaacaagacctgggacagagagaccagagacctgaccggcaacggcaaggacctgagaatgaccctggcccacatcaaggaccagaaggagggcctgcacagcctgcaggagatcagagtgtgcgagatccacgaggacaacagcaccagaagcagccagcacttctactacgacggcgagctgttcctgagccagaacgtggagaccgaggagtggaccgtgccccagagcagcagagcccagaccctggccatgaacgtgagaaacttcctgaaggaggacgccatgaagaccaagacccactaccacgccatgcacgccgactgcctgcaggagctgagaagatacctggagagcagcgtggtgctgagaagaagagtgccccccatggtgaacgtgaccagaagcgaggccagcgagggcaacatcaccgtgacctgcagagccagcagcttctaccccagaaacatcaccctgacctggagacaggacggcgtgagcctgagccacgacacccagcagtggggcgacgtgctgcccgacggcaacggcacctaccagacctgggtggccaccagaatctgccagggcgaggagcagagattcacctgctacatggagcacagcggcaaccacagcacccaccccgtgcccagcggcaaggtgctggtgctgcagagccactggcagaccttccacgtgagcgccgtggccgcctgctgctgctacttctgctactactacttcctgtgccccctgctgtag

SEQ ID NO: 69773 - protein, 556 aa, Artificial Sequence
  derived and/or modified sequence
MAGASELGTGPGAAGGDGDDSLYPIAVLIDELRNEDVQLRLNSIKKLSTIALALGVERTRSELLPFLTDTIYDEDEVLLALAEQLGNFTGLVGGPDFAHCLLPPLENLATVEETVVRDKAVESLRQISQEHTPVALEAYFVPLVKRLASGDWFTSRTSACGLFSVCYPRASNAVKAEIRQQFRSLCSDDTPMVRRAAASKLGEFAKVLELDSVKSEIVPLFTSLASDEQDSVRLLAVEACVSIAQLLSQDDLETLVMPTLRQAAEDKSWRVRYMVADRFSELQKAMGPKITLNDLIPAFQNLLKDCEAEVRAAAAHKVKELGENLPIEDRETIIMNQILPYIKCPDVRLNIISNLDCVNEVIGIRQLSQSLLPAIVELAEDAKWRVRLAIIEYMPLLAGQLGVEFFDEKLNSLCMAWLVDHVYAIREAATNNLMKLVQKFGTEWAQNTIVPKVLVMANDPNYLHRMTTLFCINALSEACGQEITTKQMLPIVLKMAGDQVANVRFNVAKSLQKIGPILDTNALQGEVKPVLQKLGQDEDMDVKYFAQEAISVLALA

SEQ ID NO: 69774 - DNA, 1671 bp, Artificial Sequence
  derived and/or modified sequence
atggccggcgccagcgagctgggcaccggccccggcgccgccggcggcgacggcgacgacagcctgtaccccatcgccgtgctgatcgacgagctgagaaacgaggacgtgcagctgagactgaacagcatcaagaagctgagcaccatcgccctggccctgggcgtggagagaaccagaagcgagctgctgcccttcctgaccgacaccatctacgacgaggacgaggtgctgctggccctggccgagcagctgggcaacttcaccggcctggtgggcggccccgacttcgcccactgcctgctgccccccctggagaacctggccaccgtggaggagaccgtggtgagagacaaggccgtggagagcctgagacagatcagccaggagcacacccccgtggccctggaggcctacttcgtgcccctggtgaagagactggccagcggcgactggttcaccagcagaaccagcgcctgcggcctgttcagcgtgtgctaccccagagccagcaacgccgtgaaggccgagatcagacagcagttcagaagcctgtgcagcgacgacacccccatggtgagaagagccgccgccagcaagctgggcgagttcgccaaggtgctggagctggacagcgtgaagagcgagatcgtgcccctgttcaccagcctggccagcgacgagcaggacagcgtgagactgctggccgtggaggcctgcgtgagcatcgcccagctgctgagccaggacgacctggagaccctggtgatgcccaccctgagacaggccgccgaggacaagagctggagagtgagatacatggtggccgacagattcagcgagctgcagaaggccatgggccccaagatcaccctgaacgacctgatccccgccttccagaacctgctgaaggactgcgaggccgaggtgagagccgccgccgcccacaaggtgaaggagctgggcgagaacctgcccatcgaggacagagagaccatcatcatgaaccagatcctgccctacatcaagtgccccgacgtgagactgaacatcatcagcaacctggactgcgtgaacgaggtgatcggcatcagacagctgagccagagcctgctgcccgccatcgtggagctggccgaggacgccaagtggagagtgagactggccatcatcgagtacatgcccctgctggccggccagctgggcgtggagttcttcgacgagaagctgaacagcctgtgcatggcctggctggtggaccacgtgtacgccatcagagaggccgccaccaacaacctgatgaagctggtgcagaagttcggcaccgagtgggcccagaacaccatcgtgcccaaggtgctggtgatggccaacgaccccaactacctgcacagaatgaccaccctgttctgcatcaacgccctgagcgaggcctgcggccaggagatcaccaccaagcagatgctgcccatcgtgctgaagatggccggcgaccaggtggccaacgtgagattcaacgtggccaagagcctgcagaagatcggccccatcctggacaccaacgccctgcagggcgaggtgaagcccgtgctgcagaagctgggccaggacgaggacatggacgtgaagtacttcgcccaggaggccatcagcgtgctggccctggcctag

SEQ ID NO: 69775 - DNA, 1671 bp, Artificial Sequence
  derived and/or modified sequence
atggcaggcgcatctgaactcggcaccggaccaggtgcggccggaggagatggggacgacagcctgtatccaattgccgttcttattgacgagctccggaacgaagacgtccagctgcgactgaacagcatcaaaaagctcagcaccatcgcactagcattaggcgtggagcgcacgaggtctgaattgctcccgttcctgaccgatacaatctacgacgaggacgaggtgcttctggctttagctgagcagctgggcaattttaccggcctggtgggaggaccagacttcgctcattgcttactccctcctctcgagaacttggcaactgtcgaagaaacggtggtgcgcgataaagcagtggagagtttacgccagatctcacaggagcacactccggtagcattagaagcctacttcgtgcctctagtcaagcgcctcgcatccggcgattggttcacctctagaacaagcgcatgtggactcttcagcgtgtgttaccccagggcttctaacgccgtaaaggctgagattcgccaacagtttcggagcttgtgcagtgatgataccccgatggtacgcagagccgctgccagcaaactgggagaatttgccaaggtactcgaactcgattcggtcaaatcagagattgtccctttatttacgtctttggcaagcgacgagcaggactcggtgaggcttctggcagtcgaagcttgcgtgagcatcgcccaactcctgtcccaggacgatctcgaaactctggtcatgcctacattgagacaagccgctgaagataagtcttggcgagtcagatatatggtggcagatagatttagtgaattgcaaaaagccatgggtcctaagatcactctgaacgacctgattcctgcttttcaaaacctgctgaaggattgtgaagctgaagtacgagctgcggctgcccataaagttaaggagctgggtgagaacctgcctattgaggatagggaaacaattattatgaatcagatcttgccatacatcaagtgtcccgacgtgaggctgaacattatctcaaacctggactgtgtgaacgaggtgattgggataagacagctttcccagagtcttctcccagccatcgttgaacttgcagaggatgccaaatggagggttaggctggcaatcattgagtacatgccactgctcgcagggcaactgggcgtagagttttttgacgaaaagctcaactcactgtgcatggcatggctcgtggatcacgtttacgccatccgggaagctgctaccaacaacctgatgaagctggtgcagaagttcggcacagagtgggctcaaaatacgatagtccctaaggtgctcgtgatggccaacgaccctaactacctccaccggatgactacgctattctgcattaatgctctcagcgaggcatgtgggcaggagattacaacaaagcagatgctaccaatcgtgttaaagatggcaggcgaccaggtggctaacgttcgcttcaacgtggccaagagtctgcagaagattgggccgatactggataccaatgcactccagggggaggttaaaccggtcctgcagaaactcggccaggacgaggatatggacgtgaaatatttcgcccaagaggccattagtgtcctggctctcgcctag

SEQ ID NO: 69776 - DNA, 1671 bp, Artificial Sequence
  derived and/or modified sequence
atggccggggccagcgagctgggcactggacctggagctgctggaggagatggagatgacagcctgtaccccatcgctgtgctgattgatgagctgagaaatgaagatgtgcagctgcggctgaacagcatcaagaagctgagcaccatcgccctggccctgggcgtggagaggaccaggtctgagctgctgcccttcctgacagacaccatctatgatgaagatgaggtgctgctggccctggccgagcagctgggcaacttcaccggcctggtgggcggccctgactttgcccactgcctgctgccccccctggagaacctggccaccgtggaggagaccgtggtgcgggacaaggctgtggagagcctgcggcagatcagccaggagcacacccctgtggccctggaggcctactttgtgcccctggtgaagaggctggccagcggggactggttcaccagcaggaccagcgcctgtggcctcttctctgtgtgctacccccgggccagcaatgctgtgaaggccgagatccggcagcagttccgcagcctgtgcagtgatgacacccccatggtgcggcgggctgctgccagcaagctgggggagtttgccaaggtgctggagctggacagcgtgaagtcagaaattgtgcccctcttcaccagcctggccagtgatgagcaggacagcgtgcggctgctggccgtggaggcctgtgtgtccatcgcccagctgctgagccaggatgacctggagaccctggtgatgcccaccctgcggcaggccgctgaggacaagtcctggagggtgcgctacatggtggccgaccgcttcagcgagctgcagaaggccatgggccccaagatcaccctgaatgacctgatcccagccttccagaacctgctgaaggactgtgaggccgaggtgcgggctgctgctgcccacaaggtgaaggagctgggggagaacctgcccatcgaggaccgggagaccatcatcatgaaccagatcctgccctacatcaagtgcccagatgtgcggctgaacatcatcagcaacctggactgtgtgaatgaagtcatcggcatccggcagctgagccagagcctgctgcctgccatcgtggagctggccgaggatgccaagtggagggtgcggctggccatcatcgagtacatgcccctgctggccggccagctgggcgtggagttctttgatgagaagctgaacagcctgtgcatggcctggctggtggaccacgtgtatgccatccgggaggccgccaccaacaacctgatgaagctggtgcagaagtttggaacagagtgggcccagaacaccatcgtgcccaaggtgctggtgatggccaatgaccccaactacctgcacaggatgaccaccctcttctgcatcaatgccctgtctgaggcctgtggccaggagatcaccaccaagcagatgctgcccatcgtgctgaagatggccggggaccaggtggccaacgtgcgcttcaacgtggccaagagcctgcagaagattggccccatcctggacaccaatgccctgcagggcgaggtgaagcctgtgctgcagaagctgggccaggatgaggacatggatgtgaagtactttgcccaggaggccatctctgtgctggccctggcctag

SEQ ID NO: 69777 - DNA, 1671 bp, Artificial Sequence
  derived and/or modified sequence
atggccggcgccagcgagctgggcaccggccccggcgccgccggcggagacggagatgactctttgtacccgatcgcagtgttgatcgacgagctgagaaatgaagacgtacagcttcgtctgaacagcataaagaaactgagcaccattgctcttgccttgggagtggagcgaacccgcagcgagctactgcccttcctgaccgataccatttatgatgaagacgaggtgctgctagcactggccgagcagctcggaaattttacaggccttgtgggaggtcccgattttgctcattgcttgttaccacctctagagaacctcgcgaccgttgaggaaaccgtggtacgtgacaaggccgtggagtccctgcggcaaatttcccaggagcacaccccagtggccttggaagcctacttcgtccctctcgtgaagagattagctagcggcgactggtttacatcccgaacatccgcctgcggtctatttagtgtatgttatccaagggccagcaacgctgttaaagcggagatccgacagcagttccgatctctgtgcagcgacgatacccctatggtcagacgagccgcagcaagcaagcttggcgaattcgctaaggtcctggaacttgactcagttaagtctgagattgtacccctttttacttccttggcctccgatgagcaggacagtgttagactccttgcagttgaggcctgcgtttctatcgcgcagctgctttctcaggacgacctggagacactggtcatgcctaccctgagacaagctgccgaagacaaatcttggcgtgtgcggtatatggtggccgatagattctcagagctccagaaggccatgggccctaagattacactcaacgacttgatacccgcctttcagaacctcttgaaagattgcgaggcggaggtcagagccgccgccgcacataaggtgaaggagctcggggaaaatctgcccatcgaggaccgcgaaactatcataatgaatcagattctgccttacattaagtgccctgatgtccggttgaacatcataagcaatctggactgtgtgaatgaagtcatcggcattaggcagctttctcagtccctcctcccggccatagtggaactggccgaggacgccaaatggcgagtacggctcgccatcatagaatatatgccacttctggcgggccagcttggcgttgagttcttcgatgagaagctaaacagtctgtgcatggcatggctcgtggatcacgtgtacgcgattagagaggctgcaacgaacaacctgatgaaactggtgcagaagttcggtactgagtgggcacagaacactatagtgcccaaggtcctagtaatggccaacgatccaaactacctacatagaatgactacactcttctgcataaatgcactgagcgaagcgtgtggccaagaaatcactacgaaacagatgttacctatcgtactgaaaatggctggggaccaagtggccaatgtccgtttcaacgtggctaaatccctgcaaaaaataggtcccatccttgacactaatgccctgcagggcgaggtgaagcccgtcctgcagaaattgggccaggacgaagacatggacgtaaaatacttcgcacaagaggccatcagtgtgcttgctctggcatag

SEQ ID NO: 69778 - DNA, 1671 bp, Artificial Sequence
  derived and/or modified sequence
atggcaggcgcttcagagcttgggaccggccctggcgctgcaggaggtgacggggacgacagcctttaccctattgcagtacttattgatgaactaaggaacgaagatgtgcagctccgacttaattcaatcaagaagctcagcacaatcgccctggccctgggagttgagagaacccggagtgagctcctgccatttctgactgacacaatctatgacgaagacgaagtgctcctggccttggccgagcagctcgggaacttcaccggcctcgttggtggtcctgacttcgcccactgtctgctaccccctctggagaacttagcgaccgtggaggaaaccgtcgtgcgggataaggccgtggagagccttagacagatttcacaggagcacactcccgtggctctggaggcatacttcgtgccactggtgaagaggctggcctcaggagactggtttacttcgagaacttcagcctgtgggctctttagtgtgtgttatcccagggcatctaatgcagtgaaagcggagataaggcagcagtttagaagtctgtgtagtgatgatactcctatggtacgtagagccgcagcctcaaagctcggcgagttcgccaaggtactggagctcgattctgtaaaatcagagatcgttccactatttacttctctagcctccgacgaacaagacagcgtgcgactactggctgttgaagcatgcgtatcaattgctcagctgctctcacaagatgatctcgagacactggtcatgcctactctgcgtcaagctgctgaagataaatcttggagagtcagatacatggttgctgatagattttccgagctgcagaaagcaatgggccctaaaatcaccctcaacgatctgatcccagcctttcagaatttgcttaaggattgtgaggccgaggtaagagcggctgctgcgcacaaggtgaaagagctgggagaaaatttgcccatcgaggatcgtgaaacaataatcatgaatcaaattctgccctacatcaagtgccccgatgtccgattgaatatcattagtaaccttgattgtgtaaatgaagtcatcggaatacgtcagctgtctcagtccttactcccagcaatcgtggaactcgccgaggatgccaagtggcgagttcgcctcgcgattatcgagtatatgccattgctggccggacagctgggggtcgaattctttgacgagaaactgaacagtctttgcatggcctggttggtggaccacgtgtacgctatccgggaagcagcgaccaataatctgatgaagctcgtccagaagttcggcaccgaatgggcccaaaacaccattgttcccaaggtcttagtcatggccaacgaccccaactacttgcaccggatgaccaccttgttttgtataaacgccctgagtgaagcctgcggtcaagagatcaccacgaaacagatgctgcccatcgtactgaagatggccggagaccaggtcgcgaacgttcgctttaatgtggctaagagtttgcagaagatcggacccatcttggataccaacgcattacagggcgaagtgaagccggtgctgcagaagcttggccaagacgaggacatggacgtgaagtacttcgcccaggaggccatctcagtgctagcactcgcgtag

SEQ ID NO: 69779 - DNA, 1953 bp, Artificial Sequence
  derived and/or modified sequence
aaagaacatggcgggcgcatcagagctcgggaccggcccaggagcagcgggtggagatggagatgattcgctatacccgatcgcggttttaatcgacgagctccgcaatgaagacgtgcagctccgactcaacagtattaagaagttatcaacaattgccctagcacttggagtagaaaggacccgaagtgaattgttgccatttcttacagatacaatttatgatgaagatgaggtactattagctcttgctgagcagctgggaaatttcactggcctagtgggaggtcctgactttgcccactgtctgctgcctcctttggaaaatctggcaactgtggaagagactgttgttcgtgacaaggctgtggagtccctgagacagatctcccaggagcatactcctgttgctctggaagcttattttgtacctctggtgaaacgcttagcaagtggggattggttcacctctcgcacatctgcatgtggtttgttcagcgtttgctatcccagggcatcaaatgctgttaaagcagaaatcagacagcaattccgttccttgtgctcagatgacacaccaatggtacgacgtgctgctgcttccaaattgggtgaatttgcaaaagttttggaattagacagtgtgaaaagtgaaattgttccactgttcactagtctagcttcagatgaacaggattcagtgcgcctccttgctgtggaagcttgtgtcagtattgcccagttattgtctcaggatgaccttgagactttggtgatgcctacacttcgacaagcagcagaagataaatcttggcgcgttcgctatatggtggctgacagattttcagagctccagaaagccatgggtcctaaaatcaccctaaatgacctcatccccgcctttcagaacctacttaaagactgtgaagctgaagtccgggcagctgctgcccacaaagtaaaagaacttggtgagaacttgcccattgaagatagagagaccataattatgaatcaaattctgccttatataaagtgtcctgacgttcgtttgaatatcatctccaatttggattgtgtaaatgaagtgattggaatccgtcagctctctcagtctctccttcctgccatagtggagctggcagaagatgccaaatggagggtccgcctggccatcattgagtatatgccgctgctggcaggccagctgggtgtggaattctttgatgaaaagctgaattctttatgtatggcttggctcgtggaccatgtatacgccatccgagaagctgccaccaacaacctcatgaaactagttcagaagtttggtacagagtgggcccaaaatactattgttcccaaagtgttagtaatggcaaatgatcctaattacttgcatagaatgaccactttattctgcattaatgcactgtctgaggcctgtggtcaggaaataactactaagcaaatgctgcccatcgtattaaaaatggcaggagaccaagtagcaaatgttcgcttcaatgtggccaaatctctacaaaagattggaccaattctagataccaatgctttacagggagaagtgaagccagtactacagaagttaggtcaagatgaagacatggatgtcaaatactttgcacaggaagctataagtgttcttgcattggcataatgaggagcaggagggaaaaggcctttactagattcttgtcacaaatttctagtcaatgtgttcttaactgggtggagaaagaatggaaaaccttcaagatctcatccaagcaaatggcaacaacttagaagaaatcatttagtgacttaattctttctaaagatgaaatgggattgttttttactcgtcttccttgttaaatcattatttaagccgttcttattgaccaattcctgacacttgattgtctcctaatgctttatccatcaccacct

SEQ ID NO: 69780 - DNA, 553 bp, Artificial Sequence
  derived and/or modified sequence
acctctctagtaaccttgcttcggaccccctgaggcgtccgcccggagccttgcccttcccgggcggttgtcggggaacccgcttcccgcctgggcgccccatccgggccgtgaggtggccgcgtctcttgggcgagggagcaggagaagcgcggtgccaggccgagacggggctggagcggctgaggggcgcaggatgcccagaagccctttgaagtgcccctggatcccttcatctcggcttggaactggctcggcttgttggctccgactcaacagtattaagaagttatcaacaattgccctagcacttggagtagaaaggacccgaagtgaattgttgccatttcttacagatacaatttatgatgaagatgaggtactattagctcttgctgagcagctgggaaatttcactggcctagtgggaggtcctgactttgcccactgtctgctgcctcctttggaaaatctggcaactgtggaagagactgttgttcgtgacaaggctgtggagtccctgagacagatctcccaggagcatactcctgtt

SEQ ID NO: 69781 - protein, 474 aa, Artificial Sequence
  derived and/or modified sequence
MAGASELGTGPGAAGGDGDDSLYPIAVLIDELRNEDVQLRLNSIKKLSTIALALGVERTRSELLPFLTDTIYDEDEVLLALAEQLGNFTGLVGGPDFAHCLLDSVRLLAVEACVSIAQLLSQDDLETLVMPTLRQAAEDKSWRVRYMVADRFSELQKAMGPKITLNDLIPAFQNLLKDCEAEVRAAAAHKVKELGENLPIEDRETIIMNQILPYIKELVSDTNQHVKSALASVIMGLSTILGKENTIEHLLPLFLAQLKDECPDVRLNIISNLDCVNEVIGIRQLSQSLLPAIVELAEDAKWRVRLAIIEYMPLLAGQLGVEFFDEKLNSLCMAWLVDHVYAIREAATNNLMKLVQKFGTEWAQNTIVPKVLVMANDPNYLHRMTTLFCINALSEACGQEITTKQMLPIVLKMAGDQVANVRFNVAKSLQKIGPILDTNALQGEVKPVLQKLGQDEDMDVKYFAQEAISVLALA

SEQ ID NO: 69782 - protein, 454 aa, Artificial Sequence
  derived and/or modified sequence
MAGASELGTGPGAAGGDGDDSLYPIAVLIDELRNEDVQLRLNSIKKLSTIALALGVERTRSELLPFLTDTIYDEDEVLLALAEQLGNFTGLVGGPDFAHCLLDSVRLLAVEACVSIAQLLSQDDLETLVMPTLRQAAEDKSWRVRYMVADRFSELQKAMGPKITLNDLIPAFQNLLKDCEAEVRAAAAHKVKELGENLPIEDRETIIMNQILPYIKELVSDTNQHVKSALASVIMGLSTILGKENTIEHLLPLFLAQLKDECPDVRLNIISNLDCVNEVIGIRQLSQSLLPAIVELAEDAKWRVRLAIIEYMPLLAGQLGVEFFDEKLNSLCMAWLVDHVYAIREAATNNLMKLVQKFGTEWAQNTIVPKVLVMANDPNYLHRMTTLFCINALSEACGQEITTKQMLPIVKNGRRPSSKCSLQCGQISTKDWTNSRYQCFTGRSEASTTEVRSR

SEQ ID NO: 69783 - DNA, 1425 bp, Artificial Sequence
  derived and/or modified sequence
atggccggcgccagcgagctgggcaccggccccggcgccgccggcggcgacggcgacgacagcctgtaccccatcgccgtgctgatcgacgagctgagaaacgaggacgtgcagctgagactgaacagcatcaagaagctgagcaccatcgccctggccctgggcgtggagagaaccagaagcgagctgctgcccttcctgaccgacaccatctacgacgaggacgaggtgctgctggccctggccgagcagctgggcaacttcaccggcctggtgggcggccccgacttcgcccactgcctgctggacagcgtgagactgctggccgtggaggcctgcgtgagcatcgcccagctgctgagccaggacgacctggagaccctggtgatgcccaccctgagacaggccgccgaggacaagagctggagagtgagatacatggtggccgacagattcagcgagctgcagaaggccatgggccccaagatcaccctgaacgacctgatccccgccttccagaacctgctgaaggactgcgaggccgaggtgagagccgccgccgcccacaaggtgaaggagctgggcgagaacctgcccatcgaggacagagagaccatcatcatgaaccagatcctgccctacatcaaggagctggtgagcgacaccaaccagcacgtgaagagcgccctggccagcgtgatcatgggcctgagcaccatcctgggcaaggagaacaccatcgagcacctgctgcccctgttcctggcccagctgaaggacgagtgccccgacgtgagactgaacatcatcagcaacctggactgcgtgaacgaggtgatcggcatcagacagctgagccagagcctgctgcccgccatcgtggagctggccgaggacgccaagtggagagtgagactggccatcatcgagtacatgcccctgctggccggccagctgggcgtggagttcttcgacgagaagctgaacagcctgtgcatggcctggctggtggaccacgtgtacgccatcagagaggccgccaccaacaacctgatgaagctggtgcagaagttcggcaccgagtgggcccagaacaccatcgtgcccaaggtgctggtgatggccaacgaccccaactacctgcacagaatgaccaccctgttctgcatcaacgccctgagcgaggcctgcggccaggagatcaccaccaagcagatgctgcccatcgtgctgaagatggccggcgaccaggtggccaacgtgagattcaacgtggccaagagcctgcagaagatcggccccatcctggacaccaacgccctgcagggcgaggtgaagcccgtgctgcagaagctgggccaggacgaggacatggacgtgaagtacttcgcccaggaggccatcagcgtgctggccctggcctag

SEQ ID NO: 69784 - DNA, 1365 bp, Artificial Sequence
  derived and/or modified sequence
atggccggcgccagcgagctgggcaccggccccggcgccgccggcggcgacggcgacgacagcctgtaccccatcgccgtgctgatcgacgagctgagaaacgaggacgtgcagctgagactgaacagcatcaagaagctgagcaccatcgccctggccctgggcgtggagagaaccagaagcgagctgctgcccttcctgaccgacaccatctacgacgaggacgaggtgctgctggccctggccgagcagctgggcaacttcaccggcctggtgggcggccccgacttcgcccactgcctgctggacagcgtgagactgctggccgtggaggcctgcgtgagcatcgcccagctgctgagccaggacgacctggagaccctggtgatgcccaccctgagacaggccgccgaggacaagagctggagagtgagatacatggtggccgacagattcagcgagctgcagaaggccatgggccccaagatcaccctgaacgacctgatccccgccttccagaacctgctgaaggactgcgaggccgaggtgagagccgccgccgcccacaaggtgaaggagctgggcgagaacctgcccatcgaggacagagagaccatcatcatgaaccagatcctgccctacatcaaggagctggtgagcgacaccaaccagcacgtgaagagcgccctggccagcgtgatcatgggcctgagcaccatcctgggcaaggagaacaccatcgagcacctgctgcccctgttcctggcccagctgaaggacgagtgccccgacgtgagactgaacatcatcagcaacctggactgcgtgaacgaggtgatcggcatcagacagctgagccagagcctgctgcccgccatcgtggagctggccgaggacgccaagtggagagtgagactggccatcatcgagtacatgcccctgctggccggccagctgggcgtggagttcttcgacgagaagctgaacagcctgtgcatggcctggctggtggaccacgtgtacgccatcagagaggccgccaccaacaacctgatgaagctggtgcagaagttcggcaccgagtgggcccagaacaccatcgtgcccaaggtgctggtgatggccaacgaccccaactacctgcacagaatgaccaccctgttctgcatcaacgccctgagcgaggcctgcggccaggagatcaccaccaagcagatgctgcccatcgtgaagaacggcagaagacccagcagcaagtgcagcctgcagtgcggccagatcagcaccaaggactggaccaacagcagataccagtgcttcaccggcagaagcgaggccagcaccaccgaggtgagaagcagatag

SEQ ID NO: 69785 - DNA, 1425 bp, Artificial Sequence
  derived and/or modified sequence
atggccggcgccagtgaactggggacggggcctggcgcagccgggggggacggggatgacagcttatatcctatagccgtgctcatcgatgagctgagaaatgaggacgtccagctccgcctgaattctattaaaaagctgtctacaattgccctggcattgggagtggaacgaactagaagtgaattgctgccattccttaccgacacaatctatgacgaggacgaggtgttgctagccctggcagaacaactgggaaacttcactggcctggtaggaggccccgactttgcccactgcctccttgactctgtccgactactagctgtggaagcctgtgtctccattgcgcagctgctgtctcaggatgatctggaaaccctggtgatgcctacactgcggcaggctgccgaagataagtcttggcgagtacgctatatggtcgcagacaggttcagtgaactgcagaaagcgatgggccccaagattactctaaacgatctgatacctgcttttcaaaatctcctgaaggattgtgaggccgaggttcgggcagccgccgctcacaaagtgaaggagctcggcgagaatctccccatcgaggacagggaaactataatcatgaaccagatccttccctatatcaaagagctggtgtccgatacaaaccaacacgtgaagtccgccttggcatcagtgatcatgggcttgtccaccattctgggaaaagagaacactattgagcacttactgcctctctttttggcccagctaaaagacgaatgtcctgatgtgcgtctaaacattatttcaaatctagattgcgtaaacgaggtcatcggcataaggcagctcagtcagagcctcctgcccgccattgttgaactggccgaggacgcaaagtggcgcgttaggttggctatcatagagtatatgcccctgctggcgggccagctcggcgtggagttcttcgatgaaaagcttaattcactgtgtatggcctggctggttgaccatgtgtacgctatccgggaagctgccaccaataaccttatgaagctagtgcaaaagttcggcactgagtgggctcagaacacaatcgttcccaaggttctggtgatggcaaatgatcccaactaccttcacaggatgaccacactcttctgcattaacgctttgtccgaagcatgcggccaggaaatcaccactaaacagatgttacccattgtattgaagatggccggagaccaggttgccaatgtgcggttcaacgtggctaagtctttacaaaagatcgggcctattttggacaccaacgcactgcagggggaggtgaaacccgtcctgcagaaattgggccaggacgaagatatggacgtcaaatactttgcccaagaagctataagtgtcttggccctcgcctag

SEQ ID NO: 69786 - DNA, 1365 bp, Artificial Sequence
  derived and/or modified sequence
atggccggggcttctgaactgggaactgggcccggagcagccggaggcgacggagacgatagtttgtacccaatcgctgtcttgatcgatgaacttcgaaatgaagacgtgcagttgcggcttaactctatcaagaaactcagcacaatagcactggcccttggagttgagcgcaccagaagtgagttgctgccttttctgaccgataccatttacgatgaggacgaagtgttgttggcactagcagagcagctgggcaacttcaccgggttagtcggcggtccagattttgcccactgtctgctagatagcgttcgccttttagcagtggaggcgtgtgtgtccattgcacagctgttaagtcaggacgatcttgagactttggttatgcccactctgcggcaggcggccgaggacaagagttggcgggtgcggtatatggtggccgatcggttctcagaattgcagaaggccatgggtcctaaaataaccctaaacgatctgatccctgcattccaaaatctgctcaaggactgtgaagcagaggtcagagcagctgctgctcacaaggtaaaagaactcggtgagaacctgcccatcgaagaccgagaaacaataatcatgaaccagatccttccctacattaaggaattagtgtcagacaccaaccagcatgttaagagcgcccttgcctccgtgatcatggggctgtccactatcttgggcaaggaaaatacaatcgagcatttgttgccgctattccttgcccagctaaaggatgagtgtccagacgtcaggctaaacatcatatcaaatctggattgcgttaacgaagtgattggcatacgtcagctgtcacagtcgctcctgccagcaatagttgagctggccgaggacgcaaagtggcgggtgcgcttagctatcattgagtacatgccactgttagctggacagctcggcgtggagttcttcgacgagaagctcaatagcctgtgtatggcatggcttgtcgatcacgtctacgcaatcagggaagcagccacaaataacttgatgaaacttgtgcagaaatttgggaccgagtgggcccagaataccattgtgcccaaggttctggtgatggctaatgacccaaactacctgcacagaatgaccaccttgttctgcatcaatgcgctcagtgaagcctgcggccaggagattacgactaaacagatgctgccgatcgtaaaaaacggacgcagaccaagctccaaatgctccctgcagtgcggtcagatcagcacaaaagattggaccaactcccgctaccagtgcttcaccggccggtccgaagcctccacaaccgaggtcagaagcaggtag

SEQ ID NO: 69787 - DNA, 1425 bp, Artificial Sequence
  derived and/or modified sequence
atggccggggccagcgagctgggcactggacctggagctgctggaggagatggagatgacagcctgtaccccatcgctgtgctgattgatgagctgagaaatgaagatgtgcagctgcggctgaacagcatcaagaagctgagcaccatcgccctggccctgggcgtggagaggaccaggtctgagctgctgcccttcctgacagacaccatctatgatgaagatgaggtgctgctggccctggccgagcagctgggcaacttcaccggcctggtgggcggccctgactttgcccactgcctgctggacagcgtgcggctgctggccgtggaggcctgtgtgtccatcgcccagctgctgagccaggatgacctggagaccctggtgatgcccaccctgcggcaggccgctgaggacaagtcctggagggtgcgctacatggtggccgaccgcttcagcgagctgcagaaggccatgggccccaagatcaccctgaatgacctgatcccagccttccagaacctgctgaaggactgtgaggccgaggtgcgggctgctgctgcccacaaggtgaaggagctgggggagaacctgcccattgaagatcgggagaccatcatcatgaaccagatcctgccctacatcaaggagctggtgtctgacaccaaccagcacgtgaagagcgccctggccagcgtcatcatgggcctgagcaccatcctgggcaaggagaacaccatcgagcacctgctgcccctcttcctggcccagctgaaggatgaatgtccagatgtgcggctgaacatcatcagcaacctggactgtgtgaatgaagtcatcggcatccggcagctgagccagagcctgctgcctgccatcgtggagctggccgaggatgccaagtggagggtgcggctggccatcatcgagtacatgcccctgctggccggccagctgggcgtggagttctttgatgagaagctgaacagcctgtgcatggcctggctggtggaccacgtgtatgccatccgggaggccgccaccaacaacctgatgaagctggtgcagaagtttggaacagagtgggcccagaacaccatcgtgcccaaggtgctggtgatggccaatgaccccaactacctgcacaggatgaccaccctcttctgcatcaatgccctgtctgaggcctgtggccaggagatcaccaccaagcagatgctgcccatcgtgctgaagatggccggggaccaggtggccaacgtgcgcttcaacgtggccaagagcctgcagaagattggccccatcctggacaccaatgccctgcagggcgaggtgaagcctgtgctgcagaagctgggccaggatgaggacatggatgtgaagtactttgcccaggaggccatctctgtgctggccctggcctag

SEQ ID NO: 69788 - DNA, 1365 bp, Artificial Sequence
  derived and/or modified sequence
atggccggggccagcgagctgggcactggacctggagctgctggaggagatggagatgacagcctgtaccccatcgctgtgctgattgatgagctgagaaatgaagatgtgcagctgcggctgaacagcatcaagaagctgagcaccatcgccctggccctgggcgtggagaggaccaggtctgagctgctgcccttcctgacagacaccatctatgatgaagatgaggtgctgctggccctggccgagcagctgggcaacttcaccggcctggtgggcggccctgactttgcccactgcctgctggacagcgtgcggctgctggccgtggaggcctgtgtgtccatcgcccagctgctgagccaggatgacctggagaccctggtgatgcccaccctgcggcaggccgctgaggacaagtcctggagggtgcgctacatggtggccgaccgcttcagcgagctgcagaaggccatgggccccaagatcaccctgaatgacctgatcccagccttccagaacctgctgaaggactgtgaggccgaggtgcgggctgctgctgcccacaaggtgaaggagctgggggagaacctgcccattgaagatcgggagaccatcatcatgaaccagatcctgccctacatcaaggagctggtgtctgacaccaaccagcacgtgaagagcgccctggccagcgtcatcatgggcctgagcaccatcctgggcaaggagaacaccatcgagcacctgctgcccctcttcctggcccagctgaaggatgaatgtccagatgtgcggctgaacatcatcagcaacctggactgtgtgaatgaagtcatcggcatccggcagctgagccagagcctgctgcctgccatcgtggagctggccgaggatgccaagtggagggtgcggctggccatcatcgagtacatgcccctgctggccggccagctgggcgtggagttctttgatgagaagctgaacagcctgtgcatggcctggctggtggaccacgtgtatgccatccgggaggccgccaccaacaacctgatgaagctggtgcagaagtttggaacagagtgggcccagaacaccatcgtgcccaaggtgctggtgatggccaatgaccccaactacctgcacaggatgaccaccctcttctgcatcaatgccctgtctgaggcctgtggccaggagatcaccaccaagcagatgctgcccatcgtgaagaatggccggcggcccagcagcaagtgcagcctgcagtgtggccagatcagcaccaaggactggaccaacagccgctaccagtgcttcaccggccgctctgaggccagcaccacagaggtgcgcagcaggtag

SEQ ID NO: 69789 - DNA, 1425 bp, Artificial Sequence
  derived and/or modified sequence
atggccggcgccagcgagctgggcaccggccccggcgccgccggcggagatggtgacgattcgttgtatccaatcgccgtcttaattgacgagttacgaaatgaggacgttcaactgagattgaattccatcaagaagctcagcacaattgcactggcactgggagtcgaacgaacccgctccgagctcctgcccttcctgaccgatactatctatgatgaagacgaagtcctgctggccctcgccgaacagcttggaaacttcacgggactcgtgggcggtcccgattttgcgcattgcctgcttgacagcgtacgattactggcggtggaggcttgcgtgtccatcgctcagctgcttagtcaggatgacctagagactttggtgatgcccactttgaggcaagctgctgaggacaagtcctggcgagtgagatacatggtggccgaccgattttcagagttgcagaaagccatgggacccaagataacccttaacgatcttattccggcctttcagaatttgttgaaggactgtgaggcagaggtacgggctgctgctgcccataaggttaaggaattgggggaaaatcttcctattgaagaccgagagactatcataatgaatcaaatattgccttacatcaaagagctcgtgtccgatactaaccaacacgttaagtctgcccttgcctccgtcattatgggactgagcacgattctcgggaaagaaaacacaatagagcacctcctgcccctgtttctggcacaactaaaggatgaatgtccggatgttcgcctcaatatcatcagtaacttggactgtgtcaatgaggtgattggtatccggcagctgtcccagtctcttctcccagcaatagtagagttagcagaagacgctaagtggcgggttagactggcaattattgagtatatgcccctcctggctggacagctgggagtcgagttctttgacgagaaacttaacagcctttgcatggcttggttggtagaccatgtttacgctattagagaggctgccacgaataacttgatgaaactcgtgcagaagttcgggaccgagtgggcccagaataccatcgtgccgaaggtgctcgtgatggccaatgaccctaactatttgcatcgaatgactacgctgttttgcataaacgccctgtccgaggcgtgtggacaggagattaccaccaagcagatgctgcctatagtgctcaagatggctggcgaccaggtggctaatgtgaggtttaacgttgcaaaaagccttcagaagatcggccccatcctggatacaaacgctctccaaggggaggttaaacctgtgctacagaagctggggcaagatgaggacatggacgttaaatactttgcacaggaggccataagtgttctggcccttgcttag

SEQ ID NO: 69790 - DNA, 1365 bp, Artificial Sequence
  derived and/or modified sequence
atggccggcgccagcgagctgggcaccggccccggcgccgccggcggtgacggcgacgacagcctgtaccccattgctgtcctgattgacgagctaaggaacgaggacgtccagcttcgcctcaattcaatcaagaaattaagtacaattgctctggcgctcggagtggaacggaccaggagtgaactgctgcctttcttaactgatacaatctacgatgaagacgaggtgttattggcgctcgccgagcagctggggaactttaccggcctggtgggcgggccagactttgcccattgtctgctggattcagtccggctactagctgtcgaggcctgcgttagcatagcacagctgctcagccaagatgatctggagacgttagtgatgccgacgctcaggcaggccgccgaggataagtcttggagggttagatacatggtggcggataggttttccgagctccagaaagcgatgggaccaaaaattactctgaatgacttgatccccgccttccagaacctgctgaaggactgtgaagcggaagtgcgggcggctgcagcccacaaggttaaggagcttggcgagaacctgcccatcgaggacagggaaacaattattatgaaccaaatcttaccttacatcaaggaactggttagcgacaccaaccagcacgtcaaatcagcccttgcctctgtgataatgggattatccacgatactggggaaagagaatacgatcgaacacctgctccccctgttcctagctcagctcaaggatgagtgtcctgacgtcaggctaaatatcataagtaaccttgactgtgtgaacgaagtcattggcattcgacagttgagtcagagcctcctccctgccattgtcgaactggccgaggatgcaaaatggcgggttcgcctagccataattgagtatatgccacttctagccggccagttgggggtggaatttttcgacgagaagctgaactccctctgcatggcctggttggtggatcatgtatacgctatccgcgaggctgcgaccaacaacctcatgaagcttgtccagaaatttgggactgagtgggcgcagaatactattgttccaaaagtcctcgtgatggctaatgacccaaactatctccaccgaatgactaccctgttttgcattaacgctctctctgaagcatgtggccaggaaatcacaacgaaacagatgttaccaatagtgaagaacggacgtcgcccaagctctaagtgttctctgcagtgtgggcaaattagcaccaaagattggactaactcccgctatcaatgcttcaccggaaggagcgaagcatccacgacagaggtgcggtctcgttag

SEQ ID NO: 69791 - DNA, 1425 bp, Artificial Sequence
  derived and/or modified sequence
atggccggtgcctctgagctcgggaccggccctggagccgctggcggagatggtgatgactcactttaccccatagctgttctgatcgacgagctccggaacgaggacgtgcagttgagattaaacagtattaagaagctttccactatagcacttgcgctcggggttgaacgcaccagaagtgaattgctcccatttctcactgacacaatctatgatgaggacgaggtactcttagcgttagcagagcaactggggaacttcacagggctggtaggcggtccagacttcgcccactgccttttggactccgtacggctcctcgccgtggaggcctgcgtgagcatcgcacaattactgtcccaggacgacctggagaccctggtgatgcccacattacgccaagccgctgaagacaaatcatggcgggtgcggtacatggtcgccgatcggttttcagagctgcagaaggccatgggacccaagattacactcaatgacctcatccctgcgtttcaaaatctcttgaaagactgcgaggccgaggtacgggcagctgccgctcacaaagtgaaggaacttggcgagaatctcccaattgaggaccgggaaacaatcataatgaatcagattctcccctacatcaaggagctcgtgtctgatactaaccagcatgtaaaaagcgctctggccagtgtaatcatgggcctgtccacaatcctggggaaggaaaacaccatagagcatttgctgcccttgtttcttgcccagctgaaggatgagtgcccggatgtgcgcctgaacatcataagcaacctggattgtgtgaatgaggtgattggtatacggcaactttctcaatctctgcttccagccatcgtggagctggcagaggatgctaaatggcgtgtaagattggcaatcattgagtatatgcccttgttggcgggtcagttgggcgtggagttcttcgacgaaaaattaaactcactctgtatggcttggcttgtggaccatgtctatgccattcgagaagcagccaccaataatcttatgaaactagtacagaagttcggaactgagtgggcccagaatacaatcgtgcccaaggtattggtaatggcaaacgatcctaactatcttcatcggatgacaacgctcttctgtataaacgctttgagtgaggcgtgtgggcaggaaattaccactaagcagatgctgccaatagtgctcaagatggcaggcgaccaggtcgcgaatgtccgtttcaacgtggccaagtcactccaaaaaattggcccaatactcgacacaaatgccctgcaaggggaggttaaacccgttctgcagaagctgggacaggacgaagatatggatgtcaaatactttgcccaggaggctattagcgtgctggcgctggcttag

SEQ ID NO: 69792 - DNA, 1365 bp, Artificial Sequence
  derived and/or modified sequence
atggcgggagcctccgagttaggcacggggccaggcgctgccggtggagatggagatgattctttatatcccatcgccgtgttaattgatgagctgcggaacgaggacgtccagcttcggctgaatagtatcaagaaactgtccaccatagcattggccttgggagtcgaaagaactagatcggaattgttaccctttctgactgataccatttatgatgaggacgaagtgctcttggctctcgccgagcagcttggcaatttcactgggctggtaggtgggcctgatttcgcgcactgtctactggactccgtacggctgcttgctgtggaggcctgcgtctcgatcgcccagctgctcagtcaggacgatctcgagaccctagtgatgcctaccttgcgtcaggccgcagaggacaaatcctggcgggtgaggtatatggtagccgaccgcttctctgaactccaaaaggctatggggccaaagattactttgaacgacctgatcccagcttttcaaaacctgcttaaggactgtgaggctgaggtgcgggctgccgcagcacataaagtcaaggaactcggcgagaatctcccaattgaggaccgcgaaaccataatcatgaatcagatcttaccctatatcaaggagcttgtgagcgacactaaccagcatgtcaaaagcgcactggccagtgttataatggggttgtccactatcctaggaaaagagaacaccatcgagcatctgctcccgctgtttctggcacagttgaaggatgagtgtcccgacgtcaggctgaacataatatctaacttggattgcgtgaatgaggtaatcggtattagacagctgtcccagtctctgcttcccgctattgtagaactcgctgaagacgcaaagtggagggtgagattggcaataatcgaatacatgcctttgctagcaggccagttgggggttgagttttttgacgaaaagttaaacagtctatgtatggcctggttggtggaccatgtgtatgccattagggaggccgcaaccaacaatctcatgaagctggtgcagaaattcggaactgaatgggcccagaatactattgtgcccaaagtactggttatggcgaacgatccaaactacctccatcggatgactacactcttttgcattaacgctctgagcgaggcctgcggccaggaaatcactacgaagcagatgcttcctattgtcaagaatggcagaaggcccagtagtaaatgctctctgcagtgcggacaaatttcgactaaggactggactaatagtcgataccaatgctttaccggccgatccgaggccagcaccaccgaagtgcgttcgcgttag

SEQ ID NO: 69793 - DNA, 1525 bp, Artificial Sequence
  derived and/or modified sequence
agcagcaggaggagaaagaacatggcgggcgcatcagagctcgggaccggcccaggagcagcgggtggagatggagatgattcgctatacccgatcgcggttttaatcgacgagctccgcaatgaagacgtgcagctccgactcaacagtattaagaagttatcaacaattgccctagcacttggagtagaaaggacccgaagtgaattgttgccatttcttacagatacaatttatgatgaagatgaggtactattagctcttgctgagcagctgggaaatttcactggcctagtgggaggtcctgactttgcccactgtctgctggattcagtgcgcctccttgctgtggaagcttgtgtcagtattgcccagttattgtctcaggatgaccttgagactttggtgatgcctacacttcgacaagcagcagaagataaatcttggcgcgttcgctatatggtggctgacagattttcagagctccagaaagccatgggtcctaaaatcaccctaaatgacctcatccccgcctttcagaacctacttaaagactgtgaagctgaagtccgggcagctgctgcccacaaagtaaaagaacttggtgagaacttgcccattgaagatagagagaccataattatgaatcaaattctgccttatataaaggaattagtatccgataccaatcaacatgtcaaatcggctctagcttctgtaattatgggattgtctactattttgggcaaagaaaataccattgaacatcttctacctcttttcttagctcagttaaaggatgagtgtcctgacgttcgtttgaatatcatctccaatttggattgtgtaaatgaagtgattggaatccgtcagctctctcagtctctccttcctgccatagtggagctggcagaagatgccaaatggagggtccgcctggccatcattgagtatatgccgctgctggcaggccagctgggtgtggaattctttgatgaaaagctgaattctttatgtatggcttggctcgtggaccatgtatacgccatccgagaagctgccaccaacaacctcatgaaactagttcagaagtttggtacagagtgggcccaaaatactattgttcccaaagtgttagtaatggcaaatgatcctaattacttgcatagaatgaccactttattctgcattaatgcactgtctgaggcctgtggtcaggaaataactactaagcaaatgctgcccatcgtattaaaaatggcaggagaccaagtagcaaatgttcgcttcaatgtggccaaatctctacaaaagattggaccaattctagataccaatgctttacagggagaagtgaagccagtactacagaagttaggtcaagatgaagacatggatgtcaaatactttgcacaggaagctataagtgttcttgcattggcataatgaggagcaggagggaaaaggcctttactagattcttgtcacaaatttctagtcaatgtgttcttaactgggtggagaa

SEQ ID NO: 69794 - DNA, 1762 bp, Artificial Sequence
  derived and/or modified sequence
ggccttcgtccctactgcctgggcgcggggcggggcctgggcgcggggcgggaggcggtgaccagcagcaggaggagaaagaacatggcgggcgcatcagagctcgggaccggcccaggagcagcgggtggagatggagatgattcgctatacccgatcgcggttttaatcgacgagctccgcaatgaagacgtgcagctccgactcaacagtattaagaagttatcaacaattgccctagcacttggagtagaaaggacccgaagtgaattgttgccatttcttacagatacaatttatgatgaagatgaggtactattagctcttgctgagcagctgggaaatttcactggcctagtgggaggtcctgactttgcccactgtctgctggattcagtgcgcctccttgctgtggaagcttgtgtcagtattgcccagttattgtctcaggatgaccttgagactttggtgatgcctacacttcgacaagcagcagaagataaatcttggcgcgttcgctatatggtggctgacagattttcagagctccagaaagccatgggtcctaaaatcaccctaaatgacctcatccccgcctttcagaacctacttaaagactgtgaagctgaagtccgggcagctgctgcccacaaagtaaaagaacttggtgagaacttgcccattgaagatagagagaccataattatgaatcaaattctgccttatataaaggaattagtatccgataccaatcaacatgtcaaatcggctctagcttctgtaattatgggattgtctactattttgggcaaagaaaataccattgaacatcttctacctcttttcttagctcagttaaaggatgagtgtcctgacgttcgtttgaatatcatctccaatttggattgtgtaaatgaagtgattggaatccgtcagctctctcagtctctccttcctgccatagtggagctggcagaagatgccaaatggagggtccgcctggccatcattgagtatatgccgctgctggcaggccagctgggtgtggaattctttgatgaaaagctgaattctttatgtatggcttggctcgtggaccatgtatacgccatccgagaagctgccaccaacaacctcatgaaactagttcagaagtttggtacagagtgggcccaaaatactattgttcccaaagtgttagtaatggcaaatgatcctaattacttgcatagaatgaccactttattctgcattaatgcactgtctgaggcctgtggtcaggaaataactactaagcaaatgctgcccatcgtaaaaaatggcaggagaccaagtagcaaatgttcgcttcaatgtggccaaatctctacaaaagattggaccaattctagataccaatgctttacagggagaagtgaagccagtactacagaagttaggtcaagatgaagacatggatgtcaaatactttgcacaggaagctataagtgtggtggcacaaaggctgaggaagctagaatttcctgtgaaggacagtggagaacccagtgtccctcgggctgacaagaaccacttcccaagacccacagtgcctggagaggacatggggaagggaccagtgtatcagttgcgtggagatactagagacacacttgcccagctgggaattgcagagctagtgcatttctcccaaagcacagactaataccccagatttaaaaaaagaacataaaaaataaagtaccacacatattgcactttt

SEQ ID NO: 69795 - DNA, 670 bp, Artificial Sequence
  derived and/or modified sequence
gaacctacttaaagactgtgaagctgaagtccgggcagctgctgcccacaaagtaaaagaacttggtgagaacttgcccattgaagatagagagaccataattatgaatcaaattctgccttatataaaggaattagtatccgataccaatcaacatgtcaaatcggctctagcttctgtaattatgggattgtctactattttgggcaaagaaaataccattgaacatcttctacctcttttcttagctcagttaaaggatgagtgtcctgacgttcgtttgaatatcatctccaatttggattgtgtaaatgaagtgattggaatccgtcagctctctcagtctctccttcctgccatagtggagctggcagaagatgccaaatggagggtccgcctggccatcattgagtatatgccgctgctggcaggccagctggcactgtctgaggcctgtggtcaggaaataactactaagcaaatgctgcccatcgtattaaaaatggcaggagaccaagtagcaaatgttcgcttcaatgtggccaaatctctacaaaagattggaccaattctagataccaatgctttacagggagaagtgaagccagtactacagaagttaggtcaagatgaagacatggatgtcaaatactttgcacaggaagctata

SEQ ID NO: 69796 - protein, 457 aa, Artificial Sequence
  derived and/or modified sequence
MFPKFSLRSMFHGAGGGNDIQWCFSQVKGAVDDDVAEADIISTVEFNHSGELLATGDKGGRVVIFQQEQENKIQSHSRGEYNVYSTFQSHEPEFDYLKSLEIEEKINKIRWLPQKNAAQFLLSTNDKTIKLWKISERDKRPEGYNLKEEDGRYRDPTTVTTLRVPVFRPMDLMVEASPRRIFANAHTYHINSISINSDYETYLSADDLRINLWHLEITDRSFNIVDIKPANMEELTEVITAAEFHPNSCNTFVYSSSKGTIRLCDMRASALCDRHSKLFEEPEDPSNRSFFSEIISSISDVKFSHSGRYMMTRDYLSVKIWDLNMENRPVETYQVHEYLRSKLCSLYENDCIFDKFECCWNGSDSVVMTGSYNNFFRMFDRNTKRDITLEASRENNKPRTVLKPRKVCASGKRKKDEISVDSLDFNKKILHTAWHPKENIIAVATTNNLYIFQDKVN

SEQ ID NO: 69797 - DNA, 1374 bp, Artificial Sequence
  derived and/or modified sequence
atgtttcctaagttttctctccggagcatgttccacggggccggcggtgggaacgatatacagtggtgtttcagccaggtcaaaggggctgtcgatgatgatgtggccgaggccgacataattagcacagtggagttcaaccatagtggggagttgctggctacaggtgataagggcggtcgcgtagtgatttttcagcaagagcaggaaaataaaatccaatctcatagcagaggcgaatacaatgtctactccaccttccaatctcacgagcccgagttcgactatctcaagtcattggagatcgaggagaaaattaacaagattcggtggctgccacagaaaaacgccgcccaattcctcctgagtaccaatgataaaaccatcaaactgtggaagataagtgagagggataaacgccccgagggttacaacctgaaggaggaagatggccggtacagggatccaacgactgttactactctgcgcgtacccgtattccgccccatggacctgatggttgaagcatccccccgccgcattttcgctaacgcacacacttatcatatcaacagcatttcaataaatagcgattacgagacttatttaagcgccgacgacctcagaatcaacctatggcacctagaaatcactgaccggagttttaacatagtcgacattaagccggccaatatggaagaactaacggaagtgattactgccgcggagttccatcctaactcttgcaatacatttgtctatagctcctcaaaaggtaccattcggctgtgcgacatgagagcctctgctctgtgcgatcggcatagtaagctttttgaggaacccgaggatcctagcaataggtctttcttctcagaaatcatctcaagtatcagcgacgttaaattcagtcacagcggtagatatatgatgactagagactatctctccgtgaagatatgggacctgaatatggagaatcgacctgtcgaaacctaccaagtccacgaatatctccgttctaagctgtgtagtctttacgagaacgattgcatatttgataagttcgaatgctgctggaatgggtccgactccgtcgtgatgacaggtagttacaataacttcttccgcatgtttgacagaaataccaagcgggatattacattggaggcaagcagagagaacaataagcctcggaccgttctgaaacccagaaaggtctgcgcatccggcaaacgcaaaaaagacgagatcagtgtggattcactcgacttcaacaagaagatcctgcacaccgcttggcatcctaaagaaaacattattgccgtggccactaccaacaatctttatatttttcaggataaggtcaattag

SEQ ID NO: 69798 - DNA, 1374 bp, Artificial Sequence
  derived and/or modified sequence
atgttccccaagttcagcctgcgctccatgttccacggggccggcggcggcaatgacatccagtggtgcttcagccaggtgaagggagctgtggatgatgatgtggccgaggccgacatcatcagcacagtggagttcaaccacagcggggagctgctggccactggagacaagggcggccgggtggtgatcttccagcaggagcaggagaacaagatccagagccacagcagaggagagtacaacgtgtacagcaccttccagagccatgagcctgagtttgactacctgaagagcctggagattgaggagaagatcaacaagatccgctggctgccccagaagaatgctgcccagttcctgctgagcaccaatgacaagaccatcaagctgtggaagatcagcgagcgggacaagaggcctgagggctacaacctgaaggaggaggatggccgctacagagaccccaccaccgtgaccaccctgcgggtgcctgtgttccggcccatggacctgatggtggaggccagcccccggcgcatctttgccaatgcccacacctaccacatcaacagcatcagcatcaacagcgactatgagacctacctgtctgcagatgacctgcgcatcaacctgtggcacctggagatcacagaccgctccttcaacatcgtggacatcaagccagccaacatggaggagctgacagaggtgatcacagctgctgagttccaccccaacagctgcaacacctttgtgtacagcagcagcaagggcaccatccggctgtgtgacatgagggccagcgccctgtgtgacagacacagcaagctgtttgaggagcctgaggaccccagcaacagaagcttcttcagcgagatcatcagcagcatcagtgatgtgaagttcagccacagcggccgctacatgatgacccgggactacctgtctgtgaagatctgggacctgaacatggagaacagacctgtggagacctaccaggtgcatgagtacctgcggagcaagctgtgcagcctgtatgaaaatgactgcatctttgacaagtttgagtgctgctggaatggaagtgacagcgtggtgatgacaggcagctacaacaacttcttcaggatgtttgacaggaacaccaagagggacatcaccctggaggccagccgggagaacaacaagcccaggacagtgctgaagcccaggaaggtgtgtgccagcggcaagaggaagaaggatgagatctctgtggacagcctggacttcaacaagaagatcctgcacacagcctggcaccccaaggagaacatcatcgctgtggccaccaccaacaacctgtacatcttccaggacaaggtgaactag

SEQ ID NO: 69799 - DNA, 1374 bp, Artificial Sequence
  derived and/or modified sequence
atgttccccaagttcagcctgcggagcatgttccacggcgccggcggagggaatgacattcagtggtgtttttcccaggtcaagggggcggttgatgacgatgtggctgaagctgacatcatctccacagtggagtttaaccactcaggggagctcctggcaacaggcgacaagggagggcgggtagttatattccagcaggaacaagagaataagatccagagccactcccggggcgaatacaatgtctacagtacatttcagagtcatgagcccgaatttgattacctaaagtccctggagatagaagaaaaaataaataaaatccgctggctcccgcaaaaaaatgcagcacaatttctcttgtctacgaacgacaagaccatcaagctatggaagatttccgagagagacaagcgaccggagggatacaatctcaaggaagaagatgggaggtatagggatcccaccacggtcacgaccctacgagtgcctgttttccgcccaatggatctgatggtcgaggcatccccccggaggattttcgcaaacgcccatacataccacattaatagcatttccattaattccgactacgaaacgtacctctctgccgatgacttacgaatcaacttgtggcacttggagattaccgataggtccttcaacatcgtcgacatcaaacctgccaacatggaggaacttaccgaggtgatcacagccgccgagtttcaccccaattcctgcaacacgttcgtgtactctagctcgaaggggactattagactgtgcgacatgagggcctcagccctttgcgatcggcattcaaaattgttcgaggagcccgaagatccctcaaatcggtccttcttttctgagattatctcttctatctcagatgtcaaattcagtcactcaggccgctacatgatgacgcgagattatttgtctgtgaagatttgggacctcaatatggaaaatcgtccagtggagacttatcaggtgcacgagtatctacggtcaaagctttgctctctttacgagaacgattgtatcttcgataaattcgaatgttgctggaacggctccgattcagttgttatgactggttcatacaacaattttttccgtatgttcgaccggaacacaaaacgcgatatcaccctggaagcatccagggagaataataagcctcggactgtcttgaagcctcggaaggtgtgcgcctccggcaaacgaaaaaaagatgagatctcagttgactccttggatttcaataaaaaaatcttgcacactgcatggcaccccaaggaaaatataattgctgtggcgaccactaataacctgtacatctttcaggataaggtgaactag

SEQ ID NO: 69800 - DNA, 1374 bp, Artificial Sequence
  derived and/or modified sequence
atgtttccaaagttctccttacggtccatgtttcacggggcaggaggcggaaacgacatccagtggtgcttctcccaggttaaaggcgctgtggatgatgatgtggcagaggcagacatcatctcaaccgtggaattcaatcattcaggtgagctgctcgccaccggagataaaggcggacgcgtagtcattttccaacaggagcaggagaacaaaatccagagccattctcgcggagaatacaacgtttactctaccttccagtcccacgaaccggagtttgattaccttaagagcctagagattgaggagaagattaacaaaattcggtggcttccacagaaaaatgccgctcagttcctgttgagcacaaatgacaaaaccatcaaactatggaagatctccgagcgggacaaaaggccagaagggtataacctaaaagaggaggacgggaggtaccgcgatcccacgactgtcaccacattgcgggtcccagtcttcagacctatggatctgatggtggaggcctccccacggaggatattcgccaatgcacacacataccacatcaatagtatttcaatcaatagcgactatgaaacatacctttcagccgacgatctcagaataaatctgtggcatctggagatcactgaccgttctttcaatatagtagacatcaaaccagccaacatggaagaacttactgaagttataacggccgctgagttccaccctaactcctgcaatacgtttgtgtactcaagttccaaaggaaccatccgtctctgtgatatgcgcgcttccgctctgtgtgaccgccacagcaagctttttgaagagccagaagatcccagtaaccgcagtttcttcagcgaaatcatcagtagtattagtgacgtgaaatttagccacagcggacggtacatgatgactagggactatctttcagtaaaaatttgggacctcaacatggagaatcgccctgtcgagacctaccaggttcatgagtatctgcgcagcaagctctgctccctgtatgaaaacgactgcattttcgataaatttgagtgctgttggaacgggtcagactccgtcgtgatgaccggatcatataacaacttttttcgcatgttcgacaggaacacaaagagggacattacccttgaggcctctcgggagaataataagcctagaactgttctaaagccacgaaaagtgtgcgccagtggaaagcgaaaaaaggatgagattagcgttgactctttggatttcaacaaaaaaatcctgcacactgcatggcaccctaaggaaaatatcattgccgtggccacaacaaacaatctatatatcttccaggacaaggtcaactag

SEQ ID NO: 69801 - DNA, 1878 bp, Artificial Sequence
  derived and/or modified sequence
atatgaatcattactccttacccaggcagtaatgttcccgaagttttctcttcgttctatgtttcatggagctggaggagggaatgatattcagtggtgtttttctcaggtgaaaggagcagtagatgatgatgtagcagaagcagatataatttctacagtagaatttaatcattctggagaattactagcaacaggagataaaggtggtagagttgtcatctttcaacaggagcaggagaacaaaatccagtctcatagcagaggagaatataatgtttacagcaccttccagagccatgaaccagagtttgactacttgaaaagtttagaaatagaagaaaagatcaacaaaattaggtggttaccccagaaaaatgctgctcagtttttattgtctaccaatgataaaacaataaaattatggaaaatcagtgaaagggacaaaagaccagaagggtataacttgaaagaggaggatggaaggtatagagatcctactacagttactacactacgagtgccagtctttaggcctatggatctaatggttgaggccagtccacgaagaatatttgccaatgctcatacatatcacatcaactcaatttctattaatagtgattatgaaacatatttatctgcagatgatttgcggattaatctttggcatctggaaattacagacaggagttttaacattgtggatatcaagcctgccaatatggaagagctaacagaggtgattacagcagcagaatttcatccaaacagctgtaacacatttgtatacagcagcagtaaaggaactattcggctatgtgacatgagggcatctgccctctgtgatagacattctaaattgtttgaagaacctgaagatcccagtaacaggtcatttttttccgaaatcatctcctctatttcggatgtaaaattcagccatagtggtcgatatatgatgactagagactatttgtcagtcaaaatttgggacttaaatatggaaaacaggcctgtggaaacataccaggtgcatgaatacctcagaagtaaactctgttcactgtatgaaaatgactgcatatttgacaaatttgaatgttgttggaatggatctgacagtgttgtcatgactggatcttacaataatttcttcagaatgtttgacagaaacacaaagcgagacataaccctagaagcatcgcgggaaaacaataagcctcgcacagttctgaagcctcgcaaagtctgtgcaagtggcaagcgaaagaaagatgaaataagtgttgacagcctagacttcaataagaaaatccttcacacagcctggcaccccaaggaaaatatcattgccgtagctactacaaacaatctgtatatatttcaagacaaagtgaattagggttggcattcctagcagaagaacccacttcctgcttagttgagatagttgaatctagcattcgttcctataaaagagagaggtccattgtggcgcccctttccagtgtttgacagtgtgccattcgacaacacattgttatagctacatggagaaagctctgtggattcatcactgtggtgttctccatgtctgctagccatttaggtaagggtagggcacttttaatttaaatgacttcttgcaccatcttgcctaatggactagattggactgtatcaacattgatttactccactttttatgccttccattgtgatgacgtcaaacacagtgaaagccttcagtcatgctatgggatttaattgtgtatcctcattactgtatcatttgtggggtacaccccttccccctttttttaaattaaatacagctcattcttactgtggcttgtagcattcctcctcttctgg

SEQ ID NO: 69802 - DNA, 1374 bp, Artificial Sequence
  derived and/or modified sequence
atgttccccaagttcagcctgagaagcatgttccacggcgccggcggcggcaacgacatccagtggtgcttcagccaggtgaagggcgccgtggacgacgacgtggccgaggccgacatcatcagcaccgtggagttcaaccacagcggcgagctgctggccaccggcgacaagggcggcagagtggtgatcttccagcaggagcaggagaacaagatccagagccacagcagaggcgagtacaacgtgtacagcaccttccagagccacgagcccgagttcgactacctgaagagcctggagatcgaggagaagatcaacaagatcagatggctgccccagaagaacgccgcccagttcctgctgagcaccaacgacaagaccatcaagctgtggaagatcagcgagagagacaagagacccgagggctacaacctgaaggaggaggacggcagatacagagaccccaccaccgtgaccaccctgagagtgcccgtgttcagacccatggacctgatggtggaggccagccccagaagaatcttcgccaacgcccacacctaccacatcaacagcatcagcatcaacagcgactacgagacctacctgagcgccgacgacctgagaatcaacctgtggcacctggagatcaccgacagaagcttcaacatcgtggacatcaagcccgccaacatggaggagctgaccgaggtgatcaccgccgccgagttccaccccaacagctgcaacaccttcgtgtacagcagcagcaagggcaccatcagactgtgcgacatgagagccagcgccctgtgcgacagacacagcaagctgttcgaggagcccgaggaccccagcaacagaagcttcttcagcgagatcatcagcagcatcagcgacgtgaagttcagccacagcggcagatacatgatgaccagagactacctgagcgtgaagatctgggacctgaacatggagaacagacccgtggagacctaccaggtgcacgagtacctgagaagcaagctgtgcagcctgtacgagaacgactgcatcttcgacaagttcgagtgctgctggaacggcagcgacagcgtggtgatgaccggcagctacaacaacttcttcagaatgttcgacagaaacaccaagagagacatcaccctggaggccagcagagagaacaacaagcccagaaccgtgctgaagcccagaaaggtgtgcgccagcggcaagagaaagaaggacgagatcagcgtggacagcctggacttcaacaagaagatcctgcacaccgcctggcaccccaaggagaacatcatcgccgtggccaccaccaacaacctgtacatcttccaggacaaggtgaactag

SEQ ID NO: 69803 - protein, 440 aa, Artificial Sequence
  derived and/or modified sequence
MASPVAAQAGKLLRALALRPRFLAAGSQAVQLTSRRWLNLQEYQSKKLMSDNGVRVQRFFVADTANEALEAAKRLNAKEIVLKAQILAGGRGKGVFNSGLKGGVHLTKDPNVVGQLAKQMIGYNLATKQTPKEGVKVNKVMVAEALDISRETYLAILMDRSCNGPVLVGSPQGGVDIEEVAASNPELIFKEQIDIFEGIKDSQAQRMAENLGFVGPLKSQAADQITKLYNLFLKIDATQVEVNPFGETPEGQVVCFDAKINFDDNAEFRQKDIFAMDDKSENEPIENEAAKYDLKYIGLDGNIACFVNGAGLAMATCDIIFLNGGKPANFLDLGGGVKEAQVYQAFKLLTADPKVEAILVNIFGGIVNCAIIANGITKACRELELKVPLVVRLEGTFMEKKGSYMHIKQETGNSNENITGIQENVAHQNLSKCAISIFLC

SEQ ID NO: 69804 - protein, 250 aa, Artificial Sequence
  derived and/or modified sequence
MSDNGVRVQRFFVADTANEALEAAKRLNAKEIVLKAQILAGGRGKGVFNSGLKGGVHLTKDPNVVGQLAKQMIGYNLATKQTPKEGVKVNKVMVAEALDISRETYLAILMDRSCNGPVLVGSPQGGVDIEEVAASNPELIFKEQIDIFEGIKDSQAQRMAENLGFVGPLKSQVEAILVNIFGGIVNCAIIANGITKACRELELKVPLVVRLEGTNVQEAQKILNNSGLPITSAIDLEDAAKKAVASVAKK

SEQ ID NO: 69805 - DNA, 1323 bp, Artificial Sequence
  derived and/or modified sequence
atggccagccccgtggccgcccaggccggcaagctgctgagagccctggccctgagacccagattcctggccgccggcagccaggccgtgcagctgaccagcagaagatggctgaacctgcaggagtaccagagcaagaagctgatgagcgacaacggcgtgagagtgcagagattcttcgtggccgacaccgccaacgaggccctggaggccgccaagagactgaacgccaaggagatcgtgctgaaggcccagatcctggccggcggcagaggcaagggcgtgttcaacagcggcctgaagggcggcgtgcacctgaccaaggaccccaacgtggtgggccagctggccaagcagatgatcggctacaacctggccaccaagcagacccccaaggagggcgtgaaggtgaacaaggtgatggtggccgaggccctggacatcagcagagagacctacctggccatcctgatggacagaagctgcaacggccccgtgctggtgggcagcccccagggcggcgtggacatcgaggaggtggccgccagcaaccccgagctgatcttcaaggagcagatcgacatcttcgagggcatcaaggacagccaggcccagagaatggccgagaacctgggcttcgtgggccccctgaagagccaggccgccgaccagatcaccaagctgtacaacctgttcctgaagatcgacgccacccaggtggaggtgaaccccttcggcgagacccccgagggccaggtggtgtgcttcgacgccaagatcaacttcgacgacaacgccgagttcagacagaaggacatcttcgccatggacgacaagagcgagaacgagcccatcgagaacgaggccgccaagtacgacctgaagtacatcggcctggacggcaacatcgcctgcttcgtgaacggcgccggcctggccatggccacctgcgacatcatcttcctgaacggcggcaagcccgccaacttcctggacctgggcggcggcgtgaaggaggcccaggtgtaccaggccttcaagctgctgaccgccgaccccaaggtggaggccatcctggtgaacatcttcggcggcatcgtgaactgcgccatcatcgccaacggcatcaccaaggcctgcagagagctggagctgaaggtgcccctggtggtgagactggagggcaccttcatggagaagaagggcagctacatgcacatcaagcaggagaccggcaacagcaacgagaacatcaccggcatccaggagaacgtggcccaccagaacctgagcaagtgcgccatcagcatcttcctgtgctag

SEQ ID NO: 69806 - DNA, 1323 bp, Artificial Sequence
  derived and/or modified sequence
atggcttctcctgtggcagcccaggcaggcaaactcctacgtgcgctagctttaaggcctagattcctggcagccggcagccaggctgtgcagctgacaagccgaagatggctgaacttgcaagagtatcagagcaagaagctcatgagtgacaacggcgtgagagtgcagcgctttttcgtcgccgacacagcgaacgaggctctcgaagcagccaagagactgaacgccaaggagatcgtccttaaagcccagattttagccggtggcaggggcaaaggagttttcaattccgggctcaaagggggcgtgcaccttacgaaagatcctaacgttgtcgggcaacttgctaagcaaatgattggatacaacctggccactaagcagactccgaaagagggggtgaaggtcaataaagttatggtggctgaagctctggatattagcagggagacctacttagccattctgatggatagaagttgcaatggtcctgtattagttggctctccccaaggcggggtggatatcgaagaggtcgcggctagcaatcccgagctgatttttaaggaacagatagacatattcgaaggaatcaaagactcacaagctcagaggatggctgagaatctgggatttgtagggccacttaagtcccaggccgccgatcagatcaccaagctgtacaatctgttcctaaagattgacgccactcaggtagaagttaatccatttggcgaaacacctgagggacaggtcgtttgtttcgacgccaaaattaacttcgatgacaatgccgaattccggcagaaagacattttcgcaatggacgacaaaagtgagaacgagccaattgagaacgaagctgcaaaatacgacctgaagtatatcgggctggacggaaacatcgcatgtttcgttaacggtgctgggctcgccatggcgacatgtgacattatattcctgaatggaggaaagcccgcgaacttcctggatctaggcggaggcgttaaagaagcacaggtttaccaggccttcaaacttctgactgccgacccaaaggtggaggctattctcgtgaacatcttcggcgggattgtgaactgcgccattattgcaaatggcatcactaaagcatgccgtgagttagaactgaaggtcccgctcgttgtcagactggaaggtacatttatggagaaaaaagggagctatatgcatattaaacaggagactggaaattccaatgaaaacatcacagggattcaggaaaatgtcgctcatcaaaacctgtcaaagtgcgctatttccatctttctgtgctag

SEQ ID NO: 69807 - DNA, 1323 bp, Artificial Sequence
  derived and/or modified sequence
atggccagccctgtggccgcccaggccggcaagctgctgcgggccctggccctgcggccccgcttcctggccgccggcagccaggccgtgcagctgaccagccgccgctggctgaacctgcaggagtaccagagcaagaagctgatgtctgacaacggggtgcgggtgcagcgcttctttgtggccgacacagccaatgaggccctggaggccgccaagaggctgaatgccaaggagatcgtgctgaaggcccagatcctggccggcggccggggcaaaggagtcttcaacagcggcctgaagggcggcgtgcacctgaccaaggaccccaacgtggtgggccagctggccaagcagatgattggctacaacctggccaccaagcagacccccaaggagggcgtgaaggtgaacaaggtgatggtggccgaggccctggacatcagccgggagacctacctggccatcctgatggacaggagctgcaatggacctgtgctggtgggcagcccccagggcggcgtggacatcgaggaggtggccgccagcaaccctgagctgatcttcaaggagcagattgacatctttgagggcatcaaggacagccaggcccagaggatggccgagaacctgggctttgtgggccccctgaagagccaggccgctgaccagatcaccaagctgtacaacctcttcctgaagattgatgccacccaggtggaggtgaacccctttggagagaccccagagggccaggtggtgtgctttgatgccaagatcaactttgatgacaatgctgagttccggcagaaggacatctttgccatggatgacaagtcagaaaatgagcccattgaaaatgaagctgccaagtatgacctgaagtacatcggcctggatggcaacatcgcctgctttgtgaatggagctggcctggccatggccacctgtgacatcatcttcctgaatggaggcaagccagccaacttcctggacctgggcggcggcgtgaaggaggcccaggtgtaccaggccttcaagctgctgacagctgaccccaaggtggaggccatcctggtgaacatctttggaggcatcgtgaactgtgccatcatcgccaacggcatcaccaaggcctgccgggagctggagctgaaggtgcccctggtggtgcggctggagggcaccttcatggagaagaagggcagctacatgcacatcaagcaggagactggaaacagcaatgaaaacatcaccggcatccaggagaatgtggcccaccagaacctgagcaaatgtgccatcagcatcttcctgtgctag

SEQ ID NO: 69808 - DNA, 1323 bp, Artificial Sequence
  derived and/or modified sequence
atggccagccccgtggccgcccaggccggcaagctgctgcgggccctggctctccgtcctagattcctcgcggccggttcacaggccgtgcaattgacgtcccgcagatggcttaatctccaggagtaccagagcaaaaagctaatgtcagataacggtgtgagggttcagcgcttttttgtcgcggatactgcgaacgaagccctggaagcggccaaaaggttaaatgcaaaggagatcgtgctcaaggcccagattctcgccgggggtcgtggaaagggggtctttaattccggcctaaaaggaggggttcacttaacgaaggatccaaacgtggtcggacagctggctaagcagatgataggatacaacctggccaccaagcagacccctaaggaaggagtcaaagttaacaaggtgatggtggcagaggctctggacattagccgtgaaacctaccttgcaatattgatggatcggtcttgcaatggacccgtgctcgtcggcagcccacagggcggcgtcgacattgaagaggtggccgcctccaaccctgaacttatctttaaagagcaaatcgacattttcgaaggcatcaaggatagtcaagctcaaagaatggccgaaaacctgggattcgtgggcccactgaagagtcaagccgcagatcagatcacgaaactttataacctgttcctaaagatcgatgccacgcaggtggaagttaatcctttcggcgaaacaccagaaggacaggttgtgtgcttcgacgccaagattaactttgatgacaacgcagagtttaggcagaaggacatctttgccatggatgacaagtccgagaacgaacctattgaaaacgaagcagcaaagtacgacctgaagtatatcgggctcgacggtaatatagcttgttttgtcaatggagccggactcgcaatggctacatgtgacataatttttcttaacggtggtaagcctgctaactttcttgacctcggaggcggggtgaaggaggcccaagtctaccaagctttcaagctcctcacggcagatcccaaagttgaagccattctcgtgaacatatttggtggaatcgtgaattgtgcaattatagctaatggcatcacgaaggcgtgtcgtgagctagagttaaaggttccgctcgtggtgcgtctagaagggacatttatggagaaaaagggttcatatatgcatataaaacaggagacagggaattcgaacgagaacattaccggcattcaggaaaacgtggcacatcagaatctcagcaaatgcgcaatcagcatctttttgtgctag

SEQ ID NO: 69809 - DNA, 1323 bp, Artificial Sequence
  derived and/or modified sequence
atggcttcacccgttgcagcccaggcgggaaaattgctcagggcgctcgcgcttcggccaagatttctggccgcagggagccaggcagtgcagcttaccagccgcaggtggcttaaccttcaggagtatcagagcaagaaactaatgtccgataatggagtccgagtgcaacgcttctttgttgccgacacggctaatgaggccctcgaggccgctaaacggctcaatgccaaggaaatcgtgctaaaggctcaaatactcgccggtggtagaggtaagggcgtcttcaactctgggctgaaaggtggtgtgcacctgacgaaggaccccaacgtggtaggacagcttgccaaacagatgatcggctacaaccttgcaaccaagcagacccctaaagaaggggttaaagtcaataaagttatggtggcggaggctttggatatctctcgcgaaacttacctggcaatcctgatggaccgcagctgtaatgggcctgtcttggtggggagcccccaggggggagtggacattgaggaagtggccgcttcaaatccggagctgatttttaaggaacagattgatatcttcgaggggataaaggacagtcaagctcaacgcatggctgaaaacctcggctttgtgggtccacttaagagccaggctgccgaccaaatcactaaattatataacttgtttctgaagatagacgctacccaggttgaggttaacccttttggggagacacccgagggacaggtggtctgcttcgacgccaagatcaactttgacgacaacgccgagtttcgacagaaagatatctttgctatggacgacaagagcgaaaatgagccaatcgagaacgaggctgccaaatatgatttaaagtatatcggtctcgatggaaatatcgcatgcttcgtgaatggagctgggttggccatggcaacatgcgatattatctttctcaacggcggaaaacctgctaattttcttgacctgggcggaggggtgaaggaagctcaggtctaccaagcatttaagctcctcaccgccgaccccaaggtggaggccatcttggtaaacatcttcgggggtattgttaattgcgccattattgctaatggtattaccaaagcatgtagggagctggaactcaaggtgccgctcgttgttaggctggaaggtacctttatggaaaagaagggcagctacatgcatatcaaacaagagaccggtaacagcaatgagaatattaccggcatacaagaaaacgtcgcccatcaaaacctctctaagtgtgctatttccatcttcctgtgctag

SEQ ID NO: 69810 - DNA, 1516 bp, Artificial Sequence
  derived and/or modified sequence
cccgtgccgagtttcctgtttaagatggcgtcccccgtagcagcgcaggccgggaagcttctgcgagccctagcgctgcggccccgcttcctggcggccgggtcccaggcagttcaattaacctccagaagatggctgaacctgcaggaataccagagcaagaaactgatgtctgacaacggagtgagagttcaaagattctttgtagcagacactgcaaatgaagctctcgaggctgctaagagactaaatgcaaaagaaattgttttaaaagcccagatcttagctggaggaagaggaaaaggtgtcttcaatagtggtttgaaaggaggtgttcatttaacaaaagaccctaatgttgtgggacagctggctaaacagatgattgggtacaatctagcgacaaaacaaactccaaaagaaggtgtgaaagttaacaaggtgatggttgctgaagccttggatatttccagagaaacctacctggcaattctgatggaccggtcctgcaatggccccgtgctggtgggcagcccccaggggggcgtcgacattgaagaggtggctgcttcaaacccggagctcatttttaaggagcaaattgacatttttgaaggaataaaggacagccaagctcagcggatggccgaaaatctaggcttcgttgggcctttgaaaagccaggctgcagatcaaattacgaagctgtataatctcttcctgaaaattgatgctactcaggtggaagtgaatccctttggtgaaactccagaaggacaagttgtctgttttgatgccaagataaactttgatgacaacgcagaattccgacaaaaagacatatttgctatggacgacaaatcagagaatgagcccattgaaaatgaagctgccaaatatgatctaaaatacataggactagatgggaacattgcctgctttgtgaatggtgctgggctcgccatggctacttgtgatatcattttccttaatggtgggaagccagccaacttcttggatcttggaggtggtgtaaaggaagctcaagtatatcaagcattcaaattgctcacagctgatcctaaggttgaagccatccttgtcaatatatttggtggtatcgtcaactgtgccatcattgccaatgggatcaccaaagcctgccgggagctagaactcaaggtgcccctggtggtccggcttgaaggtacttttatggaaaaaaaaggaagttatatgcacataaaacaagaaacaggaaattcaaatgagaatataactggtatccaagagaacgtcgcccaccaaaatctgagtaagtgtgccatcagcatttttttatgttaaagatttactttgctaagatacttgctgagattacttttccaaattaatgaatatcatcacaaaattatttttttacatttgggttcagctgcatgctaatggaaatggaaaatggaagggcatggcttatagctgttcattcaccaaaaatattttagaattgtgtcca

SEQ ID NO: 69811 - protein, 212 aa, Artificial Sequence
  derived and/or modified sequence
MPLLLLLPLLWADLTHRPKILIPGTLEPGHSKNLTCSVSWACEQGTPPIFSWLSAAPTSLGPRTTHSSVLIITPRPQDHGTNLTCQVKFAGAGVTTERTIQLNVTYVPQNPTTGIFPGDGSGKQETRAGVVHGAIGGAGVTALLALCLCLIFFIVKTHRRKAARTAVGRNDTHPTTGSASPVSDGASWHPVCPADTSSQCGPPSCPIQHFQN

SEQ ID NO: 69812 - DNA, 834 bp, Artificial Sequence
  derived and/or modified sequence
atgcccgagagcgtgaccgtgcaggagggcctgtgcatcttcgtgcactgcagcgtgttctacctggagtacggctggaaggacagcacccccgcctacggccactggttcagagagggcgtgagcgtggaccaggagacccccgtggccaccaacaacagcacccagaaggtgcagaaggagacccagggcagattccacctgctgggcgaccccagcagaaacaactgcagcctgagcatcagagacgccagaagaagagacaacggcagctacttcttctgggtggccagaggcagaaccaagttcagctacaagtacagccccctgagcgtgtacgtgaccgccctgacccacagacccgacatcctgatccccgagttcctgaagagcggccaccccagcaacctgacctgcagcgtgccctgggtgtgcgagcagggcaccccccccatcttcagctggatgagcgccgcccccaccagcctgggccccagaaccctgcacagcagcgtgctgaccatcatccccagaccccaggaccacggcaccaacctgatctgccaggtgaccttccccggcgccggcgtgaccaccgagagaaccatccagctgagcgtgagctaccccctgatgaaccccgtgatcgaggccagcctggaggacggcaccggcaagagcggcaccgtggaggaggtggtggtgctggccgtgggcgtggtggccgtgaagatcctgctgctgtgcctgtgcctgatcatcctgagcttccacaagaagaaggccgtgagagccgtggaggtggaggagaacgtgtacgccgtgatgggctag

SEQ ID NO: 69813 - DNA, 834 bp, Artificial Sequence
  derived and/or modified sequence
atgcccgagagcgttacagtccaggaaggcctgtgcatctttgtgcattgttctgtgttctacctcgaatacgggtggaaggacagcaccccagcctatggtcactggttccgggaaggcgtctccgttgatcaagaaacgcccgtggcaactaataatagcacacaaaaggtccagaaagagacccaggggcgattccatctcctcggtgaccctagcagaaataactgctccctgagcatcagagatgcacggaggcgagacaatgggagctattttttctgggtcgcccgggggaggacaaaattcagctataagtactcccccctgtccgtgtatgtgaccgcactcacccatcgccccgacatcctcattcctgaatttctgaagtccggtcacccgtccaatttaacatgttccgtaccttgggtctgcgagcaggggactccccctatctttagttggatgagtgccgctcctaccagtctcggtccaaggacccttcattcctcggtcttaaccatcattccacgtccccaggaccacgggaccaatctaatatgccaggtcaccttccccggggccggggtcacaacagaaaggaccatccagcttagtgtgtcttacccacttatgaaccctgtcatagaggcatctctggaggatggcaccggcaagtccgggaccgtggaggaggtcgtcgtgctggccgtgggggttgttgccgttaaaattctgctgttgtgtctctgcttgatcatcttgtcattccataaaaagaaggccgtccgcgccgttgaggtcgaggaaaatgtgtatgccgtgatgggatag

SEQ ID NO: 69814 - DNA, 834 bp, Artificial Sequence
  derived and/or modified sequence
atgcctgagagcgtgacagtgcaggagggcctgtgcatctttgtgcactgcagcgtcttctacctggagtatggctggaaggacagcaccccagcctacggccactggttccgggagggcgtgtctgtggaccaggagacccctgtggccaccaacaacagcacccagaaggtgcagaaggagacccagggccgcttccacctgctgggggaccccagcaggaacaactgcagcctgagcatcagagatgcccggcggcgggacaatggcagctacttcttctgggtggcccggggccgcaccaagttctcctacaagtacagccccctgtctgtgtatgtgacagccctgacccacaggccagacatcctgatccctgagttcctgaagagcggccaccccagcaacctgacctgcagcgtgccctgggtgtgtgagcagggcaccccacccatcttctcctggatgtctgctgcccccaccagcctgggccccaggaccctgcacagctctgtgctgaccatcatcccccggccccaggaccacggcaccaacctgatctgccaggtgaccttccctggagctggggtgaccacagagaggaccatccagctgtctgtgtcctaccccctgatgaaccctgtgattgaggccagcctggaggatggcaccgggaagtctggaacagtggaggaggtggtggtgctggccgtgggcgtggtggccgtgaagatcctgctgctgtgcctgtgcctgatcatcctgtccttccacaagaagaaggctgtgcgggctgtggaggtggaggagaatgtgtatgctgtgatgggctag

SEQ ID NO: 69815 - DNA, 834 bp, Artificial Sequence
  derived and/or modified sequence
atgcccgagagcgtgaccgtgcaggagggcctgtgcatcttcgtgcattgctcagttttttatcttgagtatggatggaaagatagcacccccgcctacgggcactggttccgggagggtgtgagtgtggatcaggaaacaccagtggcaactaacaattcaacccagaaggtgcagaaggagacccagggaaggttccacctactcggagatccctccaggaataattgctccctgagcattcgggatgctagaaggcgtgacaacggaagttatttcttctgggtggcgcgcggccgtacgaagttctcatacaaatactcgcccctgtcggtgtatgttactgcactgacccataggcctgacattctaatccccgaattcctgaaatcagggcacccaagcaatctgacctgtagcgtgccttgggtctgcgagcagggtaccccgcctatttttagctggatgagcgctgcccccacctcactgggaccccgaacactacattcgagtgtgctgacaataattccacggccacaagaccatggcacgaacttgatttgtcaggtaacctttcctggcgcaggcgtgaccaccgagcgtactatccagctttccgtctcctaccccctgatgaatcccgttatagaggcaagcctggaggacggcacaggcaaatccggtacagttgaggaggttgtcgttcttgctgtgggtgtggtggcggttaagattttgctcctgtgcctgtgtctcattattttatcctttcacaagaagaaagcggtgagagctgtcgaagtagaggagaatgtgtatgcggtgatgggttag

SEQ ID NO: 69816 - DNA, 834 bp, Artificial Sequence
  derived and/or modified sequence
atgccagagtcggtgacagtccaggagggcctgtgcatttttgtccactgctccgtgttttacctcgagtacggttggaaagattcgaccccagcttacggtcactggtttagggagggtgtgtctgtagaccaggaaacgccggtcgctactaataacagtacccagaaggtgcagaaggaaacccagggccgtttccacctcctgggagatccatctcgtaacaattgttcactgtccatccgggatgctaggagacgcgataacggttcatacttcttctgggttgctagagggcgaactaaattctcttacaaatattcccccctgtctgtgtacgtcaccgcattaacccaccggccagatatactaatccctgagttcctgaaatctggtcatccaagcaacttaacatgtagtgtgccctgggtgtgcgaacagggcactcctcccattttctcatggatgtcagcagctccgaccagtcttggtccgagaaccttacactcatcagttcttaccattatcccccgacctcaggatcatggtactaatctgatatgccaggtcacgtttccaggggctggagtgactacagaaagaactattcaattgtccgtatcttatcccttaatgaacccggtgatcgaggcatccttggaagacggaaccgggaaaagcgggaccgtcgaagaagtagtggttcttgcagtgggagtcgtagcagtgaagatcctgctgttatgcctttgcttgattattctgtcatttcacaagaagaaagcagtgcgtgctgtggaggtggaggaaaacgtctacgcagtcatgggttag

SEQ ID NO: 69817 - DNA, 1373 bp, Artificial Sequence
  derived and/or modified sequence
agagatgctgccgctgctgctgccgctgcccctgctgtgggcagggccctcgctcaggatgcaagattccggctggagatgccagagtccgtgacggtgcaggagggtctgtgcatctttgtgcactgttcggtcttctacctcgagtatggctggaaagattctacccctgcttatggccactggttccgggaaggggtcagtgtagaccaggagactccagtggccacaaacaactcaactcaaaaagtgcagaaggagacccagggccgattccacctcctcggtgatccctcaaggaacaactgctccctgagcatcagagacgccaggaggagggacaacggttcatacttcttttgggtggcgagaggaagaacaaaatttagttacaaatattccccgctctctgtgtatgtgacagccctgacccacaggcccgacatcctcatcccggagttcctaaagtctggccatcccagcaacctgacctgctctgtgccctgggtctgtgagcagggaacaccccccatcttctcctggatgtcagctgcccccacctccctgggccccaggaccctccactcctcagtgctcacgatcatcccacggcctcaggaccacggcaccaacctcatctgtcaggtgacgttccccggagctggtgtgaccacggagagaaccatccagctcagtgtctcctatcctctaatgaacccagtgattgaagcctccctagaagacggcacagggaaatcaggaaccgtggaagaggtggttgttttggccgtgggggtagtggctgtgaagatcctgcttctctgcctttgcctcatcatcctcagtttccacaagaagaaggcggtgagggcagtggaggttgaggagaatgtatatgctgtcatgggttaatctctcaggcctccagactgtacttccagatgtctcctcatccagttcctccacagtctgaatggccatgtttcctcttcattgctggagaatgaagtgcaaatgccactgcctggactgaaggcctttcacgatctgtcttctgctggactctgctcctgatcccccttctccttgcatcacccgaagtctccctacacccaccaggccaagccctctgtgattctgagactttgcatgtgtagttacttctcctgaaatggccttcctccccattcctgccaatccaggtccttatcatccttcaggttgtcttaaatgtcatccaggtgtgtgtatttttatgtaatccttgtatgatattaagcggagatgtggcatttgttcattaatttgtagacatattcagtaaccatactgaatacatataatgactatgtgccagcatttccgtatgtgca

SEQ ID NO: 69818 - DNA, 933 bp, Artificial Sequence
  derived and/or modified sequence
atgcctttgcttctgttgctcccgctgctgtgggcaggcgcactggctatggaccccaatttttggctgcaagtgcaggaatcagttactgtgcaggaggggctgtgcgttctggtcccctgcacgttttttcaccccatcccgtactacgacaagaattccccagttcatggatactggttccgcgaaggagctatcataagcagagacagccctgtggccactaataaattggatcaggaagttcaggaggagacccaggggagatttaggctcctcggggacccctctcggaacaactgtagtctttcaattgtggatgcccggaggcgagacaacggctcatactttttccgcatggagcgggggagcactaagtattcttacaaatcccctcagctcagtgtccacgttacagatcttacacacaggcccaagatattaattccggggactttggaacccggccactctaagaacctgacctgctctgtgtcatgggcctgcgaacagggcacacctccaatatttagttggctttcggctgctcctacttctctcggcccgaggacaacccactcatccgttctgatcatcacccctcggccacaagatcacgggactaacttaacatgtcaggtcaaatttgctggcgcaggggttacaaccgagcggacaatacaacttaacgtgacctatgtaccgcagaatcctacgactgggattttccctggtgacggtagcggcaagcaggagactcgcgctggggtggtgcatggcgccatcggcggtgccggagtcactgccctcctggccctgtgtctgtgcctaatcttctttatcgtcaaaacccataggcgtaaagcagccaggaccgctgtcggtaggaatgacacccacccaacaaccggctctgcctcaccagtgagatag

SEQ ID NO: 69819 - DNA, 933 bp, Artificial Sequence
  derived and/or modified sequence
atgcccctgctgctgctgctgcccctgctgtgggccggggccctggccatggaccccaacttctggctgcaggtgcaggagagcgtgacagtgcaggagggcctgtgtgtgctggtgccctgcaccttcttccaccccatcccctactatgacaagaacagccctgtgcacggctactggttccgggagggcgccatcatcagccgggacagccctgtggccaccaacaagctggaccaggaggtgcaggaggagacccagggccgcttccggctgctgggggaccccagcaggaacaactgcagcctgagcatcgtggatgcccggcggcgggacaatggcagctacttcttcaggatggagcggggcagcaccaagtacagctacaagagcccccagctgtctgtgcacgtgacagacctgacccaccggcccaagatcctgatccctggcaccctggagcccggccacagcaagaacctgacctgcagcgtgtcctgggcctgtgagcagggcaccccacccatcttctcctggctgtctgctgcccccaccagcctgggccccaggaccacccacagctctgtgctgatcatcaccccccggccccaggaccacggcaccaacctgacctgccaggtgaagtttgctggagctggggtgaccacagagaggaccatccagctgaatgtgacctacgtgccccagaaccccaccaccggcatcttccctggagatggcagcggcaagcaggagaccagggctggggtggtgcatggagccatcggcggggccggcgtgacagccctgctggccctgtgcctgtgcctgatcttcttcatcgtgaagacccacaggaggaaggccgccaggacagctgtgggcagaaatgacacccaccccaccactggaagtgccagccctgtgaggtag

SEQ ID NO: 69820 - DNA, 933 bp, Artificial Sequence
  derived and/or modified sequence
atgcccctgctgctgctgctgcccctgctgtgggccggcgccctggcgatggatcccaatttttggctgcaggtccaagaatcagttaccgttcaggaaggattgtgtgttcttgtcccctgcacatttttccaccctatcccatattacgacaaaaattcgccagttcacgggtactggttccgagagggtgcaattatcagccgagattcaccagttgcgaccaacaagctagaccaggaagtgcaggaggagacacagggcaggtttcgccttctcggagatcccagtcggaataactgttcactatcaatcgtggacgcacgccgcagagataacggctcttacttcttccggatggagcgtgggtcgacaaaatattcctataagtcaccccagctctccgtgcatgttacagacctcacccacagaccaaaaatcctgattcccggcaccttggagcccggacactcaaaaaacctcacatgcagtgtaagttgggcctgcgagcagggaactccaccaatcttttcatggctttctgcggcccccacttcacttggaccccgtaccacccacagtagtgtgcttatcatcacgccacggccacaggaccatggtaccaacctgacttgccaggtcaagtttgcgggcgctggagtgacaactgagcggacaatacagctgaatgtgacgtatgttccacaaaaccctactacgggaattttccctggcgacgggagtgggaaacaggagacccgggccggcgtggtccacggtgccataggtggtgcaggagtcacggcactgctggcattgtgcttgtgtctaatctttttcatcgttaagactcatcgccgcaaagccgctaggaccgccgtcggtcgcaacgacacccatccaacaaccggaagcgctagcccagtacgctag

SEQ ID NO: 69821 - DNA, 933 bp, Artificial Sequence
  derived and/or modified sequence
atgccactgttgctgctgctgcccttactctgggctggggctttggccatggaccccaatttttggcttcaggtccaagaaagtgtgacagtgcaagagggcctgtgtgtgctggtaccctgcaccttcttccatccaattccatactatgataagaattcccctgtgcatggctactggtttcgagaaggagctattatttcacgtgacagccctgtggctaccaataaactggaccaagaggttcaggaggaaacgcagggcagattcaggctcttgggagatccaagtcgcaacaactgcagcctgtccatcgttgacgccaggagacgcgacaacggtagctactttttcagaatggagcgaggttccaccaagtatagctataaaagcccccagctgtctgtgcacgtcaccgacttaacacacaggccaaagatcctcattcctggaaccctggaaccagggcactccaagaacctgacttgtagcgtgtcttgggcatgcgaacagggaactcctcccattttcagttggctgagtgcggctccaacttctcttggccctagaaccactcactcatctgtgctgatcataaccccccgaccacaggaccacgggaccaaccttacatgtcaggtgaagttcgctggcgctggagttaccacagaaaggaccatccagttaaatgtgacctacgtgccccagaatccaaccactggcatctttcctggcgatgggagtggaaagcaggagactcgcgctggagtggtgcacggagctattggtggggcaggcgtgactgcgctgctagccctgtgtctatgtttaatttttttcatcgtgaaaactcatagacggaaggccgctcgcacagccgtcggcagaaacgacactcatcctactacggggagtgccagtcccgtgcggtag

SEQ ID NO: 69822 - DNA, 933 bp, Artificial Sequence
  derived and/or modified sequence
atgcccctgctgctgctgctgcccctgctgtgggccggcgccctggccatggaccccaacttctggctgcaggtgcaggagagcgtgaccgtgcaggagggcctgtgcgtgctggtgccctgcaccttcttccaccccatcccctactacgacaagaacagccccgtgcacggctactggttcagagagggcgccatcatcagcagagacagccccgtggccaccaacaagctggaccaggaggtgcaggaggagacccagggcagattcagactgctgggcgaccccagcagaaacaactgcagcctgagcatcgtggacgccagaagaagagacaacggcagctacttcttcagaatggagagaggcagcaccaagtacagctacaagagcccccagctgagcgtgcacgtgaccgacctgacccacagacccaagatcctgatccccggcaccctggagcccggccacagcaagaacctgacctgcagcgtgagctgggcctgcgagcagggcaccccccccatcttcagctggctgagcgccgcccccaccagcctgggccccagaaccacccacagcagcgtgctgatcatcacccccagaccccaggaccacggcaccaacctgacctgccaggtgaagttcgccggcgccggcgtgaccaccgagagaaccatccagctgaacgtgacctacgtgccccagaaccccaccaccggcatcttccccggcgacggcagcggcaagcaggagaccagagccggcgtggtgcacggcgccatcggcggcgccggcgtgaccgccctgctggccctgtgcctgtgcctgatcttcttcatcgtgaagacccacagaagaaaggccgccagaaccgccgtgggcagaaacgacacccaccccaccaccggcagcgccagccccgtgagatag

SEQ ID NO: 69823 - protein, 895 aa, Artificial Sequence
  derived and/or modified sequence
MRMSVGLSLLLPLSGRTFLLLLSVVMAQSHWPSEPSEAVRDWENQLEASMHSVLSDLHEAVPTVVGIPDGTAVVGRSFRVTIPTDLIASSGDIIKVSAAGKEALPSWLHWDSQSHTLEGLPLDTDKGVHYISVSATRLGANGSHIPQTSSVFSIEVYPEDHSELQSVRTASPDPGEVVSSACAADEPVTVLTVILDADLTKMTPKQRIDLLHRMRSFSEVELHNMKLVPVVNNRLFDMSAFMAGPGNAKKVVENGALLSWKLGCSLNQNSVPDIHGVEAPAREGAMSAQLGYPVVGWHIANKKPPLPKRVRRQIHATPTPVTAIGPPTTAIQEPPSRIVPTPTSPAIAPPTETMAPPVRDPVPGKPTVTIRTRGAIIQTPTLGPIQPTRVSEAGTTVPGQIRPTMTIPGYVEPTAVATPPTTTTKKPRVSTPKPATPSTDSTTTTTRRPTKKPRTPRPVPRVTTKVSITRLETASPPTRIRTTTSGVPRGGEPNQRPELKNHIDRVDAWVGTYFEVKIPSDTFYDHEDTTTDKLKLTLKLREQQLVGEKSWVQFNSNSQLMYGLPDSSHVGKHEYFMHATDKGGLSAVDAFEIHVHRRPQGDRAPARFKAKFVGDPALVLNDIHKKIALVKKLAFAFGDRNCSTITLQNITRGSIVVEWTNNTLPLEPCPKEQIAGLSRRIAEDDGKPRPAFSNALEPDFKATSITVTGSGSCRHLQFIPVVPPRRVPSEAPPTEVPDRDPEKSSEDDVYLHTVIPAVVVAAILLIAGIIAMICYRKKRKGKLTLEDQATFIKKGVPIIFADELDDSKPPPSSSMPLILQEEKAPLPPPEYPNQSVPETTPLNQDTMGEYTPLRDEDPNAPPYQPPPPFTAPMEGKGSRPKNMTPYRSPPPYVPP

SEQ ID NO: 69824 - protein, 143 aa, Artificial Sequence
  derived and/or modified sequence
MTPKQRIDLLHRMRSFSEVELHNMKLVPVVNNRLFDMSAFMAGPGNAKKVVENGALLSWKLGCSLNQNSVPDIHGVEAPAREGAMSAQLGYPVVGWHIANKKPPALSGPPKPQSSWRDFGDFFIFIFCLTAFGLFIENSSLHF

SEQ ID NO: 69825 - protein, 88 aa, Artificial Sequence
  derived and/or modified sequence
MRMSVGLSLLLPLSGRTFLLLLSVVMAQSHWPSEPSEAVRDWENQLEASMHSVLSDLHEAVPTVVGIPDGTAVVGRSFRVTIPTDLIA

SEQ ID NO: 69826 - protein, 106 aa, Artificial Sequence
  derived and/or modified sequence
MRMSVGLSLLLPLSGRTFLLLLSVVMAQSHWPSEPSEAVRDWENQLEASMHSVLSDLHEAVPTVVGIPDGTAVVGRSFRVTIPTDLIASSGDIIKVSAAGKEALPS

SEQ ID NO: 69827 - protein, 96 aa, Artificial Sequence
  derived and/or modified sequence
MRMSVGLSLLLPLSGRTFLLLLSVVMAQSHWPSEPSEAVRDWENQLEASMHSVLSDLHEAVPTVVGIPDGTAVVGRSFRVTIPTDLIASSGDIIKV

SEQ ID NO: 69828 - protein, 117 aa, Artificial Sequence
  derived and/or modified sequence
MRMSVGLSLLLPLSGRTFLLLLSVVMAQSHWPSEPSEAVRDWENQLEASMHSVLSDLHEAVPTVVGIPDGTAVVGRSFRVTIPTDLIASSGDIIKVSAAGKEALPSWLHWDSQSHTL

SEQ ID NO: 69829 - protein, 52 aa, Artificial Sequence
  derived and/or modified sequence
MRMSVGLSLLLPLSGRTFLLLLSVVMAQSHWPSEPSEAVRDWENQLEASMHS

SEQ ID NO: 69830 - protein, 86 aa, Artificial Sequence
  derived and/or modified sequence
MRMSVGLSLLLPLSGRTFLLLLSVVMAQSHWPSEPSEAVRDWENQLEASMHSVLSDLHEAVPTVVGIPDGTAVVGRSFRVTIPTDL

SEQ ID NO: 69831 - protein, 41 aa, Artificial Sequence
  derived and/or modified sequence
MRMSVGLSLLLPLSGRTFLLLLSVVMAQSHWPSEPSEAVRD

SEQ ID NO: 69832 - DNA, 2688 bp, Artificial Sequence
  derived and/or modified sequence
atgcgtatgtcagtgggcctgtccttattgcttcccctgtcaggaagaacttttctgctgctgctctctgttgttatggcacagagccattggccgtccgagccctctgaggcagtacgggactgggagaatcagctggaagcttccatgcactccgtgttatcagatctgcacgaagccgttccgaccgtggttggcattcccgatgggacagctgtggtcgggcggtcgttccgcgtaactataccaactgacctcatagcctctagcggcgatatcataaaggtctccgcagctgggaaagaggcactgccaagttggttgcattgggactcacagagccacaccctcgaaggcctgcctctcgatacagacaagggtgtacactacatctccgtgtccgcgacacggctcggagccaatggatcccacatcccacagaccagctctgtttttagtatagaagtgtaccccgaggatcacagcgaattgcagagcgttaggacagcctctcccgacccaggcgaggtcgtcagtagcgcgtgtgcagcagatgagcccgtgaccgtcctcaccgttatcttggatgccgaccttacaaagatgaccccaaaacagaggattgaccttttgcatagaatgcggtccttctcagaggttgaactgcataatatgaagctggttccagtggtaaacaatcggttgtttgacatgtctgctttcatggccggacccggcaatgcaaaaaaggttgtcgagaatggcgcgttgctgtcctggaagctgggatgctcgttgaatcaaaattccgttccagatattcacggagtagaagcccctgcacgagagggggccatgtccgcacaactcggctatcccgtagttggttggcacatcgcaaacaaaaaaccccccttgccgaagagggtgcggcgtcagatccacgctaccccaacacctgtgaccgctattggaccccccactaccgccattcaggaaccgcccagtagaatcgtacccacacccacctcaccagcaatagcacctcctacggaaacaatggcaccgcccgtcagagatcccgtacctggcaagcccacagtcaccattcggacccggggggcaatcatccagacgcctaccctgggacccattcagcctacaagggtgtccgaggccggtactactgtccccgggcagatccgtccgacaatgaccattccaggctacgtggagcccacagctgtcgccactccccccaccaccacgacaaaaaagccaagagtttccactcccaagcccgcaacacccagcactgacagtacgactacaaccacgcgaaggcctacaaaaaagccacgcacaccaagaccagtgccgcgtgtcactaccaaggtgtctatcactaggcttgagacggctagcccacctactaggatcaggacgactacctctggggtgccacggggtggggagcctaatcagcgcccagaactgaagaatcatatcgatagagtcgatgcttgggttggaacatactttgaggtgaaaatcccatctgacacattctacgatcatgaggatacgacaaccgacaagctaaagctgacgctcaagttgagagaacagcagctagtgggcgagaaatcttgggtgcagttcaactctaattcacagcttatgtacggcctgcctgattcttcacatgtcggtaaacacgagtacttcatgcacgcaaccgacaaaggagggctgagcgcagtagacgcctttgagattcacgtacatcgcaggcctcaaggggatcgggcgcctgcgaggttcaaggctaagtttgtgggggaccctgcattggttctgaatgatatccacaagaaaattgctcttgttaaaaagctggccttcgcgttcggtgacaggaattgttcaacgataacactccagaatatcaccagggggagcattgtcgttgagtggacgaacaatacccttcccctggagccctgtcccaaggagcagatcgccggtctcagtcgccggatcgctgaggatgacgggaagccacggcccgccttcagcaatgccctggagcctgatttcaaggctactagcattactgtcactggctcagggtcctgcagacacttacagtttattccagtagtgcccccgcggcgagttcccagcgaggccccgccaaccgaggtgcctgatcgagacccagagaagagcagcgaagacgatgtgtatctccacacagttattcctgccgtagttgtcgccgcgattttactaattgccgggattattgctatgatctgttatcgcaagaaacggaaaggtaaactcactcttgaagaccaggccacgtttatcaaaaagggggtgcctatcatttttgccgatgagcttgatgacagcaaacctccgccgagcagttcaatgccactgatcctccaggaagaaaaggcccctctgccacctcccgaatacccaaaccaatccgtgcccgaaacaacccctctcaatcaggatacaatgggcgaatatacccccctcagggatgaagaccccaacgcacctccctaccagccaccaccaccctttacagcacctatggagggtaagggttctcggcccaagaatatgaccccctatcggtcacctcccccttacgtgcccccctag

SEQ ID NO: 69833 - DNA, 432 bp, Artificial Sequence
  derived and/or modified sequence
atgacacctaagcagagaatcgatctgctccaccgcatgcgcagcttctctgaagtggagctccataacatgaagctcgtcccagtcgtgaacaaccggttatttgatatgagcgcgtttatggcgggccctggcaatgccaaaaaagtggtggaaaacggtgctcttctgtcatggaaacttggctgctctcttaatcagaactccgttcccgatatccacggtgtcgaagcaccagcgagagagggagctatgtctgctcagctgggctaccctgtggtgggatggcacattgcaaacaaaaagccccctgctctttcaggcccgcctaagcctcagagctcctggcgcgacttcggggattttttcatcttcatcttttgcctgactgcatttggactcttcatcgagaattcttcactgcatttttag

SEQ ID NO: 69834 - DNA, 267 bp, Artificial Sequence
  derived and/or modified sequence
atgaggatgagcgttggattgagcctgctcctgccactcagtggtcggacatttcttctgcttctgtctgtggttatggctcaatcacattggccaagcgagccctctgaggcagtgcgagattgggagaaccagctggaggccagcatgcactccgtgcttagcgacctgcatgaggctgttcctaccgtggttggcattccagacggaaccgctgtcgtaggtagatcattccgcgttacaatcccaaccgatctgattgcctag

SEQ ID NO: 69835 - DNA, 321 bp, Artificial Sequence
  derived and/or modified sequence
atgaggatgtccgtggggttgtccttgctgctccctctcagtggtcggacgttcctgctgttgttaagtgtggtgatggcccagtcgcactggccttccgagccttctgaagctgtgagggactgggagaatcagctggaggcctctatgcactccgtactctcagacctgcatgaggccgtgcccacggttgtgggtatcccagacgggactgctgttgtgggtcgctccttccgggtcacaattccgacagacctgatcgccagcagcggagacattattaaagtgagcgctgcaggcaaagaggcgctaccaagctag

SEQ ID NO: 69836 - DNA, 291 bp, Artificial Sequence
  derived and/or modified sequence
atgagaatgagcgtaggacttagtctactcctgccactgtcagggaggacctttttgctgcttctttccgttgtaatggcacaatcacactggcctagcgaaccatcggaggccgtgagggattgggaaaaccagctggaggcaagcatgcactccgtgcttagcgacctgcatgaagcagtccctactgtggtcgggattccggacggaactgcagtcgtggggagaagctttcgagtgactattcccacagacctcatcgcctcatcaggcgacataattaaggtttag

SEQ ID NO: 69837 - DNA, 354 bp, Artificial Sequence
  derived and/or modified sequence
atgaggatgtctgtgggactgagcctgctgttacccctgtcagggaggacatttttattactcctctctgtcgttatggcccagtctcattggccaagtgaaccaagtgaagctgtacgtgattgggagaatcaactcgaggcaagcatgcactctgtgctaagcgacctgcacgaggctgtcccgacagttgtgggtatccctgatgggacagctgtggtaggaagatcctttagagtcacaatcccaacagatttgatcgcatcaagtggagatattattaaggtgtctgcggccggaaaagaggctttgcctagctggttgcattgggactcacagagccacaccctgtag

SEQ ID NO: 69838 - DNA, 159 bp, Artificial Sequence
  derived and/or modified sequence
atgcgtatgtccgtgggcctgtcacttctactccctttgagtggaaggaccttccttctcctcttatcagtcgtgatggcccagagtcactggccatcggaacctagcgaggccgttagagactgggagaaccagctggaggcctctatgcatagctag

SEQ ID NO: 69839 - DNA, 261 bp, Artificial Sequence
  derived and/or modified sequence
atgcgcatgagtgttggactatcccttttgttacctctgtctgggcgcacattcctgctgctgctgtctgtcgtgatggctcagagtcattggccatcagaacccagcgaagctgttcgagattgggagaaccagctggaagcttcaatgcatagtgtgctctctgacctgcacgaggcagtgcccaccgtagtaggcattcccgacggcactgctgttgtggggagaagcttcagagttaccatccctactgatttgtag

SEQ ID NO: 69840 - DNA, 126 bp, Artificial Sequence
  derived and/or modified sequence
atgagaatgagcgttggcctgagtctcctcctgccattgagcggaagaacctttctgctgctgcttagtgttgtcatggcgcaaagccattggccctcggagccatcagaggccgtgagggattag

SEQ ID NO: 69841 - DNA, 2688 bp, Artificial Sequence
  derived and/or modified sequence
atgaggatgtctgttggactaagtttgttactaccactgtctggtcgcacatttttactgctcctgtcagtcgtgatggctcagtctcactggccctccgaaccttctgaggccgtgagagattgggagaatcagctggaggccagtatgcacagtgtgttgtctgatctgcacgaggcagtacccactgttgtgggcatccctgatggaacagctgttgtggggcgctcctttagggtcaccattcctacagatctgatcgcatctagtggggatattatcaaggtgtccgccgctggaaaagaggccttgccatcttggcttcattgggactcacagtcccacaccctggagggactgcccttagacacagacaagggggtccactacattagcgtaagtgccactaggctgggcgccaatgggagtcacattccccagacgtcttccgtctttagtatcgaggtgtaccccgaggaccactcagaactgcagagcgtgcgcacagcatctcctgaccctggtgaggttgtttcatccgcgtgtgcggcagacgagcctgtgaccgtacttactgtgatcctcgatgctgatttaaccaaaatgactccaaagcagcggattgacctcctgcacagaatgcgaagcttttccgaggtggaactccacaatatgaagcttgtacccgttgtcaacaatagactgtttgacatgtccgcttttatggccggacccggcaatgccaaaaaagtggtcgaaaacggagcgctactgagctggaagcttggatgtagcctgaatcagaattctgtccctgatatccacggagttgaggctcctgcacgggaaggcgcgatgtccgctcagctgggataccccgtggttggctggcatattgcaaacaaaaaacccccactcccaaagagagtcagaagacagatacacgctacacccacccccgtcactgctatcggccccccaaccactgcaatccaagaaccaccctctcggatagtgcctacgcccacctccccagcaatagcgccaccgacagagacgatggcccctcctgtacgcgatcctgtacctggcaaaccaaccgtgacaattcggaccagaggcgctataatccagaccccaacgctagggcccatccaacctaccagggtgtccgaagcagggactaccgtgcctggccagatccgcccaaccatgacaatacccgggtatgtggagccgaccgccgtggcgacccctccaacaaccacaaccaagaaaccacgcgtctcgacccccaagcccgccacaccctctaccgattccacaacaacaaccactcgccgccccacgaagaagccacgaacgccacgtccagtgccgagggtgacaactaaggtgtccataacgcgactggaaaccgcttcaccaccaaccagaattcgtaccaccaccagcggtgtgccaagagggggagaacctaaccagagaccagagctgaagaaccacatagatagagtcgacgcatgggttggaacttattttgaggtaaaaattccttctgataccttttacgaccatgaagatactactacggacaagctgaaactcaccctcaaactgcgggagcagcaattggtcggcgaaaaatcatgggtgcagttcaatagtaactcccaactgatgtatggccttcccgacagtagccatgtaggcaagcacgaatattttatgcacgctactgacaaaggcgggctgtcagctgtggacgctttcgagatccatgtgcatcgcagaccccagggagaccgcgccccagcccgattcaaggcaaagtttgttggtgaccccgcgctggtgttgaacgacatccacaaaaaaattgccctggtaaagaaactggcgtttgctttcggagacagaaattgttcaaccattaccctccagaatattactaggggcagcatcgtggtcgagtggacaaacaacactcttcctctcgaaccctgccctaaagaacaaatcgccggcctcagtcgcaggatcgctgaggacgacggtaaaccaaggccggccttttctaacgcactggaaccagattttaaagcaacctctataacggtcactggaagcggttcttgccggcatcttcaattcatcccggtcgttccaccacgccgagtgccgtccgaggcccccccaaccgaagtgcctgacagagatccagagaagagttcagaagatgatgtatatcttcatacagtgattcctgcggtcgtcgttgccgccattctcctcatcgctggcataattgcaatgatctgttatcggaaaaagcgaaaagggaagctgaccctggaagatcaggccacgttcattaaaaagggcgtgcctattattttcgccgatgagctggacgacagtaagcctcctccatcctccagcatgccccttatcttgcaggaggagaaagcccctctcccccctcctgagtaccccaaccagagtgtgccagagaccactcccttgaatcaggataccatgggtgagtacactccccttcgagatgaagatcccaatgccccaccttaccaaccaccccccccctttaccgcccccatggagggcaagggctctagacctaaaaacatgaccccttatcgaagtcccccaccgtatgtgcccccttag

SEQ ID NO: 69842 - DNA, 2688 bp, Artificial Sequence
  derived and/or modified sequence
atgagaatgagcgtgggactgtcgctcctcctgcctctgtccggaaggacattcctgctgctgctgtcagtggtcatggcccagtcgcattggcccagtgagccctctgaagctgtgagggactgggaaaatcagctcgaagcatccatgcacagtgtgctgagcgatcttcacgaagcagttccgaccgtggttggcattcccgacggtacggctgttgtgggccggagcttccgagtcacaatccctaccgacttgattgcctcatctggcgatattatcaaagtgagcgctgccggcaaagaagctctgccctcttggctccactgggactcccagtctcatacactggaaggactccctctggatacggataaaggcgtccattatatctccgtctcagccaccaggctcggggcgaatgggtcgcatattcctcagacttctagcgtattcagcatagaggtgtatccagaagatcactccgaacttcagtccgtgaggaccgcatctccagatccaggcgaggtcgttagctctgcctgcgcggcggacgagcccgtaactgtacttacggttattctagatgcagacctgaccaaaatgacgccaaagcagagaatcgatctgttgcaccggatgcgctcattttccgaagttgaacttcacaacatgaagctcgtccccgtggtgaacaaccggttgtttgatatgtctgcattcatggccggccctggcaatgcgaaaaaggttgtcgagaacggggcccttctgagctggaaactggggtgctctttgaatcaaaactccgtcccggatatccacggcgtagaagctccagcccgcgaaggcgctatgtcagcgcaactggggtatccagtggtgggttggcacatagctaataaaaagccccctctccccaagagggtcaggcgccaaattcacgccacccctacaccagttactgcgataggcccaccgaccaccgcaatccaagagcctccctctaggattgtccctacaccaacgtccccggcaatagcccccccaacagagacaatggcccctcccgtcagagatcctgtgccaggcaaacctacggttacaatccgtaccaggggcgctatcattcagacacccaccttgggtccaatccaacccaccagagtgtctgaagctggtacaaccgttcccggccagattaggcctaccatgaccatacccggttacgtggagccaaccgccgtggctactcctcctaccaccaccacaaagaagccgagagtgagcacacccaaaccggctaccccatctacagattctacaacaactactacccgccggcctacaaaaaagccgcgcacaccccggcccgtgccaagagtcactacaaaggtcagtattaccagactggagacagccagccctccgacacggattcgaaccactacatccggggtgcctagaggcggagaaccaaatcagcgcccagagctcaaaaaccacatcgaccgcgtggatgcctgggtgggcacttatttcgaggtgaaaattccaagcgatacattttacgatcacgaggataccaccactgacaaactgaaactcacccttaagctacgggaacagcagctggtgggtgagaagagttgggtgcaatttaactcaaattcccaactaatgtacggtctgccagatagtagccacgtgggcaagcatgagtactttatgcacgccactgacaaaggaggactgagtgcagtggatgcatttgaaatccacgttcatcggcgcccacagggggaccgggctccagcaaggttcaaagcgaagtttgtcggagatccagcattagtgctgaatgacattcataaaaaaattgccctggtgaagaagctggcattcgcatttggcgatcgtaactgtagcaccattaccttgcagaacatcacacgcggtagtatcgtagtggagtggacaaacaacaccctgccgctcgaaccgtgccccaaggaacaaatcgctggtctcagccggcggatcgcagaagatgacggaaaaccaaggcctgctttctctaacgcactggaaccagatttcaaggccacctccatcaccgtgactggctccggatcgtgcaggcatcttcaatttattcctgtggttcctcctagaagagtcccatctgaagcccccccaacggaagtgcccgaccgcgatccagagaagtctagtgaggacgacgtatacctgcacactgtcattcccgccgtggtggttgcagcaatactgctcatcgcgggcatcatcgcaatgatctgctataggaagaagaggaagggcaagctaaccctagaagaccaggccactttcatcaaaaaaggcgtgcctattatctttgctgatgagctggacgatagcaaaccacctccaagcagctcaatgccactgatactccaggaggagaaagcacccctgcctccccctgaataccctaaccagtccgtgcctgaaacaaccccactaaatcaggacactatgggagaatacactcccctcagggacgaggacccaaacgctccaccttatcagccccccccccccttcactgctcctatggaaggcaagggcagccgtcctaaaaatatgactccctacaggtcgccacctccctatgtccccccctag

SEQ ID NO: 69843 - DNA, 2688 bp, Artificial Sequence
  derived and/or modified sequence
atgcgaatgtccgttggcttgagcctgctgttgccactgtccggtaggacatttttgcttcttctctcagtggtcatggctcagtcacactggccatccgaacctagcgaggccgtcagagactgggaaaatcagctagaagcgtcaatgcacagcgttctatccgacttacacgaggccgtgcccacagtagtgggcatccctgacgggacagccgtggtgggccggagtttcagggtgacaatccctacagatttaatcgcgagctccggcgatattatcaaagtgagcgccgcgggtaaagaggctctccccagttggctccattgggacagccagagtcacacactagaaggcctacccctggatactgataaaggggtccactatattagcgtgtcagccactagattgggcgctaatggctctcacattcctcagaccagctccgtctttagcattgaggtgtaccccgaggaccatagtgagttgcagagcgtgcggactgccagccctgaccccggggaagtcgtgtcttccgcgtgcgctgctgacgaacctgtcacagttttgaccgtgattttggacgctgacctgactaaaatgacaccaaaacagcgcattgatctgctgcaccgcatgcggtccttttcggaggtggagctgcacaatatgaaattggtgcctgtcgtaaataaccgtcttttcgatatgtctgcgttcatggcgggccccggcaacgccaagaaggtcgtcgagaacggcgctttgttatcttggaaattgggctgctcgctgaatcagaactctgtgcctgatattcacggggtggaagctcctgccagggagggggcaatgagtgcccagctgggctatcctgtggtcggctggcacatcgcaaacaaaaagcctccgcttccaaagcgggttcgcagacagattcacgctacgcctacaccagtgacggcaattgggcctcccaccaccgcaatacaggaaccacccagccgcatcgtaccgacaccaacaagcccggctattgccccaccaacagaaactatggccccaccagtccgggatcccgtgccgggtaaacctacggtaacaatccggaccaggggtgctattatccagacccctactctcggcccaattcagcctacaagggtgagtgaggctgggactaccgtcccaggccagataaggcccactatgacaatacctgggtacgtcgaaccgacggctgtggctactcctcctaccacgacaactaaaaaaccgcgcgtgtctactcctaaaccggccaccccaagcaccgattctaccaccacgacaacacgacgccctacaaagaagccgagaacaccgcgccccgttcccagagtgaccactaaagtgtcgataacccggctcgagactgcatctccgccaacacgcattcgcacgaccacaagcggtgtgccccggggtggagagcccaatcagcgcccagagctaaaaaatcacattgatcgcgttgatgcgtgggtgggtacctacttcgaagtgaaaatcccaagtgatactttttacgaccacgaggacacaactaccgacaagctgaagcttacactgaagttaagggagcagcagctagtaggggaaaagagctgggtccagttcaactccaactcccagcttatgtatgggcttccagattcgtcacatgtgggcaaacacgagtattttatgcatgcgactgataaaggggggctgtcggccgtggatgctttcgaaatccacgtacacagacgcccacagggcgatcgagcaccagctaggttcaaggctaagttcgtgggggacccagctttggtgctgaatgacatccataagaagatagccctggtgaaaaagctcgcattcgctttcggtgatcgaaactgctccaccatcacacttcagaacatcacacggggctccattgtggtcgagtggaccaataacacacttccactggaaccgtgtcccaaagaacagatcgctggtctgagcagacgaattgctgaggatgacggcaagccgagaccagcattctcaaacgctctggaacccgacttcaaagctaccagcatcactgtgacgggtagcggatcctgtcgccaccttcagtttattcctgtggtgcctcctaggcgcgtgccatccgaagcacccccaacggaggtgccagatcgggatccagaaaagagttccgaggacgacgtctaccttcatacagtgatcccagctgtcgtggtggctgccatccttttgatcgctggcatcatagccatgatctgctatagaaaaaagcgcaagggtaagctgactctggaggatcaggccacctttataaagaagggtgtcccaatcatctttgccgatgaactagacgactccaagcccccgccatcctcttcaatgccacttatcttgcaggaagagaaggctccactgcccccaccggagtacccaaaccagtcggtcccggagacgacccctctcaatcaggatacgatgggagagtatacccctctccgggatgaggatccaaacgcacctccgtaccaaccccctcctcctttcacagcacctatggaaggtaagggttctagacccaaaaacatgaccccctatcgaagccctcccccatacgtgcctccctag

SEQ ID NO: 69844 - DNA, 2688 bp, Artificial Sequence
  derived and/or modified sequence
atgcgtatgagcgttggactcagcctgcttctcccactttctggccgcaccttcctgctgctattgtcagttgtgatggcacagagccattggccatccgaaccatcagaggctgtccgggactgggagaatcagctggaggctagtatgcattcggtgctatccgacttacacgaagctgtccccacggtcgtcgggatcccagatggaactgccgtggtgggacgatcattccgcgtaactatccccaccgatctgatagcatcctcaggcgatatcatcaaagtgtcagctgctgggaaggaggccctgccctcctggctccattgggatagccagagccataccctggagggactgcccttggatacagataaaggtgtgcactacatctcggtttccgctacaagactgggcgccaacggcagccacatcccgcaaactagctccgttttctcgatcgaggtgtacccagaagatcactctgagctgcagtcagtaaggactgccagccctgaccccggcgaagttgtatcctccgcctgtgccgccgacgagccggtgacagtgttgacagtcattcttgatgccgatctcactaagatgactcctaagcagcgcatcgatctgctgcatagaatgaggtcattttccgaggtggaactacataacatgaaacttgttcctgttgtgaataatcgccttttcgatatgtctgctttcatggccggtccaggcaatgcgaagaaagtagtggaaaatggagctctcttgagctggaaacttgggtgttctctcaatcaaaacagcgtaccggatatccatggggtggaagctcctgcccgggagggcgcaatgagcgctcaattgggctaccccgtggtggggtggcacatagcaaacaaaaaacccccgcttccaaaacgggtgagacggcagatccacgctactcctacccctgtcacggctattggtcccccaacaaccgccatccaggagcccccttcccggatcgtgcccacaccgacatcacctgcaattgccccccctaccgagacgatggctccccctgtacgggaccccgtccctggcaaacctaccgtgacgattcgcacgcggggagccattatccaaacccccacattgggacccattcagcccactagagtttctgaagcgggcacaaccgttccaggacagatcaggcccaccatgaccatcccaggttatgtggaaccgacagcggttgctacacctcctactacaacaactaaaaagcctcgggtatctactccaaaaccagctactccctcaacagacagcacgaccactacaactcgacgccctaccaaaaaacccaggacgcccaggcccgtacccagagttactactaaagtctctatcacaagactggaaacagcatcgccaccaacaaggatccgaacgactacaagtggggtaccccgcgggggagagcccaaccaaagacccgaactcaaaaaccacatagatcgggttgacgcttgggtcggtacctattttgaggtgaagatcccttctgatacgttctacgaccacgaggatacgaccactgataagcttaaattgactctgaaactcagagagcagcagctggtcggtgaaaaaagttgggtacagttcaacagcaacagtcaactcatgtacgggctgcccgacagttctcatgtcgggaaacatgaatacttcatgcacgccaccgataagggtgggctttctgcagttgatgcattcgaaattcacgtccacaggcgcccgcaaggagacagagcccccgctaggttcaaggctaagtttgtcggagaccccgccctcgtgcttaacgacattcataagaaaattgccttggtaaaaaagctggcttttgcatttggtgacaggaactgctcaacaatcactctgcagaacataacccgcggtagtattgtggtcgagtggactaacaacactctccccctggagccctgcccaaaagagcagatcgcaggcctgtcacggaggattgccgaggacgatggaaaaccaagacctgcatttagcaacgctctagagcccgatttcaaagctacatctataaccgttaccggtagtggttcatgtcgacatctccagttcatcccagtggtgccacctagaagagtgccaagcgaggcacctcctaccgaagtccctgatcgtgatccagaaaaaagctctgaggacgacgtgtacttgcatacagttatcccagctgtcgttgtggcagcaatcttactgatcgctggaatcatcgcgatgatctgctacaggaagaagaggaagggaaaactcactctggaagaccaagctacctttataaagaaaggggtgcctatcatcttcgctgatgaactcgacgatagtaagcctcccccttcctcctcaatgccactgattctgcaggaggaaaaggcacctctcccccctccagaatacccaaaccagtctgtgccagaaaccactccattaaaccaggacacaatgggcgagtacactccgctccgcgacgaagaccctaacgccccaccctatcagccgcctccacccttcacggcacctatggagggcaaagggtccaggcctaagaacatgacaccgtatcggtcccccccaccttatgttccaccctag

SEQ ID NO: 69845 - DNA, 2688 bp, Artificial Sequence
  derived and/or modified sequence
atgcgcatgagcgtgggacttagcttgctcctcccactcagtggtcggaccttccttctgctcctttctgtggttatggcacagagtcattggccttccgaaccctctgaggcagtgagagactgggagaatcaactggaagctagtatgcacagcgtactgtccgacttgcatgaggccgttcctacggttgtggggatccccgacgggaccgcggtggtgggtagatcctttcgagtaaccataccaaccgacttgatcgccagtagcggagacattatcaaggtgagtgccgcaggaaaagaagccctgcccagctggctgcactgggactctcagagccacacattggaagggctccctcttgataccgacaaaggcgtccattacatatccgttagcgcaacgcgcctcggggctaatggaagccacatacctcagacttccagcgtattttctatagaggtttatcctgaagaccattctgagcttcagagcgtccgcaccgcttcccccgaccccggagaggtggtaagttcagcttgtgctgccgacgaacccgttacagtgctgacggtaatcctggacgcggacctgaccaaaatgactccaaaacagcgcatcgatctcttacacaggatgaggagtttttccgaggttgagcttcacaacatgaaactggtgcccgtggtaaataatcgcttgtttgacatgtcagcttttatggccgggccaggcaacgctaagaaagtagtagaaaatggcgccctgcttagctggaaacttggctgctctctaaatcaaaactccgtgcctgatatccatggtgtggaagcgcccgccagggagggagctatgagtgcccagttaggctacccagtcgttggctggcacatagcaaataagaagcccccacttccaaagcgagttcgaagacagatacacgcaacaccaacacctgtcacagctatcggtcccccaactaccgccatccaggagcctccgagcagaattgtacccacccctacctcccccgccatagctccgcctactgaaacgatggcaccacccgtgcgagatccagtacctggcaagcccaccgtgactattcgaacccggggggccattatccagacccctacgctgggacccatacagcccacacgcgtgagcgaagcaggcacaacggtccccgggcagattagacctactatgactatccctggatatgtggagccaaccgccgtagcgacacctccgacaacaacaacaaagaaaccccgcgtgagcaccccaaaacctgcaactcctagtactgacagtacaacaacaactactcgcaggccaacaaaaaaacctagaacacctcggcccgtccctcgagtgaccacaaaggtttctattacccggttggagaccgctagccctccaactaggatcaggactacaaccagcggcgtgcctcggggcggtgagccaaaccaacggcccgaactgaagaatcacatcgatagagtcgatgcttgggtgggcacatattttgaggtgaagattccgtcagatactttttacgaccatgaggacaccacaactgacaaactgaagttgacactcaagctgagagagcagcagctggtaggtgagaaatcttgggttcagttcaatagtaactcacagttgatgtacggcctgccagatagttcgcatgttggcaaacacgagtacttcatgcatgcaaccgataaaggaggtctgtctgccgtcgacgcctttgaaatccacgtgcatagaaggcctcaaggtgatagagcccccgcaaggttcaaggctaagttcgttggcgatccagcccttgtgttaaatgatatccacaaaaagattgcccttgtgaaaaagctggcttttgctttcggggacagaaattgctcaaccataacactccaaaacataaccagaggctctatagtggtagagtggaccaataatactctccccttggagccatgcccaaaggaacaaattgcgggtctgtctcggagaatagctgaggacgacggcaaacccaggccagccttctctaacgctctcgaaccagatttcaaagctacaagtatcactgtgacagggagcggctcatgcaggcacctgcagtttatacctgtggtgccaccacgcagagtaccctcagaggctcctcccaccgaggtaccagacagggaccctgaaaagtcctctgaggatgatgtttacctccatacagtgattcctgccgtggtcgttgcggccatccttttgattgccggaatcatagccatgatctgctatcgaaagaagaggaagggaaaactgacacttgaagatcaagctacgtttattaagaaaggcgttcccataattttcgccgatgagctagatgattcaaaacctccaccaagctctagcatgcccctgatcctgcaggaggagaaggctccgctcccccccccagagtacccaaatcagtccgtgcccgagacaacgcctctgaatcaagacacaatgggggaatatactcctcttcgggatgaagaccctaacgctcctccatatcagccaccaccacccttcaccgccccgatggaaggcaaaggatccagacctaaaaatatgaccccatacaggtctcccccaccatatgttcctccctag

SEQ ID NO: 69846 - DNA, 2688 bp, Artificial Sequence
  derived and/or modified sequence
atgaggatgtctgtgggcctgagcctgctgctgcccctgagcggccgcaccttcctgctgctgctgtctgtggtgatggcccagagccactggcccagcgagcccagcgaggccgtgcgggactgggagaaccagctggaggcctccatgcacagcgtgctgagtgacctgcacgaggccgtgcccaccgtggtgggcatcccagatggaacagctgtggtgggccgctccttccgggtgaccatccccacagacctgattgccagcagcggggacatcatcaaggtgtctgctgctgggaaggaggccctgcccagctggctgcactgggacagccagagccacaccctggagggcctgcccctggacacagacaagggcgtgcactacatctctgtgtctgccacccggctgggcgccaacggcagccacatcccccagaccagcagcgtcttcagcattgaggtgtacccagaggaccacagcgagctgcagagcgtgaggacagccagcccagaccccggggaggtggtgagcagcgcctgtgccgcagatgagcctgtgacagtgctgaccgtcatcctggatgctgacctgaccaagatgacccccaagcagagaattgacctgctgcacaggatgaggagcttcagcgaggtggagctgcacaacatgaagctggtgcctgtggtgaacaacagactctttgacatgtctgccttcatggccggccctggaaatgccaagaaggtggtggagaatggagccctgctgtcctggaagctgggctgcagcctgaaccagaacagcgtgcctgacatccatggagtggaggccccagcccgggagggcgccatgtctgcccagctgggctaccctgtggtgggctggcacatcgccaacaagaagccacccctgcccaagagggtgcggcggcagatccacgccacccccacccctgtgacagccatcggcccccccaccacagccatccaggagccccccagccgcatcgtgcccacccccaccagccctgccatcgccccacccacagagaccatggcccctcctgtgcgggaccctgtgcctgggaagcccaccgtgaccatccgcaccaggggggccatcatccagacccccaccctgggccccatccagcccaccagggtgtctgaggccggcaccaccgtgcccggccagatccggcccaccatgaccatccctggctacgtggagcccacagctgtggccaccccacccaccaccaccaccaagaagccccgggtgtccacccccaagccagccacccccagcacagacagcaccaccaccaccacccggcggcccaccaagaagcccaggacccccaggcctgtgccccgggtgaccaccaaggtgtccatcacccggctggagacagccagcccccccacccgcatccgcaccaccaccagcggcgtgccccggggcggggagcccaaccagaggcctgagctgaagaaccacatcgacagagtggatgcctgggtgggcacctactttgaggtgaagatccccagcgacaccttctatgaccacgaggacaccaccacagacaagctgaagctgaccctgaagctgcgggagcagcagctggtgggggagaagtcctgggtgcagttcaacagcaacagccagctgatgtatggcctgcctgacagcagccacgtgggcaagcatgagtacttcatgcacgccacagacaagggcggcctgtctgctgtggatgcctttgagatccacgtgcacagaagaccccagggcgaccgggccccagcccgcttcaaggccaagtttgtgggggaccctgccctggtgctgaatgacatccacaagaagatcgccctggtgaagaagctggcctttgcctttggagacaggaactgcagcaccatcaccctgcagaacatcacccggggcagcatcgtggtggagtggaccaacaacaccctgcccctggagccctgccccaaggagcagattgctggcctgagcagaagaattgctgaagatgatggcaagcccaggcctgccttcagcaatgccctggagccagacttcaaggccaccagcatcaccgtgacaggcagcggcagctgccgccacctgcagttcatccctgtggtgcccccaagaagagtgcccagcgaggccccacccacagaggtgcctgaccgggaccctgagaagagcagtgaagatgatgtgtacctgcacacagtcatcccagctgtggtggtggccgccatcctgctgattgctggcatcatcgccatgatctgctacaggaagaagaggaagggcaagctgaccctggaggaccaggccaccttcatcaagaagggcgtgcccatcatctttgctgatgagctggatgacagcaagcccccacccagcagctccatgcccctcatcctgcaggaggagaaggcccccctgcccccacctgagtaccccaaccagagcgtgcctgagaccacccccctgaaccaggacaccatgggagagtacacccccctgagagatgaggaccccaatgccccaccctaccagcccccaccacccttcaccgcccccatggagggcaagggcagccggcccaagaacatgaccccctaccgcagccccccaccctacgtgcccccatag

SEQ ID NO: 69847 - DNA, 432 bp, Artificial Sequence
  derived and/or modified sequence
atgacccccaagcagagaattgacctgctgcacaggatgaggagcttcagcgaggtggagctgcacaacatgaagctggtgcctgtggtgaacaaccggctgtttgacatgtctgccttcatggccggccctggaaatgccaagaaggtggtggagaatggagccctgctgtcctggaagctgggctgcagcctgaaccagaacagcgtgcctgacatccacggcgtggaggccccagcccgggagggcgccatgtctgcccagctgggctaccctgtggtgggctggcacatcgccaacaagaagcccccagccctgagcggcccccccaagccccagagctcctggagggactttggagacttcttcatcttcatcttctgcctgacagccttcggcctcttcatcgagaacagcagcctgcacttctag

SEQ ID NO: 69848 - DNA, 267 bp, Artificial Sequence
  derived and/or modified sequence
atgaggatgtctgtgggcctgagcctgctgctgcccctgagcggccgcaccttcctgctgctgctgtctgtggtgatggcccagagccactggcccagcgagcccagcgaggccgtgcgggactgggagaaccagctggaggcctccatgcacagcgtgctgagtgacctgcacgaggccgtgcccaccgtggtgggcatcccagatggaacagctgtggtgggccgctccttccgggtgaccatccccacagacctgattgcctag

SEQ ID NO: 69849 - DNA, 321 bp, Artificial Sequence
  derived and/or modified sequence
atgaggatgtctgtgggcctgagcctgctgctgcccctgagcggccgcaccttcctgctgctgctgtctgtggtgatggcccagagccactggcccagcgagcccagcgaggccgtgcgggactgggagaaccagctggaggcctccatgcacagcgtgctgagtgacctgcacgaggccgtgcccaccgtggtgggcatcccagatggaacagctgtggtgggccgctccttccgggtgaccatccccacagacctgattgccagcagcggggacatcatcaaggtgtctgctgctgggaaggaggccctgcccagctag

SEQ ID NO: 69850 - DNA, 291 bp, Artificial Sequence
  derived and/or modified sequence
atgaggatgtctgtgggcctgagcctgctgctgcccctgagcggccgcaccttcctgctgctgctgtctgtggtgatggcccagagccactggcccagcgagcccagcgaggccgtgcgggactgggagaaccagctggaggcctccatgcacagcgtgctgagtgacctgcacgaggccgtgcccaccgtggtgggcatcccagatggaacagctgtggtgggccgctccttccgggtgaccatccccacagacctgattgccagcagcggggacatcatcaaggtgtag

SEQ ID NO: 69851 - DNA, 354 bp, Artificial Sequence
  derived and/or modified sequence
atgaggatgtctgtgggcctgagcctgctgctgcccctgagcggccgcaccttcctgctgctgctgtctgtggtgatggcccagagccactggcccagcgagcccagcgaggccgtgcgggactgggagaaccagctggaggcctccatgcacagcgtgctgagtgacctgcacgaggccgtgcccaccgtggtgggcatcccagatggaacagctgtggtgggccgctccttccgggtgaccatccccacagacctgattgccagcagcggggacatcatcaaggtgtctgctgctgggaaggaggccctgcccagctggctgcactgggacagccagagccacaccctgtag

SEQ ID NO: 69852 - DNA, 159 bp, Artificial Sequence
  derived and/or modified sequence
atgaggatgtctgtgggcctgagcctgctgctgcccctgagcggccgcaccttcctgctgctgctgtctgtggtgatggcccagagccactggcccagcgagcccagcgaggccgtgcgggactgggagaaccagctggaggcctccatgcacagctag

SEQ ID NO: 69853 - DNA, 261 bp, Artificial Sequence
  derived and/or modified sequence
atgaggatgtctgtgggcctgagcctgctgctgcccctgagcggccgcaccttcctgctgctgctgtctgtggtgatggcccagagccactggcccagcgagcccagcgaggccgtgcgggactgggagaaccagctggaggcctccatgcacagcgtgctgagtgacctgcacgaggccgtgcccaccgtggtgggcatcccagatggaacagctgtggtgggccgctccttccgggtgaccatccccacagacctgtag

SEQ ID NO: 69854 - DNA, 126 bp, Artificial Sequence
  derived and/or modified sequence
atgaggatgtctgtgggcctgagcctgctgctgcccctgagcggccgcaccttcctgctgctgctgtctgtggtgatggcccagagccactggcccagcgagcccagcgaggccgtgcgggactag

SEQ ID NO: 69855 - DNA, 2688 bp, Artificial Sequence
  derived and/or modified sequence
atgcggatgagcgtgggcctgagcctgctgctgcccctgagcggcagaaccttcctgctcctgctctccgttgttatggcgcagtcacattggcccagtgaaccctcggaggctgttcgagattgggaaaatcaactcgaagcctcaatgcatagtgttctgtctgacttgcacgaggcagtgcccaccgtggtgggaatccccgatgggaccgccgtcgttggccggagttttcgagtgacaattccaacagacctgatcgcgtcgagcggtgacatcataaaagtgtctgctgccggtaaggaagccttaccttcttggctccactgggactctcaatctcataccctggaggggttaccccttgacaccgacaagggagtccattatatctctgtctccgctaccaggctgggcgccaacggctctcatattcctcagacctcctccgtgttcagcatcgaggtatatccagaggatcacagtgagctgcaatcagtcaggacagcaagccctgatcccggtgaagttgtaagtagcgcctgtgcggcagatgagcctgtgaccgtgctcacagttattttggatgctgacctgacaaaaatgacccctaaacaaaggatagacctgctgcacagaatgaggagtttttccgaagtcgagctgcacaacatgaaacttgtgcccgtggtgaacaatcgactttttgacatgtccgcctttatggccggccctgggaacgccaagaaggtggttgagaacggcgccttgctgtcctggaagttgggctgcagtctgaaccagaattccgtgcccgatatccacggggtcgaggccccagcgcgtgagggagccatgtctgcccagcttggttaccccgtcgtcggatggcatatcgcaaataaaaagccgccgctgcctaagagagtccgcagacagattcacgcgactcccactcctgtcactgcaattgggccgcccactactgccatccaagagccaccatctaggatcgtcccaactccaacgtcaccggcaatcgccccgcccactgagacgatggcccccccggttagagatcctgttcctggcaagcctaccgttactatccgtacccgcggcgccattatccagactccaacattgggtcctattcagccaactagggtgtcagaggccggaacaaccgtgcccggacagatccggccgactatgacaattccaggttatgttgagccaacagcggtggcaacaccccccaccacaaccactaagaaaccccgcgttagcacccctaaacctgccactccatccacagacagcacgaccacaactacacgtaggcccacaaaaaagccccggactccccgccctgtacctagggtaacaacgaaggtttccatcacccgcctggagacagcctctccgcctactcggatcagaaccaccacatccggagtacccagaggcggggaaccgaaccagaggcccgagttaaagaaccacatcgaccgtgttgatgcatgggtgggcacatatttcgaggttaaaattccctctgacactttctacgatcacgaggatactacaaccgacaagctcaaactcaccctcaagctcagagagcagcagctagttggtgagaagagctgggttcagtttaactcaaactcccagctgatgtatggccttccggactcgagccacgtcggcaagcacgagtactttatgcacgctacagacaagggtggcctctccgctgtggacgcctttgaaattcacgtgcacagacgcccacaaggcgatcgcgccccagctcgctttaaagccaagttcgtgggtgaccctgcattggtgttgaacgacatccacaagaaaatcgctctggtaaaaaaattagccttcgcattcggcgacaggaattgtagcacgataacattacagaatattacgagggggtccatcgtagtcgagtggacaaacaacacactgccactagaaccttgtccgaaggaacagattgctggactgtccaggcggattgccgaggatgatggaaagcctcggccagcattcagcaacgccctggaacctgactttaaggccacaagcatcacagtaactgggtccggttcctgccgacatctgcagtttattcccgtggttcctcccagaagggtgcctagtgaagccccccccaccgaagtccccgaccgtgatcctgaaaagagctcggaagatgatgtttatctccacaccgtgatccctgcagtcgtcgtggccgcaatcctactgattgccggaatcatcgcgatgatctgctatcgcaaaaagcgaaagggaaaactcacactagaggaccaggccacctttattaagaagggcgtccccatcatttttgctgacgaactggatgatagtaagccccccccgtcaagcagtatgcctctgattctgcaggaggagaaagccccactgccacctcctgagtatccaaatcagtctgtccccgaaacgacacctctgaaccaggatacaatgggggagtacacccctctccgcgacgaggacccaaacgctccaccataccagccaccgcccccctttactgccccaatggaaggaaaaggcagccgcccaaaaaacatgacgccctaccggagtccacctccctacgtgcccccctag

SEQ ID NO: 69856 - DNA, 432 bp, Artificial Sequence
  derived and/or modified sequence
atgacccccaagcagcggatcgacctgctgcaccggatgcggagcttcagcgaggtagaactccataacatgaagctcgtgcctgttgtgaacaacagactcttcgatatgagtgctttcatggctggccctgggaacgcaaaaaaagtcgtggaaaacggagcgcttctcagctggaagcttggctgtagcctgaatcaaaactcagttcccgacatacatggcgttgaggctcctgctcgcgagggtgcaatgtcagctcaacttggctaccctgtggtgggatggcatattgccaacaaaaagccaccagcgctgtctggccccccaaaaccccagtctagctggagagacttcggagattttttcatatttatcttttgtttgaccgcctttggcctgtttatcgaaaactcgtctttacacttttag

SEQ ID NO: 69857 - DNA, 267 bp, Artificial Sequence
  derived and/or modified sequence
atgcggatgagcgtgggcctgagcctgctgctgcccctgagcggcagaacttttctccttctgctgtccgtcgtgatggcgcagtcccattggccaagcgagccatccgaagcagtaagagactgggagaaccaactggaggcctccatgcactccgtgctaagcgaccttcacgaggctgtgccaacggtcgtgggcatcccggacggtacagcagtcgtggggcggagctttcgggtcacaatcccgaccgatttgattgcttag

SEQ ID NO: 69858 - DNA, 321 bp, Artificial Sequence
  derived and/or modified sequence
atgcggatgagcgtgggcctgagcctgctgctgcccctgagcggccgcacattcctcctgctgctcagtgtggtcatggcgcaatcccactggccgtctgagccatctgaagccgtcagagattgggagaaccagctggaggcatcaatgcactccgtgctgtctgatcttcacgaagcagtgcccaccgtcgttgggatccctgatgggactgccgtggtcgggaggtctttcagggttactattcctaccgatctgattgcttccagcggggatatcattaaggttagtgcggctggcaaggaagccctacccagctag

SEQ ID NO: 69859 - DNA, 291 bp, Artificial Sequence
  derived and/or modified sequence
atgcggatgagcgtgggcctgagcctgctgctgcccctgagcggccgcacttttctgctgttgttgtccgtcgtcatggcccagagtcactggcctagtgaaccttccgaggccgtccgagattgggagaatcagctagaggcatcaatgcactccgtattgagcgatttacacgaggcagtccccactgtcgtgggaatcccagacgggaccgctgtggtcggccgctccttccgcgtgaccattccgactgacttgatcgcgagtagcggagatattatcaaggtgtag

SEQ ID NO: 69860 - DNA, 354 bp, Artificial Sequence
  derived and/or modified sequence
atgcggatgagcgtgggcctgagcctgctgctgcccctgagcggcagaacattcctgctgcttctctcagtagtcatggcccagagccattggccatctgagccatcggaggcagtgagagattgggaaaatcagctggaggcttccatgcatagtgttctgtcagaccttcatgaggcagtccccacagtcgtcgggatccccgacggtaccgcggtggtgggacggagcttccgcgtgacaatccctacggatctcattgcgagttccggcgacataattaaggtctctgccgcaggaaaggaggctctcccttcctggttacactgggacagccagtcccacaccctgtag

SEQ ID NO: 69861 - DNA, 159 bp, Artificial Sequence
  derived and/or modified sequence
atgcggatgagcgtgggcctgagcctgctgctgcccctgagcggccggacgttcctgctgcttctgtctgtagtgatggcgcaatcccactggccatctgagccttctgaggcggtccgtgactgggaaaaccagctagaggccagcatgcatagctag

SEQ ID NO: 69862 - DNA, 261 bp, Artificial Sequence
  derived and/or modified sequence
atgcggatgagcgtgggcctgagcctgctgctgcccctgagcggccggacgttcctgctgttactttctgtggtgatggcacaatcacattggccatccgaaccaagcgaagccgtgcgggattgggaaaaccaacttgaagcctccatgcacagcgttctctccgatctgcatgaagccgtgcccacggtggtagggatccctgacgggaccgcggttgttggtcggagcttccgagtgaccatccccaccgatttatag

SEQ ID NO: 69863 - DNA, 126 bp, Artificial Sequence
  derived and/or modified sequence
atgcggatgagcgtgggcctgagcctgctgctgcccctgagcggccgaacttttctcctgctcctgagtgtcgtcatggcccaatctcattggccatctgagccgtcagaggcagtgagggattag

SEQ ID NO: 69864 - DNA, 2688 bp, Artificial Sequence
  derived and/or modified sequence
atgcggatgagcgtgggcctgagcctgctgctgcccctgagcggcagaacttttctactgctgctgagtgtggtgatggcacaaagtcactggcccagtgagccctcagaagccgttcgcgactgggagaaccaactggaagccagtatgcacagcgttctgtcagacctgcacgaggcagtcccgaccgtggtcggcattcctgatggcacagccgtagtggggcgatcatttagagtgaccataccgactgacctaatagcttcttccggggatatcatcaaagtgtccgcagcaggaaaagaggccctgccgtcttggctgcattgggacagccagtctcacactttggagggcctgcctttggatacagacaagggggtgcactacatttctgtgtccgccacccgcttaggagcaaatggttcacatataccacaaacctcttcagtgttttctattgaagtgtacccggaagatcactcagaactacagtccgtaaggacagcatcccccgatccaggcgaagttgtgagtagtgcctgcgccgccgacgaacccgtaactgtcctgaccgtgatcctggacgcagacttgactaaaatgactcccaaacagcggatcgacctgctccacaggatgcgctccttcagcgaagtcgagctgcacaacatgaagctggtcccagtcgtaaataatcgattgttcgacatgtccgcctttatggccggtcccggaaatgcaaagaaagtcgtggagaacggcgccctgctgtcgtggaagctggggtgctcgctcaaccaaaacagtgtcccagacatacacggcgtcgaggcccctgcacgagaaggcgctatgagcgcacagttggggtaccctgtggtggggtggcacatagctaataagaagcctcctctgcccaaacgcgtgagaaggcagatccacgctaccccgacgccagtcacagctatcgggcctcccaccacagctatccaagagccaccctcaagaatcgttcccacccctacgtcccccgccattgcccccccaaccgaaacaatggcaccgcctgtgcgcgatcccgtgcctggcaaacctaccgtgaccatcaggacacggggcgctattattcagaccccaactctcggccccattcagcctacccgcgtgtctgaggccgggacaactgtccctggccagatccgcccaaccatgaccattcccgggtatgttgagcccactgcagttgcaactcctcctactactaccactaaaaagccgcgcgtgtccacgccaaaacccgcgacgccctctacagactccactaccaccacaacccgaaggcccacgaaaaagcccaggaccccgcgacctgtcccgagggttacaacgaaagtttcaataacgaggctcgaaaccgcgtcacctccaacccggattcggacaactacctccggcgtaccgagagggggtgagccaaaccagcgaccggagctgaaaaaccacatcgatagggtcgacgcctgggtgggcacttacttcgaagtgaaaatacctagcgataccttttacgaccatgaggacactactaccgacaagttgaagctcacccttaaactgagggaacagcaactagttggggagaagtcttgggtgcaatttaactcaaactctcagctcatgtatggtctccctgattcctcccacgttggaaagcacgaatattttatgcatgctacagacaagggaggcctttccgcggtggatgctttcgagatccacgttcaccgacgaccccaaggagaccgggcccctgcccgtttcaaggccaaatttgtgggagacccagccttggtcctcaacgacattcacaaaaagatcgccctggtcaaaaaactggccttcgcatttggagatcgcaactgctcaacaattactcttcagaatatcactcgaggtagcatcgtggtggaatggacaaacaacaccctgcccttagagccctgccctaaagagcagatcgccggcctctcacgtaggatcgccgaggacgatggcaaacctaggcctgcattttccaatgccttagagccagatttcaaggccacctccatcacggtgaccggatcagggtcctgccgacacctccagtttatccccgtcgtgccaccccgccgtgttcctagtgaggccccgccaacagaagtgcctgacagggatcccgaaaagagcagcgaagacgatgtgtatctccatacagtgatacctgccgtggtggtcgccgccatcttacttatcgccggcatcatcgctatgatatgttacaggaaaaagagaaagggaaagttgaccttggaggaccaagctaccttcattaaaaagggagttccaatcatctttgccgacgagctggatgacagcaagccccccccaagctcaagcatgcctctcattttgcaggaggaaaaggcacctctgcctcccccagaatacccaaaccagtccgttcccgaaacaaccccactgaaccaagacacgatgggcgagtacacccccctgcgcgacgaagacccaaatgccccaccatatcaaccacctcccccattcacagcgcctatggagggtaaaggatcccgtcccaagaatatgaccccttaccggagtcccccaccttatgtccccccctag

SEQ ID NO: 69865 - DNA, 2688 bp, Artificial Sequence
  derived and/or modified sequence
atgcggatgagcgtgggcctgagcctgctgctgcccctgagcggccgcacattcctcctgctcctgtccgttgtcatggcacagtctcattggcccagcgagccaagcgaggcagtcagagactgggaaaatcaattggaggcgtccatgcattctgttctgagcgatctgcatgaggccgtgcctactgtggtcgggatcccagacggcacagctgtggtaggacgctctttccgggtcaccatccccacggacctcattgcctctagtggtgacattatcaaggtatccgccgcgggaaaggaggcacttccttcctggctccactgggatagccagtcacataccttagagggactgcctttggacaccgacaagggagttcattatatcagtgtatcggccactagactgggagccaacggctctcacattccacagacaagttctgtgttctcaatcgaggtgtatcctgaggatcacagtgagttgcaatccgtccgtacagcctccccagatcccggcgaagtcgtgtctagtgcctgtgcagccgacgaacccgtcacagtactgactgttattcttgatgcagacttgaccaagatgacacccaaacagagaatagacctactgcatagaatgagaagtttcagcgaagtcgagctccataatatgaaactggtgccggtggtgaataaccgactgttcgatatgtctgccttcatggccggcccgggaaacgcaaagaaagtggttgagaatggcgccctgctgtcctggaagttgggatgcagtcttaaccagaatagcgtccctgatatacacggagttgaagccccagcccgggagggagccatgtcagctcaactgggctacccagtcgtgggatggcatatcgccaataagaagccccccctgcccaagagagtcaggcggcagattcatgccacaccgacacctgtcacggcaataggtccccccacgacagccatccaggagccgcctagtcgaattgtccccacaccaacatctcctgccattgctccgccgactgaaacaatggccccgccagttcgggatcccgtcccaggcaagccaacagtgacaatcaggacccggggcgctatcatccagactcccactttgggaccaatccagcccactcgtgtcagcgaagccggcacaacagtccctggtcagattaggccaactatgaccatacctgggtacgtagagccaactgccgtagcaactcctccaacaacaacaacaaaaaagccacgggtttccacccccaaacctgcaaccccatctacagactcgacaaccactaccacccggaggcccacaaagaaaccccgaaccccacgccctgtccctcgggtgaccactaaagtcagcataaccagattggaaacggcctcacctcccacacgtatcagaaccacgaccagcggagtcccacgcggcggcgaaccaaatcaacgccccgaactcaaaaatcacatcgatagagtggacgcatgggtcggtacatacttcgaggtgaagattccatctgatactttttacgatcatgaggacacgaccactgacaagttgaagcttacactgaaactgcgagagcaacagttggtgggggagaaatcatgggtccagttcaactctaactcccagctcatgtatggtctgcccgacagctcacacgtgggcaagcacgaatatttcatgcatgccacagacaagggaggtctgtccgcagtggatgctttcgagatccatgttcacaggaggccccaaggcgaccgggctcccgcccgctttaaggctaagttcgtgggggatccggcccttgtgctgaacgatatccacaaaaagatagcacttgtgaagaaattggccttcgcattcggggacagaaattgcagtaccatcaccctgcagaacattactcggggctctattgtggtggagtggaccaacaacaccttgcctctcgagccttgccccaaggagcaaattgcaggtcttagtcgccgcattgccgaagacgacgggaaacctagacctgccttttccaatgcgctcgagcccgattttaaagctacaagtattacagtaacgggctctgggtcctgcaggcatctgcagtttatacccgtggttcctcccagaagggttcctagcgaggcaccccccactgaggttccagatagagaccccgagaagagtagtgaggacgacgtctacctgcacactgtcatacctgcagtcgtggtggccgctatactgctgatcgccggaatcattgcaatgatctgttaccgcaagaagagaaaaggaaaactaacgctggaggatcaggctacattcatcaagaaaggagtgcccataatctttgcagacgaactggacgactccaaaccccccccctcctcctcaatgcccctcattctgcaggaggaaaaggcacctctgcctcctcctgagtaccccaatcagtctgtgccagaaacaacccctctgaatcaggacaccatgggagagtatactccactcagggacgaagaccctaatgcccccccataccagccaccccctcccttcaccgcgcctatggagggcaagggatcgaggcctaagaatatgaccccatatagaagtccaccgccttacgtgcccccctag

SEQ ID NO: 69866 - DNA, 2688 bp, Artificial Sequence
  derived and/or modified sequence
atgcggatgagcgtgggcctgagcctgctgctgcccctgagcggccgtacatttctgctgctgctctccgtggtcatggcacagtctcattggccatccgagccctccgaagcagtacgtgactgggagaatcagctggaggcatccatgcattctgtcttgagtgatctccacgaagcggtgcctaccgtggttggcatcccggacggcaccgccgtggtcggtcggagctttcgggtcaccataccaaccgatcttattgccagctctggggacattattaaggtctcagcagccggcaaagaggccctcccttcttggctgcactgggactctcaatctcacactctggagggcctgccgttggacacagacaaaggggtacattatattagcgtcagcgctacaagactcggggccaatggttctcacatcccccagacatcttctgtgttctctatagaggtgtatcctgaagaccacagcgaactccagagcgtaaggactgcatctcctgatcctggcgaggttgtgagtagcgcatgcgccgcggacgagcccgttacagtgctcacggtgattttagatgcagacttgaccaagatgacgcctaagcagagaattgacctgctccacagaatgcgtagtttcagcgaagtggaactacataatatgaagctggtgccagtggtgaacaacaggctgttcgacatgtccgccttcatggcaggaccagggaatgccaaaaaagtcgtggagaacggggccctgctctcttggaagcttggctgttctttgaaccaaaattctgtcccagacatccacggcgtcgaggcaccggcaagggagggtgccatgtctgcgcaattgggataccccgtcgtgggttggcatatcgccaacaagaaacctcctttgccaaagagggtgcgccggcagattcatgccacgccaaccccagtcacagccatcggacctcccaccaccgccattcaggaaccaccgtctagaattgtacccaccccaacatcacccgccatcgcccctccaaccgagacaatggctcctcctgtcagagatcccgttccaggcaaaccaacggtaacaattcgaacccgcggagccatcattcagacacccactctcggcccgattcaacccacacgcgtgtcagaggccggcaccacggtcccagggcagatccgtccaaccatgacgatcccaggctatgtggaacccacagcggtagctacacctcccacaactacgacaaaaaagccacgggtatctacgcctaaaccagctactcctagcacagattccaccaccacaactactcggagacccaccaaaaagccccggacaccaagacctgttccgagggtgacaaccaaggttagtatcactcggctggagaccgccagcccccccacaaggattcggactaccactagcggtgttccaagaggaggcgagccaaatcagcgtccggaacttaagaatcacatcgacagggtcgatgcatgggtgggaacttacttcgaggtgaaaattccgagtgacactttctatgaccatgaagacacgacaacggacaaattgaaactcactctaaagctgagagaacagcaactggtgggagagaaaagctgggtgcagttcaatagcaacagccagttgatgtacggtctcccggatagttctcatgtgggtaaacatgaatactttatgcatgctaccgataagggagggctgagcgccgtggatgcattcgagatccacgtgcacagacggcctcagggagaccgcgctccagcacgatttaaggctaagtttgtaggtgatcccgcactggtgctgaatgacatccacaagaaaatagccttagttaagaagctggcatttgcttttggagatcggaattgctccacaattacactccaaaatatcacgcggggaagtatcgtggtcgagtggaccaataatacgctccccctggagccgtgcccgaaggagcaaattgccggattgtcacggcgcatcgccgaggatgacggtaagccacgacctgccttttctaacgccttagagccagactttaaggctactagtattacagtcacaggatctgggtcatgtcggcaccttcagttcatccccgttgtccccccccggagggttccgtccgaagctccacctactgaggtccctgaccgcgacccagagaaaagctccgaagacgacgtttacttgcataccgtaattcccgccgtagtcgtagcagccatcctgctcattgccggcatcattgctatgatctgttaccgtaagaaacggaaggggaagctaaccttggaggaccaggcgaccttcattaagaaaggggtaccaataatcttcgccgacgagctggacgacagcaaaccaccaccatccagctccatgcccctgatcctacaggaagagaaggccccgctgccccctcccgaatatcccaaccagtctgtcccggaaactacaccattgaaccaggataccatgggggaatatacccctctgcgggatgaagatccaaacgctccaccttaccagcccccaccgccgttcaccgctcccatggagggcaaaggcagccgtcctaaaaacatgaccccctaccgaagcccaccgccctacgtaccaccatag

SEQ ID NO: 69867 - DNA, 2688 bp, Artificial Sequence
  derived and/or modified sequence
atgcggatgagcgtgggcctgagcctgctgctgcccctgagcggccgcacatttttgctgctccttagtgtggttatggcccagtctcactggccctctgagccgagtgaagccgtccgcgactgggaaaaccagctggaggcatccatgcattcggtgctctcagacttacacgaggcagtgccaactgtggtgggcattcctgatggcacagccgtggtgggccgctctttccgcgttacaattcccacagacttgatcgcttcttctggagacattattaaagtgagcgctgcaggcaaagaagcgctgccttcctggttgcactgggactcacagtcgcacaccctggagggtttacctcttgacaccgacaaaggagtccactacatctccgtttccgcaaccaggctcggagcgaatgggagccatatcccacagacgagtagcgtgtttagcatcgaagtatatccggaggaccattcagagcttcagagtgtgcgcactgcctctccggatcccggggaagtagtcagctccgcatgtgccgccgatgaaccagttacggttcttacagtcatcttagatgctgacctaactaagatgaccccaaagcagagaatcgacttattgcatcggatgcgaagctttagcgaagttgagctccacaatatgaagttggtgccagtggttaacaatagactgttcgacatgtccgctttcatggccgggccaggcaacgccaagaaagttgttgagaacggcgcattgctgtcatggaagctggggtgttccctgaatcagaattctgtgcctgatattcatggtgtagaggcaccagctcgtgaaggagctatgagtgctcaattgggctatcctgtcgtgggctggcacatcgcaaacaaaaaaccccctctgcctaagcgtgtgagaaggcagattcatgccactcccactcccgtgactgctattggcccgcctaccacagcgatccaggagcctccatctcgcatcgtgccaactccaacgtcacccgccattgctcccccaaccgagacaatggcccctcctgtgagagacccggtgcctgggaaaccaactgtgactattaggaccaggggcgctatcatccagacccctacactgggacctattcaacccaccagggtttctgaggcgggcaccacggtgcctgggcaaattaggccgaccatgactattcccggatacgtggagccgacggccgtggctacacctccgaccacaactactaaaaaaccacgagtaagtactccaaaacccgctacccctagcactgattccaccacgactaccacaaggcgccctacaaagaagccccggacacccaggccagtgccacgggttacaaccaaagttagcattacaagactcgagactgcctcgcctccgacgcgcatccggacaacgaccagcggggttcccagaggtggggagccaaatcagagaccggaattgaagaaccatattgaccgcgtggatgcatgggtgggaacgtattttgaggtgaagataccttctgataccttctacgaccacgaggatactacaactgacaagctaaaactgaccctgaagttacgcgagcagcaacttgttggggagaagtcttgggtacaattcaattcaaattctcagctgatgtatggcctgcccgatagttcgcacgtgggcaaacacgagtactttatgcatgctactgacaaggggggcctcagcgccgtcgacgcattcgagatccacgtccatcggcgaccgcagggtgatcgcgcgcctgctaggttcaaagccaaattcgtcggtgacccagcccttgtattgaacgatatccacaagaagatcgcattagtgaaaaaactggcctttgcattcggggatcggaattgcagcacaataaccctgcaaaatatcacccggggctctatcgttgtggagtggacaaataatacccttccacttgaaccatgcccgaaagaacagatcgccggtcttagtcgcaggatagcagaggatgatggtaaaccccgccccgcttttagcaacgccttggaacctgacttcaaggccacgagcatcactgtgaccggatcagggtcatgtaggcatcttcagttcatccctgtggtgcccccacggcgcgtacctagtgaggctcccccaactgaagtgccagatcgggaccctgaaaagtcatctgaggatgacgtatatttgcacaccgttatcccagcagtagtggtggccgctatattgcttatagctggcattatcgctatgatctgctacaggaaaaagcgcaagggtaaactgactttggaagatcaggcgacatttattaagaaaggagtgcccatcatatttgcagatgagctcgacgattcaaagccaccccctagctcaagcatgccactaatcctccaggaggagaaggccccactgcctccccctgaatatccaaaccagtcagtccctgaaactacacctctgaatcaggacacaatgggtgaatacaccccactgcgagacgaggatccgaatgcccccccatatcagcccccccctccattcactgctccaatggagggcaagggcagccggcccaagaatatgacaccctatagatcaccacctccttacgtgccgccatag

SEQ ID NO: 69868 - DNA, 2688 bp, Artificial Sequence
  derived and/or modified sequence
atgcggatgagcgtgggcctgagcctgctgctgcccctgagcggcaggactttcttgctgttgctatcagtggtgatggcacaatcccattggccatctgaacccagcgaggctgttcgcgactgggagaatcaactggaggcctccatgcatagcgtactcagtgatcttcacgaggctgtaccgacagtggtgggcattcctgatgggacggcagttgtgggaagatccttcagagtgactatccccacagacctgattgcctcaagcggcgacatcataaaagtctcagcagcaggtaaggaagccctgccgtcttggctgcattgggattcacagagccacaccctggaaggacttccactggatactgataaaggtgtacactacattagcgtgtccgccacgagacttggcgcgaacggctcccacataccacagacctcttccgtgttctccattgaagtgtaccccgaagaccatagtgaactccagagcgtccggacagcatctccagatcccggggaagtcgtgtcatctgcatgcgccgccgatgaacccgtgaccgtgcttacagtgattcttgacgctgacctcacgaaaatgacacccaagcagcggatagacctgcttcataggatgcgctccttttctgaggtggagttgcataacatgaaactagttccggtagtcaacaatcggctgttcgatatgtcagcttttatggctggacctggaaacgccaaaaaagtggtcgagaatggggccctcttgagctggaagttaggctgcagccttaatcagaactcggtaccagacattcacggggtcgaggccccagcccgcgagggagctatgtctgcccagctaggttatcctgtcgtgggatggcacattgcgaataaaaaaccacccttaccaaagcgggttcggcgacagattcatgccacacccacacccgtgaccgctataggccctccgactactgctatccaggagcccccgtcaaggatcgtgccaaccccgacttctccagcgatcgcacctcctacggaaactatggcacctcctgtgcgtgatccagtccccgggaaacccaccgtgaccatcaggactcggggggctatcatccagacccctactttgggacctatccagcctacaagagtgtcagaagccggaacaacggttccaggtcagatacgtccaaccatgacaatccctggttatgtcgagcctacagctgtggcaacaccgcccacaactacaactaagaaacccagagtgtcaactcctaaacccgccacacccagcactgattccacaaccacaactactaggaggccaaccaaaaaaccacggacaccacggccggttcccagagtgacaaccaaggtgtccataaccagactggagactgcaagccctcccactaggatccggacaacgacaagtggagtgcctcgaggaggcgagcccaatcaacgacctgagttaaagaaccatattgatagagtggacgcttgggtcggtacatatttcgaggttaagatccctagcgacactttttacgaccacgaagacacgacaactgacaagcttaaacttacactcaaactgcgagagcagcagttagtgggagagaaaagttgggtacagtttaactcaaatagccagttaatgtatggactccccgactcaagccacgtaggcaagcatgagtactttatgcatgcgacagataaagggggactttccgcggtggatgccttcgagatccacgtccataggcgccctcaaggcgaccgggctcccgctaggtttaaagctaagttcgttggggatccagcactggttcttaacgacatccacaaaaagatcgcactggtcaaaaagctcgcatttgcttttggcgaccggaattgcagcacaatcaccttgcagaacattacacgcggatctatagtggtcgaatggaccaacaacacattaccgctggaaccatgtccaaaggaacagatcgcaggactctcccgtagaatagcagaggatgatggaaaacctcgcccagcattctcaaatgctttggagccagatttcaaggcaacgagcattactgtgaccgggagcggctcctgtcgtcatcttcagtttattccagtggtgccaccacgtagagtgccatctgaggctccacccacggaagtgcccgatcgagatccagagaagagctcggaggatgacgtgtacctgcatacggtgatccctgcggtggtggtggccgccatcctactcattgctggcataatcgccatgatatgttatcgcaagaagcgaaagggtaagctgacactggaggaccaggccacttttatcaaaaagggcgtcccaataatttttgccgacgagctcgacgatagcaagccacccccctcctctagcatgccactgatacttcaggaggagaaagcacccttgccccctcccgagtaccccaatcagagtgtgcctgagaccacccccttaaatcaggataccatgggtgagtatacaccactgcgggatgaggatcctaacgctcctccgtatcagcctcccccgccattcaccgccccgatggaagggaaagggtccaggccaaaaaacatgactccctaccgcagtccacctccctatgtgcctccatag

SEQ ID NO: 69869 - DNA, 2688 bp, Artificial Sequence
  derived and/or modified sequence
atgcgaatgagcgtggggttgtctcttcttcttcccttaagcggccgaacatttttacttttgctgtcagttgtcatggcacagagccattggccaagcgaacccagcgaagcagtgcgcgattgggagaaccagctggaagcaagtatgcactcggtcctgtctgacttacatgaggccgtgcccactgtagtgggaatacccgacggtaccgccgtcgtggggagaagctttagagtgacaatccccacagatcttatcgcttctagcggcgacatcatcaaagtcagtgcagccggaaaggaagccctcccatcatggctacactgggactctcaaagtcacactctggagggactgcctttggataccgacaaaggggtgcattatatctcggtgtcagccacaaggctgggcgctaatggttcccacattccacaaacctcttctgtgttctctattgaggtgtatcccgaggatcacagtgagcttcagagcgttcgtactgcctccccagacccgggagaggtggtcagctccgcatgtgccgctgacgaacctgtcaccgttctcactgtgattctggacgcggatcttaccaagatgaccccaaagcagcgcatagacctcttgcaccgtatgcgatcctttagcgaggtggagctccataacatgaaactagtgccagtcgtgaacaataggttgtttgacatgtccgccttcatggcagggcctggcaacgcgaaaaaggttgtggagaacggcgctctgctgtcgtggaagctggggtgcagtctgaaccagaattctgtacccgacatccatggagtcgaagcgcctgcgagagagggggcaatgagcgcccagctcgggtacccagtcgttgggtggcacattgcgaataaaaaacctcctctcccaaaaagagtacgtagacagatccatgcgacccccactcccgtcacggccatcgggcctccaacaacagccatccaggaaccgccttcccgtatcgtccctaccccaacctctcctgccattgcacctcccaccgagacaatggcccctcccgtccgggaccccgtgcctgggaaacctacagtgacaattcgaacacgcggagccattatccagacacccaccttgggtccaatccaacccacccgggtgagtgaggcaggcactaccgtgccaggacagattcggcctacgatgaccataccgggttacgttgaacccactgctgtggctacccctccgaccacaacaaccaaaaaaccgagggtctccactcctaaacctgctaccccctctaccgattcaaccaccactacaactagaagacctaccaaaaagcctcggacacctagaccggttcctcgggtgaccacaaaggtgagtatcactcgacttgagacagccagtccacccactaggatcaggacgactactagtggggttcctcgcggtggggaacccaaccagcgccctgaacttaagaatcacatcgaccgggtggatgcgtgggtgggaacttactttgaggtgaaaatcccatcggatacattctacgaccacgaagacaccaccaccgacaagctgaaactaacccttaagcttagagagcagcagttagtgggcgaaaaatcctgggtccagtttaacagcaactcacaactgatgtacggattacccgactcatcccacgttgggaaacacgaatatttcatgcacgcgactgacaaagggggactctccgctgtggacgccttcgagatacatgtgcacagacgaccacagggcgatagggccccagctcggttcaaggccaagttcgttggcgatcccgctcttgtactgaacgacattcacaagaagattgctcttgttaagaaacttgccttcgcctttggcgatcgaaattgtagcacaattacacttcagaatattactcgcggatcaattgttgtggaatggacgaacaacaccctgccgctggaaccctgtcccaaagagcaaatcgccggattgagtaggcgaattgcagaagatgacggcaaaccaaggccagcattctctaatgcattggagcctgactttaaggcaacatcaattactgtgaccggttccgggagctgcaggcatctgcagtttatccccgtggtgcctccgagaagagttccatccgaagctcctcctactgaggtccctgaccgggaccccgagaagtcctccgaggacgacgtgtacctgcacacagtcatccccgctgtagtggtggcggctattttgttgatagccggtatcatcgcaatgatctgctatcgaaagaaaagaaagggaaagttaacactagaggaccaagcaacattcatcaagaaaggcgttcccattatattcgccgacgagttggatgacagcaagccacccccaagttccagtatgcccctcatacttcaggaagaaaaggccccattgccaccacccgaatatccaaatcaatccgtgcccgagacaacacctcttaaccaggataccatgggcgagtacacgccactgcgggacgaggaccccaacgcacctccctaccagccgccaccaccattcacagcgcctatggagggcaagggatctcgccctaagaacatgacgccttacagaagtcctcctccgtatgtcccaccttag

SEQ ID NO: 69870 - DNA, 432 bp, Artificial Sequence
  derived and/or modified sequence
atgaccccgaaacagaggatcgaccttcttcatcgcatgcgttccttctccgaagtcgagcttcacaacatgaaactagtgccagtcgttaataacagactcttcgatatgtcagcctttatggctggtcctggaaatgcaaaaaaggtggtcgaaaacggggctttgctttcctggaaactgggctgctcactcaatcagaatagcgtacccgacatccatggagttgaggctcccgctcgggagggcgctatgagtgcccaactcggttatcccgtggtcggatggcacatagccaataagaaaccacctgcactctccggtccacctaagcctcagtcgtcttggcgtgacttcggggatttctttatctttatcttctgcctcacagcatttggactgttcattgagaattcctcccttcacttttag

SEQ ID NO: 69871 - DNA, 267 bp, Artificial Sequence
  derived and/or modified sequence
atgaggatgagcgtgggtctgagcttgctcctgcctctgtccgggaggacctttctgctgttgctgtccgtggtgatggcacaaagtcactggccttcggagccatctgaagctgtgcgtgactgggagaatcaactggaggcaagtatgcacagtgttctttccgacctgcacgaagccgtacctacagtcgtgggcattccggacggcactgccgtagttggtcgctccttcagggttacaattcctacagacttaatcgcttag

SEQ ID NO: 69872 - DNA, 321 bp, Artificial Sequence
  derived and/or modified sequence
atgaggatgtctgtgggcttgagtctgttactacctctctcaggcaggacgtttctactgctgctgtcggtagtgatggctcaaagccactggccctccgaaccatcagaggcagtgagggactgggagaaccagctcgaggcttctatgcactctgttttgtcagatttgcacgaggcggtgcccacggtcgtcgggattcccgacggcactgctgtagtgggacgatccttccgtgtcactatcccaaccgatctgatcgcgtcgtccggcgatataatcaaggtgtcagctgcgggaaaagaagcactgcctagctag

SEQ ID NO: 69873 - DNA, 291 bp, Artificial Sequence
  derived and/or modified sequence
atgcggatgagtgtaggcttaagtctgcttctgcctctttctgggagaacctttctgctcttactttcggtagttatggcacaatctcattggccctccgaacctagcgaagccgtgcgtgactgggaaaatcagctggaagcctctatgcattccgtgttatcagatctgcacgaggcagtgccaactgttgtgggcatccctgacggtacagccgtcgtgggtcggtccttcagggtgaccatccctaccgatctgatcgcgagttccggagatatcatcaaggtatag

SEQ ID NO: 69874 - DNA, 354 bp, Artificial Sequence
  derived and/or modified sequence
atgcgaatgagtgtggggctgtccctccttctgcctttaagtggcaggacctttcttctgctcctgtccgtcgtgatggcacaaagccactggccctctgagccttccgaagccgtgagagattgggagaatcagcttgaggcctcaatgcactcagtcctgtctgatctgcacgaagccgttcctaccgttgttggaatccccgacggaacagcggtggtcggcagaagctttcgtgtgactatcccaactgacctgatcgcctctagcggggacatcattaaagttagcgctgccggaaaggaggccctccctagctggttacattgggactctcagagtcacacactctag

SEQ ID NO: 69875 - DNA, 159 bp, Artificial Sequence
  derived and/or modified sequence
atgcgtatgtccgtcggcctcagtctgttactgcctttgtctggacgtactttcttactgctcctatcggtcgtgatggcccagagccattggcctagtgagccgtcggaagctgtgcgtgactgggagaaccagctcgaggccagtatgcatagttag

SEQ ID NO: 69876 - DNA, 261 bp, Artificial Sequence
  derived and/or modified sequence
atgcgcatgagcgtcggcctgtccctcctgctccctttgagcgggagaaccttcctccttctcctgagcgtggtcatggctcagagtcattggccttcagaacccagtgaagcagtgagggactgggagaaccagctcgaggcctctatgcactcggtactttccgatctgcatgaggccgttcctacagtcgttggcatccccgacggcacagcagtggtgggcaggtcattccgcgtgactattccaacagatctttag

SEQ ID NO: 69877 - DNA, 126 bp, Artificial Sequence
  derived and/or modified sequence
atgcgaatgtctgtgggcctgtccctgctgctgccactgagcggacgcaccttcctcctgctgctctccgtggtgatggctcagtcacattggccaagcgaaccctccgaagctgtacgggactag

SEQ ID NO: 69878 - DNA, 2688 bp, Artificial Sequence
  derived and/or modified sequence
atgcgtatgtccgtgggattatctttgttactgcccttgtcaggcagaacctttctgttactgctgtccgtggtgatggctcaaagtcattggcctagcgaaccatctgaagcagtcagagactgggagaatcagctggaagctagtatgcattctgtcctctctgacctgcacgaggccgtgcccaccgttgtgggtattcccgacgggactgccgtggtgggacggtcttttagagttactatccccacggatctaatcgccagttctggggatataattaaggtcagcgccgcaggcaaggaggccttgcccagctggttgcattgggattcacagtctcatactctggagggattgccgttagataccgacaagggcgttcattatatttcagtgtccgcgacccgactcggagccaacggaagtcacattccccagacgtcatctgtattttcaatagaggtatatcctgaggaccactccgaactccaatctgtgagaaccgccagccccgatcccggtgaggtagtaagttcggcttgcgcggcagacgaacctgttaccgtcctgacggtgatacttgatgctgatctgacaaagatgaccccaaaacagcggattgaccttctgcacaggatgcggtctttctccgaggttgaactccataacatgaagcttgtgcccgtcgtgaataacagattgttcgacatgagtgcctttatggctggccctggaaatgcgaaaaaagtcgtcgaaaacggggcactcctcagctggaaactgggatgtagtttgaaccagaattccgtgcccgatatacatggggtggaggcacccgcaagagagggagctatgagcgctcagcttggctatccagttgtggggtggcacattgctaacaaaaagcccccactgcccaaacgggtgcgcagacagatccatgcaacgccaacccctgtaacggcgattgggcctccaaccacagctatccaagagccaccgagtagaatcgtgccaacaccaacaagcccagcgatcgctccacccactgagaccatggcgcctccagttagggacccagtccctggaaaacctacagttaccatcaggactaggggcgcaattattcagacccccactctcggtccaattcaacctactcgcgtgagcgaggcaggcaccactgtgccaggacaaattagacccaccatgactatccctggatatgtggaaccaacagccgtggctacacccccaaccactaccaccaaaaaaccacgggtgagcacccctaagcctgcaactccatcaaccgacagcacgaccacgaccaccagaagaccaacaaaaaagccgagaacacctagaccagtgccgagagtgacgaccaaagtgagcattactcgcctggagacagcttcacccccaacccgtatcagaactacaactagcggggtgccacgcggtggcgagccaaatcagcggcctgaacttaagaatcacatcgatcgtgttgacgcctgggtcggcacatacttcgaagtcaagatcccgagcgacacattttacgatcacgaagatacgacgactgataagttaaagctgacactgaagcttagggagcaacaactcgttggcgagaagagttgggttcagttcaactccaacagtcaacttatgtatggtctgcctgactcctctcacgtggggaagcacgagtactttatgcacgccacagataagggcggactgtctgccgtggatgcattcgaaattcatgttcaccgcaggcctcaaggcgatcgggcacctgcccgatttaaagcaaagttcgtgggcgatcctgcgctagttttgaatgacattcataaaaaaatagccctcgttaagaagttggcattcgccttcggggatagaaattgcagtacaattactctccagaacatcacaagagggtcaatagtggtggagtggactaacaatacgctgcctctcgaaccttgccctaaggagcagattgcagggctctcacggcgtattgcggaggatgacggcaaacctagacccgcattctcaaatgccctggagcccgacttcaaggctaccagtattacagtaaccgggtcaggctcatgtcgccatttacaatttatacccgtggtgccccctagacgtgttccatccgaggctccaccaaccgaggtgccggacagggatccagaaaagtcctccgaagacgacgtgtatttacacacagtcatcccagcggttgtcgtggcggctatcctcctgatcgccggaattatcgcaatgatctgctaccggaagaagcgcaagggcaaactaactttggaagatcaggccacattcattaagaaaggtgtacctatcatttttgctgatgaactggatgactccaagccgccacccagctcctctatgcctcttatcctgcaggaagagaaagccccactgcctccaccggagtaccctaaccagtccgtgcctgagaccacacctctgaatcaagataccatgggcgaatacacaccgctcagagacgaggatcccaacgccccaccataccaaccacctccccctttcactgcgccaatggagggcaaagggagcaggcctaaaaatatgacaccctaccgcagccctcccccttacgtgccaccatag

SEQ ID NO: 69879 - DNA, 2688 bp, Artificial Sequence
  derived and/or modified sequence
atgcggatgagtgttggattgagtttactgctgcccctgtctggcaggactttcctgctgctgctcagcgttgtcatggcacagagtcattggccatcagaaccttcagaggcagtacgcgattgggagaatcaattggaggcatctatgcattccgtgctgagcgatcttcacgaggcagttcccacagtggtgggcatccctgatggtactgcagtggttggtcgctcttttagggtgacaatcccgactgatctcatcgcctcaagcggggacattatcaaggttagcgccgcaggcaaggaagctctcccaagctggctgcactgggactcacagtcccatacattggagggcttgccattggataccgacaagggcgtgcactatatttcagtgtctgctactagactgggcgctaacggcagccacattccacagacctcctcggtcttctctattgaagtgtaccccgaagatcatagcgaattacaaagtgtaaggactgccagcccggatcctggcgaggttgttagttccgcttgtgctgcagacgaacccgtcacagtgcttacagtgatactggatgctgaccttactaagatgactccaaaacagagaattgatctgctccatcgcatgcgaagctttagcgaggttgagctgcacaatatgaaattagtacctgtggtaaataacaggctgtttgatatgagcgcattcatggcaggcccaggtaatgccaagaaggtagtagaaaatggcgctctgctgtcctggaaattgggctgttcactcaatcaaaattctgtgcccgacatacacggagtcgaggcgccagctcgtgagggggctatgtcagcacagttggggtatcccgtggtgggatggcatattgcgaacaagaagccgcctcttccaaagcgtgtaagaaggcaaattcacgccacccccactcccgtcactgctatcgggcctcctaccacagcaattcaagagcccccatccagaatagtgccaacacctaccagcccagccatcgccccacccacagaaacaatggcacctcctgtgcgagacccagtccctggcaagccgactgtgaccatcagaacaaggggagccattatccagactccgactcttgggccaatacagcccactagggtctccgaagccggtacgacagtcccgggacagatcagaccaaccatgacaatccctggatatgtggagcccaccgctgtcgcaactccacccaccaccactaccaaaaagccacgggtctccacacccaaacctgctactccttccactgattcaacaactaccacaacccgtcgcccaaccaaaaaaccccgaacaccacggcctgtacccagagtcactactaaagtctccatcacgagactagagaccgcatcgccacctacgcgcattaggacgactacgtcgggggttccacgcggaggtgagcctaaccagaggcccgagttgaagaatcacatcgaccgcgttgatgcatgggtgggtacctattttgaggttaaaattccctccgacaccttctatgaccacgaagatacaaccacggacaagctaaaactgactctcaaactccgagagcaacagctggtgggagagaaatcttgggtccagttcaattctaatagccagctcatgtacggactgcctgactcatcccatgttggtaaacacgaatattttatgcatgccacggataagggaggactttcggctgtggatgctttcgaaatccacgtgcataggcggcctcagggcgaccgagcccctgcgcgatttaaggcgaagtttgtgggtgaccctgcgctggtgctgaatgatatccataaaaaaattgcactggtcaagaaactcgcatttgctttcggagacagaaactgctccacaatcaccctccagaacatcactcgcggtagtatcgttgtggaatggactaataacacactgcctcttgagccttgtccgaaagagcagatagcgggattatccaggagaattgctgaggatgatggaaaacctcggcctgcattttctaatgctctggagcctgatttcaaagccacgtctattactgtaaccggttcaggcagctgccgacacctgcagtttatccccgttgtccctcctaggcgggtgccttcagaggctcctcctaccgaggttcctgacagggacccagaaaagtcaagtgaagacgatgtgtatctccacaccgtcattcccgctgtggtggtagcagccatcttattaattgctggcatcatcgccatgatctgctaccggaagaaaaggaaaggaaaactgactctagaagaccaggcgactttcattaagaagggtgtacctatcatctttgcagatgaacttgacgatagcaaacctccacctagttctagcatgcccctgatcctgcaggaagaaaaggcccctctgccaccacctgagtacccaaatcaatctgtcccagagactaccccccttaaccaggacacaatgggggagtacactccgcttcgagacgaggatccaaacgcccctccttaccaaccaccacctccatttacggcgcctatggaagggaaaggaagccgtccaaaaaatatgactccgtatcggtcaccgccaccatatgttcccccttag

SEQ ID NO: 69880 - DNA, 2688 bp, Artificial Sequence
  derived and/or modified sequence
atgaggatgagcgttgggctgtccctattactcccactttctggcagaacttttttgttactgctctctgtggtgatggcacagagccattggccatccgagccttccgaagctgtccgggactgggaaaatcagctagaggcttccatgcattccgttctctcagaccttcacgaggctgtgcccaccgtcgtgggtatacctgacggcaccgccgtggttggtcggtcgtttcgcgtcacaatcccaactgatctgatcgcgtcatctggagacatcatcaaggtcagtgcagccggaaaagaggcgctgccatcctggctgcactgggacagccagtcgcacacattagagggcttacctctggataccgacaagggcgttcactacatttccgtgtctgcaacccgcctcggggctaacggaagccatataccacagacatccagcgtcttctctatcgaagtctaccctgaagaccattctgaattgcagtcagtgagaacagcttcgccggacccaggcgaagtcgtatcaagcgcctgtgctgccgatgagccagtaacagtgcttaccgtgatcctcgatgctgacctaacgaagatgacccccaagcagcgaatcgacctcctgcaccggatgcggagcttctctgaagtagagcttcacaatatgaaactggtccccgtggtcaacaatcgccttttcgacatgagcgcatttatggcagggcctggaaatgcgaagaaagtggtagagaacggcgcactgctcagctggaaactaggctgttcattaaaccagaactccgtgccggacatacacggggtggaggcgccagctagggagggtgcaatgtctgcacaattgggctatccagttgtgggctggcatattgcaaataagaagccaccacttcccaagcgcgtccgacgacagattcacgcaacacctacacccgtgaccgccataggtccacccaccactgccatacaggagcccccaagtagaatcgtgccaacacccaccagtccggcaatcgcgcctcctacggagactatggcaccacccgtcagggaccctgtgcctggcaaaccaactgtgaccattaggactcgaggcgcaattattcagacgcccactctcgggcctatacagccaaccagagtgagtgaagcagggacaaccgtgcctggacaaatccgcccaacaatgacgattcccggttatgtcgagcccacagccgtcgctacaccccctactaccaccactaaaaaacctcgggtgagtacaccaaagcctgccaccccaagcaccgattcaaccaccactaccacccggaggccaaccaagaagccacgtacaccacggcctgtgccacgggtcacaactaaggtctcaataacccggctggaaacagcgtcaccacccacccgaatccggacaactacaagtggcgtccctaggggcggtgagccaaaccagaggccagaactcaagaaccatatcgacagagtggacgcatgggtggggacttactttgaggtgaagatcccatctgatactttttatgaccacgaagacacgaccaccgacaagctgaaactgactcttaaactgagggagcagcagctggtaggcgaaaaatcttgggttcaattcaactccaactcccaactgatgtacggcctgccagactccagccacgtaggcaaacatgagtacttcatgcacgcaaccgataaaggtggtttgtccgccgtggacgcctttgaaatccatgtgcatcggcgaccgcagggcgaccgcgctccagctagatttaaagctaaattcgtcggggatcccgcactcgtcttgaacgatatacataagaagatcgcactggtgaagaaacttgcctttgcttttggagaccgcaattgtagcacgataacccttcagaatatcactaggggctctatcgttgtggaatggactaacaacaccctgcccctagagccatgccccaaagagcagatcgcaggcctgtcgaggcgcatcgccgaagatgatggcaagccccgacctgctttcagcaatgcactcgagcctgatttcaaggctaccagcataaccgtgacaggatctggaagttgcagacaccttcagtttatcccggtggtgcccccacgcagagtcccaagcgaggccccacccacagaagtgcccgatcgggaccccgagaagagcagcgaggatgacgtgtatctgcatacggtgattccagcagtggtggtagctgcgatcctgctcatagctgggatcatcgcaatgatctgttacaggaagaaacgtaagggcaagctcaccctggaggaccaagctacgtttattaagaagggggtgcctatcatctttgcagatgaactcgatgatagcaagccacccccttcctcctccatgcccttgatactgcaggaagaaaaggccccactgcccccaccagaataccctaaccaaagcgtgcccgaaaccacccccctgaaccaagatacgatgggagaatatacacccctgagggacgaggatcctaacgccccaccataccagcctccaccgccattcaccgccccaatggagggcaaggggtcgcggccaaagaatatgaccccttaccggagtccccctccgtacgtgccaccttag

SEQ ID NO: 69881 - DNA, 2688 bp, Artificial Sequence
  derived and/or modified sequence
atgcggatgtcagtgggactctccctgctgctccctctgtccggacgcacttttctcctgctactgtccgttgttatggcccagtctcattggccctccgagccatccgaggccgtgagggattgggaaaatcagctcgaggctagcatgcattcagtgttgagtgacctacacgaagccgtgcctacagtggtggggattcctgacggaaccgccgtggttggtaggtccttccgcgtcactatcccgactgacctcattgccagttccggcgacatcattaaggtgtccgctgcaggcaaagaagcgcttccatcgtggctacattgggattctcagtcgcacactctcgaagggcttcccctggatactgataaaggcgtccactacatcagcgtctcagccacaagactcggggcaaacgggtcccatattcctcagacgagctccgtgttttctattgaagtctatccagaggaccacagcgaattgcagtctgtgcggacagctagcccagacccgggagaggtggtctcttcagcctgcgccgctgatgaaccagtcaccgtcttaacagtcattcttgacgcagatctgacgaaaatgacccctaagcaaagaatcgatctactgcacaggatgcgctctttctccgaagttgagctgcataacatgaagctcgtgccagtggttaataataggctctttgacatgtcggccttcatggccggacctggaaatgctaagaaggtggtggagaatggggcattgctcagctggaaactgggatgcagtcttaatcagaactccgttcctgacatacacggcgtggaagcccctgctagagaaggggctatgagtgcccagctagggtatccagtggtgggctggcatatcgcgaataaaaagccgcctcttcctaagcgcgtgcgtaggcaaatacatgcaactcctacgcccgtcaccgccataggcccacccaccaccgctatccaggaacccccaagccgcatcgttcctacacccacatcaccagcaattgcgcctcctactgagacaatggcacctccggtcagagatcctgtacccggaaagcccactgtcaccatacgcactagaggagcaatcattcagaccccaaccttgggccctatccagcctaccagagtgtccgaagctggcacaactgtccccggacaaatccggccaacaatgaccattcctgggtatgtggagcctaccgcagtagctacacccccaacgactaccaccaaaaaaccgcgagtgtccaccccaaaacccgcaactccatccacggacagtaccacaaccactactcgacgtccaacgaagaaacccaggacccctagaccagtacctcgggtcacaacaaaggtgagcataacccgactggaaactgcatctccaccaacacgtattaggactaccacctcgggagttcccaggggcggagagcctaaccagcgtcctgagcttaaaaatcatatcgaccgtgtggatgcctgggtgggcacctattttgaggtcaaaatcccctccgacacattttatgaccacgaagacactaccactgacaaactcaaacttacactgaaactacgcgagcagcagctcgtgggggagaagtcctgggtccagttcaactctaactcgcagctcatgtacgggctgcccgattcttcccacgtaggcaagcacgagtatttcatgcacgccaccgacaaaggcggactgtcagcggtcgatgctttcgagattcatgtgcacagacggccacagggagatagggcaccagctcgctttaaggccaaatttgtgggcgacccagctctcgtactcaacgatattcacaaaaagatcgccctcgtgaaaaaactggcctttgccttcggggataggaattgcagcacaatcacactccagaatattacccgtgggtcgatcgtagtggagtggaccaataataccctgccgctggaaccgtgcccaaaggagcagatcgcagggctttccaggcgaattgcagaagacgacggcaaacccaggccagcctttagcaacgctctcgaacctgactttaaggcaactagtatcaccgtcacaggttcaggctcatgcaggcacctccagtttatacctgttgtaccccctagaagagtcccttccgaagcccctcccaccgaggttccggacagggacccagaaaagagttcggaagacgatgtgtatcttcacacagtgataccagctgtcgtcgtggcagctattctcctcatcgccggtattattgccatgatctgctatagaaaaaagaggaaaggcaagcttactctggaggaccaggccacatttataaaaaaaggtgtgccaatcatctttgctgacgagttggacgatagtaagcctccaccaagcagcagcatgcctttgatcctgcaggaagaaaaggcacctctgccacctccagagtatcccaaccagtccgtccctgaaacaacaccgttgaatcaggacactatgggcgaatataccccactccgtgatgaagaccccaacgcgccaccatatcaaccaccacccccattcaccgcacctatggagggaaaggggtcgcggccaaagaacatgacgccttataggtctccacccccttacgttccaccttag

SEQ ID NO: 69882 - DNA, 2688 bp, Artificial Sequence
  derived and/or modified sequence
atgcgcatgagtgttggtctgtctctgctgctgccgctgagcggccgtaccttcctgctgttgctgagtgtggttatggcccaaagtcattggccgtcagaaccctccgaagccgtgagagattgggagaaccaactggaagccagtatgcactctgtgctgagtgatttacacgaggccgtgcctacagtggtcggcatacctgacgggaccgccgtggtgggacgcagctttagagtgacgattcccacagatctcattgcttcatctggggatattattaaggtgagcgctgctggaaaggaagctctgcctagctggctccattgggactcccagagccacaccttagaaggacttccactggacacagataaaggggtccattatatctccgtgtcagctaccagacttggagccaacggcagccatattccgcagacttcgagtgtgtttagtatagaggtgtaccctgaagatcactctgaactgcagagcgtacgaacagcctctcccgatccgggtgaggtggtaagctctgcctgtgccgcagacgaaccagtgacagtgctcacggttattttggacgcagatctgactaaaatgacgcccaaacaacgcatcgacctcctgcaccgtatgcggtcttttagtgaggtggagctgcacaacatgaagttggtgcctgtcgtcaataacaggctgttcgatatgagtgcatttatggcaggccctggaaacgctaagaaggtagtggagaacggggctctactctcttggaaacttggttgttctcttaatcaaaatagtgtgccagacatccacggtgtggaagcacctgcccgtgaaggggctatgagcgcgcagctgggttaccctgtggtgggctggcacatcgcaaacaagaaacccccactccctaagcgcgttcgacgacaaatacatgccacgccaaccccagtgacagcaataggaccacctacaactgctatccaggagccaccatccagaatcgttccaacccccacctctcctgccattgctcccccaaccgagacaatggctccaccagtacgcgaccctgtgccaggcaagccaaccgtcactatacgtacacggggtgccattatccagactccgacgctggggccaatccaaccaacacgagtgtccgaggctgggactacggtaccgggacaaatccggccaaccatgactatcccaggctacgtcgaaccaaccgccgtggccaccccgccaacaacaactaccaagaagcctagggtgagcactcccaagcctgcaacgccatctactgattctacaaccactacaaccaggaggccaaccaaaaagccgaggaccccgagacctgtccccagagtgactacaaaggtgagcataacacgtctggaaactgcgtctcctccaactcgcattcggacaaccacttcaggagtgcctcgcggaggcgaacccaatcagcgtccggagcttaaaaaccatatagacagggtggatgcgtgggtgggcacttacttcgaggttaagattccaagcgatactttttacgatcacgaagacaccaccactgacaagctaaagctgacactgaagctgagagaacagcagctcgtaggagagaagagctgggtgcaatttaacagcaattctcagctaatgtatgggcttcctgattcctctcatgtgggcaagcatgagtattttatgcacgcaaccgacaagggaggtctaagtgccgtggatgcttttgaaatccatgttcaccggcgaccccagggcgaccgggcacccgcaagattcaaagccaaattcgtcggcgacccggctctggtcctcaatgacattcataagaaaattgccctggtgaagaaattggcattcgcgttcggggacagaaattgttccacgattactctgcagaatatcacccgcggttccattgtggttgagtggaccaacaataccctcccactggagccatgtccaaaggagcagatcgctgggttgtcgaggcggatcgccgaagacgatggcaaaccaaggccagctttttccaacgctttagagcctgattttaaagctaccagcattaccgtgaccggttccgggagttgccggcacctgcaatttatcccagtggtccctccaaggcgcgtgccctccgaggcccctcccacagaagtgccagacagggatcccgagaagtcctcagaagatgatgtgtatttacatacagtgatcccggcagtggtcgtggcggctatcctgttgattgccggaataatcgcgatgatctgttatagaaagaaacgaaagggtaaactgaccctagaggaccaggcgacattcatcaaaaagggtgtacccatcatattcgcagacgaattggatgactccaaacctcccccttcgagcagcatgcccctgatactgcaggaggaaaaggctcccctgcctccgccagagtatccgaaccagtctgtccccgaaacaacgcctctgaatcaggataccatgggcgaatacacccctctgcgggatgaggatcccaacgctccaccgtaccagcctccccctccattcacagcgccaatggagggtaagggctcacgccctaagaacatgaccccttacagatccccacccccatacgtacccccttag

SEQ ID NO: 69883 - DNA, 2688 bp, Artificial Sequence
  derived and/or modified sequence
atgagaatgagcgtgggcctgagcctgctgctgcccctgagcggcagaaccttcctgctgctgctgagcgtggtgatggcccagagccactggcccagcgagcccagcgaggccgtgagagactgggagaaccagctggaggccagcatgcacagcgtgctgagcgacctgcacgaggccgtgcccaccgtggtgggcatccccgacggcaccgccgtggtgggcagaagcttcagagtgaccatccccaccgacctgatcgccagcagcggcgacatcatcaaggtgagcgccgccggcaaggaggccctgcccagctggctgcactgggacagccagagccacaccctggagggcctgcccctggacaccgacaagggcgtgcactacatcagcgtgagcgccaccagactgggcgccaacggcagccacatcccccagaccagcagcgtgttcagcatcgaggtgtaccccgaggaccacagcgagctgcagagcgtgagaaccgccagccccgaccccggcgaggtggtgagcagcgcctgcgccgccgacgagcccgtgaccgtgctgaccgtgatcctggacgccgacctgaccaagatgacccccaagcagagaatcgacctgctgcacagaatgagaagcttcagcgaggtggagctgcacaacatgaagctggtgcccgtggtgaacaacagactgttcgacatgagcgccttcatggccggccccggcaacgccaagaaggtggtggagaacggcgccctgctgagctggaagctgggctgcagcctgaaccagaacagcgtgcccgacatccacggcgtggaggcccccgccagagagggcgccatgagcgcccagctgggctaccccgtggtgggctggcacatcgccaacaagaagccccccctgcccaagagagtgagaagacagatccacgccacccccacccccgtgaccgccatcggcccccccaccaccgccatccaggagccccccagcagaatcgtgcccacccccaccagccccgccatcgccccccccaccgagaccatggccccccccgtgagagaccccgtgcccggcaagcccaccgtgaccatcagaaccagaggcgccatcatccagacccccaccctgggccccatccagcccaccagagtgagcgaggccggcaccaccgtgcccggccagatcagacccaccatgaccatccccggctacgtggagcccaccgccgtggccaccccccccaccaccaccaccaagaagcccagagtgagcacccccaagcccgccacccccagcaccgacagcaccaccaccaccaccagaagacccaccaagaagcccagaacccccagacccgtgcccagagtgaccaccaaggtgagcatcaccagactggagaccgccagcccccccaccagaatcagaaccaccaccagcggcgtgcccagaggcggcgagcccaaccagagacccgagctgaagaaccacatcgacagagtggacgcctgggtgggcacctacttcgaggtgaagatccccagcgacaccttctacgaccacgaggacaccaccaccgacaagctgaagctgaccctgaagctgagagagcagcagctggtgggcgagaagagctgggtgcagttcaacagcaacagccagctgatgtacggcctgcccgacagcagccacgtgggcaagcacgagtacttcatgcacgccaccgacaagggcggcctgagcgccgtggacgccttcgagatccacgtgcacagaagaccccagggcgacagagcccccgccagattcaaggccaagttcgtgggcgaccccgccctggtgctgaacgacatccacaagaagatcgccctggtgaagaagctggccttcgccttcggcgacagaaactgcagcaccatcaccctgcagaacatcaccagaggcagcatcgtggtggagtggaccaacaacaccctgcccctggagccctgccccaaggagcagatcgccggcctgagcagaagaatcgccgaggacgacggcaagcccagacccgccttcagcaacgccctggagcccgacttcaaggccaccagcatcaccgtgaccggcagcggcagctgcagacacctgcagttcatccccgtggtgccccccagaagagtgcccagcgaggccccccccaccgaggtgcccgacagagaccccgagaagagcagcgaggacgacgtgtacctgcacaccgtgatccccgccgtggtggtggccgccatcctgctgatcgccggcatcatcgccatgatctgctacagaaagaagagaaagggcaagctgaccctggaggaccaggccaccttcatcaagaagggcgtgcccatcatcttcgccgacgagctggacgacagcaagcccccccccagcagcagcatgcccctgatcctgcaggaggagaaggcccccctgcccccccccgagtaccccaaccagagcgtgcccgagaccacccccctgaaccaggacaccatgggcgagtacacccccctgagagacgaggaccccaacgcccccccctaccagccccccccccccttcaccgcccccatggagggcaagggcagcagacccaagaacatgaccccctacagaagcccccccccctacgtgcccccctag

SEQ ID NO: 69884 - DNA, 432 bp, Artificial Sequence
  derived and/or modified sequence
atgacccccaagcagagaatcgacctgctgcacagaatgagaagcttcagcgaggtggagctgcacaacatgaagctggtgcccgtggtgaacaacagactgttcgacatgagcgccttcatggccggccccggcaacgccaagaaggtggtggagaacggcgccctgctgagctggaagctgggctgcagcctgaaccagaacagcgtgcccgacatccacggcgtggaggcccccgccagagagggcgccatgagcgcccagctgggctaccccgtggtgggctggcacatcgccaacaagaagccccccgccctgagcggcccccccaagccccagagcagctggagagacttcggcgacttcttcatcttcatcttctgcctgaccgccttcggcctgttcatcgagaacagcagcctgcacttctag

SEQ ID NO: 69885 - DNA, 267 bp, Artificial Sequence
  derived and/or modified sequence
atgagaatgagcgtgggcctgagcctgctgctgcccctgagcggcagaaccttcctgctgctgctgagcgtggtgatggcccagagccactggcccagcgagcccagcgaggccgtgagagactgggagaaccagctggaggccagcatgcacagcgtgctgagcgacctgcacgaggccgtgcccaccgtggtgggcatccccgacggcaccgccgtggtgggcagaagcttcagagtgaccatccccaccgacctgatcgcctag

SEQ ID NO: 69886 - DNA, 321 bp, Artificial Sequence
  derived and/or modified sequence
atgagaatgagcgtgggcctgagcctgctgctgcccctgagcggcagaaccttcctgctgctgctgagcgtggtgatggcccagagccactggcccagcgagcccagcgaggccgtgagagactgggagaaccagctggaggccagcatgcacagcgtgctgagcgacctgcacgaggccgtgcccaccgtggtgggcatccccgacggcaccgccgtggtgggcagaagcttcagagtgaccatccccaccgacctgatcgccagcagcggcgacatcatcaaggtgagcgccgccggcaaggaggccctgcccagctag

SEQ ID NO: 69887 - DNA, 291 bp, Artificial Sequence
  derived and/or modified sequence
atgagaatgagcgtgggcctgagcctgctgctgcccctgagcggcagaaccttcctgctgctgctgagcgtggtgatggcccagagccactggcccagcgagcccagcgaggccgtgagagactgggagaaccagctggaggccagcatgcacagcgtgctgagcgacctgcacgaggccgtgcccaccgtggtgggcatccccgacggcaccgccgtggtgggcagaagcttcagagtgaccatccccaccgacctgatcgccagcagcggcgacatcatcaaggtgtag

SEQ ID NO: 69888 - DNA, 354 bp, Artificial Sequence
  derived and/or modified sequence
atgagaatgagcgtgggcctgagcctgctgctgcccctgagcggcagaaccttcctgctgctgctgagcgtggtgatggcccagagccactggcccagcgagcccagcgaggccgtgagagactgggagaaccagctggaggccagcatgcacagcgtgctgagcgacctgcacgaggccgtgcccaccgtggtgggcatccccgacggcaccgccgtggtgggcagaagcttcagagtgaccatccccaccgacctgatcgccagcagcggcgacatcatcaaggtgagcgccgccggcaaggaggccctgcccagctggctgcactgggacagccagagccacaccctgtag

SEQ ID NO: 69889 - DNA, 159 bp, Artificial Sequence
  derived and/or modified sequence
atgagaatgagcgtgggcctgagcctgctgctgcccctgagcggcagaaccttcctgctgctgctgagcgtggtgatggcccagagccactggcccagcgagcccagcgaggccgtgagagactgggagaaccagctggaggccagcatgcacagctag

SEQ ID NO: 69890 - DNA, 261 bp, Artificial Sequence
  derived and/or modified sequence
atgagaatgagcgtgggcctgagcctgctgctgcccctgagcggcagaaccttcctgctgctgctgagcgtggtgatggcccagagccactggcccagcgagcccagcgaggccgtgagagactgggagaaccagctggaggccagcatgcacagcgtgctgagcgacctgcacgaggccgtgcccaccgtggtgggcatccccgacggcaccgccgtggtgggcagaagcttcagagtgaccatccccaccgacctgtag

SEQ ID NO: 69891 - DNA, 126 bp, Artificial Sequence
  derived and/or modified sequence
atgagaatgagcgtgggcctgagcctgctgctgcccctgagcggcagaaccttcctgctgctgctgagcgtggtgatggcccagagccactggcccagcgagcccagcgaggccgtgagagactag

SEQ ID NO: 69892 - DNA, 5518 bp, Artificial Sequence
  derived and/or modified sequence
aggcagaagccggcggcgcgcggacagccagtcggcgccgcgcggagctggccgctggattggctgcaacactcgcgtgtcaggcggttgctaggctccggccgcgcgccccgcccttgcgctcagcgccctctcaccgcccggtacgtgctcgcgcgaaggctgcggcgcggcgctcgcgcctcttaggcttggcggtggcggcggcggcagcttcgcgccgaatccccggggagcggcggtggcggcgtcctggggccaggaggagcgaacacctgccgcggtcctcccgccggcgctgggctctgtgtgctccgggatggagcaggtgtgcagagggtgagaacccagctctgggaccaagtcacttgcttccttacttagcaagactatcgacttgagcaaacttggacctgggatgaggatgtctgtgggcctctcgctgctgctgcccctctcggggaggacctttctcctcctgctctctgtggttatggctcagtcccactggcccagtgaaccctcagaggctgtcagggactgggaaaaccagcttgaggcatccatgcactcagtgctctcagacctccacgaggctgttcccacagtggttggcattcctgatggcacggctgtcgtcgggcgctcatttcgagtgaccattccaacagatttgattgcctccagtggagatatcatcaaggtatcagcggcagggaaggaggctttgccatcttggctgcactgggactcacagagccacaccctggagggcctcccccttgacactgataagggtgtgcattacatttcagtgagcgctacacggctgggggccaacgggagccacatcccccagacctccagtgtgttctccatcgaggtctaccctgaagaccacagtgagctgcagtcggtgaggacagcctccccagaccctggtgaggtggtatcatctgcctgtgctgcggatgaacctgtgactgttttgacggtgattttggatgccgacctcaccaagatgaccccaaagcaaaggattgacctcctgcacaggatgcggagcttctcagaagtagagcttcacaacatgaaattagtgccggtggtgaataacagactatttgacatgtcggccttcatggctggcccgggaaatgcaaaaaaggtggtggagaatggggcccttctctcctggaagctgggctgctccctgaaccagaacagtgtgcctgacattcatggtgtagaggcccctgccagggagggcgcaatgtctgctcagcttggctaccctgtggtgggttggcacatcgccaataagaagccccctcttcccaaacgcgtccggaggcagatccatgctacacccacacctgtcactgccattgggcccccaaccacggctatccaggagcccccatccaggatcgtgccaacccccacatctccagccattgctcctccaacagagaccatggctcctccagtcagggatcctgttcctgggaaacccacggtcaccatccggactcgaggcgccattattcaaaccccaaccctaggccccatccagcctactcgggtgtcagaagctggcaccacagttcctggccagattcgcccaacgatgaccattcctggctatgtggagcctactgcagttgctacccctcccacaaccaccaccaagaagccacgagtatccacaccaaaaccagcaacgccttcaactgactccaccaccaccacgactcgcaggccaaccaagaaaccacggacaccccggccagtgccccgggtcaccaccaaagtttccatcaccagattggaaactgcctcaccgcctactcgtattcgcaccaccaccagtggagtgccccgtggcggagaacccaaccagcgcccagagctcaagaaccatattgacagggtagatgcctgggttggcacctactttgaggtgaagatcccgtcagacactttctatgaccatgaggacaccaccactgacaagctgaagctgaccctgaaactgcgggagcagcagctggtgggcgagaagtcctgggtacagttcaacagcaacagccagctcatgtatggccttcccgacagcagccacgtgggcaaacacgagtatttcatgcatgccacagacaaggggggcctgtcggctgtggatgccttcgagatccacgtccacaggcgcccccaaggggatagggctcctgcaaggttcaaggccaagtttgtgggtgacccggcactggtgttgaatgacatccacaagaagattgccttggtaaagaaactggccttcgcctttggagaccgaaactgtagcaccatcaccctgcagaatatcacccggggctccatcgtggtggaatggaccaacaacacactgcccttggagccctgccccaaggagcagatcgctgggctgagccgccggatcgctgaggatgatggaaaacctcggcctgccttctccaacgccctagagcctgactttaaggccacaagcatcactgtgacgggctctggcagttgtcggcacctacagtttatccctgtggtaccacccaggagagtgccctcagaggcgccgcccacagaagtgcctgacagggaccctgagaagagcagtgaggatgatgtctacctgcacacagtcattccggccgtggtggtcgcagccatcctgctcattgctggcatcattgccatgatctgctaccgcaagaagcggaagggcaagcttacccttgaggaccaggccaccttcatcaagaagggggtgcctatcatctttgcagacgaactggacgactccaagcccccaccctcctccagcatgccactcattctgcaggaggagaaggctcccctaccccctcctgagtaccccaaccagagtgtgcccgagaccactcctctgaaccaggacaccatgggagagtacacgcccctgcgggatgaggatcccaatgcgcctccctaccagcccccaccgcccttcacagcacccatggagggcaagggctcccgtcccaagaacatgaccccataccggtcacctcctccctatgtcccaccttaacccgcaagcgcctgggtggaggcagggtagggcaggggcctggagacgacatggtgttgtctgtggagaccggtggcctgcagaccattgcccaccgggagccgacacctgacctagcacacactgacacaggggcctggacaagcccgccctctctggtcctcccaaaccccaaagcagctggagagactttggggacttttttatttttattttttgcctaacagcttttggtttgttcatagagaattcttcgcttcatttttgatggctggctctgaaagcaccatgtggagtggaggtggagggagcgaggaaccatgaatgaactcgcaggcagtgccgggcggccccctggctctctgcgttttgcctttaacactaactgtactgttttttctattcacgtgtgtctagctgcaggatgtaacatggaaaacagtaactaaagattaaattcaaaggactttcagaagttaaggttaagtttttacgtttaatctgctgtttacctaaacttgtatgtataatttttgggtgggtatggggaattgctttgctaaaaataagctcccagggtgtttcaaacttagagaagaccaagggacagtattttttatcaaaggaatactattttttcacactacgtcaacttggttgctctgataccccagagcctgattgggggcctcccggccctggctcacgccaagtccctggtgctgggtttgctctcccgctgttgccaggggctggaagctggaggggtctcttgggccatggacatccccacttccagcccatgtacactagtggcccacgaccaaggggtcttcatttccatgaaaaagggactccaagaggcagtggtggctgtggcccccaactttggtgctccagggtgggccagctgcttgtgggggcacctgggaggtcaaaggtctccaccacatcaacctattttgttttaccctttttctgtgcattgtttttttttttcctcctaaaaggaatatcacggttttttgaaacactcagtgggggacattttggtgaagatgcaatatttttatgtcatgtgatgctctttcctcacttgaccttggccgctttgtcctaacagtccacagtcctgccccgacccaccccatcccttttctctggcactccagtcccaggccttgggcctgaactactggaaaaggtctggcggctggggaggagtgccagcaatagttcataataaaaatctgttagctctcaaagctaattttttactaaagtttttatacagcctcaaattgttttattaaaaaaaagatttaaaatggtgatgcttacagcagtttgtacgagctcttaagtgttgattccatggaactgacggctttgcttgttttgattcttttccccctacttttcctaatggtttaaattctggaattacactggggttcttttgccttttttagcagaacatccgtccgtccatctgcatctctgtcccatgactcaggggcgcccactctgcttcgattctcctcctgtggaagaaaccattttgagcatgacttttcttgatgtctgaagcgttattttgggtactttttagggaggaatgcctttcgcaataatgtatccattccctgattgagggtgggtgggtggacccaggctccctttgcacacagagcagctacttctaagccatatcgactgttttgcagaggatttgtgtgtgctgcctcaggaggggagggctggtaggagggggggagaggtctctgtcctactgctctccagagggcatttccccttgcgccttctcccacagggcccagcccctctcccctgccccagtccccagggggtactctggagtgagcagtgcccctgtgggggagcctgtaaatgcgggctcagtggaccactggtgactgggctcatgcctccaagtcagagtttccctggtgccccagagacaggagcacaagtgggatctgacctggtgagattatttctgatgacctcatcaaaaaataaacaattcccaatgttccaggtgagggctttgaaaggccttccaaacagctccgtcgcccctagcaactccaccattgggcactgccatgcagagacgtggctggcccagaatggcctgttgccatagcaactggaggcgatggggcagtgaacagaataacaacagcaacaatgcctttgcaggcagcctgctcccctgagcgctgggctggtgatggtcgttggactctgtgagatggagagccaatctcacattcaagtgttcaccaaccactgatgtgtttttatttccttctatatgattttaagatgtgttttctgcattctgtaaagaaacatatcaaactaaataaaagcagtgtctttatt

SEQ ID NO: 69893 - DNA, 432 bp, Artificial Sequence
  derived and/or modified sequence
atgaccccaaagcaaaggattgacctcctgcacaggatgcggagcttctcagaagtagagcttcacaacatgaaattagtgccggtggtgaataacagactatttgacatgtcggccttcatggctggcccgggaaatgcaaaaaaggtggtggagaatggggcccttctctcctggaagctgggctgctccctgaaccagaacagtgtgcctgacattcatggtgtagaggcccctgccagggagggcgcaatgtctgctcagcttggctaccctgtggtgggttggcacatcgccaataagaagccccccgccctctctggtcctcccaaaccccaaagcagctggagagactttggggacttttttatttttattttttgcctaacagcttttggtttgttcatagagaattcttcgcttcatttttga

SEQ ID NO: 69894 - DNA, 731 bp, Artificial Sequence
  derived and/or modified sequence
agaagccggcggcgcgcggacagccagtcggcgccgcgcggagctggccgctggattggctgcaacactcgcgtgtcaggcggttgctaggctccggccgcgcgccccgcccttgcgctcagcgccctctcaccgcccggtacgtgctcgcgcgaaggctgcggcgcggcgctcgcgcctcttaggcttggcggtggcggcggcggcagcttcgcgccgaatccccggggagcggcggtggcggcgtcctggggccaggaggagcgaacacctgccgcggtcctcccgccggcgctggggccactgctctccaggaagataaggcttttaaagcagcctagcactagaaggctctgtgtgctccgggatggagcaggtgtgcagagggtgagaacccagctctgggaccaagtcacttgcttccttacttagcaagactatcgacttgagcaaacttggacctgggatgaggatgtctgtgggcctctcgctgctgctgcccctctcggggaggacctttctcctcctgctctctgtggttatggctcagtcccactggcccagtgaaccctcagaggctgtcagggactgggaaaaccagcttgaggcatccatgcactcagtgctctcagacctccacgaggctgttcccacagtggttggcattcctgatggcacggctgtcgtcgggcgctcatttcgagtgaccattccaacagatttgattgcct

SEQ ID NO: 69895 - DNA, 579 bp, Artificial Sequence
  derived and/or modified sequence
aggcagaagccggcggcgcgcggacagccagtcggcgccgcgcggagctggccgctggattggctgcaacactcgcgtgtcaggcggttgctaggctccggccgcgcgccccgcccttgcgctcagcgccctctcaccgcccggctctgtgtgctccgggatggagcaggtgtgcagagggtgagaacccagctctgggaccaagtcacttgcttccttacttagcaagactatcgacttgagcaaacttggacctgggatgaggatgtctgtgggcctctcgctgctgctgcccctctcggggaggacctttctcctcctgctctctgtggttatggctcagtcccactggcccagtgaaccctcagaggctgtcagggactgggaaaaccagcttgaggcatccatgcactcagtgctctcagacctccacgaggctgttcccacagtggttggcattcctgatggcacggctgtcgtcgggcgctcatttcgagtgaccattccaacagatttgattgcctccagtggagatatcatcaaggtatcagcggcagggaaggaggctttgccatcttg

SEQ ID NO: 69896 - DNA, 841 bp, Artificial Sequence
  derived and/or modified sequence
cgcggcgctcgcgcctcttaggcttggcggtggcggcggcggcagcttcgcgccgaatccccggggagcggcggtggcggcgtcctggggccaggaggagcgaacacctgccgcggtcctcccgccggcgctggacctggttcacctgcgagtgtatttggatagtgtctccacagaaaatgtcgtctcggcttggaatctttttgccataaattctaaggccactgctctccaggaagataaggcttttaaagcagcctagcactagaaggtgaggcacacgactgtctatcccagatggctgcactggcctaggacagacggttcttcccccagtacgtcaagaccctggagggtgcaagctacagaacagctgggctcctgcattcctcccagaccctgtcttcagtaggacaacaggcaacaaacttaaatttggctctgtgtgctccgggatggagcaggtgtgcagagggtgagaacccagctctgggaccaagtcacttgcttccttacttagcaagactatcgacttgagcaaacttggacctgggatgaggatgtctgtgggcctctcgctgctgctgcccctctcggggaggacctttctcctcctgctctctgtggttatggctcagtcccactggcccagtgaaccctcagaggctgtcagggactgggaaaaccagcttgaggcatccatgcactcagtgctctcagacctccacgaggctgttcccacagtggttggcattcctgatggcacggctgtcgtcgggcgctcatttcgagtgaccattccaacagatttgattgcctccagtggagatatcatcaaggt

SEQ ID NO: 69897 - DNA, 549 bp, Artificial Sequence
  derived and/or modified sequence
cttgcgctcagcgccctctcaccgcccgggccactgctctccaggaagataaggcttttaaagcagcctagcactagaaggctctgtgtgctccgggatggagcaggtgtgcagagggtgagaacccagctctgggaccaagtcacttgcttccttacttagcaagactatcgacttgagcaaacttggacctgggatgaggatgtctgtgggcctctcgctgctgctgcccctctcggggaggacctttctcctcctgctctctgtggttatggctcagtcccactggcccagtgaaccctcagaggctgtcagggactgggaaaaccagcttgaggcatccatgcactcagtgctctcagacctccacgaggctgttcccacagtggttggcattcctgatggcacggctgtcgtcgggcgctcatttcgagtgaccattccaacagatttgattgcctccagtggagatatcatcaaggtatcagcggcagggaaggaggctttgccatcttggctgcactgggactcacagagccacaccctgga

SEQ ID NO: 69898 - DNA, 624 bp, Artificial Sequence
  derived and/or modified sequence
acgtgctcgcgcgaaggctgcggcgcggcgctcgcgcctcttaggcttggcggtggcggcggcggcagcttcgcgccgaatccccggggagcggcggtggcggcgtcctggggccaggaggagcgaacacctgccgcggtcctcccgccggcgctggggattctcattctgtctcccatgctggagtgcagtggcgcggtcttggctcactgaaacctttgcttcccagggtcaagcgattcccctgcctcagcttcctgagtagctgggattacaggctctgtgtgctccgggatggagcaggtgtgcagagggtgagaacccagctctgggaccaagtcacttgcttccttacttagcaagactatcgacttgagcaaacttggacctgggatgaggatgtctgtgggcctctcgctgctgctgcccctctcggggaggacctttctcctcctgctctctgtggttatggctcagtcccactggcccagtgaaccctcagaggctgtcagggactgggaaaaccagcttgaggcatccatgcactcagtgctctcagacctccacgaggctgttcccacagtggttggcattcctgatggcacggctgtcgtcgggcgctca

SEQ ID NO: 69899 - DNA, 588 bp, Artificial Sequence
  derived and/or modified sequence
gtgctcgcgcgaaggctgcggcgcggcgctcgcgcctcttaggcttggcggtggcggcggcggcagcttcgcgccgaatccccggggagcggcggtggcggcgtcctggggccaggaggagcgaacacctgccgcggtcctcccgccggcgctggggccactgctctccaggaagataaggcttttaaagcagcctagcactagaaggtgaggctctgtgtgctccgggatggagcaggtgtgcagagggtgagaacccagctctgggaccaagtcacttgcttccttacttagcaagactatcgacttgagcaaacttggacctgggatgaggatgtctgtgggcctctcgctgctgctgcccctctcggggaggacctttctcctcctgctctctgtggttatggctcagtcccactggcccagtgaaccctcagaggctgtcagggactgggaaaaccagcttgaggcatccatgcactcagtgctctcagacctccacgaggctgttcccacagtggttggcattcctgatggcacggctgtcgtcgggcgctcatttcgagtgaccattccaacagatttgat

SEQ ID NO: 69900 - DNA, 547 bp, Artificial Sequence
  derived and/or modified sequence
acgtgctcgcgcgaaggctgcggcgcggcgctcgcgcctcttaggcttggcggtggcggcggcggcagcttcgcgccgaatccccggggagcggcggtggcggcgtcctggggccaggaggagcgaacacctgccgcggtcctcccgccggcgctggatagccctgggatctcctgaatttccaggttgggctactcaggcatggattgactcctacagttcaggcggatggagatcccaccaacccacagcttaattcttcagatgctttatcttcatttctcatgtatcttcagttggcttctaatgctctgtgtgctccgggatggagcaggtgtgcagagggtgagaacccagctctgggaccaagtcacttgcttccttacttagcaagactatcgacttgagcaaacttggacctgggatgaggatgtctgtgggcctctcgctgctgctgcccctctcggggaggacctttctcctcctgctctctgtggttatggctcagtcccactggcccagtgaaccctcagaggctgtcagggac

SEQ ID NO: 69901 - DNA, 5563 bp, Artificial Sequence
  derived and/or modified sequence
ttttagtagagacggggtttcacgttgttggtcaggctggtctcaaactcctgacctcaggtgatccacccgccttggcctcccaaagtgctgggattacaggtgtgagccaccgcggctggtcaaaattttttttttttggtactttttttgcagaggcggggtttcgacacgttgcccaggctggtcttgaactcctgagctcaagctatccatccacctgcctcggcctcccatagtgctgggactacaggcgggagcacagcacctagccccttccttttcttgtctctgtgaatgaggtttggagccgagacactgaagtatagataattgcaaaaaggctctgtgtgctccgggatggagcaggtgtgcagagggtgagaacccagctctgggaccaagtcacttgcttccttacttagcaagactatcgacttgagcaaacttggacctgggatgaggatgtctgtgggcctctcgctgctgctgcccctctcggggaggacctttctcctcctgctctctgtggttatggctcagtcccactggcccagtgaaccctcagaggctgtcagggactgggaaaaccagcttgaggcatccatgcactcagtgctctcagacctccacgaggctgttcccacagtggttggcattcctgatggcacggctgtcgtcgggcgctcatttcgagtgaccattccaacagatttgattgcctccagtggagatatcatcaaggtatcagcggcagggaaggaggctttgccatcttggctgcactgggactcacagagccacaccctggagggcctcccccttgacactgataagggtgtgcattacatttcagtgagcgctacacggctgggggccaacgggagccacatcccccagacctccagtgtgttctccatcgaggtctaccctgaagaccacagtgagctgcagtcggtgaggacagcctccccagaccctggtgaggtggtatcatctgcctgtgctgcggatgaacctgtgactgttttgacggtgattttggatgccgacctcaccaagatgaccccaaagcaaaggattgacctcctgcacaggatgcggagcttctcagaagtagagcttcacaacatgaaattagtgccggtggtgaataacagactatttgacatgtcggccttcatggctggcccgggaaatgcaaaaaaggtggtggagaatggggcccttctctcctggaagctgggctgctccctgaaccagaacagtgtgcctgacattcatggtgtagaggcccctgccagggagggcgcaatgtctgctcagcttggctaccctgtggtgggttggcacatcgccaataagaagccccctcttcccaaacgcgtccggaggcagatccatgctacacccacacctgtcactgccattgggcccccaaccacggctatccaggagcccccatccaggatcgtgccaacccccacatctccagccattgctcctccaacagagaccatggctcctccagtcagggatcctgttcctgggaaacccacggtcaccatccggactcgaggcgccattattcaaaccccaaccctaggccccatccagcctactcgggtgtcagaagctggcaccacagttcctggccagattcgcccaacgatgaccattcctggctatgtggagcctactgcagttgctacccctcccacaaccaccaccaagaagccacgagtatccacaccaaaaccagcaacgccttcaactgactccaccaccaccacgactcgcaggccaaccaagaaaccacggacaccccggccagtgccccgggtcaccaccaaagtttccatcaccagattggaaactgcctcaccgcctactcgtattcgcaccaccaccagtggagtgccccgtggcggagaacccaaccagcgcccagagctcaagaaccatattgacagggtagatgcctgggttggcacctactttgaggtgaagatcccgtcagacactttctatgaccatgaggacaccaccactgacaagctgaagctgaccctgaaactgcgggagcagcagctggtgggcgagaagtcctgggtacagttcaacagcaacagccagctcatgtatggccttcccgacagcagccacgtgggcaaacacgagtatttcatgcatgccacagacaaggggggcctgtcggctgtggatgccttcgagatccacgtccacaggcgcccccaaggggatagggctcctgcaaggttcaaggccaagtttgtgggtgacccggcactggtgttgaatgacatccacaagaagattgccttggtaaagaaactggccttcgcctttggagaccgaaactgtagcaccatcaccctgcagaatatcacccggggctccatcgtggtggaatggaccaacaacacactgcccttggagccctgccccaaggagcagatcgctgggctgagccgccggatcgctgaggatgatggaaaacctcggcctgccttctccaacgccctagagcctgactttaaggccacaagcatcactgtgacgggctctggcagttgtcggcacctacagtttatccctgtggtaccacccaggagagtgccctcagaggcgccgcccacagaagtgcctgacagggaccctgagaagagcagtgaggatgatgtctacctgcacacagtcattccggccgtggtggtcgcagccatcctgctcattgctggcatcattgccatgatctgctaccgcaagaagcggaagggcaagcttacccttgaggaccaggccaccttcatcaagaagggggtgcctatcatctttgcagacgaactggacgactccaagcccccaccctcctccagcatgccactcattctgcaggaggagaaggctcccctaccccctcctgagtaccccaaccagagtgtgcccgagaccactcctctgaaccaggacaccatgggagagtacacgcccctgcgggatgaggatcccaatgcgcctccctaccagcccccaccgcccttcacagcacccatggagggcaagggctcccgtcccaagaacatgaccccataccggtcacctcctccctatgtcccaccttaacccgcaagcgcctgggtggaggcagggtagggcaggggcctggagacgacatggtgttgtctgtggagaccggtggcctgcagaccattgcccaccgggagccgacacctgacctagcacacactgacacaggggcctggacaagcccgccctctctggtcctcccaaaccccaaagcagctggagagactttggggacttttttatttttattttttgcctaacagcttttggtttgttcatagagaattcttcgcttcatttttgatggctggctctgaaagcaccatgtggagtggaggtggagggagcgaggaaccatgaatgaactcgcaggcagtgccgggcggccccctggctctctgcgttttgcctttaacactaactgtactgttttttctattcacgtgtgtctagctgcaggatgtaacatggaaaacagtaactaaagattaaattcaaaggactttcagaagttaaggttaagtttttacgtttaatctgctgtttacctaaacttgtatgtataatttttgggtgggtatggggaattgctttgctaaaaataagctcccagggtgtttcaaacttagagaagaccaagggacagtattttttatcaaaggaatactattttttcacactacgtcaacttggttgctctgataccccagagcctgattgggggcctcccggccctggctcacgccaagtccctggtgctgggtttgctctcccgctgttgccaggggctggaagctggaggggtctcttgggccatggacatccccacttccagcccatgtacactagtggcccacgaccaaggggtcttcatttccatgaaaaagggactccaagaggcagtggtggctgtggcccccaactttggtgctccagggtgggccagctgcttgtgggggcacctgggaggtcaaaggtctccaccacatcaacctattttgttttaccctttttctgtgcattgtttttttttttcctcctaaaaggaatatcacggttttttgaaacactcagtgggggacattttggtgaagatgcaatatttttatgtcatgtgatgctctttcctcacttgaccttggccgctttgtcctaacagtccacagtcctgccccgacccaccccatcccttttctctggcactccagtcccaggccttgggcctgaactactggaaaaggtctggcggctggggaggagtgccagcaatagttcataataaaaatctgttagctctcaaagctaattttttactaaagtttttatacagcctcaaattgttttattaaaaaaaagatttaaaatggtgatgcttacagcagtttgtacgagctcttaagtgttgattccatggaactgacggctttgcttgttttgattcttttccccctacttttcctaatggtttaaattctggaattacactggggttcttttgccttttttagcagaacatccgtccgtccatctgcatctctgtcccatgactcaggggcgcccactctgcttcgattctcctcctgtggaagaaaccattttgagcatgacttttcttgatgtctgaagcgttattttgggtactttttagggaggaatgcctttcgcaataatgtatccattccctgattgagggtgggtgggtggacccaggctccctttgcacacagagcagctacttctaagccatatcgactgttttgcagaggatttgtgtgtgctgcctcaggaggggagggctggtaggagggggggagaggtctctgtcctactgctctccagagggcatttccccttgcgccttctcccacagggcccagcccctctcccctgccccagtccccagggggtactctggagtgagcagtgcccctgtgggggagcctgtaaatgcgggctcagtggaccactggtgactgggctcatgcctccaagtcagagtttccctggtgccccagagacaggagcacaagtgggatctgacctggtgagattatttctgatgacctcatcaaaaaataaacaattcccaatgttccaggtgagggctttgaaaggccttccaaacagctccgtcgcccctagcaactccaccattgggcactgccatgcagagacgtggctggcccagaatggcctgttgccatagcaactggaggcgatggggcagtgaacagaataacaacagcaacaatgcctttgcaggcagcctgctcccctgagcgctgggctggtgatggtcgttggactctgtgagatggagagccaatctcacattcaagtgttcaccaaccactgatgtgtttttatttccttctatatgattttaagatgtgttttctgcattctgtaaagaaacatatcaaactaaataaaagcagtgtctttattacaa

SEQ ID NO: 69902 - DNA, 5579 bp, Artificial Sequence
  derived and/or modified sequence
aggcagaagccggcggcgcgcggacagccagtcggcgccgcgcggagctggccgctggattggctgcaacactcgcgtgtcaggcggttgctaggctccggccgcgcgccccgcccttgcgctcagcgccctctcaccgcccggtacgtgctcgcgcgaaggctgcggcgcggcgctcgcgcctcttaggcttggcggtggcggcggcggcagcttcgcgccgaatccccggggagcggcggtggcggcgtcctggggccaggaggagcgaacacctgccgcggtcctcccgccggcgctggggccactgctctccaggaagataaggcttttaaagcagcctagcactagaaggtgaggctctgtgtgctccgggatggagcaggtgtgcagagggtgagaacccagctctgggaccaagtcacttgcttccttacttagcaagactatcgacttgagcaaacttggacctgggatgaggatgtctgtgggcctctcgctgctgctgcccctctcggggaggacctttctcctcctgctctctgtggttatggctcagtcccactggcccagtgaaccctcagaggctgtcagggactgggaaaaccagcttgaggcatccatgcactcagtgctctcagacctccacgaggctgttcccacagtggttggcattcctgatggcacggctgtcgtcgggcgctcatttcgagtgaccattccaacagatttgattgcctccagtggagatatcatcaaggtatcagcggcagggaaggaggctttgccatcttggctgcactgggactcacagagccacaccctggagggcctcccccttgacactgataagggtgtgcattacatttcagtgagcgctacacggctgggggccaacgggagccacatcccccagacctccagtgtgttctccatcgaggtctaccctgaagaccacagtgagctgcagtcggtgaggacagcctccccagaccctggtgaggtggtatcatctgcctgtgctgcggatgaacctgtgactgttttgacggtgattttggatgccgacctcaccaagatgaccccaaagcaaaggattgacctcctgcacaggatgcggagcttctcagaagtagagcttcacaacatgaaattagtgccggtggtgaataacagactatttgacatgtcggccttcatggctggcccgggaaatgcaaaaaaggtggtggagaatggggcccttctctcctggaagctgggctgctccctgaaccagaacagtgtgcctgacattcatggtgtagaggcccctgccagggagggcgcaatgtctgctcagcttggctaccctgtggtgggttggcacatcgccaataagaagccccctcttcccaaacgcgtccggaggcagatccatgctacacccacacctgtcactgccattgggcccccaaccacggctatccaggagcccccatccaggatcgtgccaacccccacatctccagccattgctcctccaacagagaccatggctcctccagtcagggatcctgttcctgggaaacccacggtcaccatccggactcgaggcgccattattcaaaccccaaccctaggccccatccagcctactcgggtgtcagaagctggcaccacagttcctggccagattcgcccaacgatgaccattcctggctatgtggagcctactgcagttgctacccctcccacaaccaccaccaagaagccacgagtatccacaccaaaaccagcaacgccttcaactgactccaccaccaccacgactcgcaggccaaccaagaaaccacggacaccccggccagtgccccgggtcaccaccaaagtttccatcaccagattggaaactgcctcaccgcctactcgtattcgcaccaccaccagtggagtgccccgtggcggagaacccaaccagcgcccagagctcaagaaccatattgacagggtagatgcctgggttggcacctactttgaggtgaagatcccgtcagacactttctatgaccatgaggacaccaccactgacaagctgaagctgaccctgaaactgcgggagcagcagctggtgggcgagaagtcctgggtacagttcaacagcaacagccagctcatgtatggccttcccgacagcagccacgtgggcaaacacgagtatttcatgcatgccacagacaaggggggcctgtcggctgtggatgccttcgagatccacgtccacaggcgcccccaaggggatagggctcctgcaaggttcaaggccaagtttgtgggtgacccggcactggtgttgaatgacatccacaagaagattgccttggtaaagaaactggccttcgcctttggagaccgaaactgtagcaccatcaccctgcagaatatcacccggggctccatcgtggtggaatggaccaacaacacactgcccttggagccctgccccaaggagcagatcgctgggctgagccgccggatcgctgaggatgatggaaaacctcggcctgccttctccaacgccctagagcctgactttaaggccacaagcatcactgtgacgggctctggcagttgtcggcacctacagtttatccctgtggtaccacccaggagagtgccctcagaggcgccgcccacagaagtgcctgacagggaccctgagaagagcagtgaggatgatgtctacctgcacacagtcattccggccgtggtggtcgcagccatcctgctcattgctggcatcattgccatgatctgctaccgcaagaagcggaagggcaagcttacccttgaggaccaggccaccttcatcaagaagggggtgcctatcatctttgcagacgaactggacgactccaagcccccaccctcctccagcatgccactcattctgcaggaggagaaggctcccctaccccctcctgagtaccccaaccagagtgtgcccgagaccactcctctgaaccaggacaccatgggagagtacacgcccctgcgggatgaggatcccaatgcgcctccctaccagcccccaccgcccttcacagcacccatggagggcaagggctcccgtcccaagaacatgaccccataccggtcacctcctccctatgtcccaccttaacccgcaagcgcctgggtggaggcagggtagggcaggggcctggagacgacatggtgttgtctgtggagaccggtggcctgcagaccattgcccaccgggagccgacacctgacctagcacacactgacacaggggcctggacaagcccgccctctctggtcctcccaaaccccaaagcagctggagagactttggggacttttttatttttattttttgcctaacagcttttggtttgttcatagagaattcttcgcttcatttttgatggctggctctgaaagcaccatgtggagtggaggtggagggagcgaggaaccatgaatgaactcgcaggcagtgccgggcggccccctggctctctgcgttttgcctttaacactaactgtactgttttttctattcacgtgtgtctagctgcaggatgtaacatggaaaacagtaactaaagattaaattcaaaggactttcagaagttaaggttaagtttttacgtttaatctgctgtttacctaaacttgtatgtataatttttgggtgggtatggggaattgctttgctaaaaataagctcccagggtgtttcaaacttagagaagaccaagggacagtattttttatcaaaggaatactattttttcacactacgtcaacttggttgctctgataccccagagcctgattgggggcctcccggccctggctcacgccaagtccctggtgctgggtttgctctcccgctgttgccaggggctggaagctggaggggtctcttgggccatggacatccccacttccagcccatgtacactagtggcccacgaccaaggggtcttcatttccatgaaaaagggactccaagaggcagtggtggctgtggcccccaactttggtgctccagggtgggccagctgcttgtgggggcacctgggaggtcaaaggtctccaccacatcaacctattttgttttaccctttttctgtgcattgtttttttttttcctcctaaaaggaatatcacggttttttgaaacactcagtgggggacattttggtgaagatgcaatatttttatgtcatgtgatgctctttcctcacttgaccttggccgctttgtcctaacagtccacagtcctgccccgacccaccccatcccttttctctggcactccagtcccaggccttgggcctgaactactggaaaaggtctggcggctggggaggagtgccagcaatagttcataataaaaatctgttagctctcaaagctaattttttactaaagtttttatacagcctcaaattgttttattaaaaaaaagatttaaaatggtgatgcttacagcagtttgtacgagctcttaagtgttgattccatggaactgacggctttgcttgttttgattcttttccccctacttttcctaatggtttaaattctggaattacactggggttcttttgccttttttagcagaacatccgtccgtccatctgcatctctgtcccatgactcaggggcgcccactctgcttcgattctcctcctgtggaagaaaccattttgagcatgacttttcttgatgtctgaagcgttattttgggtactttttagggaggaatgcctttcgcaataatgtatccattccctgattgagggtgggtgggtggacccaggctccctttgcacacagagcagctacttctaagccatatcgactgttttgcagaggatttgtgtgtgctgcctcaggaggggagggctggtaggagggggggagaggtctctgtcctactgctctccagagggcatttccccttgcgccttctcccacagggcccagcccctctcccctgccccagtccccagggggtactctggagtgagcagtgcccctgtgggggagcctgtaaatgcgggctcagtggaccactggtgactgggctcatgcctccaagtcagagtttccctggtgccccagagacaggagcacaagtgggatctgacctggtgagattatttctgatgacctcatcaaaaaataaacaattcccaatgttccaggtgagggctttgaaaggccttccaaacagctccgtcgcccctagcaactccaccattgggcactgccatgcagagacgtggctggcccagaatggcctgttgccatagcaactggaggcgatggggcagtgaacagaataacaacagcaacaatgcctttgcaggcagcctgctcccctgagcgctgggctggtgatggtcgttggactctgtgagatggagagccaatctcacattcaagtgttcaccaaccactgatgtgtttttatttccttctatatgattttaagatgtgttttctgcattctgtaaagaaacatatcaaactaaataaaagcagtgtctttattacaa

SEQ ID NO: 69903 - DNA, 5662 bp, Artificial Sequence
  derived and/or modified sequence
aggcagaagccggcggcgcgcggacagccagtcggcgccgcgcggagctggccgctggattggctgcaacactcgcgtgtcaggcggttgctaggctccggccgcgcgccccgcccttgcgctcagcgccctctcaccgcccggtacgtgctcgcgcgaaggctgcggcgcggcgctcgcgcctcttaggcttggcggtggcggcggcggcagcttcgcgccgaatccccggggagcggcggtggcggcgtcctggggccaggaggagcgaacacctgccgcggtcctcccgccggcgctgggtgagtgcaccgcccgccctatccgctgtgcctggctgcttgggcccccatccctgctgccggctgagccttccgcggaacacctgctgctgctcgctgttcggcccggggcggggacacggccgcggacgtccttgtgggctctgtgtgctccgggatggagcaggtgtgcagagggtgagaacccagctctgggaccaagtcacttgcttccttacttagcaagactatcgacttgagcaaacttggacctgggatgaggatgtctgtgggcctctcgctgctgctgcccctctcggggaggacctttctcctcctgctctctgtggttatggctcagtcccactggcccagtgaaccctcagaggctgtcagggactgggaaaaccagcttgaggcatccatgcactcagtgctctcagacctccacgaggctgttcccacagtggttggcattcctgatggcacggctgtcgtcgggcgctcatttcgagtgaccattccaacagatttgattgcctccagtggagatatcatcaaggtatcagcggcagggaaggaggctttgccatcttggctgcactgggactcacagagccacaccctggagggcctcccccttgacactgataagggtgtgcattacatttcagtgagcgctacacggctgggggccaacgggagccacatcccccagacctccagtgtgttctccatcgaggtctaccctgaagaccacagtgagctgcagtcggtgaggacagcctccccagaccctggtgaggtggtatcatctgcctgtgctgcggatgaacctgtgactgttttgacggtgattttggatgccgacctcaccaagatgaccccaaagcaaaggattgacctcctgcacaggatgcggagcttctcagaagtagagcttcacaacatgaaattagtgccggtggtgaataacagactatttgacatgtcggccttcatggctggcccgggaaatgcaaaaaaggtggtggagaatggggcccttctctcctggaagctgggctgctccctgaaccagaacagtgtgcctgacattcatggtgtagaggcccctgccagggagggcgcaatgtctgctcagcttggctaccctgtggtgggttggcacatcgccaataagaagccccctcttcccaaacgcgtccggaggcagatccatgctacacccacacctgtcactgccattgggcccccaaccacggctatccaggagcccccatccaggatcgtgccaacccccacatctccagccattgctcctccaacagagaccatggctcctccagtcagggatcctgttcctgggaaacccacggtcaccatccggactcgaggcgccattattcaaaccccaaccctaggccccatccagcctactcgggtgtcagaagctggcaccacagttcctggccagattcgcccaacgatgaccattcctggctatgtggagcctactgcagttgctacccctcccacaaccaccaccaagaagccacgagtatccacaccaaaaccagcaacgccttcaactgactccaccaccaccacgactcgcaggccaaccaagaaaccacggacaccccggccagtgccccgggtcaccaccaaagtttccatcaccagattggaaactgcctcaccgcctactcgtattcgcaccaccaccagtggagtgccccgtggcggagaacccaaccagcgcccagagctcaagaaccatattgacagggtagatgcctgggttggcacctactttgaggtgaagatcccgtcagacactttctatgaccatgaggacaccaccactgacaagctgaagctgaccctgaaactgcgggagcagcagctggtgggcgagaagtcctgggtacagttcaacagcaacagccagctcatgtatggccttcccgacagcagccacgtgggcaaacacgagtatttcatgcatgccacagacaaggggggcctgtcggctgtggatgccttcgagatccacgtccacaggcgcccccaaggggatagggctcctgcaaggttcaaggccaagtttgtgggtgacccggcactggtgttgaatgacatccacaagaagattgccttggtaaagaaactggccttcgcctttggagaccgaaactgtagcaccatcaccctgcagaatatcacccggggctccatcgtggtggaatggaccaacaacacactgcccttggagccctgccccaaggagcagatcgctgggctgagccgccggatcgctgaggatgatggaaaacctcggcctgccttctccaacgccctagagcctgactttaaggccacaagcatcactgtgacgggctctggcagttgtcggcacctacagtttatccctgtggtaccacccaggagagtgccctcagaggcgccgcccacagaagtgcctgacagggaccctgagaagagcagtgaggatgatgtctacctgcacacagtcattccggccgtggtggtcgcagccatcctgctcattgctggcatcattgccatgatctgctaccgcaagaagcggaagggcaagcttacccttgaggaccaggccaccttcatcaagaagggggtgcctatcatctttgcagacgaactggacgactccaagcccccaccctcctccagcatgccactcattctgcaggaggagaaggctcccctaccccctcctgagtaccccaaccagagtgtgcccgagaccactcctctgaaccaggacaccatgggagagtacacgcccctgcgggatgaggatcccaatgcgcctccctaccagcccccaccgcccttcacagcacccatggagggcaagggctcccgtcccaagaacatgaccccataccggtcacctcctccctatgtcccaccttaacccgcaagcgcctgggtggaggcagggtagggcaggggcctggagacgacatggtgttgtctgtggagaccggtggcctgcagaccattgcccaccgggagccgacacctgacctagcacacactgacacaggggcctggacaagcccgccctctctggtcctcccaaaccccaaagcagctggagagactttggggacttttttatttttattttttgcctaacagcttttggtttgttcatagagaattcttcgcttcatttttgatggctggctctgaaagcaccatgtggagtggaggtggagggagcgaggaaccatgaatgaactcgcaggcagtgccgggcggccccctggctctctgcgttttgcctttaacactaactgtactgttttttctattcacgtgtgtctagctgcaggatgtaacatggaaaacagtaactaaagattaaattcaaaggactttcagaagttaaggttaagtttttacgtttaatctgctgtttacctaaacttgtatgtataatttttgggtgggtatggggaattgctttgctaaaaataagctcccagggtgtttcaaacttagagaagaccaagggacagtattttttatcaaaggaatactattttttcacactacgtcaacttggttgctctgataccccagagcctgattgggggcctcccggccctggctcacgccaagtccctggtgctgggtttgctctcccgctgttgccaggggctggaagctggaggggtctcttgggccatggacatccccacttccagcccatgtacactagtggcccacgaccaaggggtcttcatttccatgaaaaagggactccaagaggcagtggtggctgtggcccccaactttggtgctccagggtgggccagctgcttgtgggggcacctgggaggtcaaaggtctccaccacatcaacctattttgttttaccctttttctgtgcattgtttttttttttcctcctaaaaggaatatcacggttttttgaaacactcagtgggggacattttggtgaagatgcaatatttttatgtcatgtgatgctctttcctcacttgaccttggccgctttgtcctaacagtccacagtcctgccccgacccaccccatcccttttctctggcactccagtcccaggccttgggcctgaactactggaaaaggtctggcggctggggaggagtgccagcaatagttcataataaaaatctgttagctctcaaagctaattttttactaaagtttttatacagcctcaaattgttttattaaaaaaaagatttaaaatggtgatgcttacagcagtttgtacgagctcttaagtgttgattccatggaactgacggctttgcttgttttgattcttttccccctacttttcctaatggtttaaattctggaattacactggggttcttttgccttttttagcagaacatccgtccgtccatctgcatctctgtcccatgactcaggggcgcccactctgcttcgattctcctcctgtggaagaaaccattttgagcatgacttttcttgatgtctgaagcgttattttgggtactttttagggaggaatgcctttcgcaataatgtatccattccctgattgagggtgggtgggtggacccaggctccctttgcacacagagcagctacttctaagccatatcgactgttttgcagaggatttgtgtgtgctgcctcaggaggggagggctggtaggagggggggagaggtctctgtcctactgctctccagagggcatttccccttgcgccttctcccacagggcccagcccctctcccctgccccagtccccagggggtactctggagtgagcagtgcccctgtgggggagcctgtaaatgcgggctcagtggaccactggtgactgggctcatgcctccaagtcagagtttccctggtgccccagagacaggagcacaagtgggatctgacctggtgagattatttctgatgacctcatcaaaaaataaacaattcccaatgttccaggtgagggctttgaaaggccttccaaacagctccgtcgcccctagcaactccaccattgggcactgccatgcagagacgtggctggcccagaatggcctgttgccatagcaactggaggcgatggggcagtgaacagaataacaacagcaacaatgcctttgcaggcagcctgctcccctgagcgctgggctggtgatggtcgttggactctgtgagatggagagccaatctcacattcaagtgttcaccaaccactgatgtgtttttatttccttctatatgattttaagatgtgttttctgcattctgtaaagaaacatatcaaactaaataaaagcagtgtctttattacaa

SEQ ID NO: 69904 - DNA, 5673 bp, Artificial Sequence
  derived and/or modified sequence
aggcagaagccggcggcgcgcggacagccagtcggcgccgcgcggagctggccgctggattggctgcaacactcgcgtgtcaggcggttgctaggctccggccgcgcgccccgcccttgcgctcagcgccctctcaccgcccggtacgtgctcgcgcgaaggctgcggcgcggcgctcgcgcctcttaggcttggcggtggcggcggcggcagcttcgcgccgaatccccggggagcggcggtggcggcgtcctggggccaggaggagcgaacacctgccgcggtcctcccgccggcgctggatagccctgggatctcctgaatttccaggttgggctactcaggcatggattgactcctacagttcaggcggatggagatcccaccaacccacagcttaattcttcagatgctttatcttcatttctcatgtatcttcagttggcttctaatgctctgtgtgctccgggatggagcaggtgtgcagagggtgagaacccagctctgggaccaagtcacttgcttccttacttagcaagactatcgacttgagcaaacttggacctgggatgaggatgtctgtgggcctctcgctgctgctgcccctctcggggaggacctttctcctcctgctctctgtggttatggctcagtcccactggcccagtgaaccctcagaggctgtcagggactgggaaaaccagcttgaggcatccatgcactcagtgctctcagacctccacgaggctgttcccacagtggttggcattcctgatggcacggctgtcgtcgggcgctcatttcgagtgaccattccaacagatttgattgcctccagtggagatatcatcaaggtatcagcggcagggaaggaggctttgccatcttggctgcactgggactcacagagccacaccctggagggcctcccccttgacactgataagggtgtgcattacatttcagtgagcgctacacggctgggggccaacgggagccacatcccccagacctccagtgtgttctccatcgaggtctaccctgaagaccacagtgagctgcagtcggtgaggacagcctccccagaccctggtgaggtggtatcatctgcctgtgctgcggatgaacctgtgactgttttgacggtgattttggatgccgacctcaccaagatgaccccaaagcaaaggattgacctcctgcacaggatgcggagcttctcagaagtagagcttcacaacatgaaattagtgccggtggtgaataacagactatttgacatgtcggccttcatggctggcccgggaaatgcaaaaaaggtggtggagaatggggcccttctctcctggaagctgggctgctccctgaaccagaacagtgtgcctgacattcatggtgtagaggcccctgccagggagggcgcaatgtctgctcagcttggctaccctgtggtgggttggcacatcgccaataagaagccccctcttcccaaacgcgtccggaggcagatccatgctacacccacacctgtcactgccattgggcccccaaccacggctatccaggagcccccatccaggatcgtgccaacccccacatctccagccattgctcctccaacagagaccatggctcctccagtcagggatcctgttcctgggaaacccacggtcaccatccggactcgaggcgccattattcaaaccccaaccctaggccccatccagcctactcgggtgtcagaagctggcaccacagttcctggccagattcgcccaacgatgaccattcctggctatgtggagcctactgcagttgctacccctcccacaaccaccaccaagaagccacgagtatccacaccaaaaccagcaacgccttcaactgactccaccaccaccacgactcgcaggccaaccaagaaaccacggacaccccggccagtgccccgggtcaccaccaaagtttccatcaccagattggaaactgcctcaccgcctactcgtattcgcaccaccaccagtggagtgccccgtggcggagaacccaaccagcgcccagagctcaagaaccatattgacagggtagatgcctgggttggcacctactttgaggtgaagatcccgtcagacactttctatgaccatgaggacaccaccactgacaagctgaagctgaccctgaaactgcgggagcagcagctggtgggcgagaagtcctgggtacagttcaacagcaacagccagctcatgtatggccttcccgacagcagccacgtgggcaaacacgagtatttcatgcatgccacagacaaggggggcctgtcggctgtggatgccttcgagatccacgtccacaggcgcccccaaggggatagggctcctgcaaggttcaaggccaagtttgtgggtgacccggcactggtgttgaatgacatccacaagaagattgccttggtaaagaaactggccttcgcctttggagaccgaaactgtagcaccatcaccctgcagaatatcacccggggctccatcgtggtggaatggaccaacaacacactgcccttggagccctgccccaaggagcagatcgctgggctgagccgccggatcgctgaggatgatggaaaacctcggcctgccttctccaacgccctagagcctgactttaaggccacaagcatcactgtgacgggctctggcagttgtcggcacctacagtttatccctgtggtaccacccaggagagtgccctcagaggcgccgcccacagaagtgcctgacagggaccctgagaagagcagtgaggatgatgtctacctgcacacagtcattccggccgtggtggtcgcagccatcctgctcattgctggcatcattgccatgatctgctaccgcaagaagcggaagggcaagcttacccttgaggaccaggccaccttcatcaagaagggggtgcctatcatctttgcagacgaactggacgactccaagcccccaccctcctccagcatgccactcattctgcaggaggagaaggctcccctaccccctcctgagtaccccaaccagagtgtgcccgagaccactcctctgaaccaggacaccatgggagagtacacgcccctgcgggatgaggatcccaatgcgcctccctaccagcccccaccgcccttcacagcacccatggagggcaagggctcccgtcccaagaacatgaccccataccggtcacctcctccctatgtcccaccttaacccgcaagcgcctgggtggaggcagggtagggcaggggcctggagacgacatggtgttgtctgtggagaccggtggcctgcagaccattgcccaccgggagccgacacctgacctagcacacactgacacaggggcctggacaagcccgccctctctggtcctcccaaaccccaaagcagctggagagactttggggacttttttatttttattttttgcctaacagcttttggtttgttcatagagaattcttcgcttcatttttgatggctggctctgaaagcaccatgtggagtggaggtggagggagcgaggaaccatgaatgaactcgcaggcagtgccgggcggccccctggctctctgcgttttgcctttaacactaactgtactgttttttctattcacgtgtgtctagctgcaggatgtaacatggaaaacagtaactaaagattaaattcaaaggactttcagaagttaaggttaagtttttacgtttaatctgctgtttacctaaacttgtatgtataatttttgggtgggtatggggaattgctttgctaaaaataagctcccagggtgtttcaaacttagagaagaccaagggacagtattttttatcaaaggaatactattttttcacactacgtcaacttggttgctctgataccccagagcctgattgggggcctcccggccctggctcacgccaagtccctggtgctgggtttgctctcccgctgttgccaggggctggaagctggaggggtctcttgggccatggacatccccacttccagcccatgtacactagtggcccacgaccaaggggtcttcatttccatgaaaaagggactccaagaggcagtggtggctgtggcccccaactttggtgctccagggtgggccagctgcttgtgggggcacctgggaggtcaaaggtctccaccacatcaacctattttgttttaccctttttctgtgcattgtttttttttttcctcctaaaaggaatatcacggttttttgaaacactcagtgggggacattttggtgaagatgcaatatttttatgtcatgtgatgctctttcctcacttgaccttggccgctttgtcctaacagtccacagtcctgccccgacccaccccatcccttttctctggcactccagtcccaggccttgggcctgaactactggaaaaggtctggcggctggggaggagtgccagcaatagttcataataaaaatctgttagctctcaaagctaattttttactaaagtttttatacagcctcaaattgttttattaaaaaaaagatttaaaatggtgatgcttacagcagtttgtacgagctcttaagtgttgattccatggaactgacggctttgcttgttttgattcttttccccctacttttcctaatggtttaaattctggaattacactggggttcttttgccttttttagcagaacatccgtccgtccatctgcatctctgtcccatgactcaggggcgcccactctgcttcgattctcctcctgtggaagaaaccattttgagcatgacttttcttgatgtctgaagcgttattttgggtactttttagggaggaatgcctttcgcaataatgtatccattccctgattgagggtgggtgggtggacccaggctccctttgcacacagagcagctacttctaagccatatcgactgttttgcagaggatttgtgtgtgctgcctcaggaggggagggctggtaggagggggggagaggtctctgtcctactgctctccagagggcatttccccttgcgccttctcccacagggcccagcccctctcccctgccccagtccccagggggtactctggagtgagcagtgcccctgtgggggagcctgtaaatgcgggctcagtggaccactggtgactgggctcatgcctccaagtcagagtttccctggtgccccagagacaggagcacaagtgggatctgacctggtgagattatttctgatgacctcatcaaaaaataaacaattcccaatgttccaggtgagggctttgaaaggccttccaaacagctccgtcgcccctagcaactccaccattgggcactgccatgcagagacgtggctggcccagaatggcctgttgccatagcaactggaggcgatggggcagtgaacagaataacaacagcaacaatgcctttgcaggcagcctgctcccctgagcgctgggctggtgatggtcgttggactctgtgagatggagagccaatctcacattcaagtgttcaccaaccactgatgtgtttttatttccttctatatgattttaagatgtgttttctgcattctgtaaagaaacatatcaaactaaataaaagcagtgtctttattacaa

SEQ ID NO: 69905 - DNA, 5826 bp, Artificial Sequence
  derived and/or modified sequence
aggcagaagccggcggcgcgcggacagccagtcggcgccgcgcggagctggccgctggattggctgcaacactcgcgtgtcaggcggttgctaggctccggccgcgcgccccgcccttgcgctcagcgccctctcaccgcccggtacgtgctcgcgcgaaggctgcggcgcggcgctcgcgcctcttaggcttggcggtggcggcggcggcagcttcgcgccgaatccccggggagcggcggtggcggcgtcctggggccaggaggagcgaacacctgccgcggtcctcccgccggcgctggacctggttcacctgcgagtgtatttggatagtgtctccacagaaaatgtcgtctcggcttggaatctttttgccataaattctaaggccactgctctccaggaagataaggcttttaaagcagcctagcactagaaggtgaggcacacgactgtctatcccagatggctgcactggcctaggacagacggttcttcccccagtacgtcaagaccctggagggtgcaagctacagaacagctgggctcctgcattcctcccagaccctgtcttcagtaggacaacaggcaacaaacttaaatttggctctgtgtgctccgggatggagcaggtgtgcagagggtgagaacccagctctgggaccaagtcacttgcttccttacttagcaagactatcgacttgagcaaacttggacctgggatgaggatgtctgtgggcctctcgctgctgctgcccctctcggggaggacctttctcctcctgctctctgtggttatggctcagtcccactggcccagtgaaccctcagaggctgtcagggactgggaaaaccagcttgaggcatccatgcactcagtgctctcagacctccacgaggctgttcccacagtggttggcattcctgatggcacggctgtcgtcgggcgctcatttcgagtgaccattccaacagatttgattgcctccagtggagatatcatcaaggtatcagcggcagggaaggaggctttgccatcttggctgcactgggactcacagagccacaccctggagggcctcccccttgacactgataagggtgtgcattacatttcagtgagcgctacacggctgggggccaacgggagccacatcccccagacctccagtgtgttctccatcgaggtctaccctgaagaccacagtgagctgcagtcggtgaggacagcctccccagaccctggtgaggtggtatcatctgcctgtgctgcggatgaacctgtgactgttttgacggtgattttggatgccgacctcaccaagatgaccccaaagcaaaggattgacctcctgcacaggatgcggagcttctcagaagtagagcttcacaacatgaaattagtgccggtggtgaataacagactatttgacatgtcggccttcatggctggcccgggaaatgcaaaaaaggtggtggagaatggggcccttctctcctggaagctgggctgctccctgaaccagaacagtgtgcctgacattcatggtgtagaggcccctgccagggagggcgcaatgtctgctcagcttggctaccctgtggtgggttggcacatcgccaataagaagccccctcttcccaaacgcgtccggaggcagatccatgctacacccacacctgtcactgccattgggcccccaaccacggctatccaggagcccccatccaggatcgtgccaacccccacatctccagccattgctcctccaacagagaccatggctcctccagtcagggatcctgttcctgggaaacccacggtcaccatccggactcgaggcgccattattcaaaccccaaccctaggccccatccagcctactcgggtgtcagaagctggcaccacagttcctggccagattcgcccaacgatgaccattcctggctatgtggagcctactgcagttgctacccctcccacaaccaccaccaagaagccacgagtatccacaccaaaaccagcaacgccttcaactgactccaccaccaccacgactcgcaggccaaccaagaaaccacggacaccccggccagtgccccgggtcaccaccaaagtttccatcaccagattggaaactgcctcaccgcctactcgtattcgcaccaccaccagtggagtgccccgtggcggagaacccaaccagcgcccagagctcaagaaccatattgacagggtagatgcctgggttggcacctactttgaggtgaagatcccgtcagacactttctatgaccatgaggacaccaccactgacaagctgaagctgaccctgaaactgcgggagcagcagctggtgggcgagaagtcctgggtacagttcaacagcaacagccagctcatgtatggccttcccgacagcagccacgtgggcaaacacgagtatttcatgcatgccacagacaaggggggcctgtcggctgtggatgccttcgagatccacgtccacaggcgcccccaaggggatagggctcctgcaaggttcaaggccaagtttgtgggtgacccggcactggtgttgaatgacatccacaagaagattgccttggtaaagaaactggccttcgcctttggagaccgaaactgtagcaccatcaccctgcagaatatcacccggggctccatcgtggtggaatggaccaacaacacactgcccttggagccctgccccaaggagcagatcgctgggctgagccgccggatcgctgaggatgatggaaaacctcggcctgccttctccaacgccctagagcctgactttaaggccacaagcatcactgtgacgggctctggcagttgtcggcacctacagtttatccctgtggtaccacccaggagagtgccctcagaggcgccgcccacagaagtgcctgacagggaccctgagaagagcagtgaggatgatgtctacctgcacacagtcattccggccgtggtggtcgcagccatcctgctcattgctggcatcattgccatgatctgctaccgcaagaagcggaagggcaagcttacccttgaggaccaggccaccttcatcaagaagggggtgcctatcatctttgcagacgaactggacgactccaagcccccaccctcctccagcatgccactcattctgcaggaggagaaggctcccctaccccctcctgagtaccccaaccagagtgtgcccgagaccactcctctgaaccaggacaccatgggagagtacacgcccctgcgggatgaggatcccaatgcgcctccctaccagcccccaccgcccttcacagcacccatggagggcaagggctcccgtcccaagaacatgaccccataccggtcacctcctccctatgtcccaccttaacccgcaagcgcctgggtggaggcagggtagggcaggggcctggagacgacatggtgttgtctgtggagaccggtggcctgcagaccattgcccaccgggagccgacacctgacctagcacacactgacacaggggcctggacaagcccgccctctctggtcctcccaaaccccaaagcagctggagagactttggggacttttttatttttattttttgcctaacagcttttggtttgttcatagagaattcttcgcttcatttttgatggctggctctgaaagcaccatgtggagtggaggtggagggagcgaggaaccatgaatgaactcgcaggcagtgccgggcggccccctggctctctgcgttttgcctttaacactaactgtactgttttttctattcacgtgtgtctagctgcaggatgtaacatggaaaacagtaactaaagattaaattcaaaggactttcagaagttaaggttaagtttttacgtttaatctgctgtttacctaaacttgtatgtataatttttgggtgggtatggggaattgctttgctaaaaataagctcccagggtgtttcaaacttagagaagaccaagggacagtattttttatcaaaggaatactattttttcacactacgtcaacttggttgctctgataccccagagcctgattgggggcctcccggccctggctcacgccaagtccctggtgctgggtttgctctcccgctgttgccaggggctggaagctggaggggtctcttgggccatggacatccccacttccagcccatgtacactagtggcccacgaccaaggggtcttcatttccatgaaaaagggactccaagaggcagtggtggctgtggcccccaactttggtgctccagggtgggccagctgcttgtgggggcacctgggaggtcaaaggtctccaccacatcaacctattttgttttaccctttttctgtgcattgtttttttttttcctcctaaaaggaatatcacggttttttgaaacactcagtgggggacattttggtgaagatgcaatatttttatgtcatgtgatgctctttcctcacttgaccttggccgctttgtcctaacagtccacagtcctgccccgacccaccccatcccttttctctggcactccagtcccaggccttgggcctgaactactggaaaaggtctggcggctggggaggagtgccagcaatagttcataataaaaatctgttagctctcaaagctaattttttactaaagtttttatacagcctcaaattgttttattaaaaaaaagatttaaaatggtgatgcttacagcagtttgtacgagctcttaagtgttgattccatggaactgacggctttgcttgttttgattcttttccccctacttttcctaatggtttaaattctggaattacactggggttcttttgccttttttagcagaacatccgtccgtccatctgcatctctgtcccatgactcaggggcgcccactctgcttcgattctcctcctgtggaagaaaccattttgagcatgacttttcttgatgtctgaagcgttattttgggtactttttagggaggaatgcctttcgcaataatgtatccattccctgattgagggtgggtgggtggacccaggctccctttgcacacagagcagctacttctaagccatatcgactgttttgcagaggatttgtgtgtgctgcctcaggaggggagggctggtaggagggggggagaggtctctgtcctactgctctccagagggcatttccccttgcgccttctcccacagggcccagcccctctcccctgccccagtccccagggggtactctggagtgagcagtgcccctgtgggggagcctgtaaatgcgggctcagtggaccactggtgactgggctcatgcctccaagtcagagtttccctggtgccccagagacaggagcacaagtgggatctgacctggtgagattatttctgatgacctcatcaaaaaataaacaattcccaatgttccaggtgagggctttgaaaggccttccaaacagctccgtcgcccctagcaactccaccattgggcactgccatgcagagacgtggctggcccagaatggcctgttgccatagcaactggaggcgatggggcagtgaacagaataacaacagcaacaatgcctttgcaggcagcctgctcccctgagcgctgggctggtgatggtcgttggactctgtgagatggagagccaatctcacattcaagtgttcaccaaccactgatgtgtttttatttccttctatatgattttaagatgtgttttctgcattctgtaaagaaacatatcaaactaaataaaagcagtgtctttattacaa

SEQ ID NO: 69906 - DNA, 534 bp, Artificial Sequence
  derived and/or modified sequence
atggaggaaaatttcatctgtagtaggaagacgatggcactctcgtcaacttggattctgtcccccaaaaaaacaggtccactgacgtctatgataactgccaccaggatcatcatccgaaaacgaacccctgttgcccatcttcctactttgaggatccttacgggcacaactttacgaaccaagctgattcatgccagcccgacaccagtcaataccgtagggactgcttctagcatgggcgctcccagccatgctgcagcttggctactgagccttgggataagtgtgcggaagtgcaagatccgcgcccgcacaacgcacgtcgcaggcgctaatgtgtcacttcccagggttctgcccacaacggccgtaagtgtgaatactctaacacaggtgcccgcggccccaaagtggttcctctacgccgggcaaactccagcaaggatgggacttcccgctcccggtatttcgggtgacccaagttcgcctgtacctgtcccaacatcttcccgcggcaacagcgttaagtag

SEQ ID NO: 69907 - DNA, 1605 bp, Artificial Sequence
  derived and/or modified sequence
atgagccttctcgaaagtctggatcctgattggacaccggatcagtatgactattcatacgaggactataaccaggaggagaacacaagcagcaccttgactcatgctgagaacccagattggtactacacggaggaccaagccgacccatgccagcctaacccctgtgagcatggaggcgattgcttggtgcacggatcaacgtttacttgtagttgccttgcaccattttccggcaacaagtgccagaaggtgcagaatacctgtaaggataatccatgtggtaggggtcagtgccttattacacagagtcccccctactatcggtgcgtgtgtaaacatccatacacgggcccttcctgtagccaggttgtcccagtttgtaggcccaatccctgccagaacggcgcaacctgcagccggcataaacgtcgcagtaagtttacctgtgcatgccctgatcagtttaaaggcaaattctgcgaaatcggcagcgatgactgctacgtgggggatggctatagttaccggggaaaaatgaaccgcaccgtgaaccagcatgcctgcctttattggaactctcacctcctccttcaggagaattataatatgttcatggaggacgcggagacccacggaattggagagcacaacttttgccggaaccctgatgccgacgaaaagccttggtgttttataaaggttactaacgataaggtcaaatgggaatactgcgatgtcagcgcatgttctgcgcaggacgtcgcctatcccgaagagtcacccaccgagccctcaacaaagcttcccggtttcgactcctgcgggaagaccgagatagcggagcgcaagatcaaacgcatttacggcggcttcaagtcaaccgctggaaaacacccttggcaggctagcctgcagtcaagcctgcccctcacaatctctatgccgcagggacatttctgcggtggagccctgatccatccctgctgggtgcttacagctgctcactgcactgatattaaaacccgccacctcaaggttgtgctgggagatcaggacctcaagaaggaggaatttcacgagcagagtttcagggtcgaaaaaattttcaagtattctcactataatgaacgggatgagatcccccacaacgatatcgcattactcaagctaaagcccgtggacggacactgcgctctagagtctaagtatgttaaaacagtgtgtttgcctgacgggagcttcccgtctgggtccgaatgtcacatcagcggatggggcgttactgaaactggaaaaggtagccgtcagttgttggatgcaaaggtgaagctgatcgctaacaccttatgtaattcacgtcagctgtatgaccatatgattgatgattccatgatctgcgccggtaacctccaaaagcctgggcaggatacatgccagggtgacagtggggggcctttgacatgtgagaaagacgggacttactacgtatacggcatcgtgtcctggggacttgagtgtggtaagagacccggcgtgtatacacaggtgaccaagtttctgaattggatcaaggcgactattaaatctgaaagcggattttag

SEQ ID NO: 69908 - DNA, 534 bp, Artificial Sequence
  derived and/or modified sequence
atggaggagaacttcatctgcagcaggaagaccatggccctgagcagcacctggatcctgagccccaagaagacaggccccctgacctccatgatcacagccacccgcatcatcatcaggaagaggacccctgtggcccacctgcccaccctgcgcatcctgaccggcaccaccctgcggaccaagctgattcatgccagccccacccctgtgaacacagtgggcacagccagctccatgggcgcccccagccacgccgccgcctggctgctgagcctgggcatctctgtgaggaagtgcaagatccgggcccggaccacccacgtggccggggccaacgtgtccctgccccgggtgctgcccaccacagctgtgtctgtgaacaccctgacccaggtgcctgctgcccccaagtggttcctgtatgccggccagaccccagccaggatgggcctgcctgcccctggcatcagcggggaccccagcagccctgtgcctgtgcccaccagcagccggggcaacagcgtgaagtag

SEQ ID NO: 69909 - DNA, 1605 bp, Artificial Sequence
  derived and/or modified sequence
atgagcctgctggagagcctggaccctgactggaccccagaccagtatgactacagctatgaggactacaaccaggaggagaacaccagcagcaccctgacccatgctgaaaatccagactggtactacacagaggaccaggccgacccctgccagcccaacccctgtgagcacggcggggactgcctggtgcacggcagcaccttcacctgcagctgcctggcccccttcagcggcaacaagtgccagaaggtgcagaacacctgcaaggacaacccctgtggccggggccagtgcctgatcacccagagccccccctactaccgctgtgtgtgcaagcacccctacacaggccccagctgcagccaggtggtgcctgtgtgccggcccaacccctgccagaatggagccacctgcagccgccacaagaggaggagcaagttcacctgtgcctgcccagaccagttcaagggcaagttctgtgaaattggaagtgatgactgctacgtgggagatggctacagctaccggggcaagatgaacagaacagtgaaccagcacgcctgcctgtactggaacagccacctgctgctgcaggagaactacaacatgttcatggaggatgctgagacccacggcatcggggagcacaacttctgcagaaatccagatgctgatgagaagccctggtgcttcatcaaggtgaccaatgacaaggtgaagtgggagtactgtgatgtgtctgcctgcagcgcccaggatgtggcctacccagaggagagccccacagagcccagcaccaagctgcccggctttgacagctgtgggaagacagaaattgctgagaggaagatcaagaggatctatggaggcttcaagagcacagctgggaagcacccctggcaggccagcctgcagagcagcctgcccctgaccatctccatgccccagggccacttctgtggcggggccctgatccacccctgctgggtgctgacagctgcccactgcacagacatcaagaccaggcacctgaaggtggtgctgggggaccaggacctgaagaaggaggagttccacgagcagagcttccgggtggagaagatcttcaagtacagccactacaatgaaagagatgagatcccccacaatgacatcgccctgctgaagctgaagcctgtggatggccactgtgccctggagagcaaatatgtgaagacagtgtgcctgcctgatggcagcttccccagcggcagcgagtgccacatcagcggctggggcgtgacagaaacaggcaagggcagccggcagctgctggatgccaaggtgaagctgattgccaacaccctgtgcaacagccggcagctgtatgaccacatgattgatgacagcatgatctgtgccggcaacctgcagaagccaggccaggacacctgccagggcgacagcggcggccccctgacctgtgagaaggatggcacctactacgtgtatggcatcgtgtcctggggcctggagtgtgggaagaggcctggggtgtacacccaggtgaccaagttcctgaactggatcaaggccaccatcaagtctgagagcggcttctag

SEQ ID NO: 69910 - DNA, 534 bp, Artificial Sequence
  derived and/or modified sequence
atggaggagaacttcatctgcagccggaagaccatggccctgagcagtacatggatcctatcccccaagaagaccggaccgttgacttccatgataacagcaacccggatcataattcggaagagaactcctgtcgctcacctgcccaccttgcggattctaaccggcacaacactccgtacgaaattgattcacgcatcaccaacccctgtcaatacagtgggcaccgcatccagcatgggcgccccaagccatgctgctgcttggctgctctcactgggaatttctgtccgcaagtgcaagatccgggccaggactacacacgttgctggggctaacgtcagcttaccgcgggtgcttcctactacggctgtgagcgtgaataccctgactcaggttcctgccgctcctaaatggtttttatatgcaggtcaaactcccgcccggatggggctgccagctccaggcatctctggtgatccctcaagtcctgtgccagtcccaacatcatcccgaggcaacagcgtaaagtag

SEQ ID NO: 69911 - DNA, 1605 bp, Artificial Sequence
  derived and/or modified sequence
atgagcctgctggagagcctggaccccgactggacccccgaccagtatgattattcttatgaggactataaccaagaagagaacacgtcatctacccttacccatgccgagaacccagactggtattataccgaggaccaagcagatccctgccagcctaacccctgcgaacacggaggtgactgcctcgtgcatggaagcacctttacctgcagctgtctggctccgttctcaggcaacaagtgccagaaagtgcaaaacacatgcaaagacaacccctgcggaaggggccagtgtctaatcactcaaagccccccttactatcggtgcgtctgcaaacatccttacacaggcccaagctgttctcaggtggtgcctgtgtgtaggcccaatccctgtcagaatggggctacctgttcccgacacaagcggcgtagcaagtttacctgcgcatgcccagatcaattcaagggcaagttctgcgaaatcgggagcgacgattgttatgttggcgacggatattcttaccgaggcaaaatgaatcggacagtgaaccaacatgcctgtctgtactggaattcccatctgttgttacaggaaaactacaacatgttcatggaggacgccgagacccacgggattggtgagcataacttctgcagaaatccagacgccgatgaaaaaccctggtgctttataaaggtgactaacgataaagtaaaatgggagtactgtgacgtatccgcctgctcagctcaggatgtagcttatcctgaagagtcccccaccgagccctctactaaattgcctggctttgactcctgcggtaagactgagatcgcagagaggaagataaaacggatttacggaggtttcaagagcactgccggaaagcacccatggcaagccagccttcagtcatctctgcccctaacgatttccatgccacaggggcacttctgcggaggagcgcttatccacccgtgttgggtcctgactgcggcacattgtactgacattaagactagacatcttaaggtcgtgctcggggatcaggatctcaaaaaggaggagtttcatgagcaatcttttcgagtggagaaaatctttaagtactcccactataatgagagagacgagatcccacacaacgatatcgcccttctgaagctgaaacctgtagatggtcactgtgccctggagagtaagtatgtgaaaacagtctgtctcccagatggttccttcccctcaggcagcgagtgccatatcagcgggtggggggtaacagagacaggaaagggctcccggcagctactggatgccaaagtcaagctaattgctaacaccctgtgtaattcccgacagctttacgaccacatgatcgacgactccatgatctgcgccggcaacctgcagaagcctgggcaggatacctgtcagggggattctggcggccccctgacgtgtgaaaaagacggcacttactacgtgtacggaatcgtctcctggggtctagagtgtggaaagagacccggggtttacacacaggtaacgaagttccttaactggattaaggcaaccataaaatcggaaagcggattctag

SEQ ID NO: 69912 - DNA, 534 bp, Artificial Sequence
  derived and/or modified sequence
atggaagagaattttatctgcagtaggaagaccatggctctgagctcaacctggattttatcgcccaagaagacaggtcctctgactagcatgataaccgcgacccgcatcatcattcgcaaaaggacaccagtggcgcacctccctactctgcggatattgactggcacaaccctgcgtactaagttaatccatgcctcgccgacaccagttaacactgtcggtacagcctccagcatgggggctccaagtcatgccgcagcttggctgctgagcctgggaatcagtgtacgaaaatgtaagattcgggcaaggaccacacatgtggcaggagccaacgtgtccctgcctcgcgtcctgccaacaactgccgtgagcgttaacaccctgacccaggtcccggctgcaccgaagtggttcctgtacgccggacagacgccagcaaggatggggctccctgcccctggtatttccggggacccgtctagccctgtccccgtgcccacctcctccaggggcaacagtgtgaagtag

SEQ ID NO: 69913 - DNA, 1605 bp, Artificial Sequence
  derived and/or modified sequence
atgagcctgctcgagtctcttgaccccgactggacacccgaccagtatgactactcgtacgaagattataatcaggaggagaacaccagctcaactctgacccatgcggaaaaccctgactggtactacaccgaagatcaggccgacccctgtcaacctaatccctgcgagcacggaggagactgtcttgtacacggatcaacctttacttgttcgtgtctggcgccattcagtgggaataaatgccaaaaggttcaaaacacatgcaaagataatccctgtggcaggggacagtgtttgatcacgcagagccccccatactacaggtgtgtctgcaagcacccttatacaggcccaagttgtagccaggtagtccccgtttgtcgtccaaacccatgccagaatggagcaacttgctcccggcataagcgccgttcaaagtttacgtgtgcttgccccgaccagtttaagggaaaattctgcgagatcggctcagacgattgctacgtaggggacgggtacagttaccgagggaaaatgaatcgaactgtgaatcaacacgcttgcctgtattggaactcccacctcctgcttcaggaaaactacaatatgttcatggaagacgccgaaacacatggcataggggagcataacttctgtcgcaaccctgacgccgacgagaaaccttggtgtttcattaaggtcactaacgataaggtcaagtgggaatactgcgacgtctccgcatgttccgcacaggacgttgcctatcccgaagaatcccctactgagccgtcaacaaaacttccgggatttgactcttgcggcaaaacagaaatcgccgagcgaaaaattaagcgtatttatggaggcttcaaatcaaccgctggaaagcacccttggcaggccagccttcaatcctccctgccgcttacaatttctatgccacagggccatttctgcgggggtgccttgattcacccatgttgggtgctaactgctgcgcactgtacagacatcaaaacccggcatctcaaagtcgttctgggagaccaggacctgaagaaggaggaatttcatgaacagtcgttcagagtggagaaaattttcaaatattcgcattataatgagcgggatgaaatcccccataacgatatcgcgctgttgaaactgaagccggtcgacggccactgtgcactggaaagcaaatatgttaaaacagtgtgcttgccggacggctcattcccatccggcagtgaatgtcacatcagcgggtggggcgtgaccgagaccgggaagggctctcggcagctgctggacgccaaggtgaagctcattgccaacacactgtgtaacagtaggcagctgtatgatcacatgattgatgatagtatgatttgcgcaggtaacctgcagaagcccggtcaagacacatgccagggggacagcggcggtcccttgacctgtgagaaagacgggacatactacgtctacggaatcgttagttgggggttggagtgcgggaaacgcccaggcgtctacactcaagtaactaagtttttaaactggattaaggctaccatcaagtctgagagcggattttag

SEQ ID NO: 69914 - DNA, 534 bp, Artificial Sequence
  derived and/or modified sequence
atggaggagaacttcatctgcagcagaaagaccatggccctgagcagcacctggatcctgagccccaagaagaccggccccctgaccagcatgatcaccgccaccagaatcatcatcagaaagagaacccccgtggcccacctgcccaccctgagaatcctgaccggcaccaccctgagaaccaagctgatccacgccagccccacccccgtgaacaccgtgggcaccgccagcagcatgggcgcccccagccacgccgccgcctggctgctgagcctgggcatcagcgtgagaaagtgcaagatcagagccagaaccacccacgtggccggcgccaacgtgagcctgcccagagtgctgcccaccaccgccgtgagcgtgaacaccctgacccaggtgcccgccgcccccaagtggttcctgtacgccggccagacccccgccagaatgggcctgcccgcccccggcatcagcggcgaccccagcagccccgtgcccgtgcccaccagcagcagaggcaacagcgtgaagtag

SEQ ID NO: 69915 - DNA, 1605 bp, Artificial Sequence
  derived and/or modified sequence
atgagcctgctggagagcctggaccccgactggacccccgaccagtacgactacagctacgaggactacaaccaggaggagaacaccagcagcaccctgacccacgccgagaaccccgactggtactacaccgaggaccaggccgacccctgccagcccaacccctgcgagcacggcggcgactgcctggtgcacggcagcaccttcacctgcagctgcctggcccccttcagcggcaacaagtgccagaaggtgcagaacacctgcaaggacaacccctgcggcagaggccagtgcctgatcacccagagccccccctactacagatgcgtgtgcaagcacccctacaccggccccagctgcagccaggtggtgcccgtgtgcagacccaacccctgccagaacggcgccacctgcagcagacacaagagaagaagcaagttcacctgcgcctgccccgaccagttcaagggcaagttctgcgagatcggcagcgacgactgctacgtgggcgacggctacagctacagaggcaagatgaacagaaccgtgaaccagcacgcctgcctgtactggaacagccacctgctgctgcaggagaactacaacatgttcatggaggacgccgagacccacggcatcggcgagcacaacttctgcagaaaccccgacgccgacgagaagccctggtgcttcatcaaggtgaccaacgacaaggtgaagtgggagtactgcgacgtgagcgcctgcagcgcccaggacgtggcctaccccgaggagagccccaccgagcccagcaccaagctgcccggcttcgacagctgcggcaagaccgagatcgccgagagaaagatcaagagaatctacggcggcttcaagagcaccgccggcaagcacccctggcaggccagcctgcagagcagcctgcccctgaccatcagcatgccccagggccacttctgcggcggcgccctgatccacccctgctgggtgctgaccgccgcccactgcaccgacatcaagaccagacacctgaaggtggtgctgggcgaccaggacctgaagaaggaggagttccacgagcagagcttcagagtggagaagatcttcaagtacagccactacaacgagagagacgagatcccccacaacgacatcgccctgctgaagctgaagcccgtggacggccactgcgccctggagagcaagtacgtgaagaccgtgtgcctgcccgacggcagcttccccagcggcagcgagtgccacatcagcggctggggcgtgaccgagaccggcaagggcagcagacagctgctggacgccaaggtgaagctgatcgccaacaccctgtgcaacagcagacagctgtacgaccacatgatcgacgacagcatgatctgcgccggcaacctgcagaagcccggccaggacacctgccagggcgacagcggcggccccctgacctgcgagaaggacggcacctactacgtgtacggcatcgtgagctggggcctggagtgcggcaagagacccggcgtgtacacccaggtgaccaagttcctgaactggatcaaggccaccatcaagagcgagagcggcttctag

SEQ ID NO: 69916 - protein, 2446 aa, Artificial Sequence
  derived and/or modified sequence
MTARGQSPLAPLLETLEDPSASHGGQTDAYLTLTSRMTGEEGKEVITEIEKKLPRLYKVLKTHISSQNSELSSAALQALGFCLYNPKITSELSEANALELLSKLNDTIKNSDKNVRTRALWVISKQTFPSEVVGKMVSSIIDSLEILFNKGETHSAVVDFEALNVIVRLIEQAPIQMGEEAVRWAKLVIPLVVHSAQKVHLRGATALEMGMPLLLQKQQEIASITEQLMTTKLISELQKLFMSKNETYVLKLWPLFVKLLGRTLHRSGSFINSLLQLEELGFRSGAPMIKKIAFIAWKSLIDNFALNPDILCSAKRLKLLMQPLSSIHVRTETLALTKLEVWWYLLMRLGPHLPANFEQVCVPLIQSTISIDSNASPQGNSCHVATSPGLNPMTPVHKGASSPYGAPGTPRMNLSSNLGGMATIPSIQLLGLEMLLHFLLGPEALSFAKQNKLVLSLEPLEHPLISSPSFFSKHANTLITAVHDSFVAVGKDAPDVVVSAIWKELISLVKSVTESGNKKEKPGSEVLTLLLKSLESIVKSEVFPVSKTLVLMEITIKGLPQKVLGSPAYQVANMDILNGTPALFLIQLIFNNFLECGVSDERFFLSLESLVGCVLSGPTSPLAFSDSVLNVINQNAKQLENKEHLWKMWSVIVTPLTELINQTNEVNQGDALEHNFSAIYGALTLPVNHIFSEQRFPVATMKTLLRTWSELYRAFARCAALVATAEENLCCEELSSKIMSSLEDEGFSNLLFVDRIIYIITVMVDCIDFSPYNIKYQPKVKSPQRPSDWSKKKNEPLGKLTSLFKLIVKVIYSFHTLSFKEAHSDTLFTIGNSITGIISSVLGHISLPSMIRKIFATLTRPLALFYENSKLDEVPKVYSCLNNKLEKLLGEIIACLQFSYTGTYDSELLEQLSPLLCIIFLHKNKQIRKQSAQFWNATFAKVMMLVYPEELKPVLTQAKQKFLLLLPGLETVEMMEESSGPYSDGTENSQLNVKISGMERKSNGKRDSFLAQTKNKKENMKPAAKLKLESSSLKVKGEILLEEEKSTDFVFIPPEGKDAKERILTDHQKEVLKTKRCDIPAMYNNLDVSQDTLFTQYSQEEPMEIPTLTRKPKEDSKMMITEEQMDSDIVIPQDVTEDCGMAEHLEKSSLSNNECGSLDKTSPEMSNSNNDERKKALISSRKTSTECASSTENSFVVSSSSVSNTTVAGTPPYPTSRRQTFITLEKFDGSENRPFSPSPLNNISSTVTVKNNQETMIKTDFLPKAKQREGTFSKSDSEKIVNGTKRSSRRAGKAEQTGNKRSKPLMRSEPEKNTEESVEGIVVLENNPPGLLNQTECVSDNQVHLSESTMEHDNTKLKAATVENAVLLETNTVEEKNVEINLESKENTPPVVISADQMVNEDSQVQITPNQKTLRRSSRRRSEVVESTTESQDKENSHQKKERRKEEEKPLQKSPLHIKDDVLPKQKLIAEQTLQENLIEKGSNLHEKTLGETSANAETEQNKKKADPENIKSEGDGTQDIVDKSSEKLVRGRTRYQTRRASQGLLSSIENSESDSSEAKEEGSRKKRSGKWKNKSNESVDIQDQEEKVVKQECIKAENQSHDYKATSEEDVSIKSPICEKQDESNTVICQDSTVTSDLLQVPDDLPNVCEEKNETSKYAEYSFTSLPVPESNLRTRNAIKRLHKRDSFDNCSLGESSKIGISDISSLSEKTFQTLECQHKRSRRVRRSKGCDCCGEKSQPQEKSLIGLKNTENNDVEISETKKADVQAPVSPSETSQANPYSEGQFLDEHHSVNFHLGLKEDNDTINDSLIVSETKSKENTMQESLPSGIVNFREEICDMDSSEAMSLESQESPNENFKTVGPCLGDSKNVSQESLETKEEKPEETPKMELSLENVTVEGNACKVTESNLEKAKTMELNVGNEASFHGQERTKTGISEEAAIEENKRNDDSEADTAKLNAKEVATEEFNSDISLSDNTTPVKLNAQTEISEQTAAGELDGGNDVSDLHSSEETNTKMKNNEEMMIGEAMAETGHDGETENEGITTKTSKPDEAETNMLTAEMDNFVCDTVEMSTEEGIIDANKTETNTEYSKSEEKLDNNQMVMESDILQEDHHTSQKVEEPSQCLASGTAISELIIEDNNASPQKLRELDPSLVSANDSPSGMQTRCVWSPLASPSTSILKRGLKRSQEDEISSPVNKVRRVSFADPIYQAGLADDIDRRCSIVRSHSSNSSPIGKSVKTSPTTQSKISEMAKESIPCPTESVYPPLVNCVAPVDIILPQITSNMWARGLGQLIRAKNIKTIGDLSTLTASEIKTLPIRSPKVSNVKKALRIYHEQQVKTRGLEEIPVFDISEKTVNGIENKSLSPDEERLVSDIIDPVALEIPLSKNLLAQISALALQLDSEDLHNYSGSQLFEMHEKLSCMANSVIKNLQSRWRSPSHENSI

SEQ ID NO: 69917 - DNA, 7341 bp, Artificial Sequence
  derived and/or modified sequence
atgaccgccagaggccagagccccctggcccccctgctggagaccctggaggaccccagcgccagccacggcggccagaccgacgcctacctgaccctgaccagcagaatgaccggcgaggagggcaaggaggtgatcaccgagatcgagaagaagctgcccagactgtacaaggtgctgaagacccacatcagcagccagaacagcgagctgagcagcgccgccctgcaggccctgggcttctgcctgtacaaccccaagatcaccagcgagctgagcgaggccaacgccctggagctgctgagcaagctgaacgacaccatcaagaacagcgacaagaacgtgagaaccagagccctgtgggtgatcagcaagcagaccttccccagcgaggtggtgggcaagatggtgagcagcatcatcgacagcctggagatcctgttcaacaagggcgagacccacagcgccgtggtggacttcgaggccctgaacgtgatcgtgagactgatcgagcaggcccccatccagatgggcgaggaggccgtgagatgggccaagctggtgatccccctggtggtgcacagcgcccagaaggtgcacctgagaggcgccaccgccctggagatgggcatgcccctgctgctgcagaagcagcaggagatcgccagcatcaccgagcagctgatgaccaccaagctgatcagcgagctgcagaagctgttcatgagcaagaacgagacctacgtgctgaagctgtggcccctgttcgtgaagctgctgggcagaaccctgcacagaagcggcagcttcatcaacagcctgctgcagctggaggagctgggcttcagaagcggcgcccccatgatcaagaagatcgccttcatcgcctggaagagcctgatcgacaacttcgccctgaaccccgacatcctgtgcagcgccaagagactgaagctgctgatgcagcccctgagcagcatccacgtgagaaccgagaccctggccctgaccaagctggaggtgtggtggtacctgctgatgagactgggcccccacctgcccgccaacttcgagcaggtgtgcgtgcccctgatccagagcaccatcagcatcgacagcaacgccagcccccagggcaacagctgccacgtggccaccagccccggcctgaaccccatgacccccgtgcacaagggcgccagcagcccctacggcgcccccggcacccccagaatgaacctgagcagcaacctgggcggcatggccaccatccccagcatccagctgctgggcctggagatgctgctgcacttcctgctgggccccgaggccctgagcttcgccaagcagaacaagctggtgctgagcctggagcccctggagcaccccctgatcagcagccccagcttcttcagcaagcacgccaacaccctgatcaccgccgtgcacgacagcttcgtggccgtgggcaaggacgcccccgacgtggtggtgagcgccatctggaaggagctgatcagcctggtgaagagcgtgaccgagagcggcaacaagaaggagaagcccggcagcgaggtgctgaccctgctgctgaagagcctggagagcatcgtgaagagcgaggtgttccccgtgagcaagaccctggtgctgatggagatcaccatcaagggcctgccccagaaggtgctgggcagccccgcctaccaggtggccaacatggacatcctgaacggcacccccgccctgttcctgatccagctgatcttcaacaacttcctggagtgcggcgtgagcgacgagagattcttcctgagcctggagagcctggtgggctgcgtgctgagcggccccaccagccccctggccttcagcgacagcgtgctgaacgtgatcaaccagaacgccaagcagctggagaacaaggagcacctgtggaagatgtggagcgtgatcgtgacccccctgaccgagctgatcaaccagaccaacgaggtgaaccagggcgacgccctggagcacaacttcagcgccatctacggcgccctgaccctgcccgtgaaccacatcttcagcgagcagagattccccgtggccaccatgaagaccctgctgagaacctggagcgagctgtacagagccttcgccagatgcgccgccctggtggccaccgccgaggagaacctgtgctgcgaggagctgagcagcaagatcatgagcagcctggaggacgagggcttcagcaacctgctgttcgtggacagaatcatctacatcatcaccgtgatggtggactgcatcgacttcagcccctacaacatcaagtaccagcccaaggtgaagagcccccagagacccagcgactggagcaagaagaagaacgagcccctgggcaagctgaccagcctgttcaagctgatcgtgaaggtgatctacagcttccacaccctgagcttcaaggaggcccacagcgacaccctgttcaccatcggcaacagcatcaccggcatcatcagcagcgtgctgggccacatcagcctgcccagcatgatcagaaagatcttcgccaccctgaccagacccctggccctgttctacgagaacagcaagctggacgaggtgcccaaggtgtacagctgcctgaacaacaagctggagaagctgctgggcgagatcatcgcctgcctgcagttcagctacaccggcacctacgacagcgagctgctggagcagctgagccccctgctgtgcatcatcttcctgcacaagaacaagcagatcagaaagcagagcgcccagttctggaacgccaccttcgccaaggtgatgatgctggtgtaccccgaggagctgaagcccgtgctgacccaggccaagcagaagttcctgctgctgctgcccggcctggagaccgtggagatgatggaggagagcagcggcccctacagcgacggcaccgagaacagccagctgaacgtgaagatcagcggcatggagagaaagagcaacggcaagagagacagcttcctggcccagaccaagaacaagaaggagaacatgaagcccgccgccaagctgaagctggagagcagcagcctgaaggtgaagggcgagatcctgctggaggaggagaagagcaccgacttcgtgttcatcccccccgagggcaaggacgccaaggagagaatcctgaccgaccaccagaaggaggtgctgaagaccaagagatgcgacatccccgccatgtacaacaacctggacgtgagccaggacaccctgttcacccagtacagccaggaggagcccatggagatccccaccctgaccagaaagcccaaggaggacagcaagatgatgatcaccgaggagcagatggacagcgacatcgtgatcccccaggacgtgaccgaggactgcggcatggccgagcacctggagaagagcagcctgagcaacaacgagtgcggcagcctggacaagaccagccccgagatgagcaacagcaacaacgacgagagaaagaaggccctgatcagcagcagaaagaccagcaccgagtgcgccagcagcaccgagaacagcttcgtggtgagcagcagcagcgtgagcaacaccaccgtggccggcacccccccctaccccaccagcagaagacagaccttcatcaccctggagaagttcgacggcagcgagaacagacccttcagccccagccccctgaacaacatcagcagcaccgtgaccgtgaagaacaaccaggagaccatgatcaagaccgacttcctgcccaaggccaagcagagagagggcaccttcagcaagagcgacagcgagaagatcgtgaacggcaccaagagaagcagcagaagagccggcaaggccgagcagaccggcaacaagagaagcaagcccctgatgagaagcgagcccgagaagaacaccgaggagagcgtggagggcatcgtggtgctggagaacaacccccccggcctgctgaaccagaccgagtgcgtgagcgacaaccaggtgcacctgagcgagagcaccatggagcacgacaacaccaagctgaaggccgccaccgtggagaacgccgtgctgctggagaccaacaccgtggaggagaagaacgtggagatcaacctggagagcaaggagaacaccccccccgtggtgatcagcgccgaccagatggtgaacgaggacagccaggtgcagatcacccccaaccagaagaccctgagaagaagcagcagaagaagaagcgaggtggtggagagcaccaccgagagccaggacaaggagaacagccaccagaagaaggagagaagaaaggaggaggagaagcccctgcagaagagccccctgcacatcaaggacgacgtgctgcccaagcagaagctgatcgccgagcagaccctgcaggagaacctgatcgagaagggcagcaacctgcacgagaagaccctgggcgagaccagcgccaacgccgagaccgagcagaacaagaagaaggccgaccccgagaacatcaagagcgagggcgacggcacccaggacatcgtggacaagagcagcgagaagctggtgagaggcagaaccagataccagaccagaagagccagccagggcctgctgagcagcatcgagaacagcgagagcgacagcagcgaggccaaggaggagggcagcagaaagaagagaagcggcaagtggaagaacaagagcaacgagagcgtggacatccaggaccaggaggagaaggtggtgaagcaggagtgcatcaaggccgagaaccagagccacgactacaaggccaccagcgaggaggacgtgagcatcaagagccccatctgcgagaagcaggacgagagcaacaccgtgatctgccaggacagcaccgtgaccagcgacctgctgcaggtgcccgacgacctgcccaacgtgtgcgaggagaagaacgagaccagcaagtacgccgagtacagcttcaccagcctgcccgtgcccgagagcaacctgagaaccagaaacgccatcaagagactgcacaagagagacagcttcgacaactgcagcctgggcgagagcagcaagatcggcatcagcgacatcagcagcctgagcgagaagaccttccagaccctggagtgccagcacaagagaagcagaagagtgagaagaagcaagggctgcgactgctgcggcgagaagagccagccccaggagaagagcctgatcggcctgaagaacaccgagaacaacgacgtggagatcagcgagaccaagaaggccgacgtgcaggcccccgtgagccccagcgagaccagccaggccaacccctacagcgagggccagttcctggacgagcaccacagcgtgaacttccacctgggcctgaaggaggacaacgacaccatcaacgacagcctgatcgtgagcgagaccaagagcaaggagaacaccatgcaggagagcctgcccagcggcatcgtgaacttcagagaggagatctgcgacatggacagcagcgaggccatgagcctggagagccaggagagccccaacgagaacttcaagaccgtgggcccctgcctgggcgacagcaagaacgtgagccaggagagcctggagaccaaggaggagaagcccgaggagacccccaagatggagctgagcctggagaacgtgaccgtggagggcaacgcctgcaaggtgaccgagagcaacctggagaaggccaagaccatggagctgaacgtgggcaacgaggccagcttccacggccaggagagaaccaagaccggcatcagcgaggaggccgccatcgaggagaacaagagaaacgacgacagcgaggccgacaccgccaagctgaacgccaaggaggtggccaccgaggagttcaacagcgacatcagcctgagcgacaacaccacccccgtgaagctgaacgcccagaccgagatcagcgagcagaccgccgccggcgagctggacggcggcaacgacgtgagcgacctgcacagcagcgaggagaccaacaccaagatgaagaacaacgaggagatgatgatcggcgaggccatggccgagaccggccacgacggcgagaccgagaacgagggcatcaccaccaagaccagcaagcccgacgaggccgagaccaacatgctgaccgccgagatggacaacttcgtgtgcgacaccgtggagatgagcaccgaggagggcatcatcgacgccaacaagaccgagaccaacaccgagtacagcaagagcgaggagaagctggacaacaaccagatggtgatggagagcgacatcctgcaggaggaccaccacaccagccagaaggtggaggagcccagccagtgcctggccagcggcaccgccatcagcgagctgatcatcgaggacaacaacgccagcccccagaagctgagagagctggaccccagcctggtgagcgccaacgacagccccagcggcatgcagaccagatgcgtgtggagccccctggccagccccagcaccagcatcctgaagagaggcctgaagagaagccaggaggacgagatcagcagccccgtgaacaaggtgagaagagtgagcttcgccgaccccatctaccaggccggcctggccgacgacatcgacagaagatgcagcatcgtgagaagccacagcagcaacagcagccccatcggcaagagcgtgaagaccagccccaccacccagagcaagatcagcgagatggccaaggagagcatcccctgccccaccgagagcgtgtacccccccctggtgaactgcgtggcccccgtggacatcatcctgccccagatcaccagcaacatgtgggccagaggcctgggccagctgatcagagccaagaacatcaagaccatcggcgacctgagcaccctgaccgccagcgagatcaagaccctgcccatcagaagccccaaggtgagcaacgtgaagaaggccctgagaatctaccacgagcagcaggtgaagaccagaggcctggaggagatccccgtgttcgacatcagcgagaagaccgtgaacggcatcgagaacaagagcctgagccccgacgaggagagactggtgagcgacatcatcgaccccgtggccctggagatccccctgagcaagaacctgctggcccagatcagcgccctggccctgcagctggacagcgaggacctgcacaactacagcggcagccagctgttcgagatgcacgagaagctgagctgcatggccaacagcgtgatcaagaacctgcagagcagatggagaagccccagccacgagaacagcatctag

SEQ ID NO: 69918 - DNA, 7341 bp, Artificial Sequence
  derived and/or modified sequence
atgaccgctcgcggtcagagcccgctcgctccgctgctcgagactctggaagatccctctgcaagccatggagggcaaacggacgcttatctgacattgactagccgcatgactggagaggaggggaaggaagtgataactgagatcgagaaaaagttgccccgactgtataaagtgctgaagactcacatctcttctcaaaactcagaactctccagcgcagcacttcaggccctcggcttctgtttgtataatcccaaaattactagtgagttatccgaggccaacgcattggaactgcttagcaaactcaacgacactatcaagaattccgataaaaacgtaagaacccgggcgttgtgggtaatcagtaaacagacatttccttccgaggtcgtgggcaagatggtgagcagcatcatcgacagtcttgagattttgtttaacaaaggagaaactcacagcgccgtcgtggatttcgaggcgctaaacgttattgtgcgcctcatcgagcaagctcccatacaaatgggggaagaggcagtccgctgggctaagttagttatacctctggtggtgcacagtgctcagaaggttcacctacggggcgcaacagcactggaaatgggcatgcctctcctacttcaaaagcaacaggagattgcctcaattacggagcaactgatgaccaccaagctaatctccgaactccagaagctctttatgagtaaaaacgagacatacgttctcaaattatggcctcttttcgtcaaattgctggggcgcactctgcatagaagcggaagttttattaactccctgttacagctcgaggagctgggctttaggtcaggtgctcctatgatcaagaaaattgctttcatcgcctggaagagcctgatcgacaatttcgcactgaaccctgacatcctctgctcagccaagcgcctgaagctgcttatgcagcccttatccagcatacacgtcaggacagagaccctcgccctgaccaaactggaagtctggtggtacctcctgatgagattgggaccccacctccccgcaaactttgaacaggtctgtgttcctttaattcagtctaccatctcaattgacagtaacgccagccctcagggtaactcttgtcatgtagctacttcaccagggctcaaccctatgacacccgtgcataagggcgctagcagtccatatggggctcccggcactcctcgcatgaacctgagctccaatcttggcggaatggctaccataccttccatccaactcttgggcctggaaatgctgttgcacttcttactgggacccgaagctctgtcgtttgccaaacagaataagctggtgctgagtctcgaacccctggagcaccctctgatcagctctccctccttctttagcaagcacgctaataccctgataacagccgtccacgactcatttgtggcagtcggcaaagacgcgcccgatgtcgtagtgtctgccatctggaaggaactcatttctctcgtaaaatcggtgaccgaatcaggcaataagaaagaaaagcccggctctgaggtgctcactctgctcctgaagagcctcgagtccattgttaaatcagaagtcttcccagtgtcaaaaaccctggtcctgatggagattacgatcaaaggcctcccgcaaaaagttctcgggtccccagcctaccaggtggcgaatatggacatcctgaacggtaccccggctctgttcctcatccagttgatctttaataattttctggagtgcggggtgtcagacgagcgcttcttcctgtctctggaaagcctcgtggggtgcgtcctctccggaccaacaagtcctctcgccttctctgactccgttctgaacgtaattaaccagaatgccaagcagctggaaaataaggaacatctgtggaaaatgtggtcggtgatagtcacacctttgacagaactgatcaatcagaccaacgaagtaaaccaaggggacgcattagaacacaacttctctgcaatttacggagctttgacacttcccgtcaaccacattttttcagagcagcgctttccggtagctacgatgaaaacactcctaagaacttggagcgagctgtaccgcgcttttgcacggtgcgccgcgcttgtcgcgactgctgaggaaaacctctgctgtgaggaactaagcagtaagattatgtcgtcgttggaagacgagggatttagtaacttgctctttgtggatcggatcatttatatcatcacggtcatggtcgattgcatcgacttctccccttataatatcaaataccaacctaaagtcaagagtccccaaaggccgagtgactggagtaagaaaaagaatgagccattgggcaaactgacatcactcttcaaactgattgtcaaggtgatctacagctttcatacgctgagttttaaagaagcacacagcgataccctgtttaccataggtaattctattacaggaataataagcagcgtcctgggacacatatctcttccgagcatgattaggaagatctttgcaacgcttacgcggccgctggcactcttctacgaaaattccaaacttgacgaagttccaaaggtgtacagctgtttaaacaataaactcgaaaaactgttgggggagattattgcttgtctccagttcagctatacaggaacctacgattcagagctactggaacagctttcccccctgttgtgcataattttcctccataaaaataagcagataaggaaacagagcgcccaattctggaatgctacctttgcaaaggttatgatgctcgtgtacccagaggagctgaagcccgtattgacgcaggctaaacagaagttcctgctattactacccgggttggaaacagtcgaaatgatggaggagtctagcggaccttatagcgacggaacggagaatagccagttgaatgttaaaatctcaggaatggagaggaaatcaaacggaaagagagatagctttttggcccaaacaaagaataaaaaggagaacatgaaacccgccgctaagctgaaacttgagagtagcagtctaaaggtgaagggcgaaatcctgcttgaggaggagaagagcaccgacttcgtgttcatcccacccgaaggcaaggatgctaaggagcgcatactgaccgatcatcaaaaggaggtcctgaagacaaagcgatgcgatattcccgctatgtacaataacctggacgtatctcaggacacactgtttacacagtatagtcaggaagaaccaatggaaattcccactctgacaagaaaaccgaaggaagactccaaaatgatgatcacggaggaacaaatggatagtgatattgtgattccacaagacgttacggaagactgtggcatggcggagcatctggaaaagtcatcgttgtccaacaatgagtgcggcagtctggataaaacctctccggaaatgtctaactccaacaacgacgagagaaagaaggcgcttatctcttctaggaagacctctactgaatgtgcatcctctacggaaaattcctttgtggtgtcgtcatctagtgtgtccaacactaccgtggctggcacccctccctatcctacctcacgccggcaaacttttattactcttgagaagtttgatgggagcgagaacagacctttcagcccaagccccctgaataatatcagctctacagtcactgtaaaaaacaatcaggaaaccatgattaaaaccgactttttacctaaagcaaaacaacgagagggaaccttttctaagtccgattctgaaaaaattgtgaacggtaccaagcggagctctaggcgagcaggtaaagcggaacagactgggaataaaagatccaagcctctgatgcgatccgaaccggagaagaatacagaggagtctgtggagggcatcgtcgtgctggaaaacaatccgcctggtttgctgaatcagacagaatgcgtgtccgacaaccaggttcacttgtctgagtcgacaatggaacatgacaacaccaagttaaaggcggcaaccgtggaaaatgccgtcttactcgagacaaatactgtcgaagaaaagaatgtggaaatcaacctggagtctaaggagaacacacccccagtcgtcatcagtgccgaccagatggtgaacgaagacagtcaggttcagattactccaaatcagaaaactcttagaagatcctctcggaggcgctccgaggtggtggaaagcacgacagagtcccaggacaaggaaaactcccaccagaagaaagagcgtaggaaggaggaggagaagcccctgcagaaaagccctctgcacattaaagacgatgtgttgccaaagcagaaactgattgcagaacagactctgcaggagaaccttatcgaaaaaggatccaacttacatgagaagactctcggggagacctccgccaatgctgaaacggaacagaataaaaaaaaagctgatcccgagaacatcaaatcggagggtgatgggactcaagatatagtggacaagtcaagcgaaaaacttgtgcgaggtcgaaccaggtatcaaacacgcagggcgagccagggtttattgtcgagtattgagaatagtgaaagtgattcgagcgaggccaaggaagagggaagcagaaagaaacgctcagggaagtggaaaaataagagtaacgaaagtgtggacattcaggatcaggaggagaaagttgtcaagcaagagtgtattaaggctgagaaccagtcacacgactacaaagccacttcggaggaggatgtgagtatcaagtcccccatctgtgaaaaacaagacgaatccaacactgtgatatgccaggacagcaccgttactagcgatctgctgcaggtgccagacgatctgcccaatgtgtgtgaggagaaaaacgagaccagcaagtacgccgaatatagttttacttcactgcccgttcccgagtccaatctgcgcaccagaaatgccatcaaacgactgcacaagcgagattcatttgacaattgcagtctcggcgagtcaagcaaaataggcatttcagacatttcctccctgagtgagaagacattccaaacattagagtgccaacacaaacgctctaggagagtgcggagatccaaggggtgtgactgctgtggtgaaaaaagccagcctcaggagaagagcctaattggcctcaagaacactgaaaataacgacgtggaaatttctgagacaaagaaagccgatgttcaggcccctgtatcaccctcagagacttcacaggccaatccgtacagtgaaggccagtttttggacgagcatcacagcgtgaacttccacctgggtttaaaggaggacaacgataccatcaatgattcactgatcgtgtcagaaactaaaagcaaggagaatactatgcaggaatctctcccctccgggattgtgaactttagagaagagatttgtgacatggactcttcagaggctatgagcctggagagccaggagagtccaaatgagaacttcaagacagtagggccatgcctaggtgatagcaagaatgtgtcccaagagagcctggaaactaaggaagaaaagccagaggaaaccccaaagatggagctgtcattagaaaatgtgacggtggaagggaatgcgtgcaaggtaaccgaatctaacttagaaaaagccaagacgatggagctgaatgtcggaaacgaggcttcattccatggtcaagaacgcactaagacaggaatcagtgaagaagccgcaattgaagaaaacaagaggaacgatgattccgaagccgatacagctaaactgaacgcgaaagaggtggccaccgaggagtttaacagcgatatctctctgagcgacaacactactcccgtgaaattaaacgctcagaccgagattagtgaacagacagcagctggcgagctggatggcgggaacgatgtgtctgatctacactcctctgaagagacaaacacaaagatgaagaataatgaagagatgatgatcggggaagcgatggccgagacaggtcatgatggcgagacagaaaacgaggggattacaaccaagacaagcaaacccgatgaggctgaaacaaatatgctcacggcagagatggacaactttgtgtgcgacactgttgagatgtctaccgaggaaggcattatcgatgcaaacaagacagaaacaaataccgagtattcgaagtccgaagaaaagctggataacaaccagatggtgatggagtccgatatactgcaggaagaccatcacacttcccagaaagtcgaggagccatcacagtgtctagcgagtggcactgcaatttctgagctcatcatcgaggacaacaacgccagtccccaaaaattacgggaactcgacccatctctggtaagtgccaatgacagcccttcaggcatgcagacccgttgcgtctggtctccactcgcaagtccctcaactagcattctgaagcgcgggctcaagcgatcccaagaggatgagatttccagtcccgtcaataaagtgcgacgtgtgtcttttgcagacccaatctatcaagcgggtctggctgacgatattgaccgaagatgtagcatcgtaaggagtcattccagtaacagtagtccaatcggcaaatctgttaagaccagccctactacacagtcaaagatatccgagatggcaaaggagtcaatcccttgtcctaccgagtcggtttaccccccactggtgaactgtgtcgcccctgttgacataattctgcctcagatcactagcaacatgtgggccagggggctggggcaactgatacgcgcaaagaatatcaaaaccatcggagatctgtccaccctcaccgcgtctgaaataaagaccctgccaatccggtcgccaaaggtctctaatgtgaaaaaggcattgcgcatatatcacgagcaacaggtcaagacccgagggcttgaagagattcctgtatttgatatctcagagaagacagtgaatggcatcgaaaataaatctttgagtccggatgaagaacgactcgtgagcgatatcatcgaccctgtggccctggaaatcccgctgtccaagaatttgttggcccaaatctccgccttggccctgcaattagattccgaggaccttcacaactattcagggagccagctctttgagatgcacgagaagctgagttgtatggctaacagcgtcattaagaatctccagtctaggtggcgttctccgagccacgagaacagcatctag

SEQ ID NO: 69919 - DNA, 7341 bp, Artificial Sequence
  derived and/or modified sequence
atgaccgcaagagggcaaagcccattggctcccctgctggaaactctggaagatccctcagcatctcacgggggccagaccgatgcttacctgacgctgacatcgaggatgactggagaggaaggtaaagaggtcattactgaaatcgagaagaagctcccacgcctttacaaggttcttaagacccatatctcctctcagaactctgaactatcttccgccgctctgcaggctctgggcttttgcctatacaacccaaaaattaccagcgaactgtctgaagccaacgcgttggagcttttgtccaagctgaacgacacaatcaagaactcagataaaaacgtgaggaccagagccctgtgggttattagtaaacagaccttcccatcagaggtggtgggcaagatggtcagtagcatcattgactctctggagattctgttcaacaaaggtgaaacgcattcagctgtggtggacttcgaggccctgaacgtgatcgtgcggcttattgaacaggccccaatccagatgggagaagaagccgtcaggtgggctaagctcgttatcccactggtggtccattcagcgcagaaagtccacctgcggggagctacggctctcgaaatgggtatgccgctgctgctgcaaaagcagcaggaaattgcctcgatcactgagcagctgatgacaacaaaattgatctccgagctccagaagctattcatgagcaagaatgaaacttacgttctgaaactgtggcctctgtttgtgaaattgcttggtagaacgctgcaccgttccggatcattcatcaactctctgctgcaactcgaagaattggggtttcgtagtggcgctccgatgatcaagaagatcgcatttatagcatggaaaagtttgatagacaattttgccctcaatcccgatatcctgtgtagcgcaaaaagactcaagctgttgatgcagcctctgtcatccattcacgtgcgcacagagactctagccctgacaaagctcgaggtatggtggtatctactcatgaggttggggcctcacctccccgccaatttcgagcaagtatgcgtacctctgatccagagtacaatctctatcgacagcaatgcctcccctcaggggaactcatgtcacgtagccacctctcctggactgaacccaatgactcctgtacataagggtgcttcctcgccctatggcgctccaggaactccgagaatgaatctgtcctccaatttgggcggtatggccactatccccagcattcagctccttggactggagatgctcctgcactttctacttggtcccgaggccctctcattcgcaaaacagaacaagcttgttctgtctctggagccactggagcaccccctaattagctctccgtctttcttttccaagcacgccaatactctcatcacagctgtgcacgatagcttcgtggcggttgggaaggacgcacctgatgtggtcgtgtccgcaatatggaaagaattgataagccttgttaagagtgtgaccgaatcaggcaataaaaaagagaagccgggctcagaagtgttgacactgcttctgaagtctttagagtcaatcgtgaaatccgaagtgttcccagtcagcaagacacttgttcttatggaaatcacaatcaagggcttaccccagaaggtgctcggctcacctgcataccaggtggctaatatggatattctcaatggcacccctgcacttttcctgatccagctgatctttaataacttcctggagtgtggagtgtcagatgaaagatttttcctgtccctagagtctctggtgggctgtgtactgtccggccctacgtcacctcttgctttcagcgattcagtcttgaatgtcatcaatcaaaacgccaagcaactcgaaaataaggaacacctgtggaaaatgtggtccgtcattgtcacccccttaaccgaactcatcaatcagaccaatgaagtaaaccagggcgacgcgctagaacataatttttcagccatctatggagctctgacccttccggtgaaccatatattcagtgaacagcgttttcccgtagccacaatgaagactctgctgcgcacctggagcgagctctatagagcttttgcgcgctgcgcagctctggtagctaccgccgaggagaatttatgctgcgaggagctcagctcaaagattatgtcaagtcttgaggacgaaggattttctaatcttctgtttgtagatcgcatcatctacattatcacggtgatggtcgattgtattgacttctccccatacaatatcaaataccagccaaaagtaaagtctccccagcggccaagtgactggtcaaaaaagaaaaacgagccacttggaaagctcacctccttgtttaaactcattgtgaaggttatatactcctttcatacccttagttttaaggaagcccactccgataccctgttcactataggcaactctattaccggcattatttcgagcgtgttaggtcacatttctcttccatccatgatccggaagatattcgctaccctgacacgacccctggctctcttttacgagaactcaaagctggatgaggttccgaaggtgtactcctgccttaacaataagctggagaaacttctgggtgaaattatcgcgtgcctccagttctcatacactggaacgtatgattccgaactccttgagcaacttagccccttgctctgtattatcttcttacataagaataagcagataaggaaacaatcggcccaattttggaatgccacttttgccaaagtaatgatgttggtctaccctgaggagctgaaaccagttttgacccaagccaaacaaaagttcctgctgttgcttccaggcctggaaaccgtagaaatgatggaagaatccagcggcccgtactcagacggcacagaaaattctcagcttaatgtcaaaattagtgggatggaaagaaaatccaatggcaaaagggacagctttctggcacagaccaagaataagaaagagaatatgaaacctgctgcaaaacttaaactggaatcctcatccctgaaggtgaagggcgagatcttattagaggaagaaaagagcaccgatttcgtgttcatcccgccagaggggaaagacgcgaaggagagaattctcactgaccatcagaaggaggtgcttaagactaaacgctgtgacatccctgcaatgtataacaacctagatgtttctcaagacaccctgttcacccagtactcacaagaagagcccatggaaatccccacactgaccagaaaaccaaaggaagactctaaaatgatgattactgaggagcagatggactccgacatcgtgatcccccaggacgtgaccgaggactgtggcatggccgaacacctggaaaaatcttcgctgagcaacaacgaatgtggatcgctcgacaaaacctctcccgagatgtctaacagcaacaatgatgagaggaagaaggcccttatctcatctcgcaaaactagtactgaatgcgctagcagcacggagaattcattcgtggtaagttcttcgagcgtgagcaataccaccgttgcaggaacccccccctatcctacctctcgtagacagacgttcattacgcttgaaaagtttgatggctctgaaaataggccatttagcccctctccacttaataacatctcatccaccgtcacggtaaagaacaatcaggagaccatgataaagacagattttctgcccaaagccaaacagcgagaagggacgttttcaaaatccgatagtgagaagattgtgaatgggaccaagagaagtagccgccgcgctgggaaggcggaacagaccggaaataaacgatcaaaaccactcatgaggtcagagccggagaagaacactgaagagtccgtagagggcattgttgtgctggaaaataatcctcccggtctgcttaaccagacagaatgcgtgagcgacaatcaggtgcatttgagtgaaagtacaatggaacacgacaacaccaagttaaaagccgctacggtggagaatgcagtgctcctagagactaacaccgtcgaggagaagaacgtcgaaataaaccttgaatccaaagagaacaccccaccagtggtgatcagtgctgaccaaatggtcaacgaagactctcaggtacagatcacacccaatcagaaaaccctgaggcgctcctccaggaggagaagcgaagtcgtagagtccactacagagtctcaagataaggaaaattcccaccaaaaaaaggagcggcggaaagaggaggaaaaacctctgcagaagtctccgctccatattaaggacgatgtcttgcctaagcaaaagctgatcgcagaacaaacgctgcaggagaatctgatcgagaaaggcagcaacctccatgagaagacattgggcgaaacctccgccaatgctgaaactgagcaaaataagaaaaaagccgatcctgaaaatattaaatcagagggagacggtacgcaggacattgtagataaatctagcgaaaagctcgttcgagggaggacccggtaccagacccggagagcatctcaggggctgctgtccagtatcgagaatagcgagagcgacagctcggaagccaaagaagagggctctaggaagaagcgatcagggaagtggaagaataaatccaacgagagcgtggatattcaggatcaggaggaaaaggtagttaaacaagagtgtattaaagctgaaaatcagtctcatgactacaaagccacctcagaagaagatgtgtcgatcaaatcacctatatgtgaaaagcaggacgagagcaacactgttatttgtcaggattctactgtaacttcggacctgctgcaggtccccgatgacctgcctaacgtgtgcgaggagaagaacgagacctcgaagtacgccgaatactccttcactagccttccagtgccagagtctaacctccgcactcgcaatgccattaaacgtttgcacaagagagacagtttcgacaactgttccctgggcgagagctccaagattggtatctccgatatcagctccttgtccgaaaaaactttccagactctcgaatgtcagcacaagcggagcagaagggttaggcgctctaagggctgcgactgctgtggtgagaaatctcaacctcaagagaaatctcttattgggctgaagaacaccgagaacaatgatgtggaaatatctgagaccaagaaagccgatgtccaagcacccgtgtcgccatctgaaacgtctcaggctaacccatatagtgaaggtcagtttctggatgagcaccattcagtaaacttccacctgggactgaaggaggataatgatactattaatgatagtctcattgtctcagagacaaagtccaaagagaataccatgcaggaatccttgcccagtgggatagtgaactttcgagaggagatttgcgatatggacagctcggaagctatgagcctcgagtcgcaggaatcccccaacgagaatttcaagactgtgggcccttgtttaggtgactccaaaaatgtatcacaggagtctttggagaccaaggaggaaaagccagaggaaacccccaagatggagctgtccttggagaatgtgacagtggaaggtaatgcatgcaaagtgactgagtccaatctggaaaaggcaaagactatggagctgaacgtgggaaacgaggcctccttccacgggcaggagaggactaagactgggattagtgaagaggcggctatcgaggagaataaacgcaacgatgatagcgaggccgacaccgcaaagttgaacgctaaagaggtggccaccgaggaatttaactccgacatcagtctgtccgataacaccaccccagtgaagctcaacgcacagaccgagatctcagaacagacagccgcaggcgagttggacgggggcaacgatgtttcagatctgcatagtagcgaagagaccaataccaagatgaaaaacaacgaggaaatgatgattggggaggccatggcagaaacaggccacgatggtgagacagaaaacgaaggaatcactaccaagacgtcaaagcccgacgaggccgaaacaaacatgctgaccgcggagatggacaatttcgtttgtgataccgtggaaatgagtacagaagagggcattatagacgcaaacaagaccgagacaaacacggaatactctaaatccgaagaaaagctcgataacaaccagatggtcatggaaagcgacatcctgcaagaggaccaccacacttcgcagaaggttgaggaacccagccagtgcttagcgagcggaactgccatatcagagcttattatcgaagacaacaatgctagtcctcaaaaattgagagagctggatccatcgctcgtctcggcgaacgactcccctagtggaatgcagacgcggtgcgtgtggagtccactggctagtcctagtaccagtatcctgaaacggggacttaaaagaagccaagaagatgaaatcagctcccccgtcaataaggtgaggcgagtgtcattcgccgaccccatctatcaagctggcctcgctgacgatatcgatcgtcggtgttctatcgttcgctcccattccagtaattcatcgcctatagggaagtccgtgaaaaccagcccaaccacacagtcgaagatctccgagatggcaaaagagtcaatcccctgtccgaccgaaagcgtttacccccctcttgtgaactgtgtggctcctgtcgacatcattcttccgcagattacaagtaatatgtgggccagaggtctgggccagctgattagagccaaaaacattaaaacaattggggatctgtccactttaaccgcatccgaaattaagactctgcctatccgctcccctaaagtcagcaatgtcaagaaggcacttcgtatctaccacgaacagcaggtaaaaacgaggggcctagaggagattcctgtattcgacatttccgaaaagacagtcaacggcatcgaaaacaagagtctttcccccgatgaagagcgcctggtctccgacataatcgaccccgtcgccctggaaatcccattgagtaagaatcttttggcgcagatatccgccttggccttgcagcttgactcagaggatctccacaactattcaggatctcagttgtttgaaatgcatgagaagctgagctgcatggccaatagtgttatcaaaaacttgcagagcagatggaggagcccatcccacgaaaatagcatctag

SEQ ID NO: 69920 - DNA, 7341 bp, Artificial Sequence
  derived and/or modified sequence
atgacggcgcgcggtcagagcccattggccccacttttggagaccctcgaagacccgagcgcttcccatggcggacagaccgatgcctatctcaccctgacatcccgtatgacgggagaggaaggcaaggaagtgatcacggaaattgagaagaaattacctcgactatacaaggtgcttaagactcatatttctagtcagaactcagagctgtctagtgcagccttgcaagccctcgggttctgtctctataatcccaagatcaccagcgaactatccgaggctaatgcactagaactgttgtccaagctcaatgataccatcaagaacagcgataagaatgtccggacgcgggccctctgggtcatttcaaagcagacctttccctcagaagtagtcggaaaaatggtatcaagtatcatagattcactggagatactcttcaataaaggcgaaacccattccgccgtggtagattttgaggccttgaacgtgatcgttaggcttatagagcaggcacccattcagatgggcgaagaagcagttcgctgggccaaactggtgattccgctggtggtgcacagcgcccagaaggtacacctgaggggggctaccgctctcgagatggggatgcctttgttgctgcaaaagcaacaggagatcgcctcaatcaccgagcagctgatgaccacaaaactgataagcgaactccagaagttgtttatgagtaaaaatgagacctatgttttgaagttgtggccactcttcgtcaagctgctgggcagaactctgcaccgtagcgggtcttttataaactcattgttacaactggaggagctgggttttcggtcgggggcccccatgattaagaaaatcgcatttatcgcgtggaagtctctgattgataattttgccctgaaccccgatatcctgtgtagcgcgaaaaggctcaaactcctgatgcagccccttagctccatacacgtgcgtacagagaccttagcgctcacaaaactggaagtttggtggtacctgttgatgaggctaggcccacatcttcctgccaattttgaacaggtgtgcgtgcctttgatccagagtacaatctccattgatagcaacgcttcccctcagggtaactcatgtcacgtggccacatcacccggattaaatccaatgactcccgtccacaagggggcctcttccccttatggagccccaggtactcctaggatgaacctaagttccaacctgggcggaatggctactatcccaagcatacagctgcttgggctagagatgttattgcactttcttctgggacctgaggccctctcctttgccaaacagaacaagctggtgctgtctttggagcctttggagcatccactcatctcttccccttccttcttttccaagcatgcaaacactcttatcacagcggtgcacgactctttcgttgccgtggggaaagatgccccagacgtagtagtatcagccatctggaaagagttgatatcactggttaaaagcgtcactgaatcggggaacaaaaaggagaagcccggatctgaggtgctcaccctgctgctgaagtcattggagagcatcgtaaaaagcgaggtctttcccgtgtcgaagacgttagtgctgatggagatcaccatcaaagggctgccacagaaagtcctgggcagccctgcataccaagttgcaaatatggatatcttgaatggaacccccgccctctttctgattcaactcatcttcaacaactttctagaatgtggcgtgtccgacgagcggtttttcctgagtctggagtccttagtcggctgtgtgctgtctggccctacctcgccgcttgctttctctgacagcgtgcttaacgtgatcaatcaaaatgccaagcagctcgaaaataaggagcacctctggaagatgtggagtgtaattgtgacaccactgacagagctcatcaatcagacaaatgaagttaaccagggggatgccttggaacacaattttagcgcaatctatggcgcattaactctacctgtgaaccatatttttagtgaacaaaggtttcccgtcgctaccatgaaaactttgttacgaacgtggagcgaactgtaccgagcattcgcgaggtgtgctgccctggtggcaaccgctgaggagaacctttgctgcgaagagctgtcaagcaagatcatgagcagcctggaagatgaaggtttctccaacctgctttttgtggacagaattatttacataattacagtaatggtggattgtatcgatttttctccctataacattaaataccagcctaaagtaaagtctccacagagaccgagcgattggagcaagaaaaaaaatgaacctctcggcaagctgacgtctcttttcaaactgattgtgaaggtgatatacagctttcacaccttatctttcaaagaagctcactcagacacactgttcaccatcggaaactcaataaccgggatcatttcgtccgttctgggccatattagtctgccttctatgatcaggaagatcttcgctaccttgacgcgacctctggcccttttttacgaaaatagcaagttggacgaggtccctaaggtgtactcctgcttgaataacaagttagagaagctactcggcgaaatcatcgcctgcttgcagttttcgtacacggggacatatgattccgagctgcttgaacagctcagcccacttctctgcattatttttttgcataagaacaagcagattcgcaagcagtccgcccagttttggaacgccacatttgccaaggttatgatgcttgtgtatccagaagagctaaagccagtgcttacgcaggccaagcaaaagtttttactcttgctcccgggcttagagaccgtcgagatgatggaagagtcaagcggcccttattctgatggtacagagaattcccagctgaatgtgaagatcagcggcatggaaagaaaatccaacggaaaaagagactcgttcctggcccagacaaagaacaaaaaagagaacatgaagccggcggctaagctgaagctcgaatcctcgtctctgaaggtgaagggcgaaattctcctggaagaggaaaaatctaccgactttgtgttcattcccccagaaggtaaggacgccaaggagaggatccttactgatcatcaaaaggaggtgctgaagacaaaaagatgtgatatccccgcaatgtataacaacctggacgtctctcaggacacattgttcacacagtatagtcaagaagagcctatggagattcctacactaactagaaaaccaaaagaggacagcaagatgatgattactgaagagcagatggactctgatatcgtcattcctcaggacgttaccgaggactgcgggatggctgaacatctggagaagagctcactttccaataacgaatgtggaagtctcgacaagacatcccccgaaatgtctaatagcaacaatgacgagaggaagaaagccctgatatcatctaggaaaacctcaaccgaatgcgcctcctctacagaaaatagctttgtcgttagcagttccagcgtctcaaatacgactgtagcgggaacgcctccctaccctacttcacgtcggcaaacttttattaccttagagaagttcgacgggagcgaaaatcgaccatttagcccttccccgctgaacaatatctcatctacagtgaccgtgaaaaacaaccaggaaacaatgattaagaccgattttctacccaaggccaaacagcgagaagggactttctcaaaatctgactcggagaaaatagtcaatggaaccaagaggagttcccggcgggccgggaaggccgagcagacaggtaacaagcgatccaaacctttgatgcgcagcgaaccagaaaagaatactgaagagagcgtggaaggaatcgtggtgttagaaaacaatccccccgggttgctgaatcaaaccgagtgcgttagcgataatcaagtgcatctcagtgaaagcacaatggaacacgacaacacaaagctgaaggccgccactgtggagaatgctgtactgctggaaacaaatactgtggaagagaagaatgtcgagatcaacctcgaatccaaggagaataccccgccggtcgtgatttcagccgatcaaatggtcaacgaagacagtcaggttcagatcaccccgaatcagaagactctgaggagatctagtaggagaagatctgaggtggtggagagtactacagaatctcaggataaggagaattctcaccaaaaaaaagaacgccgaaaagaggaggaaaagcctctgcaaaagtccccactgcacattaaggacgatgtgctcccaaagcagaaattgatcgccgaacagactttgcaggagaatttaatagagaagggcagcaacctgcacgaaaaaaccctcggagaaacttctgcaaatgctgagactgagcagaacaagaagaaggccgatcccgaaaatatcaaatccgaaggggacggcacacaagacatagttgacaagagttcggagaagctcgtgcgcgggagaacacgctatcagacccggagagcttcccagggcctgctgtcctccatcgaaaactccgaatcagattcgtctgaggccaaagaggaggggagtcgtaaaaaacgaagcggaaagtggaagaacaagtccaacgagtcagttgacatccaagatcaggaggagaaagtggtgaagcaggagtgtatcaaggctgagaaccagagccatgattacaaagcaacgtccgaggaagatgtgtccatcaagagccccatctgtgagaagcaggatgagtccaatacagttatttgccaggactccactgtgacttctgaccttctgcaggtcccagatgacttgccgaacgtgtgcgaggagaaaaacgagacatcaaaatatgcagaatactcttttacgagtctgcctgtgcctgagtccaatctgaggactagaaacgccatcaagcgcctgcacaagcgagactcatttgataactgctcacttggcgaatccagcaagattggcatatctgatatcagttcattgtctgaaaaaacatttcagacacttgagtgtcagcataaacgatcaaggcgggtgcggagatccaaaggctgtgactgttgcggtgaaaaatcccagccgcaggaaaaatccttaatcggtttaaagaataccgagaacaacgatgtggagatcagcgagaccaagaaggcagatgtccaggcccccgtcagtccatcagagactagccaggctaacccgtactcggagggccaatttctcgatgagcaccattcagtgaacttccacctaggtctaaaggaggataatgacactatcaatgactcacttatcgttagcgagactaagtcaaaggaaaataccatgcaggagagtctgccatccggtattgtcaactttagagaagagatctgcgatatggattccagcgaagcaatgtcactggaaagccaggaaagtcctaatgaaaactttaagaccgtggggccttgtttgggggacagtaaaaatgtatcgcaggagtcactggagaccaaagaggagaagccagaagaaactccaaagatggagctctctttagagaacgtcactgtggaggggaacgcatgcaaagtgacagaaagcaaccttgagaaagccaagactatggaactcaatgtgggcaacgaggcctctttccatggccaggaaagaactaaaacaggcattagcgaagaagcagccatcgaggagaacaaacggaatgatgattcagaggccgatacagccaagctgaacgccaaagaagtagctacagaagaattcaactctgatatcagtctctctgacaacaccacacctgtgaaactgaacgcccagaccgaaatatccgaacagaccgccgccggcgaattggacggcggaaacgacgtctccgacctgcactctagcgaggagacaaacacaaaaatgaagaataacgaggagatgatgataggcgaagcaatggccgagaccgggcacgacggcgagaccgaaaatgaggggatcaccaccaaaacttctaaaccagatgaagcagagactaacatgttgacagccgagatggataacttcgtgtgcgacacagtcgagatgtcaacggaggagggtattattgatgccaataagacagaaaccaacactgagtactccaaatccgaagagaaactcgacaataaccagatggtaatggaatctgacatccttcaggaggaccatcacacgagtcagaaggtagaggagcctagccagtgtctggcctcaggcacagccatctccgagctgatcatcgaggacaataatgcttccccacagaaactgcgggagctggatccctcgctggtatctgccaacgactctccgtcaggaatgcagacaaggtgcgtctggtctcccctcgcgtccccctcaactagtatactgaaacgaggacttaagaggagccaggaggatgagattagttctcccgtcaacaaggtacgacgggtcagcttcgcggacccaatttaccaggccgggctggccgatgatattgaccggaggtgctcaattgtccggagccattcttctaacagctctcccattgggaagtctgtcaagacttctcccactactcagagcaaaattagcgagatggctaaggaatcgatcccttgccccaccgaaagtgtctatccacctttggtgaattgcgtggccccagtggacatcatactgccccagataaccagtaacatgtgggctagaggtctgggccagctcatcagggcgaagaacataaaaaccataggcgacttgagcacccttaccgcttcagaaatcaagacactgcccatcaggtcacctaaggtctctaacgtcaagaaggcgttgagaatctaccacgagcagcaggtgaagacaagagggcttgaagaaattcctgtgtttgatatcagcgagaagacagtaaacggtattgaaaacaaatctctgagccccgacgaagaacgccttgtgtctgatataattgaccccgtggccttggaaatccctctgagcaaaaaccttctggctcagattagcgccctggcccttcagttagactccgaagatctgcataactatagcggctcccagctgttcgaaatgcacgagaagctctcctgtatggcgaacagtgtgatcaagaatttgcagtcacggtggcgttcgcccagtcatgaaaacagcatctag

SEQ ID NO: 69921 - DNA, 7341 bp, Artificial Sequence
  derived and/or modified sequence
atgacagcccggggccagagccccctggcccccctgctggagaccctggaggaccccagcgccagccatggaggccagacagatgcctacctgaccctgaccagcaggatgaccggggaggagggcaaggaggtgatcacagaaattgagaagaagctgccccggctgtacaaggtgctgaagacccacatcagcagccagaacagcgagctgagcagcgctgccctgcaggccctgggcttctgcctgtacaaccccaagatcaccagcgagctgtctgaggccaatgccctggagctgctgagcaagctgaatgacaccatcaagaacagcgacaagaatgtgaggacccgggccctgtgggtgatcagcaagcagaccttccccagcgaggtggtgggcaagatggtgagcagcatcatcgacagcctggagatcctcttcaacaagggggagacccacagcgctgtggtggactttgaggccctgaatgtcatcgtgcggctcatcgagcaggcccccatccagatgggagaggaggccgtgcgctgggccaagctggtgatccccctggtggtgcacagcgcccagaaggtgcacctgcggggggccacagccctggagatgggcatgcccctgctgctgcagaagcagcaggagatcgccagcatcacagagcagctgatgaccaccaagctgatcagcgagctgcagaagctgttcatgagcaagaatgagacctacgtgctgaagctgtggcccctgtttgtgaagctgctgggccgcaccctgcacaggagcggcagcttcatcaacagcctgctgcagctggaggagctgggcttccgcagcggggcccccatgatcaagaagatcgccttcatcgcctggaagagcctgattgacaactttgccctgaacccagacatcctgtgcagcgccaagaggctgaagctgctgatgcagcccctgagcagcatccacgtgaggacagagaccctggccctgaccaagctggaggtgtggtggtacctgctgatgaggctgggcccccacctgcctgccaactttgagcaggtgtgtgtgcccctcatccagagcaccatcagcattgacagcaatgccagcccccagggcaacagctgccacgtggccaccagccctggcctgaaccccatgacccctgtgcacaagggggccagcagcccctacggggcccctggcacccccaggatgaacctgagcagcaacctgggcggcatggccaccatccccagcatccagctgctgggcctggagatgctgctgcacttcctgctgggccctgaggccctgagctttgccaagcagaacaagctggtgctgagcctggagcccctggagcaccccctcatcagcagccccagcttcttcagcaagcacgccaacaccctcatcacagctgtgcatgacagctttgtggccgtgggcaaggatgccccagatgtggtggtgtctgccatctggaaggagctgatcagcctggtgaagtctgtgacagaaagtggcaacaagaaggagaagccaggcagcgaggtgctgaccctgctgctgaagagcctggagagcatcgtgaagtctgaggtgtttcctgtgtccaagaccctggtgctgatggagatcaccatcaagggcctgccccagaaggtgctgggcagccctgcctaccaggtggccaacatggacatcctgaatggcaccccagccctcttcctgatccagctgatcttcaacaacttcctggagtgtggggtgtctgatgagcgcttcttcctgagcctggagagcctggtgggctgtgtgctgagcggccccaccagccccctggccttcagtgacagcgtgctgaatgtcatcaaccagaatgccaagcagctggagaacaaggagcacctgtggaagatgtggagcgtcatcgtgacccccctgacagagctgatcaaccagaccaatgaggtgaaccagggagatgccctggagcacaacttcagcgccatctacggggccctgaccctgcctgtgaaccacatcttcagcgagcagcgcttccctgtggccaccatgaagaccctgctgcggacctggagcgagctgtaccgggcctttgcccgctgtgccgccctggtggccacagctgaggagaacctgtgctgtgaggagctgagcagcaagatcatgagcagcctggaggatgagggcttcagcaacctgctgtttgtggaccgcatcatctacatcatcaccgtgatggtggactgcatcgacttcagcccctacaacatcaagtaccagcccaaggtgaagagcccccagaggcccagcgactggagcaagaagaagaatgagcccctgggcaagctgaccagcctcttcaagctgattgtgaaggtgatctacagcttccacaccctgtccttcaaggaggcccacagcgacaccctcttcaccatcggcaacagcatcaccggcatcatcagctctgtgctgggccacatcagcctgcccagcatgatcaggaagatctttgccaccctgacccggcccctggccctcttctatgagaacagcaagctggatgaggtgcccaaggtgtacagctgcctgaacaacaagctggagaagctgctgggggagatcatcgcctgcctgcagttctcctacacaggcacctatgacagcgagctgctggagcagctgagccccctgctgtgcatcatcttcctgcacaagaacaagcagatcaggaagcagagcgcccagttctggaatgccacctttgccaaggtgatgatgctggtgtacccagaggagctgaagcctgtgctgacccaggccaagcagaagttcctgctgctgctgcccggcctggagaccgtggagatgatggaggagagcagcggcccctacagtgatggaacagagaacagccagctgaatgtgaagatcagcggcatggagaggaagagcaatggcaagagggacagcttcctggcccagaccaagaacaagaaggagaacatgaagccagctgccaagctgaagctggagagcagcagcctgaaggtgaagggggagatcctgctggaggaggagaagagcacagactttgtgttcatccccccagagggcaaggatgccaaggagcgcatcctgacagaccaccagaaggaggtgctgaagaccaagagatgtgacatcccagccatgtacaacaacctggatgtgtcccaggacaccctcttcacccagtacagccaggaggagcccatggagatccccaccctgaccaggaagcccaaggaggacagcaagatgatgatcacagaggagcagatggacagcgacatcgtcatcccccaggatgtgacagaggactgtggcatggccgagcacctggagaagagcagcctgagcaacaatgaatgtggcagcctggacaagaccagccctgagatgagcaacagcaacaatgatgagaggaagaaggccctgatcagcagcaggaagaccagcacagaatgtgccagcagcacagagaacagctttgtggtgagcagcagctctgtgagcaacaccaccgtggccggcaccccaccctaccccaccagccggcggcagaccttcatcaccctggagaagtttgatggctctgaaaatcggcccttcagccccagccccctgaacaacatcagcagcacagtgacagtgaagaacaaccaggagaccatgatcaagacagacttcctgcccaaggccaagcagcgggagggcaccttcagcaagagtgacagcgagaagatcgtgaatggcaccaagaggagcagcagaagagctgggaaggccgagcagacaggcaacaagaggagcaagcccctgatgaggtctgagcctgagaagaacacagaggagagcgtggagggcatcgtggtgctggagaacaaccccccaggcctgctgaaccagacagaatgtgtgtctgacaaccaggtgcacctgtctgagagcaccatggagcatgacaacaccaagctgaaggccgccaccgtggagaatgctgtgctgctggagaccaacacagtggaggagaagaatgtggagatcaacctggagagcaaggagaacaccccacctgtggtgatctctgctgaccagatggtgaatgaagacagccaggtgcagatcacccccaaccagaagaccctgcggcgcagcagcagaagaagaagtgaggtggtggagagcaccacagagagccaggacaaggagaacagccaccagaagaaggagaggaggaaggaggaggagaagcccctgcagaagagccccctgcacatcaaggatgatgtgctgcccaagcagaagctgattgctgagcagaccctgcaggagaacctgattgagaagggcagcaacctgcacgagaagaccctgggggagaccagcgccaatgctgagacagagcagaacaagaagaaggctgaccctgagaacatcaagtcagaaggagatggcacccaggacatcgtggacaagagcagcgagaagctggtgcggggccgcacccgctaccagacccggcgggccagccagggcctgctgagcagcattgagaacagcgagagtgacagcagcgaggccaaggaggagggcagcaggaagaagaggtctgggaagtggaagaacaagagcaatgaatctgtggacatccaggaccaggaggagaaggtggtgaagcaggagtgcatcaaggccgagaaccagagccatgactacaaggccaccagcgaggaggatgtgtccatcaagagccccatctgtgagaagcaggatgagagcaacacagtcatctgccaggacagcacagtgaccagtgacctgctgcaggtgcctgatgacctgcccaacgtgtgtgaggagaagaatgagaccagcaaatatgcagagtacagcttcaccagcctgcctgtgcctgagagcaacctgcggaccagaaatgccatcaagaggctgcacaagagggacagctttgacaactgcagcctgggggagagcagcaagattggcatcagtgacatcagcagcctgtctgagaagaccttccagaccctggagtgccagcacaagaggagccggcgggtgagaagaagcaagggctgtgactgctgcggggagaagagccagccccaggagaagagcctgattggcctgaagaacacagaaaataatgatgtggagatcagcgagaccaagaaggcagatgtgcaggcccctgtgagccccagcgagaccagccaggccaacccctacagcgagggccagttcctggatgagcaccacagcgtgaacttccacctgggcctgaaggaggacaatgacaccatcaatgacagcctcatcgtgtctgagaccaagagcaaggagaacaccatgcaggagagcctgcccagcggcatcgtgaacttccgggaggagatctgtgacatggacagcagcgaggccatgagcctggagagccaggagagccccaatgaaaacttcaagacagtgggcccctgcctgggggacagcaagaatgtgtcccaggagagcctggagaccaaggaggagaagccagaggagacccccaagatggagctgagcctggagaatgtgacagtggagggcaatgcctgcaaggtgacagagagcaacctggagaaggccaagaccatggagctgaatgtgggcaatgaggccagcttccacggccaggagaggaccaagacaggcatcagcgaggaggccgccatcgaggagaacaagagaaatgatgacagcgaggccgacacagccaagctgaatgccaaggaggtggccacagaggagttcaacagcgacatcagcctgagtgacaacaccacccctgtgaagctgaatgcccagacagagatcagcgagcagacagctgctggggagctggatggcggcaatgatgtgtctgacctgcacagcagcgaggagaccaacaccaagatgaagaacaatgaggagatgatgattggagaggccatggccgagactggacatgatggagaaacagaaaatgaaggcatcaccaccaagaccagcaagccagatgaggccgagaccaacatgctgacagctgagatggacaactttgtgtgtgacacagtggagatgagcacagaggagggcatcattgatgccaacaagacagagaccaacacagagtacagcaagtctgaggagaagctggacaacaaccagatggtgatggagagtgacatcctgcaggaggaccaccacaccagccagaaggtggaggagcccagccagtgcctggccagcggcacagccatcagcgagctgatcatcgaggacaacaatgccagcccccagaagctgcgggagctggaccccagcctggtgtctgccaatgacagccccagcggcatgcagacccgctgtgtgtggagccccctggccagccccagcaccagcatcctgaagaggggcctgaagaggagccaggaggatgagatcagcagccctgtgaacaaggtgcggcgggtgtcctttgctgaccccatctaccaggccggcctggctgatgacatcgaccggcgctgcagcatcgtgcgcagccacagcagcaacagcagccccatcggcaagtctgtgaagaccagccccaccacccagagcaagatcagcgagatggccaaggagagcatcccctgccccacagagagcgtgtacccacccctggtgaactgtgtggcccctgtggacatcatcctgccccagatcaccagcaacatgtgggcccggggcctgggccagctgatccgggccaagaacatcaagaccatcggggacctgagcaccctgacagccagcgagatcaagaccctgcccatccgcagccccaaggtgtccaatgtgaagaaggccctgcgcatctaccacgagcagcaggtgaagacccggggcctggaggagatccctgtgtttgacatcagcgagaagacagtgaatggaattgagaacaagagcctgagcccagatgaggagcggctggtgtctgacatcatcgaccctgtggccctggagatccccctgagcaagaacctgctggcccagatcagcgccctggccctgcagctggacagcgaggacctgcacaactacagcggcagccagctgtttgagatgcatgagaagctgagctgcatggccaacagcgtcatcaagaacctgcagagccgctggaggagccccagccatgaaaattccatctag

SEQ ID NO: 69922 - DNA, 7341 bp, Artificial Sequence
  derived and/or modified sequence
atgaccgcccggggccagagccccctggcccccctgctggagaccttagaggatcctagtgctagccatggcgggcagacagatgcctatttgacactcacatcacgcatgacaggagaagaaggcaaggaagtgattacagagattgaaaagaaactccctcggctgtacaaggtgctgaagacccatattagtagccagaattcagagctctcctccgctgccctgcaggcactcggattttgtctctataacccgaaaatcaccagcgagctgtcagaggcaaatgccttggaactgctctccaagctgaacgacacgattaagaactcggataaaaatgtaagaacccgggccctgtgggtcataagcaagcagacatttcctagcgaggtcgtgggcaaaatggtcagtagcatcatagactctctggagatcctgttcaataagggcgagacacactccgcggtggttgattttgaggccctgaatgtgattgtgcgattgatcgaacaggcccctatccaaatgggcgaagaggcagtgcgctgggcgaaacttgttattccacttgtcgtgcacagcgcacagaaggtgcatcttcggggtgctacagctctagagatgggcatgcccttactcctccagaaacagcaagagatagcgtccattactgagcagcttatgaccaccaagttgatcagtgagttacagaaactgttcatgagcaagaatgagacctacgtgctgaagctttggcccctttttgtcaagttgcttgggagaacgcttcatcgctccggctcatttatcaacagcctccttcagttggaagaactcggattccgctctggcgctcccatgataaaaaaaatcgcctttattgcgtggaagtctctgatcgacaacttcgccctcaacccagacatcctgtgttccgccaagagacttaagttactgatgcaaccactctcatccatccatgtaaggacggagactcttgccctgaccaaacttgaggtgtggtggtatctcctcatgcgccttggcccccacctgcctgctaacttcgagcaggtatgtgtaccactcatacaatcaactatctctatcgactctaacgcatctccacagggaaactcatgccacgtggccacctctccgggacttaaccctatgactcccgttcataaaggtgcttctagtccatacggggcccccgggactcctcgaatgaatctctctagtaaccttggcggcatggccacgatcccctccatacagctgctggggctggaaatgcttttgcacttcctgctcggccccgaggcactgtcttttgccaagcagaacaaacttgtacttagcttggaaccactggaacacccactgattagcagtccaagctttttctcgaagcacgcaaatacactgatcacggccgtgcacgacagtttcgttgcggttggaaaggatgccccggacgtggtagtatccgcaatatggaaggaacttatttcactggtgaagtcagtcacagagtccgggaataagaaggagaagcccggcagtgaggtgctcacgttgctgttgaaatccttggagtcaatcgtgaagagtgaagtctttcctgtcagcaagaccctggtactgatggaaattaccattaaaggactcccgcagaaggtacttggctcacccgcttaccaggtggcaaatatggacatcttgaatggaacccccgcgctattcttaatccagctgatcttcaataattttttagaatgtggcgtttccgatgaacgctttttcctgtctctggaaagcctggtcggatgtgtcctgtcagggcctacatcgcccctagctttttccgattctgttcttaatgtcattaatcagaacgctaagcaattggaaaacaaagagcacctctggaagatgtggagcgtaatcgtcaccccgctcactgaactgatcaatcagaccaatgaagtgaatcagggggacgcgctggaacataactttagtgcaatctacggagccctaaccctgccagtaaatcatattttcagcgaacagaggtttcccgtggcaactatgaaaacgttgctgagaacatggtcagaactctatagggcctttgcgcggtgcgccgccctggttgccacagcagaagagaatctgtgctgtgaggagttatccagcaaaatcatgtcgtctttggaggacgaagggttcagcaatctattattcgtggaccggatcatatacattatcactgtgatggtagattgtattgacttcagcccttacaacatcaaataccaacccaaagtgaaaagcccccaacgaccttctgactggtccaaaaagaaaaacgaacctctgggaaagctgacctccctgttcaagcttatagttaaggtgatatactccttccatactttgtccttcaaggaagcacattccgatactttattcacaatcggaaactctatcacggggattatctctagtgtcctggggcatattagcctgccttccatgattagaaagatctttgcaacactgacaagaccattggcactattttacgaaaactcaaaactagacgaggtgccgaaagtttattcatgcctgaacaataaactcgaaaagctacttggggagatcattgcttgcctccaattcagctacaccggcacgtatgacagcgaacttttagagcaattgtcacctctcttgtgtatcatcttcttacataaaaacaagcagataagaaaacagtccgcacagttctggaacgcgacattcgcaaaagtaatgatgctggtctatcctgaggagcttaaacctgtcctgacacaagcaaaacagaaatttctgctgcttctccctggattggaaaccgtggagatgatggaagagtccagcgggccatactcggacggaacggaaaactcccagttgaacgtgaagatctcagggatggaacgcaagtccaacggtaaaagagatagcttcctggcccagaccaagaataagaaagaaaacatgaaacccgccgcgaagcttaaactggagtcaagtagtctcaaagtcaaaggcgagatcctactcgaggaggagaaatccactgactttgttttcatcccgccggagggtaaagacgcgaaggaacgcatcttgaccgatcatcaaaaggaagtgctgaaaacaaaacgctgcgacattcctgcgatgtataataacctcgacgtgtctcaggataccctctttacccagtactcccaagaggagccaatggagattcccaccctcacaaggaagcccaaggaggattccaaaatgatgatcaccgaagagcagatggattccgacatcgtgattcctcaggatgtcaccgaggactgtggcatggctgagcatttggaaaaaagctctttgagtaataacgagtgcggaagccttgacaaaacctctccagagatgtcgaattccaacaacgacgagcgtaaaaaagccctgatttctagcaggaaaacctcaacagagtgtgcaagcagtacagagaatagcttcgtggtgtcttctagctccgtgtcaaacactacagtcgctggaactccgccgtaccctactagccggaggcagacctttatcaccctggaaaaatttgatggatccgaaaatcgaccattttccccatcaccattgaacaatatctcttcaacagtgactgtcaagaacaaccaagagactatgatcaagacggacttcctgccgaaagccaagcagcgggagggcactttctccaagagcgactcagagaagatcgtcaacggaacgaagaggtcaagtcggagagccggaaaagctgagcaaacgggcaataagcggtcaaagccactgatgcggagcgaaccggaaaagaatacagaggagagcgtggagggaattgtggtcctggagaacaatcccccaggtctgctaaatcaaaccgaatgcgtcagcgacaaccaggtgcatttatccgaatcgacaatggagcatgacaatacaaaacttaaggctgccactgtagagaacgcagttctgctggaaactaacacagtcgaagaaaaaaacgtggaaatcaacctagaatccaaagagaatactcctcctgtggttatctcggccgatcagatggttaatgaagattctcaggtccaaattacccccaaccagaagaccctgcgccgtagtagccggcggagaagcgaggtggtggagagcaccactgaatcgcaagataaagagaactctcaccagaagaaggagagaaggaaagaagaggagaaacctctgcagaaatctccactccacattaaagatgacgtgctaccaaaacagaagctaattgccgaacaaaccctccaggagaatttaatcgagaaaggatctaacttacatgaaaagactctcggcgaaacctcggccaacgctgaaaccgagcaaaataaaaaaaaagctgatcccgaaaacatcaagtcagagggagatggcactcaagacatagtggacaagagtagtgagaagctcgtgcgcggcagaacaaggtatcaaactcggcgtgccagtcagggcctgctgagttctattgagaactctgagtcagattcctccgaagcgaaggaagaggggagccgaaaaaagcggtctggcaagtggaagaacaagtcaaacgaatctgtggacattcaggaccaagaggaaaaggtggtaaagcaggaatgtatcaaggctgagaatcaaagccacgattacaaggccacaagcgaagaggacgtcagcattaaatctccaatctgtgaaaaacaggacgagtccaataccgttatttgccaggacagcactgtgacaagtgatcttctgcaggtgcccgacgacttgcctaatgtgtgtgaggaaaagaacgagacctccaaatacgcggaatattcgttcacaagcctgcccgtgcctgagtccaatctcaggaccaggaatgccatcaagagactgcataagagagactcttttgacaactgttcactgggcgagagtagcaagattggcatctctgacatttcgtcactgtcggaaaagacatttcagactctggagtgccagcacaaaagatcaaggcgggttaggagaagtaaagggtgtgactgctgtggagaaaaatcccaacctcaagagaaatctctcattggcttaaagaataccgagaacaacgacgtcgaaattagtgaaacaaagaaagcagatgtccaggcacctgtgtccccaagcgagacctcccaggccaatccctattcggaagggcagttccttgatgaacaccactccgtcaacttccacttgggtctcaaggaagacaacgacacaataaacgactccctgattgtgtccgaaacaaagtccaaggaaaacaccatgcaagagtctctgcctagcggcatcgtgaactttcgggaagagatctgtgacatggattcaagcgaggcgatgtcacttgaatcacaggaatcaccaaacgagaattttaaaacagtcgggccatgcctgggagacagtaaaaacgtgagccaggagtccctggaaaccaaagaggagaagcctgaggagacaccaaaaatggagctgtctctagagaatgtcaccgtcgagggaaatgcctgcaaagtgaccgagagtaacctggaaaaagccaagactatggaacttaacgtcggtaatgaagctagttttcatggccaagaacggacgaagaccggaataagcgaggaagcagcaattgaagagaacaaacgcaatgacgattccgaagctgacacagctaaactcaacgccaaggaagttgcaactgaggaattcaatagcgatataagcctcagcgacaatacgaccccggtcaaattgaacgcccagactgagatcagcgaacagactgctgctggcgagcttgatgggggaaacgatgtctcagacctgcatagcagtgaggagacaaacacgaaaatgaagaacaacgaagagatgatgataggagaagccatggcggagacggggcatgatggcgagacagagaatgaagggatcactacaaaaactagcaaaccagatgaggccgagacgaacatgctgacagcagaaatggataatttcgtttgcgacacggtggagatgtcaacggaagagggaattatcgacgcaaataagacagagaccaatactgaatattctaaaagtgaggagaaactggataacaaccagatggttatggagtccgacatcctccaggaggatcatcacacatctcagaaagtggaagagccgtcccagtgtttagccagcgggactgcaataagcgagctgatcattgaggacaacaacgccagtccacagaaattacgggagctggatccttccctggtctcagcaaacgacagtccttccggcatgcagacaaggtgcgtatggagcccactggcttctcccagcacctcaatacttaagagaggactgaagcggagccaggaggatgagatcagcagtccggttaataaagtgaggagagtctccttcgccgatcccatttaccaggccggcctggctgatgacattgacaggcgttgtagcattgtccgcagtcactcttctaactcctcgccgatagggaagtctgttaagactagtcccaccactcagtccaagatttccgaaatggccaaagagtccatcccctgtccgactgagtctgtctatcctcctcttgtaaattgtgtggcccccgtcgacattatcctcccacaaatcaccagcaatatgtgggccagaggcttggggcaacttattagagctaaaaacatcaagacgattggggacctcagcaccctgaccgcatcagaaatcaagacactgcctatccgctcccctaaagtcagtaatgtaaagaaggccttgcggatctaccatgagcagcaggtgaaaacacgtggtctggaggagatcccggtgtttgatatcagtgaaaagacagttaatgggatagaaaacaaatctctgtctccagacgaagaaagactggtcagcgatattatagatccagtggccctggagattcccctgtctaagaacctgttggcccagatctcggctctggctcttcagctggattctgaagatctgcataactatagtggcagccagctgttcgaaatgcacgagaagctctcgtgcatggccaattctgtgatcaagaatctgcaatcccgctggaggtccccttcacacgaaaactcaatttag

SEQ ID NO: 69923 - DNA, 7341 bp, Artificial Sequence
  derived and/or modified sequence
atgaccgcccggggccagagccccctggcccccctgctggagaccctcgaagacccctctgcatcacatggcggccagactgatgcctatctgacactgacttctaggatgacgggcgaggaaggaaaggaggtgatcacagagatagaaaagaaactcccccgactatataaagtgctgaaaacgcatatcagctcccagaactctgagctgagttcagccgctctgcaggctttggggttttgtctatataatcccaagatcacatctgaactctctgaagcaaatgccctagaattgctgagtaaactgaatgatacaatcaaaaactcagacaaaaatgtgcggacacgcgccctgtgggtgatctccaaacaaacttttcccagtgaggtcgtcggcaagatggtaagtagcattattgactcactagaaattcttttcaataagggggaaacacacagtgctgtagtggatttcgaggccctgaacgtaatcgtgagactgattgagcaagccccaatccagatgggcgaagaagcagtgaggtgggcaaaactagtgatccctctcgtggtccacagcgctcagaaggtacacctccgaggcgccaccgcactcgaaatgggcatgccactcctgcttcagaaacagcaggagattgctagcataacagagcagctgatgacaactaagttaatcagtgagctacagaagctgtttatgagcaaaaatgaaacctacgtgctgaaactgtggccactcttcgtgaagcttttaggccgtacactgcaccgctcaggtagttttattaactcacttctacaactcgaagaactgggatttcgctctggagctccgatgattaagaaaatcgcctttatcgcatggaaatccctgattgacaactttgcgttgaatcctgacatcctgtgctctgctaaacgcttgaagttgttaatgcaacctttaagctccatccatgtacgaacagagaccctggctctcaccaagctggaagtttggtggtacctactgatgcgtctgggaccccaccttcccgcgaacttcgagcaggtctgtgtgccactgatacagtccactatttcgatagactcaaatgcctccccgcaggggaattcctgccatgtggccacaagccctggactgaacccaatgactccggtacacaaaggcgcttcctcgccttacggagcacccggaacaccccggatgaacctgtctagcaaccttggaggcatggccaccattccatcgatacaattacttggcctggaaatgctccttcactttctgctcgggcctgaagccctgtcattcgcaaagcaaaataagttagttctgagcctggagccccttgaacaccctctgattagttcaccgagcttcttctctaagcacgccaacactctcatcaccgccgtgcatgacagtttcgtggctgtggggaaagacgcacccgatgtcgttgttagcgctatttggaaagagctgatatctttagtcaaatccgtcacagagtctggcaacaagaaagagaaaccaggctcagaagtgctgacgctcctacttaaatctctggaaagcatagtaaagagtgaagtttttccggtctctaagactttggtgctgatggaaattaccataaaaggcctcccccagaaagtgctaggtagccccgcttaccaggtggcaaacatggatattctgaacgggacacccgctctctttctcatccagctgatatttaacaatttcctcgagtgcggggtgtccgatgagcgattcttcttgtctctagagagtctggtgggctgtgtcctgagcggaccaacttctcctctggcgttcagtgattccgtgctcaacgtcattaaccaaaacgccaagcaattagaaaacaaagagcatctgtggaagatgtggtcggtaatcgtcacacccctgaccgaactgattaatcagacaaatgaagtgaaccagggagacgctttagagcacaatttttccgcaatctatggggctctgacactacccgtaaaccacatattctcagaacagcggttccctgtcgctactatgaaaaccctgctgaggacctggagtgagctatatcgagctttcgctcggtgcgctgcccttgtggcaactgcggaggagaatctctgttgcgaggagcttagcagcaagattatgagtagtcttgaggatgaaggcttctccaacctcctgtttgtggaccgtattatatatattataactgtaatggtggattgcattgatttctctccatataatatcaagtatcagccaaaagtcaaatccccccagaggcccagcgattggtcaaaaaaaaagaatgagccgctgggtaaattgacaagcctgtttaaactgattgtgaaagtgatctacagttttcacaccctgtccttcaaggaagctcactctgataccttgtttaccatcggtaacagcatcacaggtattatttccagcgttctgggacatatttctctcccatctatgatccgcaagatattcgccactctgactcgcccactcgccctgttttacgagaatagcaaactggacgaagtgccaaaagtctacagctgtctgaacaataagcttgagaaactgctaggagaaatcatcgcctgtctccaattttcttacacgggaacctacgatagcgaactgctggagcaactgtccccccttctgtgcattatcttcctgcacaaaaataagcagatacgaaaacagtctgctcagttctggaacgccacctttgctaaggtcatgatgctggtctacccagaggagttgaagccagttctgacacaggctaaacagaagttccttctgctgcttcctgggctggagacggtggagatgatggaggagagttccgggccgtatagtgatggcaccgagaactcccagctaaatgtgaagatctctggaatggaaaggaagagtaacgggaagagggacagttttctcgctcagaccaaaaataaaaaagagaatatgaaacctgcggctaagctcaagctcgaatcttcatcactcaaggtcaagggagaaattctgttggaggaagagaaaagcaccgatttcgtgttcattccccctgaagggaaagatgctaaggagaggatcctaacggaccatcagaaggaagtcttaaagaccaagagatgcgatattcccgccatgtacaacaacctggatgtgagccaggataccctctttacacagtattcgcaggaagaaccgatggagattcctactctgacaaggaagcctaaggaagacagcaagatgatgatcaccgaagagcagatggacagtgatatcgttatccctcaggacgtcaccgaggactgtggaatggccgaacacctggagaagagttccctcagcaacaacgagtgcgggtcactcgacaagacgtcccctgaaatgtcgaattctaacaacgatgagcgcaagaaggccttgatcagtagcagaaaaactagtaccgaatgcgcgtcaagtacagagaattcgttcgtggtcagttcttctagtgtcagcaacaccaccgttgcaggcacaccaccttatcccacatctcggagacagacattcatcaccttggagaagtttgacgggtcagagaataggcccttcagtccttcccctctcaacaacatcagctcaacagtgactgtgaaaaataaccaggaaacgatgatcaaaaccgatttcttgcccaaggccaagcagcgagagggcacattctcaaagagtgatagtgagaaaatcgtaaacggcacgaagaggtcctccaggcgggctgggaaggctgagcaaaccggcaataagaggtctaagcccctgatgcgatccgagccagagaagaacactgaagagtccgtcgagggaatcgtggttctcgagaacaacccaccaggcttgctgaaccagaccgaatgtgtttccgacaatcaggtacaccttagcgagagtacgatggagcacgacaacactaagctgaaagctgctaccgtggagaatgccgtgctacttgagaccaatacagtcgaagagaaaaacgtagaaataaacttagaatctaaagagaacactccacctgtagtgatttcagccgaccaaatggtaaatgaggacagccaggtgcagataacaccaaatcagaagacactacgacgcagttcccgaagacgcagtgaggtcgtagagtcaacaacggagagccaggataaggaaaattcacaccagaagaaggaacggcgcaaggaggaagagaagcctctgcagaaaagtcccttacatattaaggatgatgtactgcctaagcagaaactgatagctgagcagactctgcaagaaaacctgatcgagaaaggaagcaacctgcacgaaaagaccctgggtgagacatccgctaacgccgaaactgaacagaacaaaaagaaggccgaccctgagaatatcaaaagtgagggcgatggaactcaggacattgtggacaaatcctccgagaaattggtgcggggacggacacggtatcaaaccagaagggcctcacagggcctcctgtcttcgatagagaacagtgagtctgactctagtgaagcaaaggaggaaggctccaggaaaaagcggagtggaaagtggaaaaataaatctaacgagtctgtggacatacaggatcaagaagaaaaggtggtgaaacaagaatgcattaaggcagaaaatcaaagccacgactacaaagcgacatcggaggaggatgtttccatcaaatcaccgatttgcgagaagcaggatgagagtaacaccgtgatctgccaggactctacagtcaccagcgacctgctgcaagtgcccgatgacctacccaatgtttgcgaagagaagaatgaaaccagcaagtacgctgagtactccttcacttcgctgccagtcccagagagcaacctaagaacgagaaacgctatcaagcgcctgcataagagggacagctttgataactgcagtcttggggagagtagcaaaatcggtatttctgacatttcaagtctttctgagaagacctttcagacactggagtgccagcataagcgctcgcggcgtgtgcgacgttcaaaggggtgtgactgctgtggcgagaagtcccagccacaggagaagtctcttatcggacttaaaaacacggagaacaacgacgtagagatcagtgaaaccaaaaaagctgacgtacaggcaccagtatcccctagcgagacctcccaggctaacccttactcagaggggcagttcctggacgaacatcactctgtgaatttccaccttggccttaaggaggataatgataccataaacgattctctgattgtgagtgagactaagagtaaggagaacactatgcaagaaagcctgccttctggcatcgtgaatttccgagaggagatctgcgacatggactcctctgaggccatgagtctggaaagccaggagtccccgaacgagaattttaagacagtcggaccatgtctgggggacagcaagaatgtcagccaagagtccttagagaccaaggaggagaaacccgaggaaaccccaaaaatggagcttagcttggagaatgtgaccgtcgaaggtaacgcgtgcaaggtcactgagtctaacctggaaaaggccaaaaccatggaactcaatgtgggcaatgaggcctcatttcacgggcaagagaggactaaaaccggcatttctgaagaggcggccatcgaggaaaacaagcggaacgacgactcagaggcagacacggccaagctcaacgccaaggaagtggccaccgaagagttcaacagcgacatctccctttccgataacacaacccctgtcaaactgaacgctcagactgagatctccgagcagacagccgccggcgagcttgacggaggaaatgatgtgtcagacctgcattcatcagaggaaacaaatacaaaaatgaaaaataatgaggagatgatgataggggaggcgatggccgaaactggacacgatggtgagaccgaaaatgaaggcattaccactaaaacgagcaaacctgacgaggccgagacaaatatgttgactgccgaaatggataactttgtctgcgataccgtggagatgtctactgaggaggggattatcgacgctaacaagaccgaaaccaataccgaatattccaagtcggaagagaaactagataacaatcaaatggtcatggagtctgatattctgcaagaggatcatcatacttcacaaaaggtcgaagagccttcacagtgcttagccagcgggacagctatctccgaactgatcatagaagataacaacgcctctccccagaaattgagagaactggacccgtccctggtcagcgcaaacgacagcccaagtggcatgcaaaccaggtgcgtctggtcacctctggcctccccttccacaagtatccttaaacggggcctcaaacgctcacaggaagatgagatttcgtcccctgtcaacaaggtacgaagagtgtcttttgctgacccaatctatcaagcagggttagctgatgacatcgaccgccgatgctcaatcgtcaggagccacagttcaaactcctcgcccattggtaagtccgtcaagaccagtccgacgacacaatcaaaaatctcagagatggcaaaagaatccatcccctgcccaactgagtccgtatatccccctctcgttaattgtgttgctcctgtcgacatcatactacctcagatcactagcaacatgtgggctcgaggtctcgggcaactgatcagagcgaagaacatcaagacgattggtgacctgtctacgctcactgcaagtgaaatcaaaaccttgcctattaggagcccaaaggtgtctaacgtgaagaaagcactccgcatttaccacgagcaacaggtgaagactcgaggtctggaagagattcccgtgtttgacattagtgaaaaaactgtcaacgggatcgaaaacaaatctctctcacccgacgaagaaagattggtgagcgacatcatagacccagtagctttggagatccctctctccaagaaccttttagctcaaatttccgcgctggcattgcaactggactccgaggatctgcacaactacagtggatcccaattattcgagatgcacgaaaagctgtcatgtatggccaatagcgtgataaagaatctgcagtctaggtggcgctccccctcccacgaaaattccatttag

SEQ ID NO: 69924 - DNA, 7341 bp, Artificial Sequence
  derived and/or modified sequence
atgaccgcccggggccagagccccctggcccccctgctggagaccctcgaggacccatcagcatcccatggcggccaaacagatgcctacttgaccctgactagcagaatgacaggcgaagagggaaaggaggtcatcaccgagattgagaagaaacttccaagattgtacaaggtcctaaagacccatattagttcccaaaattccgagctgtcttcggcagcactgcaagccctggggttttgtctgtataatcccaagattacctccgaactgtcagaggccaacgcgctcgaactactctctaaactgaatgacactatcaagaatagtgataagaacgtgcgcactcgcgccctgtgggtaatcagcaagcagaccttcccatcagaagtcgtaggcaaaatggttagctcaatcattgattcactggagatcctctttaataagggcgagactcacagcgccgtggtggactttgaggctctaaacgtgatcgtcagactgatagagcaggcccccatccagatgggtgaggaagccgtccgatgggctaagttagtgatccccttggtggtgcactccgcccagaaggttcatctgcgaggggccaccgctctggaaatgggcatgcctctgttgctccaaaaacaacaggagatcgccagcattacggagcaactgatgacgacaaagctgatttccgaactgcagaagctgttcatgtcgaagaacgagacttatgtcctaaagttatggcccctatttgtcaagttgctgggacgaacgctgcaccgaagcggctcatttatcaacagcctcttgcagctggaagaattgggctttcgttccggagcaccaatgatcaagaagattgcctttatcgcctggaagagcttaatcgacaatttcgcactgaatcccgacatactctgttcagctaagcgattaaaactgctgatgcagcccctgagctcaatccacgtgcggactgaaaccctggcattgaccaagctagaagtgtggtggtacctgctgatgcgccttgggccccacctgcccgccaactttgagcaggtgtgcgtaccattaattcaaagcacaatttcaatcgattccaatgcctctcctcagggaaacagttgccacgtggccacctcacctgggctgaaccctatgaccccagtgcacaagggagcttcatctccctatggtgcacctggcaccccacgtatgaacctgtcttccaatctgggggggatggctactattcccagtatccagctgctcggcttagagatgttactacacttcctgctggggccagaagcattgtctttcgcaaagcagaacaaattggtgctgtcccttgagcctctggagcaccctttaatcagctccccctcattctttagcaagcacgccaatactctgataaccgcagttcacgatagcttcgtggccgtcggtaaagacgcacctgacgtggtggtttcagctatatggaaagagttaatttctctcgtcaaatcagtgacagagtccggcaataaaaaggagaagccgggatcagaggtcctgacgctgcttctgaagagcctggaatctatcgtcaaaagtgaagtgtttcctgtgagtaaaacactggtgcttatggagattaccattaagggactgccacagaaagtgctgggaagtccagcctaccaggtggctaacatggacattctgaacggaactcccgctctgttcctcatacagcttatctttaataatttcctggaatgcggagttagcgacgagagattcttcctctcactggagtcactcgtggggtgcgtgctgtccggcccaacaagtcctctggccttttcggactctgtgctcaatgtcatcaaccagaatgccaaacagctagagaacaaagagcatctatggaagatgtggtctgtgatcgttacgcccttgacagagcttatcaaccaaactaatgaggtaaatcagggggacgccctggagcacaatttcagtgctatttacggagccctcacgctaccagtcaaccatatattcagcgagcagagattcccggtggcaacaatgaaaactctgctgcgtacctggtctgagttgtacagagccttcgctagatgcgccgctctcgttgctactgctgaagaaaacctgtgttgtgaagaactgagtagcaagattatgagcagtcttgaagacgaagggttttccaatcttctgttcgttgatcggattatttacattataaccgtcatggtggattgtatcgatttctctccttacaacatcaagtatcagccaaaagtcaagagtccccagaggccaagcgattggtcaaagaagaagaatgagcccctgggtaaacttacctcgttgttcaagttgatagtcaaagtgatttattcttttcacacattgagctttaaggaagcgcatagcgatacactgttcactatcggcaactcaattacgggcattataagctctgtactgggccatatctctctgccatccatgatccgtaaaattttcgctacattgactcgaccactggctctattttatgagaactctaagctggatgaagttccaaaagtatacagctgcttgaataacaagctcgagaaactgctcggagaaatcatcgcctgtctacaattttcttacacaggaacgtatgattcagagttactggagcagctgtctccgctgctgtgtattattttcctgcataagaacaaacagataaggaaacagtccgcgcagttttggaatgcgacatttgctaaggtaatgatgctagtttaccccgaagagctgaaacctgtactcacccaagctaaacagaaatttctgctcttgctccccggactcgagacagtggagatgatggaggagtcaagtggcccctactccgatggaaccgagaattcgcagctgaacgtaaaaatctccggaatggagcggaagtccaatgggaagagagactctttcctggcgcagactaaaaataagaaagagaacatgaagcccgctgctaagcttaaactggagtcctcttctctgaaagtgaagggcgagatcctcctcgaggaggagaagtcgacagattttgtgtttataccacccgaaggtaaagacgccaaagaacgaatactcaccgaccaccagaaagaagtgcttaagactaagcgatgcgatatacccgctatgtacaataatttagatgtcagccaggacacacttttcacccagtatagtcaggaagaaccaatggagatcccgaccctaacaagaaaacccaaagaagactctaagatgatgatcacagaagaacagatggacagtgatatcgtgatcccccaagacgttacggaggactgcggtatggccgagcacctggagaaatctagtttgtcaaacaacgagtgtggctctctcgataagacctcacccgaaatgagcaattctaacaatgatgagaggaagaaagctctgatttccagtcggaagacatcgactgaatgtgcatcttccactgaaaattcctttgtcgtgagcagttcttctgtcagtaacaccaccgtagccgggacacccccatatcctacaagtaggagacaaactttcataacgcttgaaaagttcgatggctccgagaatcggcctttttctccaagccctctgaacaacatcagctccaccgtcacggtgaagaacaaccaggaaaccatgattaaaaccgacttcttgcctaaagccaagcagagggagggcacatttagcaaaagtgatagtgagaagattgtgaatggaaccaagaggagctctcggcgggcaggaaaagccgaacaaactggcaacaaaaggtcgaagccactcatgcgttcagagcccgaaaaaaacaccgaggaaagtgttgaggggatagtggtactggagaacaatccccctgggttgctgaatcagaccgagtgtgtgtctgacaatcaggtacacctcagtgagtccacaatggaacatgacaacacaaaactaaaagccgccactgtagagaatgctgtactcctggaaaccaatactgtggaggagaagaacgtggagattaacctggaatcaaaggaaaatactcctccggtggtcatcagcgccgatcagatggtgaacgaagactcccaagtgcagattaccccgaaccaaaaaacgctccgcaggtcttctcgccgacggtcagaagttgtggagagtacaaccgagtcgcaggataaggaaaattcccaccaaaagaaggagcggcgaaaggaggaagagaaacccctgcagaagtcccctctgcatattaaagatgatgtgctgcctaaacagaagctgattgccgagcaaaccttgcaagagaacctgatagaaaagggatccaacctccatgaaaaaaccctgggtgagacatcagctaacgctgagaccgagcagaacaagaagaaggccgacccagaaaacattaagagtgagggggacgggacccaggatatcgttgacaagtcctccgaaaagctggtgaggggccgcacccgatatcagaccaggcgcgcctcgcagggcctgctgagctcgattgagaattctgaatcagatagcagcgaggccaaggaagaaggaagccggaagaaacgctcgggtaaatggaaaaacaaaagcaatgagagcgtcgacattcaggatcaggaggaaaaggtggtgaaacaggaatgcatcaaggcagagaatcagagccacgactacaaagccacctcagaagaggacgtcagcattaagagccctatttgtgagaagcaggatgaatcaaacactgtcatctgccaggactcgactgtgacttccgatcttctgcaggtgccagacgatctgcctaacgtgtgtgaggagaaaaatgagacctccaagtatgcggagtattcctttacgtctctgcccgtgcctgagtctaacctccggacgagaaacgccattaaaagacttcacaaaagagactccttcgacaattgttcactcggagagtcttcaaagattgggatttcggacatatcgagtctcagtgagaaaactttccagaccctggagtgtcagcacaaacggtctcgtcgggtgagaagaagcaagggttgtgactgttgtggcgagaaaagccagccacaggaaaagagtctgatcggcctgaagaatacagagaataacgatgttgagatttccgaaacaaaaaaagctgatgtccaagccccggtcagccccagtgagacaagtcaggcaaacccttacagcgagggtcaattcctggacgaacatcacagcgtgaactttcaccttggcctaaaagaggacaatgacaccattaatgattcgctgattgtctctgaaacaaaaagcaaggagaacaccatgcaggagagtttacctagtggaatcgtaaacttcagagaagaaatctgcgatatggattcttcggaggctatgtccctggaatcacaggagtcaccgaatgagaattttaagaccgtcggtccatgcctcggggactctaaaaacgtttcacaggagagtctggagacaaaggaagaaaaacctgaagagacaccgaaaatggaacttagtctcgaaaacgtgacagttgaggggaatgcgtgcaaagtgacagagtccaacctggaaaaggcaaaaactatggaactaaatgtcggtaacgaagccagttttcatggccaggaacggactaagactggcatctccgaggaagctgctatagaagagaataagaggaatgatgattctgaggcggatactgccaagctgaacgcaaaggaagttgctactgaagagttcaacagcgacattagcctatccgacaatacgacaccagtcaaactcaacgcccagactgagatttcagagcaaactgcagccggcgagctggatgggggcaacgacgtgagcgacctacattcctccgaagagaccaacacaaagatgaagaacaatgaagagatgatgattggcgaagctatggccgagacagggcacgatggagagacagaaaacgagggaattacaacaaagacctcgaagcccgatgaggctgagaccaatatgcttacagccgagatggacaatttcgtgtgtgatacggtcgagatgtcaacggaggagggtatcattgatgcaaataaaacagagactaatacggagtattcgaaatctgaggagaagttagataacaaccaaatggtgatggaaagcgacatcttacaggaggaccaccatactagccaaaaggttgaggagccatctcagtgtttagctagcggtactgcaatcagtgaattgattattgaggataataatgctagtcctcaaaaattgagagagttagatccttccctggtgagcgccaacgactccccctcgggtatgcaaactagatgcgtctggagccctctggcttccccatccaccagcattttgaagagaggcctgaagcggtctcaggaggacgaaataagcagcccggtgaataaggtgcggagagtttccttcgctgaccctatctaccaagcaggcctggccgacgatatcgatcgccggtgcagcattgtgaggtcacatagctccaactccagtccaatcggcaaatccgtgaagacgagccctactactcagagcaagatttccgagatggcgaaggaaagcattccatgccccaccgaaagtgtgtatccccctctcgttaactgcgtcgcaccagtcgacattattctgccccagattaccagtaatatgtgggcccgggggcttgggcagctaatacgggccaagaacatcaaaaccattggggatctgtctactctgaccgcttctgagattaaaacactccctatccggagccctaaagtgtcgaatgttaaaaaggcacttagaatttaccatgagcagcaggtgaaaaccagaggactcgaagaaattcccgtttttgatatttctgaaaagaccgttaacgggatcgagaacaaaagcttgagtccggatgaggagcggctcgttagcgacattatcgaccctgtggctctggagatacctctctccaagaatcttctggcgcaaatctctgccttggccctgcagcttgactctgaagacctgcacaattactcgggcagtcagttgtttgaaatgcatgagaagctcagctgcatggccaattccgtcatcaaaaatctgcagtcaaggtggaggtctccctctcacgagaattccatttag

SEQ ID NO: 69925 - DNA, 7340 bp, Artificial Sequence
  derived and/or modified sequence
atgaccgctaggggacagtccccgctcgcacctctgttggaaactttggaggatccttcagcgagccatggaggacagaccgatgcatacctgacattgacatcgcgcatgacgggagaggaaggtaaggaggtcatcactgagattgagaaaaagctgcctagactttacaaggtattgaaaacccacatctcttcccaaaattcagagctgagtagtgccgctctgcaggcattgggattttgtctgtataacccaaagatcaccagcgagctcagcgaggcaaacgcattagaactgcttagtaagcttaacgacactattaagaatagcgataagaacgtaaggacacgcgctctctgggtgatctcaaaacagacgttccctagcgaagtcgtaggtaaaatggtgtcctcgatcatcgatagcttagaaattctctttaacaagggagaaacacattccgcggttgtagatttcgaagccttgaacgttatcgtcaggctgattgagcaggcaccaatacagatgggggaggaggctgtaagatgggccaaactagtgattccactggtggtccactcagcccagaaggtgcacttacggggtgctactgctctcgagatgggcatgccgctgctgctgcagaaacagcaggagatcgcctctattacagagcagctaatgacaacaaaactcatctctgagttacaaaagttgttcatgtccaaaaacgaaacctatgtgctgaagctttggcctttattcgtcaagcttctcggtaggaccttgcatcgatcaggttcatttataaacagcctgctgcagctggaggaattggggttcaggtccggcgctcctatgatcaagaagattgcttttattgcgtggaagtccttgatagacaacttcgcattgaaccctgatatcttatgctcggccaagcggttgaagctcttgatgcaaccactgtcctctattcacgtaagaactgaaacactggccttaaccaagttagaagtctggtggtaccttctgatgcgcctcggccctcacctgccagccaacttcgagcaggtgtgcgtacccctgatccagtcaacaatttctattgactctaacgccagtccccaaggaaatagttgccacgtagcaacctctcctggtctcaaccctatgactcccgtccataaaggcgcttcatcaccttatggtgccccagggacaccgaggatgaatttatcatcgaaccttggcggtatggcaactattccttctatccagcttcttgggctggagatgttgcttcattttttattaggacctgaagcactgtcgtttgccaaacagaataaactggttctcagtctcgagccactggaacacccactgatctcatccccatcctttttcagtaagcatgccaatacacttattaccgcagttcacgatagttttgtggcagttgggaaggatgcccctgacgtcgtggttagcgccatctggaaagaattgatttctctcgtgaaaagcgttactgagtccggtaataagaaggaaaagcccggtagtgaggtattgactctgctgcttaagtctcttgaaagtatcgtcaagtcagaggtattcccggttagtaagacattggttttaatggagataaccattaaaggcctaccgcaaaaggttcttggttcacccgcttaccaggtggctaatatggatattctcaatgggacacctgccctgttcctgatccagctgatattcaacaacttcctggagtgtggtgtgtccgatgaaaggtttttcctatccctggagtcactggttgggtgcgtgctgtccggcccaacgtcacccttagcattctctgactccgtcctgaacgtgatcaatcagaatgcaaagcagctggagaataaagaacacctgtggaaaatgtggagtgtgatagttacgccattgacagagctcataaaccagaccaacgaggtgaatcaaggcgacgctctcgagcataacttctcggccatatacggggcattaacgctgcctgtgaaccacatattttctgaacagcggtttcctgtggccactatgaaaacattgctccgcacatggtcagaactgtaccgcgcatttgctcggtgcgcggcactggttgccaccgcggaagaaaatctatgctgtgaagaattgtcttctaagataatgtcctccctggaggatgaaggcttcagtaacctcctgttcgtagaccggattatttacatcattaccgtgatggtggactgtatcgacttctcgccatataatattaaatatcagccaaaggtgaagtccccccagcgtccgagtgactggagcaagaagaaaaacgaacctctgggaaagctgacctctctgttcaaacttatcgtgaaggtgatctactcgtttcatactctgtccttcaaggaggctcacagtgataccctgttcacaattggcaactccattaccggcataatttcctctgtgctggggcatatctcccttccgagcatgattcgcaaaatatttgcgaccttaactcggccactggccttattttacgagaactccaagttggacgaggtgccaaaagtttattcctgtctaaataataaattggagaagttgcttggtgagatcatcgcatgcctccagttttcttacacaggcacttatgattccgagctcctcgaacagttgagtcctcttttgtgcattattttcctgcacaaaaataagcagatccgtaaacaatccgcgcagttttggaacgccacattcgccaaagtgatgatgctagtgtatccagaagagctgaagcccgtgctgacacaagccaagcagaagttcttactcctgctgccagggcttgagaccgttgagatgatggaagagtcctcaggaccatactccgacggcacagaaaacagtcagctgaatgtgaagataagtggaatggagcggaaatccaacggtaaacgcgattccttcctggcccagaccaagaacaaaaaggagaacatgaagcccgctgccaaactgaagctcgagtcttcttccctgaaggtgaagggcgaaatactgctggaagaggagaaatccaccgattttgtgtttatacctccggagggcaaggatgctaaggagaggatcttaaccgatcatcagaaggaagtgctcaagactaagcggtgtgatattcccgctatgtacaataatcttgacgtatctcaagacacgcttttcacacagtactcccaggaggaaccaatggaaataccaaccctaaccagaaagcccaaagaggactcaaaaatgatgataacagaggagcaaatggattccgatatcgtgatccctcaggatgtgactgaagactgtggcatggctgagcatctcgagaagtcaagtttgagcaataacgaatgcggaagtctggataagacatcccccgagatgagcaatagtaataacgacgaacgtaaaaaagcacttatctcgtctagaaaaacaagcaccgagtgtgcaagcagcaccgagaatagttttgttgtaagctcctcaagtgtgtcaaataccactgtcgccggtacccctccatacccgacctcacgtcgtcagacctttatcacgcttgaaaagtttgatgggagcgagaacaggcccttttccccaagtccactcaataacatatcctccacagtgactgtaaaaaataaccaggagactatgattaaaactgatttcctgccaaaagcaaagcagagagaggggactttctccaaatccgactctgagaaaatcgtcaacgggaccaagagaagttccagacgcgcaggcaaggccgaacagaccggaaacaaacgttcaaagcctctgatgcgctcagagcctgagaagaatactgaggaatcagtggaggggattgtagttcttgagaacaatcctccaggcctcctgaatcaaacagagtgcgtgtcagacaaccaagtccacctatctgaatcgaccatggaacatgacaatactaagttgaaagcagctaccgtcgagaacgctgtgctcttggaaactaacactgtcgaggagaagaatgttgagatcaaccttgagtcgaaagagaacacaccacccgttgtgatctccgccgatcagatggttaatgaagattcacaggtacagatcacgcccaaccagaaaacgctgcggcgaagctcacgtagaaggtctgaagttgtggagagtactaccgaaagccaggataaagagaactcgcaccagaaaaaggagagacggaaggaggaagagaagcctctgcagaaaagtccactgcacataaaagacgacgtgctgcctaagcaaaagctaatcgcagaacagacccttcaagaaaacctgatcgagaagggaagcaatcttcatgagaagacgctgggagaaacttcggccaatgccgagacagaacaaaacaagaaaaaagccgatcccgaaaatattaagagcgagggtgatggaactcaggacatcgtcgataagtcctctgaaaagctcgtaagagggaggaccagataccagactcgcagagcctcccagggattactttcctccatagagaactccgaaagcgactcaagcgaagccaaggaagaggggtcaaggaaaaaacgatcaggcaagtggaaaaacaagtccaatgaaagtgtcgatattcaagatcaggaagagaaggtggtgaaacaggagtgcatcaaggcagagaaccagtcgcacgactataaggcaacctcggaggaagacgtgagcataaagagcccgatttgcgagaagcaagatgaatctaacactgtgatttgtcaagacagcaccgtgacaagtgatttgctacaggtgccagacgaccttcctaacgtgtgcgaggaaaagaatgagacttcgaaatacgccgaatactcttttacttcattaccggttcctgagtccaacctcaggacccgcaatgcaatcaaacgtctgcacaagagggactctttcgataattgcagcctcggtgagtcgtcaaaaatagggatatctgatataagttcgctgtccgaaaaaacctttcaaactttggagtgccagcacaaaagaagtcgaagagtgagaagatccaaaggctgcgattgttgtggggagaaatcacaaccacaggagaagagcctcattggccttaaaaatacagagaataacgatgtggagatttcggagaccaagaaagctgacgtacaggcgcctgttagcccaagtgagacctcgcaggctaatccatactcagagggtcagttcctggatgaacatcattcggttaattttcatctcggacttaaggaggataacgacaccatcaatgattccttgatcgtgtcggagactaaaagcaaggaaaacaccatgcaggagagtctccctagcgggattgttaatttcagagaagaaatttgcgacatggacagttcagaggcaatgtcattggaaagtcaggagagcccgaatgagaactttaagacggttggaccttgtctgggtgattctaaaaatgtctcgcaggaaagcctggaaaccaaagaggaaaaacctgaggaaactcctaaaatggaactatctctcgaaaatgtcactgtggagggcaatgcctgcaaagtaactgaaagtaatctagagaaggcaaagaccatggagctgaatgttggcaatgaggctagtttccacggacaagagcgaaccaagacaggcatctcagaggaagctgccatcgaggagaataagaggaacgacgacagcgaggccgataccgccaaactaaacgcaaaagaggtggccactgaagagttcaatagcgacatttcgttgtcggataatactactcctgtgaaactgaacgcgcagaccgaaataagcgagcagaccgccgcaggagagcttgatgggggaaacgatgtatctgacctccactcaagcgaggaaaccaacactaaaatgaaaaataacgaagagatgatgattggtgaggccatggccgagaccgggcatgatggagaaacagaaaacgaaggcattacgaccaaaacaagcaaacccgacgaggctgagacaaatatgcttactgctgaaatggataacttcgtgtgtgatacggtggagatgagcactgaggaggggattattgacgctaataagactgagaccaacacagaatatagcaagagtgaagagaagctggacaacaaccagatggtgatggagtcagatatccttcaggaggatcaccacaccagtcagaaagtggaggaacccagccagtgcttagctagcggtacagctatttcagagctgataatagaggataacaatgccagcccgcagaaactgcgtgaactggacccaagcctcgtctctgccaatgacagtccctccggcatgcagacccgctgtgtgtggtcccctctagctagtccttcaactagcattctgaaacggggactgaagcgttcccaggaggacgagataagttctccagtgaacaaagtccgcagagtctcctttgccgacccaatatatcaggccggactggccgatgatatagaccggcgttgtagcattgtgcgctcccattcatccaattctagcccaatcggtaaatctgtgaagacctctccgacaacacagtctaaaatatccgagatggcaaaagaatctattccgtgccccactgagtcagtgtaccccccattagtgaactgtgtggcccctgtggatattattctgccacaaatcacttcaaatatgtgggctcggggactgggccagctgattcgggctaagaacatcaaaactattggggatcttagcactctgaccgctagtgagatcaagacattaccaatccggtcccccaaggtatctaacgtcaaaaaggctctgcggatataccacgaacagcaggtgaagacgaggggattggaagagattccggtgttcgatattagcgaaaaaaccgttaatggaatagagaataaaagtctaagtcccgacgaagaaaggctggtgtcagatattatcgaccccgttgccctggaaatcccattgagtaagaacctgcttgcgcagatttctgcccttgctctgcagctcgattcagaggacctccacaattactccggatctcaactcttcgaaatgcacgaaaagttatcatgtatggctaattctgtgattaagaacctgcagagcagatggagaagcccttcacacgagaacagcatcta

SEQ ID NO: 69926 - DNA, 7340 bp, Artificial Sequence
  derived and/or modified sequence
atgaccgctagggggcagagtcctcttgccccacttttggagactttagaagatccatcagctagccacggtgggcagacagatgcatatctgactctgacatccaggatgacaggcgaggagggtaaagaagtgataaccgaaatcgagaagaagctgcccaggctatataaggtgttgaaaactcacattagtagccagaacagcgagctgagttccgctgccttacaggcgctggggttctgcttgtataaccctaagatcacttccgaactgtcagaggctaacgcactcgagttgttgtctaaactaaacgatactatcaaaaattcagacaagaatgtgaggactagggccctatgggttatttcaaagcaaacattccctagcgaagtggtgggaaagatggtgtcctccattatcgactctctcgagatactgtttaacaagggggaaactcacagtgcggtcgttgactttgaggctttaaacgtgattgtgcggttaattgagcaggcaccgatccagatgggggaggaggcagtgcggtgggccaagctcgttattccgctggtagttcacagcgctcagaaggtccatctgagaggagcaactgccttggagatgggcatgcctctgctcctgcagaagcagcaagagatcgcatccattacagaacagctgatgaccacgaagttaatcagcgagttgcagaagttgttcatgtctaaaaacgagacttatgtactgaagctgtggcccctattcgtcaagttgttaggcaggactctccatagatcaggaagtttcatcaacagtttgcttcagttagaggagctgggcttcagaagcggcgcaccaatgatcaaaaagatcgcatttatagcttggaaaagtctgatcgataacttcgccctaaacccggacatcctttgtagtgcaaaaaggctgaaactgcttatgcagcctttaagtagcatccacgtacgcactgagactctggcactgaccaagctggaagtgtggtggtatctgttgatgaggctcgggcctcatctgcctgcgaactttgagcaggtctgtgtacccctgatacaaagcacaatctctattgactcgaatgccagcccacagggcaactcatgccatgtcgctacatctccgggtcttaatccgatgacgccagtacataaaggcgctagtagcccctatggggcacccggaacaccccgtatgaatctgtcatctaatctggggggtatggcaaccatcccgtctatccagctcttgggactggaaatgcttttgcacttcctgctgggaccagaggcgctctcattcgcaaagcagaacaaactggtgctctcactggagcctcttgagcatcccctgatctcttccccaagcttcttttctaagcacgccaatactctgatcactgccgttcatgatagttttgtagccgtggggaaggacgctcccgacgtcgttgtatcagctatttggaaagagctcatctctctggttaagtccgttacagagtccggcaacaaaaaggaaaagccaggatccgaggtgctgactctactgctgaagtctctcgagagtatcgtgaaatcggaagtgttccccgttagtaaaactcttgtcctcatggagatcaccattaaggggttgccccagaaagtgctgggctcgcctgcataccaagtggcgaatatggacattctcaatggtacccctgctctgtttcttattcagctgattttcaacaatttcctcgagtgtggtgtgagcgatgaacgattttttctgtctctggagtctctcgtcggctgcgtcctgagcggacccacatcgccgctcgcctttagcgactccgttctcaatgtgataaaccaaaatgctaagcagttggagaacaaggagcacctgtggaagatgtggagtgttatagttacacccctcaccgagctcataaaccagactaatgaggtgaatcagggagatgcactggaacacaattttagtgcaatttacggggctttgacgctcccagtcaaccacattttctcagagcagcgctttcccgtggctacaatgaagacattgctgcggacgtggagcgagctgtaccgggcttttgcacggtgtgccgcactcgtggctaccgccgaagagaatctctgctgcgaggagctcagcagtaaaattatgtccagcctggaagacgagggcttttccaatctgctgttcgtggaccgcataatctacataatcacggtcatggttgattgtatcgacttttccccctataacatcaagtaccaacccaaagtgaagtccccccagcggccttccgactggtccaaaaagaagaatgagccgctgggaaaattgacttccctttttaaactgatcgtgaaagttatttatagctttcacacattaagctttaaggaggcacactctgatacactgtttacaatcggcaatagtattacagggattatatcatccgtgctaggacatatcagcctgccatcgatgatccgaaaaattttcgctactctgacaagacctcttgccctattttacgaaaacagtaagcttgatgaggtcccgaaggtctacagctgccttaataacaagctggagaagctgctgggggaaattatcgcctgtctgcaattttcctacactggaacatacgattcagaactacttgagcagctcagccctcttctttgcattatcttccttcataagaacaagcagatcagaaagcaaagcgcccagttctggaacgcaactttcgctaaagtgatgatgttggtctacccggaagaattaaaacctgttttaacacaggccaaacagaaattcttgctcctcctgcccggactggaaaccgtggagatgatggaagaatcgtcggggccttattcagacggcacggaaaattcccagctgaatgttaaaatatccgggatggagaggaaatcaaatggcaagagagactcatttctggctcagaccaagaacaaaaaggaaaacatgaaaccagcagcgaagttaaagctggagtcaagcagcctgaaggtgaaaggcgagatcctgctggaggaggagaagtctactgacttcgtgtttattcctccggaaggaaaagatgcaaaggagcggatcctaactgaccaccagaaggaggtgctcaagaccaaacgatgtgacattcctgcgatgtataacaacctcgacgtgagccaagacactctgttcacccaatactcgcaggaggagcccatggaaatccccactctaacacgaaagcccaaagaggactctaagatgatgataaccgaagagcagatggattccgatattgtgatacctcaggatgtgaccgaggattgcggaatggctgaacatctcgagaaatcctcgctcagtaataacgaatgtggatcactggataaaacatctccagaaatgagcaacagtaacaatgacgagcgaaaaaaagctctgatcagtagtcgtaaaaccagcaccgagtgtgcgagcagtaccgagaactcctttgtggtgtcctccagtagcgtcagtaacactacagtggctggcaccccgccatatccaacaagccgtaggcagacgtttatcacactggagaagttcgatggtagtgagaaccggccattcagcccttctcccctcaataacatctcctctacggtgaccgtcaaaaacaaccaggagacaatgatcaaaaccgattttctccctaaagcaaagcaacgggagggcacctttagcaaaagcgatagtgagaaaatcgtgaacggcacaaagcggtccagccgtcgagctggcaaggcggaacagacgggcaacaagagatcgaagccactaatgcggtccgagcctgagaagaatactgaagagagtgtcgaggggatcgtcgtgttggagaataatcctcctggcctgctgaaccagactgaatgcgtgagcgacaatcaggtacaccttagtgaatctaccatggaacacgataatacgaaattaaaggccgcaacagtagagaatgctgtgctcctggagaccaatactgttgaagagaaaaacgtggagatcaatcttgaatctaaagaaaatacaccaccagtcgtcatctccgcagaccagatggtaaacgaggattctcaggttcagattactccaaaccaaaaaaccctcagaaggtcttcccggaggcgttccgaggtagtggagagcactaccgagtcacaggataaagagaattcacatcagaagaaggaacggagaaaggaggaggagaagccactgcagaagagtccgctgcacataaaagatgacgttctgcctaaacagaaactcattgctgagcaaactctgcaggaaaacctcattgagaaaggaagcaatttgcacgagaagaccttaggcgaaacctccgccaatgccgagaccgaacagaataaaaaaaaggcggaccccgaaaacattaaaagtgagggcgacgggactcaggacattgtggacaaatcttccgaaaagttggttagggggaggacaagataccagacaaggcgcgcttcccagggactcttaagttcaatagaaaattcggagagtgattcatccgaggctaaagaagaggggtctaggaaaaagcgttccggcaagtggaaaaataaatctaacgagtcggtggacattcaggaccaagaggaaaaggttgtcaagcaggaatgcatcaaagccgaaaaccagagccacgattataaagcaacaagcgaggaagatgtgtccatcaagtccccaatatgcgagaaacaggacgagagcaacactgtcatctgtcaggattctactgtgaccagcgatttgcttcaggtccctgatgatttacccaacgtctgcgaggaaaagaatgagacctctaaatatgccgaatatagctttacatctcttcctgtgcccgagtcaaacttgcgcacccggaacgccatcaagaggcttcacaagcgggatagctttgacaactgtagcttaggcgaatcgtctaaaatcggaatttcggacattagcagcctgtctgaaaagaccttccaaactcttgagtgtcagcataagagatcacgaagagtccgaaggtccaaggggtgtgattgttgcggcgagaaatctcagcctcaggaaaagtccctgattggcttaaaaaacaccgaaaacaacgacgtggagatttccgagaccaaaaaggccgacgtccaggccccagtgtctcctagcgagacaagtcaggctaatccttattccgagggtcagtttctggacgagcaccacagcgtcaacttccatctgggcctgaaagaagacaacgatactatcaatgattctctgatcgtcagcgaaacaaaaagcaaggaaaacaccatgcaggagagcctgccctccgggatcgtgaatttcagagaggagatatgcgacatggactctagtgaagccatgagtctagagtcacaggagtccccaaacgagaacttcaaaaccgtgggaccgtgtctgggagacagcaagaacgtttctcaggaatccttggagaccaaagaagagaagccagaggagacaccaaagatggagctgtctcttgaaaatgtaaccgttgagggcaatgcctgtaaagtaactgaaagcaatctcgagaaagctaaaactatggagctgaacgttggcaacgaggccagcttccacggccaggagcgtaccaaaactggcatttctgaagaagccgctattgaggagaataagcgaaacgacgactcagaagccgataccgccaaactcaacgccaaggaagtggctacagaagaatttaattcagacatctccctatctgacaatacaacccccgtaaagctgaacgctcagaccgagatctccgagcaaacagcagccggagagctggatggaggcaacgatgttagtgacctgcacagctccgaggaaacaaacaccaaaatgaagaataacgaagagatgatgattggcgaagcgatggccgagaccggccatgacggggagacggaaaatgagggcatcactaccaagacctcaaagcccgacgaagctgaaacgaacatgctaacagctgaaatggataacttcgtctgcgatactgtcgagatgagcaccgaagagggcatcatcgacgccaacaaaaccgagaccaacaccgagtactctaaaagcgaggaaaaacttgacaataaccaaatggtcatggaatccgacatcctgcaggaggaccaccacacatcacaaaaggtggaggaaccaagccagtgtctagccagtggcaccgctatttcagagctgattattgaagacaacaacgcgagccctcagaagctgcgagagctcgacccttctctggtgtctgccaatgactcgccaagcggtatgcagacacggtgtgtgtggagccccctggcaagtccatctacttcaatcctcaagcgaggactgaaaaggagccaagaggacgaaattagctctccagtgaataaggtgcggcgtgtgtcctttgcggacccgatctaccaggctgggctggccgacgacattgacagacggtgttctattgtgagatctcacagttccaactcatcacctataggcaaaagcgtcaaaacgagccctacgacccagtctaaaatttctgagatggctaaagaaagtatcccgtgccccacagaaagcgtttaccctcctttggttaattgtgttgcgccagtcgacatcattctccctcaaattacatccaacatgtgggccagaggcctaggacagttgattagagctaaaaatatcaagacaatcggcgacctgtccacattgacagcatcagagatcaagaccctcccgatccgctcaccaaaagtatcaaatgtgaaaaaagccttacgaatatatcacgagcaacaggtaaaaacacgtggactcgaggagatacctgtgttcgacattagcgagaagacggtcaacgggatagagaacaagtcactgtcccctgacgaggaacggctggtaagcgacatcattgaccccgtcgcccttgagataccactctcaaagaatcttctcgcccaaatatctgctcttgccctgcagttagatagtgaggatcttcataactatagcgggtctcagctctttgaaatgcacgaaaaattgtcttgcatggccaactctgtcatcaagaacctccaatccagatggcgttcaccttcccacgagaactccattta

SEQ ID NO: 69927 - DNA, 7340 bp, Artificial Sequence
  derived and/or modified sequence
atgaccgcgcgtggtcagtccccactagcccctctgctagaaaccttggaggacccttcggcctcacacggcggtcagaccgacgcgtacctaactctgacatcccgcatgaccggtgaggaagggaaggaggttatcactgaaatcgagaagaagcttccacggctctacaaagtgctgaagacccatataagctcccaaaatagcgagctgtcaagcgcagccctgcaggccctgggattctgtctttataaccccaaaataacttcagaattgtccgaggcaaacgctctggagttactgagcaaactgaatgatacaatcaagaattcagacaagaatgtccgtactcgcgctctctgggtgataagtaagcaaacttttcctagtgaggtggttggcaagatggtctcctctataatcgattctttggagatcctgttcaacaagggagaaacccacagtgccgtggtggacttcgaggcgctgaatgtgattgtgcgattgattgaacaggcccctatccagatgggcgaagaggcggttcgctgggcgaagctcgttataccactcgtcgtgcatagcgctcagaaagtccacttgcggggtgcaactgcgcttgaaatgggcatgcccctgcttcttcaaaaacagcaggagatagccagcattacagaacaattaatgacgactaaactcatctcggagctgcagaagctctttatgtctaagaatgaaacatacgtgctcaagctgtggcccctcttcgttaagttactggggaggactttacatagaagcggcagctttatcaactcactcctccagctagaggagttgggcttccgctcaggagccccaatgatcaagaagattgcctttatcgcctggaaatctctcatcgataacttcgccctaaatccagacatcctctgctccgccaagcgactcaagctgcttatgcagccactgtcatctattcacgtgagaaccgagaccctggccctcaccaaactcgaggtgtggtggtatctgctgatgaggctgggaccccacttacccgcaaacttcgaacaggtgtgcgttcccttaattcagtcgaccatctcgattgatagtaacgcctccccacaggggaattcctgccatgtggccacctcacctgggctcaatcctatgacaccagtgcacaaaggggcatcatctccatacggtgcacctggaacgcctaggatgaatttgtcttccaatctggggggtatggctaccataccgtcaatccagctgctcggcctggaaatgctgcttcactttttgctgggaccggaagcactgtccttcgcgaaacagaataaactggttctaagccttgaacctcttgagcatcccttaatcagttcaccttcctttttttccaaacatgcaaacacactgatcaccgctgtgcatgattcatttgttgccgtgggcaaagacgctcccgatgtggttgtgagcgcgatctggaaggagctgatttccctggtgaagagcgtaaccgaatctggcaataagaaggagaaacccggttctgaagtgttgacccttctgttaaagtcactcgagtcaattgtcaagagcgaagttttccccgtgagcaagacattagtgctgatggaaataacaataaagggtctcccgcagaaggtcctggggtcacccgcttatcaggtggccaatatggacattctcaatggtactcctgcactcttcctgattcagttgattttcaacaatttcctggaatgcggcgtatctgacgaacggtttttcctgtccttggaatccctggtgggatgcgtgttgtctggccctacttccccactcgctttctccgatagtgtcctgaacgttattaaccagaacgctaagcaactggagaacaaggaacatctatggaaaatgtggagtgttatcgttactcccctgacggagttgattaatcagaccaacgaagttaaccaaggggacgcattagagcataattttagcgcaatctacggcgctctgactttgcctgtgaaccatatcttttcagagcagcgatttcccgtggctaccatgaaaacactactgaggacctggagtgagctctacagggccttcgccaggtgtgcggctcttgttgcaacggctgaggaaaatctatgttgcgaagaactcagcagcaagatcatgtccagcctggaagacgaaggcttttctaacctgctcttcgtggatcggatcatctacattattactgtgatggtggattgcattgatttctcaccctataacattaagtaccagccaaaggtgaaatccccccagcggccttccgattggagcaagaaaaaaaatgaaccactgggaaagctcacctctctgttcaaactgatcgtgaaggttatctattccttccacactttatccttcaaagaggcccactcagacaccctattcacaataggaaactctataaccggtattatctcaagcgtgctgggccacatcagtttgccctcaatgatccggaaaatttttgccacactaacccggccactggctctgttttacgagaactccaagctcgatgaggtgccaaaggtgtactcttgtctcaataacaaactggagaagctgctaggggaaatcattgcatgtctgcagttttcatatacagggacatacgactcagaattgttggaacagctttctcccctactttgcatcattttcctccataaaaacaagcagattaggaaacagtcagctcagttctggaacgctacttttgctaaggtgatgatgttggtgtacccagaggagctgaagcctgtgttgactcaggccaaacagaagtttctgctacttttgccgggtctggagactgtcgaaatgatggaagagagtagcggaccgtactcggacggaaccgaaaactcccagttgaatgtcaagatctcaggcatggagcgcaagtccaacggcaaaagggatagttttttggcccagacgaaaaacaaaaaggagaatatgaagcctgctgccaaactgaagctggagagtagttcactgaaagtgaagggtgagatccttctggaagaagagaaaagtacagatttcgtatttattccgcctgaggggaaagatgcaaaagaaaggatcctgacagatcatcagaaggaagtccttaaaacaaagcgttgtgacatccccgcaatgtacaataacctggatgtgtcacaggatactctattcacccaatattcacaggaggaaccaatggagataccgaccttaaccagaaagccgaaagaggactccaaaatgatgattactgaggagcagatggatagcgacattgtcataccacaagacgtgaccgaagactgtggtatggcagaacaccttgaaaagtcatcactctcaaataatgagtgcgggtctcttgacaagacctccccagagatgagtaacagcaacaacgatgagaggaaaaaagccctgatcagtagccgcaagacgagtacagagtgtgccagctcgacggaaaatagctttgtggtatccagctcctccgtcagcaacaccacagtggcaggcacccccccatacccaacaagtcgtaggcagacatttattacacttgaaaagtttgatgggtctgagaatcggccattctccccatccccccttaataatatcagcagtacggttaccgttaagaacaatcaggagacaatgattaagacggatttcctgcctaaggccaaacagcgggaaggtaccttttccaaatctgatagcgagaagatagtgaacggaacaaagaggagtagcagaagggcagggaaggccgagcaaacaggtaacaaaaggtcgaaacccctaatgcgcagcgagcctgagaagaacactgaagagtccgttgagggaattgtcgtgttggaaaacaaccccccagggttgttgaatcaaacagaatgcgtgtcagacaatcaggtccacttatcagagagtacgatggagcatgataacaccaagctcaaggccgctactgtcgagaacgctgtgttactggaaacgaatacagtcgaggaaaagaatgtcgaaattaacttggagagcaaggagaatactccccctgtggtcatctctgccgatcagatggtgaacgaggatagccaggtacagattacccccaatcagaagacactgcgacgctcctccagacggcgatctgaagtggtggagtcaacaacggaatcacaggataaagagaactcacaccagaagaaagagagacggaaggaggaggagaaaccactccagaaaagcccactgcacattaaggatgacgtgctccctaagcagaaactcatcgctgagcaaacattgcaagagaacctaatcgaaaaaggatccaatctgcatgaaaagacgttgggcgagacaagtgccaatgctgagaccgagcagaacaagaagaaagcagatcccgagaatatcaaaagtgaaggcgacggcacccaagacatcgtcgataaaagcagcgagaagcttgtcaggggtcggacacgatatcagacaaggcgcgctagtcagggtctgctttctagcattgaaaatagtgaatccgacagttctgaggcaaaggaggagggttctcgcaagaaaaggtctggcaagtggaaaaataagagcaatgaatccgtggatatccaggatcaggaagagaaagtagttaagcaagagtgtatcaaagctgagaatcagtcccacgattacaaggctacatctgaggaggacgtgtccatcaagagtcccatctgtgagaaacaggacgagtctaacactgttatttgtcaagattctaccgtgactagcgatctcttgcaagtaccggatgacctacccaacgtgtgcgaggagaagaacgagacgtccaagtacgctgaatactccttcaccagcctaccggttcctgagtccaacctccgcacacgcaatgcaatcaagcggctccataagagagactcctttgacaattgttccctgggagagagcagtaaaattggaatctccgatatctcgagcctcagcgagaaaacctttcaaacgctggaatgtcaacataaacgctccaggcgggtgagacgctcgaaaggctgcgactgctgtggcgaaaaaagccagccacaggagaagtcactcataggtctgaaaaacacagaaaacaacgacgtcgagattagcgaaacaaagaaggctgatgtccaagctccagtttccccctctgagaccagtcaggctaacccatattccgagggccagtttctggacgagcatcatagcgtcaacttccatctcggtctgaaggaagataacgacacaatcaatgattctttgattgtgtccgagactaaaagcaaggaaaatacgatgcaagaatccctcccttccggtatcgtcaattttagggaagaaatctgtgacatggactcatctgaggctatgtctctggagtcccaggagagccccaatgagaactttaagacagtcggcccatgtcttggagattcgaagaacgtgagccaagagagccttgagacaaaagaggagaaaccagaggagactccaaagatggagctttccttggaaaatgtaacagttgaggggaacgcatgtaaggttacagagagtaatctagaaaaagcgaagacaatggagcttaatgtcggcaatgaggcatcttttcacggtcaagagcggactaagaccgggataagcgaagaggccgcaatcgaagaaaataaaagaaacgatgattccgaagctgacactgcaaagctgaacgcgaaagaggtggccacagaggaattcaacagcgacatctcactgagtgacaatacaactcccgtcaagctgaacgcccaaactgaaatctcagagcagaccgcggctggggaactggacggaggcaatgacgtgtccgatctgcactcttccgaagagactaatactaagatgaagaacaacgaggaaatgatgatcggagaggctatggccgagacagggcatgatggcgagaccgagaatgagggaattactacgaagacatcaaagcccgacgaagccgaaactaacatgttgactgcagagatggataactttgtgtgcgacaccgtagaaatgtccacagaagaaggcataatagacgccaataaaacagaaaccaatactgagtactccaaatcagaagagaaactggacaacaatcagatggtgatggaatcagatatcctgcaagaagatcaccatacttctcagaaggtcgaggaaccctcccagtgcctagcctcaggcaccgcgataagcgaactgattatcgaggataataatgcctctccacagaaactgcgggagctcgacccatcgctcgtatcagctaacgactcccccagcggcatgcagacacggtgcgtgtggagtccactcgcttccccgagcaccagtatcctaaaacgaggactcaaacggagccaggaggatgaaatctcgtcacccgtaaacaaagtccgaagggtgagctttgctgaccccatataccaggccggactggcagatgatatcgacaggcggtgttcaatcgtcaggagccactctagtaattcttccccaatcggaaagtctgtgaaaacatcacctacaacacagagcaagatctccgagatggccaaagaaagcattccatgccccaccgagtccgtctatccaccactcgtaaattgtgtcgctcccgttgacatcatcctgccacaaattacctcgaatatgtgggctcgaggcctcgggcaattgattagggccaagaacattaagactattggggatctgagcactttgaccgcttctgagataaaaacactcccaatccgttcaccaaaggtgagcaatgtgaaaaaggctctacgcatctatcacgagcaacaagtgaaaacacgtggcttggaggaaatccccgtttttgatatctcagagaagaccgtaaacggcatcgaaaacaaatccctttcccccgacgaagaaagattggtgtcagacatcattgatccggtggctctggagatccctctgtccaagaatcttctagcccagatcagcgctcttgccctccagctcgattctgaagacctgcacaactattcagggtcccagctcttcgaaatgcatgaaaagctgagctgcatggccaactccgtgatcaagaatctacaaagcagatggaggagcccctctcacgagaattccatcta

SEQ ID NO: 69928 - DNA, 7722 bp, Artificial Sequence
  derived and/or modified sequence
actcctgggcccgcccagccgccatcttggtctaggagggagcgcgccgcacgcggtggccgacatgacggccaggggtcagagccccctcgcgccgctgttggagactttggaagacccttctgcctcccatggagggcagactgacgcttacctgactctgaccagtcgtatgactggagaagaaggaaaagaagtaattacagaaattgagaaaaaacttcctcggctgtacaaagttttaaagactcacatttccagtcaaaactcggagctgagtagtgctgctctacaagccctggggttttgcttatataatcccaaaattacctcagaattatcagaggcaaatgctctagaattgctttcaaaattgaatgataccattaagaattcagacaaaaatgtacgtactagagcactttgggtgatatctaagcagacatttccctctgaagtggttggcaaaatggtatccagtataattgattcattagaaatactgtttaacaaaggagagacgcattctgctgttgttgattttgaagcattaaatgttatcgtaaggctaattgaacaagccccaattcaaatgggagaagaggcagtgaggtgggcaaaactggtcatacctttagtggttcattcagcacaaaaggtacatttgcggggagcaactgctctggagatgggaatgccattattgcttcagaaacagcaagaaatagcatctattacggagcagcttatgactactaaattaatctcagaacttcagaagctatttatgagtaaaaatgagacttacgtgttaaaattatggcctttgtttgtcaaactacttggaaggaccttgcatcgaagtgggagtttcatcaattctctcttgcaactagaagaacttggatttcgtagtggagcacccatgattaaaaagatagcttttattgcttggaagagtttaatagataattttgctttaaatccagatatactatgtagtgcaaaaagactcaagttgttaatgcagcctttgagttccatccatgtgagaacagaaactctagcattaacaaaactagaagtctggtggtatttactgatgagacttggacctcatcttcctgctaattttgaacaggtttgtgtgcctctgattcaaagtacaataagcattgattctaatgcctcacctcagggcaattcgtgtcatgtagctacatctccaggtttaaatcctatgactcctgtacacaaaggtgcttcctccccgtacggagccccgggaactccccgaatgaacctgagttcgaatttaggtggaatggccacaatcccatccattcaacttttgggacttgaaatgttgcttcatttcttgttgggtccagaagccttgagttttgctaagcaaaataaacttgtgctgagcttagagccattggaacatccgttaatcagcagcccttcctttttttccaaacatgcaaatacacttatcactgctgttcatgatagctttgttgcagttggaaaagatgcccccgatgtggttgtcagtgctatctggaaggagctaattagcttggtgaagtcagttactgaatcaggtaacaaaaaagagaaaccaggttctgaagttttgactctcttattaaagtctttggaaagcatagtaaagtctgaagtatttcctgtatcaaaaacgctggtcctcatggaaattacaattaaaggacttcctcagaaagtattaggttcaccagcatatcaggttgctaatatggatattcttaatggaactccagctttgttcttaattcaattaattttcaacaatttcttggaatgtggtgtatcagatgaaaggttctttctcagtttggaatcacttgtaggctgtgttctttctggtccaacttcaccactagctttcagtgactcagttttaaatgttattaatcaaaatgcaaagcagttggaaaataaggagcatctctggaaaatgtggagtgttatagtcaccccattaactgaattgattaatcagaccaatgaagtaaatcaaggtgatgccttagaacataattttagtgccatctatggtgcattgactttaccagtaaaccacattttttcagaacagagatttccagtggccaccatgaagactttgcttagaacttggtcagaattatatagagcatttgctcgttgtgctgctttggtggcaacagcagaagagaacttgtgctgtgaggaactttcttccaagataatgtccagtttggaagatgaaggcttttctaatttgttgttcgtggatagaattatttatattattactgtaatggttgattgcattgacttctcaccatataatattaaatatcagcccaaagttaaatcaccacagagaccttcagattggtccaaaaagaagaatgagcccctagggaaattgacttctttatttaaacttattgtgaaagtgatctattctttccacacactgagcttcaaggaagcacattctgataccctcttcactattggcaactcaatcaccggcattatttccagtgtacttgggcatatttctttgccttctatgatccgaaaaatatttgcaactttaacaagacctctggcattattttatgaaaactcaaagcttgatgaagttcctaaagtatatagttgtctgaacaacaagttagaaaagctactgggagaaattattgcttgtctgcaattcagctacaccggaacttatgatagtgaacttcttgaacaactctccccactattatgcataatatttctgcacaagaataaacagattcgaaaacagagtgctcagttctggaatgccacttttgccaaagtgatgatgttggtttatcctgaagagttaaaaccagtactaacacaagccaaacaaaaatttctgctcctgttgcctggtttggaaactgttgaaatgatggaggaatccagtggaccatattctgatggaacagaaaattcacaactaaatgtgaagataagtggcatggagagaaaatcaaatggaaaaagagattcatttttggcacaaacaaagaataaaaaagaaaatatgaaaccagcagccaaactgaaacttgaatcttcgtctttaaaagtaaagggtgaaattcttttggaagaggaaaagtctactgactttgtgtttatacctccagaaggaaaagatgcaaaggaaagaatattaactgatcatcaaaaagaagttctcaaaacaaagcggtgtgatattcctgccatgtataataatctggatgtttcccaagataccttatttactcagtatagtcaggaagagcctatggaaattcctactttaaccagaaaaccaaaggaggattctaagatgatgattacggaggagcaaatggacagtgacattgtcattcctcaagatgtcacggaagactgtggtatggctgaacatcttgaaaagtcctccctttcgaataatgagtgtggttctcttgacaaaaccagtccagaaatgtcaaacagtaataatgatgaaagaaaaaaagctttaatttcatcaaggaaaacatcaactgaatgtgcatctagtacagaaaattctttcgttgtcagcagtagttcagtttctaataccactgttgctggaactcccccataccctacaagtcggaggcaaacctttattactttggagaagtttgatggttcagaaaatagaccttttagtccatcccccttgaataatatttcatcaactgttacagtgaaaaataaccaggaaaccatgattaaaacagattttctaccaaaagcaaagcaaagagaagggactttttcaaaatctgattctgaaaaaatagtgaatggaactaagagatcaagccggagagctggtaaagctgaacaaacagggaataaaaggtctaagcccttaatgagatctgagccggagaaaaatactgaggaatctgttgaaggcattgtagtcttagaaaataacccacctggtttgcttaatcaaacagaatgtgtgtcagataatcaggttcatctttctgaatctacaatggagcatgacaatacaaagcttaaagcagcaacagtggaaaatgctgtattattggaaactaatactgtagaggagaaaaatgtagaaattaatttggaatccaaagagaatacacccccagtagtaatatcagcagatcaaatggtaaatgaggatagtcaggttcagataactccaaatcagaaaacccttagacggtcttcaaggcgacgttcagaagtagtagagtctaccactgaaagccaagataaggaaaatagtcatcaaaaaaaggaacgacgtaaggaagaagaaaaacctcttcagaagagtccattgcatataaaagatgatgtgttacctaaacaaaaactgattgctgaacaaactctacaggagaatttaattgagaaaggaagtaatttacatgagaagactcttggggaaactagtgctaatgcagaaactgaacaaaataaaaaaaaggcagaccctgagaacattaagtctgagggggatggtacccaggacattgtagataagtcctctgagaaactagtcagaggccgaacacggtatcaaactagaagagcatctcagggtttgctttccagcattgaaaactcagaatctgatagttcggaggcaaaagaagaaggttctaggaagaagagatctggaaaatggaaaaacaaaagcaatgaaagtgttgacattcaagatcaagaagagaaagtggtgaaacaggaatgtataaaagctgaaaatcagtcacatgattataaagcaacttctgaagaagatgtaagcataaaatctccgatttgcgaaaaacaagatgaaagtaatactgtaatatgtcaggattctacagtaacttcagatttgttgcaagttcctgatgatttaccaaatgtgtgtgaggaaaaaaatgaaactagcaaatatgcagaatattcctttacaagtctacctgtgccagaatcaaatctaaggactagaaatgccattaagagattacataagcgagactcttttgataattgtagtttgggagaatcctcaaaaatagggatatcagatatttcttcgctttcagaaaaaacttttcaaacacttgaatgccaacacaagagaagtaggagggtgaggagatctaaaggttgtgattgctgtggggaaaaatcacaacctcaggaaaagtcactcattgggttaaagaatacagaaaataatgacgtagagattagtgaaacaaaaaaggcagatgtgcaagcacctgtaagcccatcagaaacttctcaagctaatccatattctgaaggacaatttttagatgaacatcatagtgtgaattttcatttgggtctcaaagaggataatgatactattaatgattcattaattgtttctgaaaccaaatcaaaagaaaacactatgcaagaatctcttccttctggaatagtaaactttagagaggaaatttgtgatatggattctagtgaagcaatgtctcttgaaagccaggagtcacctaatgaaaattttaaaactgttggcccgtgtttaggagactcgaaaaatgtttcacaggaatctttggagacaaaagaagaaaaaccagaagaaaccccaaaaatggaactgagtctagagaatgttactgttgaaggaaatgcatgtaaagtaacagaatccaatctagagaaagcaaaaactatggaattgaatgtaggaaatgaagctagctttcatggacaagagagaaccaaaactggtatttctgaagaagcagcaatagaagaaaataaaagaaatgatgactctgaagcagacacagctaaactgaatgccaaagaagtagcaactgaggaatttaattcagatattagtctttctgataatactacacctgtaaaattgaatgctcaaactgagatttctgaacaaacagcagctggggaactagatggaggaaatgatgtatctgatctacactcatctgaagaaacgaataccaaaatgaaaaataatgaagaaatgatgatcggcgaggcaatggctgaaactggccatgatggtgaaacagagaatgagggcataactaccaaaacctcaaagcctgatgaagctgaaacaaacatgttgactgcagaaatggacaactttgtttgtgacacagttgaaatgagcactgaagaaggaatcattgacgctaataaaactgaaacaaatactgagtatagtaaatctgaagaaaaattagataacaatcaaatggtaatggaaagtgatattttacaggaagatcaccatacttcacagaaagtggaggaaccatcacagtgtctggcatctggaacagctatctctgagctaataatagaagacaataatgcatctcctcaaaaactaagggaacttgatccttcacttgtgtcagcaaatgacagtcctagtggcatgcagacacgctgtgtctggtctcctttggcttctccgtctacgagcattttaaagagaggactaaaaagatcccaagaagatgaaatctcatcacctgttaataaggttcgccgtgtctcctttgcagatccaatataccaagcaggattggcagatgacattgatagacggtgctctattgttaggtcccattcttccaatagttctcccataggaaaaagtgttaaaacttctcctactacacaatctaagatttcagaaatggccaaagaatccataccatgcccaacagaaagtgtttacccaccattggtgaactgtgtggcaccagttgacatcattttacctcagattacatcaaacatgtgggcaagaggcctgggacaactcattagagctaagaatataaaaactattggtgatttgagtactcttacagcatctgaaataaaaactcttcctatccgttctccaaaagtgtccaatgtaaaaaaggctctcagaatatatcatgagcagcaggtgaagactcgtggactagaagagattccagtttttgatatttctgaaaaaacagtaaatggaatagaaaataaatctttgtcacctgatgaagaaagacttgtctcagatataattgatcctgttgctttagaaattccattatccaaaaaccttctggcacagattagtgctcttgctcttcagctggattcagaagatcttcataattattcaggaagccaactatttgaaatgcacgagaaactaagttgtatggcaaactctgtaataaaaaatctacagtcacgttggagatcaccatcccatgaaaattctatttagtattttcagagaaaattgaaggtttttttaaacatcactggatttcttgattgaggaaacaagttctgaaataatagcacaatttcaaagaagagactctttgcaaagttgataacatttcaaaccctgaaggacagtgacttattatgtaagttcaattttgtaagttcattatgtaagatccttttttttttcataatatgtattcttggctgctatgcgtggtttttcaggaaatttaattatcttactgagatgtgaaagcaaaactagtaacagaacttacattttatttcatgctttcttaaacccgtgca

SEQ ID NO: 69929 - DNA, 7992 bp, Artificial Sequence
  derived and/or modified sequence
ccctccgccccctcgcggcgagatgcctcgttccccgggcttctcccgccctccgccgatctcctccctctgttgaaagctgcccgggaaagtggtggcgggagcgggcccaggcccgaatgtggcgtgggctcaggtgtctggtgtcgggcgccggaggaggttcgcgctggggtttggtgattcggaggcctggggtgcagacgcggcgtggctgtgaggcccgggcgggcgtgcgggtgtgagggccggactcacactgggccgccgcggggctgtttccatcggtcactggattttctcctcttccggttcgggcctcagggtggccgacatgacggccaggggtcagagccccctcgcgccgctgttggagactttggaagacccttctgcctcccatggagggcagactgacgcttacctgactctgaccagtcgtatgactggagaagaaggaaaagaagtaattacagaaattgagaaaaaacttcctcggctgtacaaagttttaaagactcacatttccagtcaaaactcggagctgagtagtgctgctctacaagccctggggttttgcttatataatcccaaaattacctcagaattatcagaggcaaatgctctagaattgctttcaaaattgaatgataccattaagaattcagacaaaaatgtacgtactagagcactttgggtgatatctaagcagacatttccctctgaagtggttggcaaaatggtatccagtataattgattcattagaaatactgtttaacaaaggagagacgcattctgctgttgttgattttgaagcattaaatgttatcgtaaggctaattgaacaagccccaattcaaatgggagaagaggcagtgaggtgggcaaaactggtcatacctttagtggttcattcagcacaaaaggtacatttgcggggagcaactgctctggagatgggaatgccattattgcttcagaaacagcaagaaatagcatctattacggagcagcttatgactactaaattaatctcagaacttcagaagctatttatgagtaaaaatgagacttacgtgttaaaattatggcctttgtttgtcaaactacttggaaggaccttgcatcgaagtgggagtttcatcaattctctcttgcaactagaagaacttggatttcgtagtggagcacccatgattaaaaagatagcttttattgcttggaagagtttaatagataattttgctttaaatccagatatactatgtagtgcaaaaagactcaagttgttaatgcagcctttgagttccatccatgtgagaacagaaactctagcattaacaaaactagaagtctggtggtatttactgatgagacttggacctcatcttcctgctaattttgaacaggtttgtgtgcctctgattcaaagtacaataagcattgattctaatgcctcacctcagggcaattcgtgtcatgtagctacatctccaggtttaaatcctatgactcctgtacacaaaggtgcttcctccccgtacggagccccgggaactccccgaatgaacctgagttcgaatttaggtggaatggccacaatcccatccattcaacttttgggacttgaaatgttgcttcatttcttgttgggtccagaagccttgagttttgctaagcaaaataaacttgtgctgagcttagagccattggaacatccgttaatcagcagcccttcctttttttccaaacatgcaaatacacttatcactgctgttcatgatagctttgttgcagttggaaaagatgcccccgatgtggttgtcagtgctatctggaaggagctaattagcttggtgaagtcagttactgaatcaggtaacaaaaaagagaaaccaggttctgaagttttgactctcttattaaagtctttggaaagcatagtaaagtctgaagtatttcctgtatcaaaaacgctggtcctcatggaaattacaattaaaggacttcctcagaaagtattaggttcaccagcatatcaggttgctaatatggatattcttaatggaactccagctttgttcttaattcaattaattttcaacaatttcttggaatgtggtgtatcagatgaaaggttctttctcagtttggaatcacttgtaggctgtgttctttctggtccaacttcaccactagctttcagtgactcagttttaaatgttattaatcaaaatgcaaagcagttggaaaataaggagcatctctggaaaatgtggagtgttatagtcaccccattaactgaattgattaatcagaccaatgaagtaaatcaaggtgatgccttagaacataattttagtgccatctatggtgcattgactttaccagtaaaccacattttttcagaacagagatttccagtggccaccatgaagactttgcttagaacttggtcagaattatatagagcatttgctcgttgtgctgctttggtggcaacagcagaagagaacttgtgctgtgaggaactttcttccaagataatgtccagtttggaagatgaaggcttttctaatttgttgttcgtggatagaattatttatattattactgtaatggttgattgcattgacttctcaccatataatattaaatatcagcccaaagttaaatcaccacagagaccttcagattggtccaaaaagaagaatgagcccctagggaaattgacttctttatttaaacttattgtgaaagtgatctattctttccacacactgagcttcaaggaagcacattctgataccctcttcactattggcaactcaatcaccggcattatttccagtgtacttgggcatatttctttgccttctatgatccgaaaaatatttgcaactttaacaagacctctggcattattttatgaaaactcaaagcttgatgaagttcctaaagtatatagttgtctgaacaacaagttagaaaagctactgggagaaattattgcttgtctgcaattcagctacaccggaacttatgatagtgaacttcttgaacaactctccccactattatgcataatatttctgcacaagaataaacagattcgaaaacagagtgctcagttctggaatgccacttttgccaaagtgatgatgttggtttatcctgaagagttaaaaccagtactaacacaagccaaacaaaaatttctgctcctgttgcctggtttggaaactgttgaaatgatggaggaatccagtggaccatattctgatggaacagaaaattcacaactaaatgtgaagataagtggcatggagagaaaatcaaatggaaaaagagattcatttttggcacaaacaaagaataaaaaagaaaatatgaaaccagcagccaaactgaaacttgaatcttcgtctttaaaagtaaagggtgaaattcttttggaagaggaaaagtctactgactttgtgtttatacctccagaaggaaaagatgcaaaggaaagaatattaactgatcatcaaaaagaagttctcaaaacaaagcggtgtgatattcctgccatgtataataatctggatgtttcccaagataccttatttactcagtatagtcaggaagagcctatggaaattcctactttaaccagaaaaccaaaggaggattctaagatgatgattacggaggagcaaatggacagtgacattgtcattcctcaagatgtcacggaagactgtggtatggctgaacatcttgaaaagtcctccctttcgaataatgagtgtggttctcttgacaaaaccagtccagaaatgtcaaacagtaataatgatgaaagaaaaaaagctttaatttcatcaaggaaaacatcaactgaatgtgcatctagtacagaaaattctttcgttgtcagcagtagttcagtttctaataccactgttgctggaactcccccataccctacaagtcggaggcaaacctttattactttggagaagtttgatggttcagaaaatagaccttttagtccatcccccttgaataatatttcatcaactgttacagtgaaaaataaccaggaaaccatgattaaaacagattttctaccaaaagcaaagcaaagagaagggactttttcaaaatctgattctgaaaaaatagtgaatggaactaagagatcaagccggagagctggtaaagctgaacaaacagggaataaaaggtctaagcccttaatgagatctgagccggagaaaaatactgaggaatctgttgaaggcattgtagtcttagaaaataacccacctggtttgcttaatcaaacagaatgtgtgtcagataatcaggttcatctttctgaatctacaatggagcatgacaatacaaagcttaaagcagcaacagtggaaaatgctgtattattggaaactaatactgtagaggagaaaaatgtagaaattaatttggaatccaaagagaatacacccccagtagtaatatcagcagatcaaatggtaaatgaggatagtcaggttcagataactccaaatcagaaaacccttagacggtcttcaaggcgacgttcagaagtagtagagtctaccactgaaagccaagataaggaaaatagtcatcaaaaaaaggaacgacgtaaggaagaagaaaaacctcttcagaagagtccattgcatataaaagatgatgtgttacctaaacaaaaactgattgctgaacaaactctacaggagaatttaattgagaaaggaagtaatttacatgagaagactcttggggaaactagtgctaatgcagaaactgaacaaaataaaaaaaaggcagaccctgagaacattaagtctgagggggatggtacccaggacattgtagataagtcctctgagaaactagtcagaggccgaacacggtatcaaactagaagagcatctcagggtttgctttccagcattgaaaactcagaatctgatagttcggaggcaaaagaagaaggttctaggaagaagagatctggaaaatggaaaaacaaaagcaatgaaagtgttgacattcaagatcaagaagagaaagtggtgaaacaggaatgtataaaagctgaaaatcagtcacatgattataaagcaacttctgaagaagatgtaagcataaaatctccgatttgcgaaaaacaagatgaaagtaatactgtaatatgtcaggattctacagtaacttcagatttgttgcaagttcctgatgatttaccaaatgtgtgtgaggaaaaaaatgaaactagcaaatatgcagaatattcctttacaagtctacctgtgccagaatcaaatctaaggactagaaatgccattaagagattacataagcgagactcttttgataattgtagtttgggagaatcctcaaaaatagggatatcagatatttcttcgctttcagaaaaaacttttcaaacacttgaatgccaacacaagagaagtaggagggtgaggagatctaaaggttgtgattgctgtggggaaaaatcacaacctcaggaaaagtcactcattgggttaaagaatacagaaaataatgacgtagagattagtgaaacaaaaaaggcagatgtgcaagcacctgtaagcccatcagaaacttctcaagctaatccatattctgaaggacaatttttagatgaacatcatagtgtgaattttcatttgggtctcaaagaggataatgatactattaatgattcattaattgtttctgaaaccaaatcaaaagaaaacactatgcaagaatctcttccttctggaatagtaaactttagagaggaaatttgtgatatggattctagtgaagcaatgtctcttgaaagccaggagtcacctaatgaaaattttaaaactgttggcccgtgtttaggagactcgaaaaatgtttcacaggaatctttggagacaaaagaagaaaaaccagaagaaaccccaaaaatggaactgagtctagagaatgttactgttgaaggaaatgcatgtaaagtaacagaatccaatctagagaaagcaaaaactatggaattgaatgtaggaaatgaagctagctttcatggacaagagagaaccaaaactggtatttctgaagaagcagcaatagaagaaaataaaagaaatgatgactctgaagcagacacagctaaactgaatgccaaagaagtagcaactgaggaatttaattcagatattagtctttctgataatactacacctgtaaaattgaatgctcaaactgagatttctgaacaaacagcagctggggaactagatggaggaaatgatgtatctgatctacactcatctgaagaaacgaataccaaaatgaaaaataatgaagaaatgatgatcggcgaggcaatggctgaaactggccatgatggtgaaacagagaatgagggcataactaccaaaacctcaaagcctgatgaagctgaaacaaacatgttgactgcagaaatggacaactttgtttgtgacacagttgaaatgagcactgaagaaggaatcattgacgctaataaaactgaaacaaatactgagtatagtaaatctgaagaaaaattagataacaatcaaatggtaatggaaagtgatattttacaggaagatcaccatacttcacagaaagtggaggaaccatcacagtgtctggcatctggaacagctatctctgagctaataatagaagacaataatgcatctcctcaaaaactaagggaacttgatccttcacttgtgtcagcaaatgacagtcctagtggcatgcagacacgctgtgtctggtctcctttggcttctccgtctacgagcattttaaagagaggactaaaaagatcccaagaagatgaaatctcatcacctgttaataaggttcgccgtgtctcctttgcagatccaatataccaagcaggattggcagatgacattgatagacggtgctctattgttaggtcccattcttccaatagttctcccataggaaaaagtgttaaaacttctcctactacacaatctaagatttcagaaatggccaaagaatccataccatgcccaacagaaagtgtttacccaccattggtgaactgtgtggcaccagttgacatcattttacctcagattacatcaaacatgtgggcaagaggcctgggacaactcattagagctaagaatataaaaactattggtgatttgagtactcttacagcatctgaaataaaaactcttcctatccgttctccaaaagtgtccaatgtaaaaaaggctctcagaatatatcatgagcagcaggtgaagactcgtggactagaagagattccagtttttgatatttctgaaaaaacagtaaatggaatagaaaataaatctttgtcacctgatgaagaaagacttgtctcagatataattgatcctgttgctttagaaattccattatccaaaaaccttctggcacagattagtgctcttgctcttcagctggattcagaagatcttcataattattcaggaagccaactatttgaaatgcacgagaaactaagttgtatggcaaactctgtaataaaaaatctacagtcacgttggagatcaccatcccatgaaaattctatttagtattttcagagaaaattgaaggtttttttaaacatcactggatttcttgattgaggaaacaagttctgaaataatagcacaatttcaaagaagagactctttgcaaagttgataacatttcaaaccctgaaggacagtgacttattatgtaagttcaattttgtaagttcattatgtaagatccttttttttttcataatatgtattcttggctgctatgcgtggtttttcaggaaatttaattatcttactgagatgtgaaagcaaaactagtaacagaacttacattttatttcatgctttcttaaacccgtgca

SEQ ID NO: 69930 - DNA, 8053 bp, Artificial Sequence
  derived and/or modified sequence
cgcactcctgggcccgcccagccgccatcttggtctaggagggagcgcgccgcacgcgtgagtaaacagccggagctgggaaagtcgagctctggcagcgtctgggtgctgaggggcagaggcggagagaaccctgtcctgatcttcctagggtggccgacatgacggccaggggtcagagccccctcgcgccgctgttggagactttggaagacccttctgcctcccatggagggcagactgacgcttacctgactctgaccagtcgtatgactggagaagaaggaaaagaagtaattacagaaattgagaaaaaacttcctcggctgtacaaagttttaaagactcacatttccagtcaaaactcggagctgagtagtgctgctctacaagccctggggttttgcttatataatcccaaaattacctcagaattatcagaggcaaatgctctagaattgctttcaaaattgaatgataccattaagaattcagacaaaaatgtacgtactagagcactttgggtgatatctaagcagacatttccctctgaagtggttggcaaaatggtatccagtataattgattcattagaaatactgtttaacaaaggagagacgcattctgctgttgttgattttgaagcattaaatgttatcgtaaggctaattgaacaagccccaattcaaatgggagaagaggcagtgaggtgggcaaaactggtcatacctttagtggttcattcagcacaaaaggtacatttgcggggagcaactgctctggagatgggaatgccattattgcttcagaaacagcaagaaatagcatctattacggagcagcttatgactactaaattaatctcagaacttcagaagctatttatgagtaaaaatgagacttacgtgttaaaattatggcctttgtttgtcaaactacttggaaggaccttgcatcgaagtgggagtttcatcaattctctcttgcaactagaagaacttggatttcgtagtggagcacccatgattaaaaagatagcttttattgcttggaagagtttaatagataattttgctttaaatccagatatactatgtagtgcaaaaagactcaagttgttaatgcagcctttgagttccatccatgtgagaacagaaactctagcattaacaaaactagaagtctggtggtatttactgatgagacttggacctcatcttcctgctaattttgaacaggtttgtgtgcctctgattcaaagtacaataagcattgattctaatgcctcacctcagggcaattcgtgtcatgtagctacatctccaggtttaaatcctatgactcctgtacacaaaggtgcttcctccccgtacggagccccgggaactccccgaatgaacctgagttcgaatttaggtggaatggccacaatcccatccattcaacttttgggacttgaaatgttgcttcatttcttgttgggtccagaagccttgagttttgctaagcaaaataaacttgtgctgagcttagagccattggaacatccgttaatcagcagcccttcctttttttccaaacatgcaaatacacttatcactgctgttcatgatagctttgttgcagttggaaaagatgcccccgatgtggttgtcagtgctatctggaaggagctaattagcttggtgaagtcagttactgaatcaggtaacaaaaaagagaaaccaggttctgaagttttgactctcttattaaagtctttggaaagcatagtaaagtctgaagtatttcctgtatcaaaaacgctggtcctcatggaaattacaattaaaggacttcctcagaaagtattaggttcaccagcatatcaggttgctaatatggatattcttaatggaactccagctttgttcttaattcaattaattttcaacaatttcttggaatgtggtgtatcagatgaaaggttctttctcagtttggaatcacttgtaggctgtgttctttctggtccaacttcaccactagctttcagtgactcagttttaaatgttattaatcaaaatgcaaagcagttggaaaataaggagcatctctggaaaatgtggagtgttatagtcaccccattaactgaattgattaatcagaccaatgaagtaaatcaaggtgatgccttagaacataattttagtgccatctatggtgcattgactttaccagtaaaccacattttttcagaacagagatttccagtggccaccatgaagactttgcttagaacttggtcagaattatatagagcatttgctcgttgtgctgctttggtggcaacagcagaagagaacttgtgctgtgaggaactttcttccaagataatgtccagtttggaagatgaaggcttttctaatttgttgttcgtggatagaattatttatattattactgtaatggttgattgcattgacttctcaccatataatattaaatatcagcccaaagttaaatcaccacagagaccttcagattggtccaaaaagaagaatgagcccctagggaaattgacttctttatttaaacttattgtgaaagtgatctattctttccacacactgagcttcaaggaagcacattctgataccctcttcactattggcaactcaatcaccggcattatttccagtgtacttgggcatatttctttgccttctatgatccgaaaaatatttgcaactttaacaagacctctggcattattttatgaaaactcaaagcttgatgaagttcctaaagtatatagttgtctgaacaacaagttagaaaagctactgggagaaattattgcttgtctgcaattcagctacaccggaacttatgatagtgaacttcttgaacaactctccccactattatgcataatatttctgcacaagaataaacagattcgaaaacagagtgctcagttctggaatgccacttttgccaaagtgatgatgttggtttatcctgaagagttaaaaccagtactaacacaagccaaacaaaaatttctgctcctgttgcctggtttggaaactgttgaaatgatggaggaatccagtggaccatattctgatggaacagaaaattcacaactaaatgtgaagataagtggcatggagagaaaatcaaatggaaaaagagattcatttttggcacaaacaaagaataaaaaagaaaatatgaaaccagcagccaaactgaaacttgaatcttcgtctttaaaagtaaagggtgaaattcttttggaagaggaaaagtctactgactttgtgtttatacctccagaaggaaaagatgcaaaggaaagaatattaactgatcatcaaaaagaagttctcaaaacaaagcggtgtgatattcctgccatgtataataatctggatgtttcccaagataccttatttactcagtatagtcaggaagagcctatggaaattcctactttaaccagaaaaccaaaggaggattctaagatgatgattacggaggagcaaatggacagtgacattgtcattcctcaagatgtcacggaagactgtggtatggctgaacatcttgaaaagtcctccctttcgaataatgagtgtggttctcttgacaaaaccagtccagaaatgtcaaacagtaataatgatgaaagaaaaaaagctttaatttcatcaaggaaaacatcaactgaatgtgcatctagtacagaaaattctttcgttgtcagcagtagttcagtttctaataccactgttgctggaactcccccataccctacaagtcggaggcaaacctttattactttggagaagtttgatggttcagaaaatagaccttttagtccatcccccttgaataatatttcatcaactgttacagtgaaaaataaccaggaaaccatgattaaaacagattttctaccaaaagcaaagcaaagagaagggactttttcaaaatctgattctgaaaaaatagtgaatggaactaagagatcaagccggagagctggtaaagctgaacaaacagggaataaaaggtctaagcccttaatgagatctgagccggagaaaaatactgaggaatctgttgaaggcattgtagtcttagaaaataacccacctggtttgcttaatcaaacagaatgtgtgtcagataatcaggttcatctttctgaatctacaatggagcatgacaatacaaagcttaaagcagcaacagtggaaaatgctgtattattggaaactaatactgtagaggagaaaaatgtagaaattaatttggaatccaaagagaatacacccccagtagtaatatcagcagatcaaatggtaaatgaggatagtcaggttcagataactccaaatcagaaaacccttagacggtcttcaaggcgacgttcagaagtagtagagtctaccactgaaagccaagataaggaaaatagtcatcaaaaaaaggaacgacgtaaggaagaagaaaaacctcttcagaagagtccattgcatataaaagatgatgtgttacctaaacaaaaactgattgctgaacaaactctacaggagaatttaattgagaaaggaagtaatttacatgagaagactcttggggaaactagtgctaatgcagaaactgaacaaaataaaaaaaaggcagaccctgagaacattaagtctgagggggatggtacccaggacattgtagataagtcctctgagaaactagtcagaggccgaacacggtatcaaactagaagagcatctcagggtttgctttccagcattgaaaactcagaatctgatagttcggaggcaaaagaagaaggttctaggaagaagagatctggaaaatggaaaaacaaaagcaatgaaagtgttgacattcaagatcaagaagagaaagtggtgaaacaggaatgtataaaagctgaaaatcagtcacatgattataaagcaacttctgaagaagatgtaagcataaaatctccgatttgcgaaaaacaagatgaaagtaatactgtaatatgtcaggattctacagtaacttcagatttgttgcaagttcctgatgatttaccaaatgtgtgtgaggaaaaaaatgaaactagcaaatatgcagaatattcctttacaagtctacctgtgccagaatcaaatctaaggactagaaatgccattaagagattacataagcgagactcttttgataattgtagtttgggagaatcctcaaaaatagggatatcagatatttcttcgctttcagaaaaaacttttcaaacacttgaatgccaacacaagagaagtaggagggtgaggagatctaaaggttgtgattgctgtggggaaaaatcacaacctcaggaaaagtcactcattgggttaaagaatacagaaaataatgacgtagagattagtgaaacaaaaaaggcagatgtgcaagcacctgtaagcccatcagaaacttctcaagctaatccatattctgaaggacaatttttagatgaacatcatagtgtgaattttcatttgggtctcaaagaggataatgatactattaatgattcattaattgtttctgaaaccaaatcaaaagaaaacactatgcaagaatctcttccttctggaatagtaaactttagagaggaaatttgtgatatggattctagtgaagcaatgtctcttgaaagccaggagtcacctaatgaaaattttaaaactgttggcccgtgtttaggagactcgaaaaatgtttcacaggaatctttggagacaaaagaagaaaaaccagaagaaaccccaaaaatggaactgagtctagagaatgttactgttgaaggaaatgcatgtaaagtaacagaatccaatctagagaaagcaaaaactatggaattgaatgtaggaaatgaagctagctttcatggacaagagagaaccaaaactggtatttctgaagaagcagcaatagaagaaaataaaagaaatgatgactctgaagcagacacagctaaactgaatgccaaagaagtagcaactgaggaatttaattcagatattagtctttctgataatactacacctgtaaaattgaatgctcaaactgagatttctgaacaaacagcagctggggaactagatggaggaaatgatgtatctgatctacactcatctgaagaaacgaataccaaaatgaaaaataatgaagaaatgatgatcggcgaggcaatggctgaaactggccatgatggtgaaacagagaatgagggcataactaccaaaacctcaaagcctgatgaagctgaaacaaacatgttgactgcagaaatggacaactttgtttgtgacacagttgaaatgagcactgaagaaggaatcattgacgctaataaaactgaaacaaatactgagtatagtaaatctgaagaaaaattagataacaatcaaatggtaatggaaagtgatattttacaggaagatcaccatacttcacagaaagtggaggaaccatcacagtgtctggcatctggaacagctatctctgagctaataatagaagacaataatgcatctcctcaaaaactaagggaacttgatccttcacttgtgtcagcaaatgacagtcctagtggcatgcagacacgctgtgtctggtctcctttggcttctccgtctacgagcattttaaagagaggactaaaaagatcccaagaagatgaaatctcatcacctgttaataaggttcgccgtgtctcctttgcagatccaatataccaagcaggattggcagatgacattgatagacggtgctctattgttaggtcccattcttccaatagttctcccataggaaaaagtgttaaaacttctcctactacacaatctaagatttcagaaatggccaaagaatccataccatgcccaacagaaagtgtttacccaccattggtgaactgtgtggcaccagttgacatcattttacctcagattacatcaaacatgtgggcaagaggcctgggacaactcattagagctaagaatataaaaactattggtgatttgagtactcttacagcatctgaaataaaaactcttcctatccgttctccaaaagtgtccaatgtaaaaaaggctctcagaatatatcatgagcagcaggtgaagactcgtggactagaagagattccagtttttgatatttctgaaaaaacagtaaatggaatagaaaataaatctttgtcacctgatgaagaaagacttgtctcagatataattgatcctgttgctttagaaattccattatccaaaaaccttctggcacagattagtgctcttgctcttcagctggattcagaagatcttcataattattcaggaagccaactatttgaaatgcacgagaaactaagttgtatggcaaactctgtaataaaaaatctacagtcacgttggagatcaccatcccatgaaaattctatttagtattttcagagaaaattgaaggtttttttaaacatcactggatttcttgattgaggaaacaagttctgaaataatagcacaatttcaaagaagagactctttgcaaagttgataacatttcaaaccctgaaggacagtgacttattatgtaagttcaattttgtaagttcattatgtaagatccttttttttttcataatatgtattcttggctgctatgcgtggtttttcaggaaatttaattatcttactgagatgtgaaagcaaaactagtaacagaacttacattttatttcatgctttcttaaacccgtgcatattctggtgaaacatgtaaaatactttaagtaaaattgaacatttttatttgaatttttgctgaactgataaaggtgtttatatttttgtttgttggtttgtttaattcatgtttgttgggactgaggtttaggaagtttgttactggttaaaaacctcaaatgaaatgcgaaagaatttgaatttttcctgcatatgtcaactttggacagctttcaagaaaaatgagaaaa

SEQ ID NO: 69931 - protein, 315 aa, Artificial Sequence
  derived and/or modified sequence
MGFLEEEGRWNLSFSGAGYLGAHHVGATECLRQRAPRLLQGARRIYGSSSGALNAVSIVCGKSVDCPSTITVSPFHGTVDICPQSTSPNLHELNVFNFSFQISTENFFLGLICLIPPSLEVVADNCRQGYLDALRFLERRGLTKEPVLWTLVSKEPPAPADGNWDAGCDQRWKGGLSLNWKVPHVQVKDVPNFEQLSPELEAALKKACTRDPSRWARFWHSGPGQVLTYLLLPCTLPFEYIYFRSRRLVVWLPDVPADLWWMQGLLRNMALEVFSRTKAQLLGPISPPATRVLETSPLQPQIAPHREELGPTHQA

SEQ ID NO: 69932 - protein, 268 aa, Artificial Sequence
  derived and/or modified sequence
MGFLEEEGRWNLSFSGAGYLGAHHVGATECLRQRAPRLLQGARRIYGSSSGALNAVSIVCGKSVDFCCSHLLGMVGQLERLSLSILHPAYAPIEHVKQQLQDALPPDAHVLASQRLGISLTRWPDGRNFLVTDFATCDELIQVVADNCRQGYLDALRFLERRGLTKEPVLWTLVSKEPPAPADGNWDAGCDQRWKGGLSLNWKVPHVQVKDVPNFEQLSPELEAALKKACTRDPSRWARFWHSGPGQVLTYLLLPCTLPFEYIYFRSR

SEQ ID NO: 69933 - DNA, 948 bp, Artificial Sequence
  derived and/or modified sequence
atggggtttctggaggaagagggcaggtggaatctctccttctcaggggctgggtacctgggtgctcaccatgttggggctaccgagtgcctccggcaaagggcacctagactcctccagggggcgaggaggatttacggaagcagttcgggtgccttgaacgccgtgtccatagtgtgcggaaagtcggtggattgcccaagtaccataacagtgagtccttttcacggcaccgtggatatctgtcctcagagcacctcaccaaacctgcacgagctgaacgtattcaacttctcattccagatctcaaccgaaaatttcttcctggggctgatttgtcttattcccccgagcctggaagtggtcgcagataattgtcggcagggctatctggatgctttaaggtttttggagcgtagagggttaacaaaagagcctgttctgtggactctcgtgtccaaggagcctccggcgccagcagatgggaattgggacgccggctgcgaccagcgctggaaggggggcctgtctctgaactggaaggtgccgcacgtccaggtgaaggatgtgcccaactttgaacaactctctccagagctcgaagcagcactcaagaaagcatgtactagagatccctcaaggtgggctaggttttggcactcgggtcctggccaggttctcacatatctgctactcccgtgtactctcccatttgagtacatctactttcggtcaaggaggctcgtagtgtggctgcctgatgtgcctgctgacctttggtggatgcagggactactgcgcaacatggccctagaagtgttctctaggacaaaggcacagttactaggtcccatcagcccacctgctacccgcgtcctcgaaaccagccccctccagccacagattgcccctcacagggaggagcttgggcctacccaccaggcttag

SEQ ID NO: 69934 - DNA, 807 bp, Artificial Sequence
  derived and/or modified sequence
atgggctttcttgaggaagagggcaggtggaacctaagtttctccggggccggctatttgggagcccaccatgtgggtgccaccgagtgtctgcgtcagagggcaccccggctccttcaaggcgctagaaggatttacggcagcagcagtggtgcactgaatgctgtctctatagtatgcggcaagtcggtggatttctgttgctcccacctcctgggcatggtcggtcagttggaacggctgtcactcagcatactccatcctgcttacgcccccatcgaacacgtaaaacagcagctccaggatgccctgccgccggacgcgcacgtcctggctagtcagcggttgggtatatccctgactagatggcccgacggtaggaactttttagttactgattttgcaacctgtgacgaactcatacaagtagttgcagataactgtagacaggggtacctagacgccttgcgctttcttgagcgccgaggactcacaaaggagcctgttttgtggactctggtgtctaaagaaccaccagccccggccgacggcaactgggacgccggttgtgatcaacgctggaaagggggcctgagcctaaattggaaggtgccacacgtgcaggtcaaagacgtcccaaactttgaacagcttagtcccgaactcgaggccgcattgaagaaggcatgtacgcgggatccaagcagatgggctcgattttggcatagtgggcccgggcaggtccttacctacctgttgctgccctgcacactgccctttgagtatatctacttcagaagcagatag

SEQ ID NO: 69935 - DNA, 948 bp, Artificial Sequence
  derived and/or modified sequence
atgggttttctcgaggaggagggaagatggaatctgtcttttagcggggccgggtatctaggcgcccaccacgtcggggcgactgagtgcctgcgacagcgagcccctcggctgcttcaaggcgcccggagaatttacgggagcagtagcggggctcttaacgccgtgtccattgtatgtggcaagtcagtagactgtccttccacaataacagtgtcgccattccacgggacggtggacatatgtccccagtcaacctctccaaatctgcacgaactgaatgtcttcaattttagcttccaaatcagcacagagaacttcttcctcggccttatatgcctaatccctccgtcactggaggtggtggcagacaattgtcggcagggatatctggatgctctcagattcctggagaggagagggttgaccaaggagccagtcttgtggaccctcgttagcaaggaaccaccggctcctgctgacgggaactgggatgcagggtgtgatcagaggtggaagggaggcctctctctgaattggaaagtgccgcacgtacaagtcaaggacgttcccaatttcgagcaactcagcccagaactcgaggccgctctaaaaaaagcttgcactcgtgacccatcccgctgggctagattctggcatagtggccccgggcaagtgctgacctacctgctgttgccatgcacgctcccattcgagtacatttacttccgctcgcggcggttagtggtgtggctccctgatgtcccagcagatctgtggtggatgcagggcctgctgcgtaacatggccctggaagtgttttctcgcacgaaagcccagttgttggggccgatttcaccgccagctaccagagtgctggagactagccctcttcaaccacaaattgcacctcaccgcgaggagttgggcccaacacatcaggcctag

SEQ ID NO: 69936 - DNA, 948 bp, Artificial Sequence
  derived and/or modified sequence
atgggcttcctggaggaggagggccgctggaacctgtccttctctggagctggctacctgggcgcccaccacgtgggcgccacagaatgtctgcggcagagggccccccggctgctgcagggcgcccggcgcatctacggcagcagcagcggggccctgaatgctgtgtccatcgtgtgtgggaagtctgtggactgccccagcaccatcaccgtgagccccttccacggcaccgtggacatctgcccccagagcaccagccccaacctgcacgagctgaatgtgttcaacttctccttccagatcagcacagagaacttcttcctgggcctcatctgcctgatcccccccagcctggaggtggtggccgacaactgccggcagggctacctggatgccctgcgcttcctggagcggcggggcctgaccaaggagcctgtgctgtggaccctggtgtccaaggagcccccagccccagcagatggcaactgggatgctggctgtgaccagcgctggaagggcggcctgagcctgaactggaaggtgccccacgtgcaggtgaaggatgtgcccaactttgagcagctgagccctgagctggaggccgccctgaagaaggcctgcacccgggaccccagccgctgggcccgcttctggcacagcggccctggccaggtgctgacctacctgctgctgccctgcaccctgccctttgagtacatctacttccgcagccggcggctggtggtgtggctgcctgatgtgcctgctgacctgtggtggatgcagggcctgctgaggaacatggccctggaggtgttcagcaggaccaaggcccagctgctgggccccatcagccccccagccaccagggtgctggagaccagccccctgcagccccagatcgccccccaccgggaggagctgggccccacccaccaggcctag

SEQ ID NO: 69937 - DNA, 807 bp, Artificial Sequence
  derived and/or modified sequence
atgggcttcctggaggaggagggccgctggaacctgtccttctctggagctggctacctgggcgcccaccacgtgggcgccacagaatgtctgcggcagagggccccccggctgctgcagggcgcccggcgcatctacggcagcagcagcggggccctgaatgctgtgtccatcgtgtgtgggaagtctgtggacttctgctgcagccacctgctgggcatggtgggccagctggagcggctgagcctgagcatcctgcacccagcctatgcccccattgaacatgtgaagcagcagctgcaggatgccctgcccccagatgcccacgtgctggccagccagaggctgggcatcagcctgacccgctggccagatggaagaaacttcctggtgacagactttgccacctgtgatgagctgatccaggtggtggccgacaactgccggcagggctacctggatgccctgcgcttcctggagcggcggggcctgaccaaggagcctgtgctgtggaccctggtgtccaaggagcccccagccccagcagatggcaactgggatgctggctgtgaccagcgctggaagggcggcctgagcctgaactggaaggtgccccacgtgcaggtgaaggatgtgcccaactttgagcagctgagccctgagctggaggccgccctgaagaaggcctgcacccgggaccccagccgctgggcccgcttctggcacagcggccctggccaggtgctgacctacctgctgctgccctgcaccctgccctttgagtacatctacttccgcagcaggtag

SEQ ID NO: 69938 - DNA, 948 bp, Artificial Sequence
  derived and/or modified sequence
atgggcttcctggaggaggagggccggtggaacctgagcttcagcggtgcagggtatttaggggcacaccacgtgggagctaccgaatgtctgaggcagagggcgccacgcctgctgcagggggcacgcaggatatatggctcaagtagcggcgctctgaacgcagtttccatcgtgtgtggaaagagcgtagattgcccctcgacaattacagttagtccttttcacgggaccgtggacatatgccctcagtccaccagccctaatctgcatgaacttaatgtcttcaatttttccttccagatctcaacggagaatttcttcctaggcttgatctgtctgataccgccctcacttgaggtcgtcgctgataactgcagacagggctaccttgacgcactcagatttctggagagacgtggtctgacaaaggaacccgttctgtggacactggtatccaaggaaccccccgcgcccgccgatggtaattgggatgccgggtgtgaccagaggtggaaagggggtctgagcctgaactggaaggttcctcacgtgcaagtgaaagacgtcccaaatttcgagcagctgtcaccggagttagaggcagccctaaaaaaagcctgcacaagggaccctagtcggtgggctcgattttggcattccggacccggccaggtcctgacttacctcttgctgccgtgcacactgccctttgagtacatctacttccgctctcgccgcctggtagtttggttgcccgacgtgcccgccgatctctggtggatgcagggcctcctccgaaacatggcactagaggtattttcaaggaccaaggcgcaattattgggcccgatttcgcctcccgccacccgcgtccttgaaacaagtcccctacaaccgcaaatagctccgcacagagaagaacttggccctacccaccaggcatag

SEQ ID NO: 69939 - DNA, 807 bp, Artificial Sequence
  derived and/or modified sequence
atgggcttcctggaggaggagggccggtggaacctgagcttcagcggcgctgggtacttgggcgctcatcatgtaggggctactgagtgtctcaggcaacgagcacctcgcctcctgcagggagcccgaaggatttacggcagctctagcggagcattgaatgccgtatctatcgtgtgcgggaagtccgtcgacttctgctgttcccatctgctgggaatggtgggccagctggagagactaagcctgagcatcctgcatcctgcctatgctcccattgaacatgttaaacaacagctccaagatgccctgccccccgatgcgcatgtgctcgcctctcagcggctgggcatctccctaacacggtggcctgatggacgtaattttttggtgacagattttgccacctgtgatgaactgatccaagtggtggcagacaattgtcggcaaggttacctggatgcgctcaggtttctggagagaagaggtcttacgaaagagcctgtcctgtggacgctcgtttccaaagagcctcccgctccagctgatggaaactgggacgcaggctgcgatcagagatggaagggcgggctctccctcaattggaaagtccctcacgttcaggtcaaagatgtacctaatttcgagcagctctcacctgaacttgaggcagctctaaagaaggcatgtacaagggatccttctcgatgggcccggttctggcactccgggcctgggcaggttttaacctacctgctgctcccttgcactctgccctttgagtacatctactttcgcagccgctag

SEQ ID NO: 69940 - DNA, 948 bp, Artificial Sequence
  derived and/or modified sequence
atgggcttcctggaggaggagggccggtggaacctgagcttcagcggcgcaggttatttgggagcgcatcatgttggcgcaacggaatgcctgagacaaagagccccccgcctgctgcagggcgctaggcgcatctacgggtcttcctcaggcgcactgaacgcagtgtctatcgtctgcggtaagtccgtggattgccctagtaccattacagtgtcacccttccatggaacggtggatatctgtccccagtcaacctctcccaacctccatgaactcaacgtgtttaatttcagtttccaaatcagtactgagaatttctttttgggactaatctgcttaatccccccgtccctggaggtcgttgccgataattgccgacagggctatctggacgctctgcggttcctggagaggagaggactcacgaaagaaccagttctctggacccttgtcagtaaagaaccaccagctcctgcggacgggaattgggatgccgggtgcgaccaacggtggaaggggggcctgtcacttaattggaaggtgccccacgtgcaggtgaaagatgtcccaaacttcgagcagttatcacccgagctcgaagcggcgctgaagaaggcttgtaccagagatccctcaagatgggcccgattttggcacagcggtcctggtcaagtgctcacttacctcttacttccttgcacactcccttttgagtatatatacttcaggagccgtaggctagtcgtatggctgcccgacgttcccgccgacctgtggtggatgcaaggactgcttcggaacatggccctggaggtcttctccaggacaaaagctcagttattaggccccataagtccacccgccacgcgtgtcctggagacatccccattgcaaccgcagatcgccccccacagagaggaattaggcccaactcatcaggcctag

SEQ ID NO: 69941 - DNA, 2000 bp, Artificial Sequence
  derived and/or modified sequence
agcaccagccccagcccggctccctccagagcccacatttgggcccagccccgtccaaggctgcatcccggccctatcccgggtcacggagtgacccttcctcgtcccgatcaccccgcccggtccacccgccatgggcttcttagaggaggagggcagatggaacctgtccttctccggcgccggctacctgggcgcccaccacgtgggcgccaccgaatgcctgcgccagcgagccccgcgcctcctccagggcgcccgccgcatctacggttcctcgtctggggcgctcaacgcagtcagcatcgtctgcggcaagtcggtcgactgcccctccaccatcacggtgtcgcccttccatgggacagtggacatctgcccccagagcacctcccccaacctgcatgagctgaacgtcttcaacttcagcttccaaatctccactgagaacttcttcctggggctcatatgtctcataccccccagcctcgaggtagtggccgacaactgcagacaaggctacctggatgccctgaggttcctggagagacgtggactcaccaaggaaccagtgctatggacgctggtgtctaaggaacccccagccccggctgacggaaactgggatgctggctgtgaccaacgctggaaggggggcctgtctctcaactggaaagtgccccatgtgcaagtcaaggatgtacccaactttgagcagctctcaccagagctggaggctgcactgaagaaagcatgtacgagggatcccagccggtgggcccgcttctggcactcggggcctggacaggtgctgacgtacctgctgctaccctgcacactgcccttcgagtacatctacttccgcagcagaaggttggtggtgtggctgcccgatgtgccggcggacttgtggtggatgcagggcctgctgaggaacatggccctcgaggttttctccaggaccaaggcccagctccttgggcccatcagccctccggccactcgcgtcctggaaacaagccccctccaaccccagatagctcctcatagagaggagctcgggcccacccaccaggcctgagggggccgagcagggccagcccagtgactggtgtcccttgattcctgctctggcctttgtcctgtgtgcccacatctgccccagcgggaagaggccctgccaatctccgtggagaccctgcagcttggagcccgttccttggggcgcagcctgtcagcatgtccccggtcactgtgtacccaggtcacctgccctccctcttgccccgtctcatcagggagagaaaggaggacagccacagagacacatgtcttactttcagaatttccacggggggactaggagggcagcattgctggggagaggggctcctgttctgccgtggagctgcccacggagcacctcacagaagattgagaaagtgcctgatgcccgcgtcagagaccagaggagccaactgagatgatggggtgggggtgctccccccagactttctcagtcctgcagcggcccttgggggtgacccccggcatctaccccactcaggaaaccttgacttctgaattcctatcaggtccagagggtggaaggccctggcaggaagcaggaggaggaggagaggggggtccaggtcttttcaggatcccagctgtgggtgcttctgttgggcccagtggcccctgctatccccacagcctcattcctgcagaaggtttgtgacgtagctgtgcctgtacctggggcagagaggatgccagggacaccaggcctctggcctctccacgagtcactgctctccccattggcagcacgggacccatgctgtgcccccggccaggccctgaggaaatgctcagcctcagtggagatggggaggttagagagatggaggcgtgagtgagaacgggaagcaaaggaatacacgtgggaactaaagagaaaaatgaccagcctgggcagcatagcaagaccctgtctc

SEQ ID NO: 69942 - DNA, 921 bp, Artificial Sequence
  derived and/or modified sequence
gctccctccagagcccacatttgggcccagccccgtccaaggctgcatcccggccctatcccgggtcacggagtgacccttcctcgtcccgatcaccccgcccggtccacccgccatgggcttcttagaggaggagggcagatggaacctgtccttctccggcgccggctacctgggcgcccaccacgtgggcgccaccgaatgcctgcgccagcgagccccgcgcctcctccagggcgcccgccgcatctacggttcctcgtctggggcgctcaacgcagtcagcatcgtctgcggcaagtcggtcgacttctgctgctcccacctcctgggcatggttgggcagttggagcggctgagcctaagcatcctgcacccggcctacgcgcccatcgagcacgtcaagcagcagctgcaggatgctctgccccccgacgcccacgtcctggcctcccagcggctgggcatttcgctgacccgctggcctgacggacgcaacttcttggtcactgacttcgccacctgcgatgagctcatccaggtagtggccgacaactgcagacaaggctacctggatgccctgaggttcctggagagacgtggactcaccaaggaaccagtgctatggacgctggtgtctaaggaacccccagccccggctgacggaaactgggatgctggctgtgaccaacgctggaaggggggcctgtctctcaactggaaagtgccccatgtgcaagtcaaggatgtacccaactttgagcagctctcaccagagctggaggctgcactgaagaaagcatgtacgagggatcccagccggtgggcccgcttctggcactcggggcctggacaggtgctgacgtacctgctgctaccctgcacactgcccttcgagtacatctacttccgcagcagaag

SEQ ID NO: 69943 - DNA, 2197 bp, Artificial Sequence
  derived and/or modified sequence
agcaccagccccagcccggctccctccagagcccacatttgggcccagccccgtccaaggctgcatcccggccctatcccgggtcacggagtgacccttcctcgtcccgatcaccccgcccggtccacccgccatgggcttcttagaggaggagggcagatggaacctgtccttctccggcgccggctacctgggcgcccaccacgtgggcgccaccgaatgcctgcgccagcgagccccgcgcctcctccagggcgcccgccgcatctacggttcctcgtctggggcgctcaacgcagtcagcatcgtctgcggcaagtcggtcgactgcccctccaccatcacggtgtcgcccttccatgggacagtggacatctgcccccagagcacctcccccaacctgcatgagctgaacgtcttcaacttcagcttccaaatctccactgagaacttcttcctggggctcatatgtctcataccccccagcctcgaggtagtggccgacaactgcagacaaggctacctggatgccctgaggttcctggagagacgtggactcaccaaggaaccagtgctatggacgctggtgtctaaggaacccccagccccggctgacggaaactgggatgctggctgtgaccaacgctggaaggggggcctgtctctcaactggaaagtgccccatgtgcaagtcaaggatgtacccaactttgagcagctctcaccagagctggaggctgcactgaagaaagcatgtacgagggatcccagccggtgggcccgcttctggcactcggggcctggacaggtgctgacgtacctgctgctaccctgcacactgcccttcgagtacatctacttccgcagcagaaggttggtggtgtggctgcccgatgtgccggcggacttgtggtggatgcagggcctgctgaggaacatggccctcgaggttttctccaggaccaaggcccagctccttgggcccatcagccctccggccactcgcgtcctggaaacaagccccctccaaccccagatagctcctcatagagaggagctcgggcccacccaccaggcctgagggggccgagcagggccagcccagtgactggtgtcccttgattcctgctctggcctttgtcctgtgtgcccacatctgccccagcgggaagaggccctgccaatctccgtggagaccctgcagcttggagcccgttccttggggcgcagcctgtcagcatgtccccggtcactgtgtacccaggtcacctgccctccctcttgccccgtctcatcagggagagaaaggaggacagccacagagacacatgtcttactttcagaatttccacggggggactaggagggcagcattgctggggagaggggctcctgttctgccgtggagctgcccacggagcacctcacagaagattgagaaagtgcctgatgcccgcgtcagagaccagaggagccaactgagatgatggggtgggggtgctccccccagactttctcagtcctgcagcggcccttgggggtgacccccggcatctaccccactcaggaaaccttgacttctgaattcctatcaggtccagagggtggaaggccctggcaggaagcaggaggaggaggagaggggggtccaggtcttttcaggatcccagctgtgggtgcttctgttgggcccagtggcccctgctatccccacagcctcattcctgcagaaggtttgtgacgtagctgtgcctgtacctggggcagagaggatgccagggacaccaggcctctggcctctccacgagtcactgctctccccattggcagcacgggacccatgctgtgcccccggccaggccctgaggaaatgctcagcctcagtggagatggggaggttagagagatggaggcgtgagtgagaacgggaagcaaaggaatacacgtgggaactaaagagaaaaatgaccagcctgggcagcatagcaagaccctgtctctaaaaaaaataataaaaacttagctgggcatggtggtgcatgcctgtggtcctggctacttgggaggctgaggatggaggatcatttgagcccaggaggtcgaggctgcagtgaaccgtgatcacgccactgcaccccagcccaggcaacaaagtgagcccctgtctctaaataaataaagagacaataagccactc

SEQ ID NO: 69944 - DNA, 948 bp, Artificial Sequence
  derived and/or modified sequence
atgggctttctcgaggaagagggtaggtggaacctgtcgttttcaggtgcgggatatttgggagcgcaccacgtgggggctaccgaatgcttgcggcaacgggcaccacgactgttgcagggggcaagacggatctacggcagctcgtctggagcattgaacgcagtgagcatcgtctgcggcaaatctgtggactgccccagtacaattaccgtctcacccttccacggcacagtcgatatctgtccccagagtacgtcacctaacctgcatgagctgaatgtgttcaatttttcatttcagatcagcaccgagaacttttttctgggactgatatgcctgatccccccttctctcgaggtcgtggccgacaattgccgccagggataccttgacgccctgagattcctcgagagacgcggtcttactaaagaacccgtcctctggactcttgtgagcaaggagcccccagcgcctgctgacgggaattgggacgcagggtgcgatcaaaggtggaaaggtggtctgtctcttaattggaaggtcccccatgtacaggttaaagacgtgcccaattttgagcagctcagtcctgagctcgaggcagcccttaagaaggcatgcacccgggatccctccagatgggccaggttctggcacagcggtccagggcaggtgctaacataccttcttttgccctgtaccctgccctttgaatacatatacttcagatctcgcagacttgtggtttggctgcccgacgttcctgctgatctttggtggatgcaaggtctgctgagaaatatggccctagaggtgttcagccgaacgaaagcacaactcttggggcctatatcaccgccagcgacaagagtgcttgaaactagcccacttcagcctcagattgctccccacagagaggaactggggccaacccaccaggcttag

SEQ ID NO: 69945 - DNA, 807 bp, Artificial Sequence
  derived and/or modified sequence
atgggcttcctggaggaagaggggcgttggaacctgagtttctcaggagccggttatttgggagcccaccatgtcggagcaaccgaatgtttaaggcagcgcgctccccgtctgttacagggtgcaaggcgaatctatgggtccagctcaggtgcccttaacgcagtaagtatcgtttgcggcaagagcgtcgatttctgctgttcccacctgttgggtatggtcggtcagttggagaggttgagcctgagcatactacatcccgcatacgcccctatcgagcacgtgaaacaacagctccaggatgcactgccacctgacgctcacgtactcgcatctcagaggcttggaatcagcttgactaggtggcccgacggaaggaactttctggtgaccgactttgcaacatgcgatgagttgatccaggtggtggcagataactgtcggcaaggctacctcgatgctctgcggtttctggagaggaggggactcaccaaggaacccgtgttgtggactctagtgtctaaggaaccacccgcacccgcagatggtaattgggatgctgggtgtgatcaacgctggaagggaggcctctctttgaactggaaagtgccccacgtccaggtgaaagacgtcccgaactttgaacagttgtcgcctgaactagaggccgctctgaaaaaggcctgtacgcgggatccctcaaggtgggccagattttggcattccggtcccggacaggtgctcacttaccttctcctaccttgcacattacccttcgagtacatttacttccgctcccgttag

SEQ ID NO: 69946 - DNA, 948 bp, Artificial Sequence
  derived and/or modified sequence
atggggtttcttgaagaggagggcaggtggaacctatccttctctggtgctgggtacttgggagcacaccacgtgggagccacagagtgtcttaggcagagagcaccccgactgctccagggcgctagaagaatctatggcagctctagcggcgcactaaacgccgtgtctatagtttgcgggaaatcagttgattgcccgtccacaattacagtgtctcccttccatggaaccgtggatatctgtcctcaaagtacaagtcctaatttacatgagttgaacgtctttaatttttcctttcagataagcaccgaaaatttttttttaggcttgatctgcctgattcctccctccctggaggtggtagctgataattgtaggcaagggtacctcgacgctctgcggttcctggaaaggcgtggactgaccaaagaacccgttctctggacccttgtgtccaaggagcctcctgccccagctgatgggaactgggatgccggttgcgaccagcgctggaaaggcggtttgagcctcaattggaaagtcccacacgtgcaggtcaaggatgtgcctaactttgaacagctgagccctgagctggaggcagccttgaagaaggcgtgcaccagggaccccagcagatgggcacgcttttggcatagcggccctggacaggtactgacgtacctcctgcttccttgtacactgccattcgagtatatctatttccgatccaggcgcttggttgtctggctccccgacgtgcccgcagatctctggtggatgcagggactgctgcggaatatggccctggaagtattttcgcgcactaaggcccagctgcttggaccaataagcccaccagctacccgcgttttagagacatctccactccagcctcagatagccccacaccgggaggagctgggacccacccatcaggcctag

SEQ ID NO: 69947 - DNA, 948 bp, Artificial Sequence
  derived and/or modified sequence
atgggcttcctggaggaggagggcagatggaacctgagcttcagcggcgccggctacctgggcgcccaccacgtgggcgccaccgagtgcctgagacagagagcccccagactgctgcagggcgccagaagaatctacggcagcagcagcggcgccctgaacgccgtgagcatcgtgtgcggcaagagcgtggactgccccagcaccatcaccgtgagccccttccacggcaccgtggacatctgcccccagagcaccagccccaacctgcacgagctgaacgtgttcaacttcagcttccagatcagcaccgagaacttcttcctgggcctgatctgcctgatcccccccagcctggaggtggtggccgacaactgcagacagggctacctggacgccctgagattcctggagagaagaggcctgaccaaggagcccgtgctgtggaccctggtgagcaaggagccccccgcccccgccgacggcaactgggacgccggctgcgaccagagatggaagggcggcctgagcctgaactggaaggtgccccacgtgcaggtgaaggacgtgcccaacttcgagcagctgagccccgagctggaggccgccctgaagaaggcctgcaccagagaccccagcagatgggccagattctggcacagcggccccggccaggtgctgacctacctgctgctgccctgcaccctgcccttcgagtacatctacttcagaagcagaagactggtggtgtggctgcccgacgtgcccgccgacctgtggtggatgcagggcctgctgagaaacatggccctggaggtgttcagcagaaccaaggcccagctgctgggccccatcagcccccccgccaccagagtgctggagaccagccccctgcagccccagatcgccccccacagagaggagctgggccccacccaccaggcctag

SEQ ID NO: 69948 - DNA, 807 bp, Artificial Sequence
  derived and/or modified sequence
atgggcttcctggaggaggagggcagatggaacctgagcttcagcggcgccggctacctgggcgcccaccacgtgggcgccaccgagtgcctgagacagagagcccccagactgctgcagggcgccagaagaatctacggcagcagcagcggcgccctgaacgccgtgagcatcgtgtgcggcaagagcgtggacttctgctgcagccacctgctgggcatggtgggccagctggagagactgagcctgagcatcctgcaccccgcctacgcccccatcgagcacgtgaagcagcagctgcaggacgccctgccccccgacgcccacgtgctggccagccagagactgggcatcagcctgaccagatggcccgacggcagaaacttcctggtgaccgacttcgccacctgcgacgagctgatccaggtggtggccgacaactgcagacagggctacctggacgccctgagattcctggagagaagaggcctgaccaaggagcccgtgctgtggaccctggtgagcaaggagccccccgcccccgccgacggcaactgggacgccggctgcgaccagagatggaagggcggcctgagcctgaactggaaggtgccccacgtgcaggtgaaggacgtgcccaacttcgagcagctgagccccgagctggaggccgccctgaagaaggcctgcaccagagaccccagcagatgggccagattctggcacagcggccccggccaggtgctgacctacctgctgctgccctgcaccctgcccttcgagtacatctacttcagaagcagatag

SEQ ID NO: 69949 - DNA, 1017 bp, Artificial Sequence
  derived and/or modified sequence
atgggcaacatcaccgccgacaacagcagcatgagctgcaccatcgaccacaccatccaccagaccctggcccccgtggtgtacgtgaccgtgctggtggtgggcttccccgccaactgcctgagcctgtacttcggctacctgcagatcaaggccagaaacgagctgggcgtgtacctgtgcaacctgaccgtggccgacctgttctacatctgcagcctgcccttctggctgcagtacgtgctgcagcacgacaactggagccacggcgacctgagctgccaggtgtgcggcatcctgctgtacgagaacatctacatcagcgtgggcttcctgtgctgcatcagcgtggacagatacctggccgtggcccaccccttcagattccaccagttcagaaccctgaaggccgccgtgggcgtgagcgtggtgatctgggccaaggagctgctgaccagcatctacttcctgatgcacgaggaggtgatcgaggacgagaaccagcacagagtgtgcttcgagcactaccccatccaggcctggcagagagccatcaactactacagattcctggtgggcttcctgttccccatctgcctgctgctggccagctaccagggcatcctgagagccgtgagaagaagccacggcacccagaagagcagaaaggaccagatccagagactggtgctgagcaccgtggtgatcttcctggcctgcttcctgccctaccacgtgctgctgctggtgagaagcgtgtgggaggccagctgcgacttcgccaagggcgtgttcaacgcctaccacttcagcctgctgctgaccagcttcaactgcgtggccgaccccgtgctgtactgcttcgtgagcgagaccacccacagagacctggccagactgagaggcgcctgcctggccttcctgacctgcagcagaaccggcagagccagagaggcctaccccctgggcgcccccgaggccagcggcaagagcggcgcccagggcgaggagccctag

SEQ ID NO: 69950 - DNA, 1098 bp, Artificial Sequence
  derived and/or modified sequence
atgggcaacatcaccgccgacaacagcagcatgagctgcaccatcgaccacaccatccaccagaccctggcccccgtggtgtacgtgaccgtgctggtggtgggcttccccgccaactgcctgagcctgtacttcggctacctgcagatcaaggccagaaacgagctgggcgtgtacctgtgcaacctgaccgtggccgacctgttctacatctgcagcctgcccttctggctgcagtacgtgctgcagcacgacaactggagccacggcgacctgagctgccaggtgtgcggcatcctgctgtacgagaacatctacatcagcgtgggcttcctgtgctgcatcagcgtggacagatacctggccgtggcccaccccttcagattccaccagttcagaaccctgaaggccgccgtgggcgtgagcgtggtgatctgggccaaggagctgctgaccagcatctacttcctgatgcacgaggaggtgatcgaggacgagaaccagcacagagtgtgcttcgagcactaccccatccaggcctggcagagagccatcaactactacagattcctggtgggcttcctgttccccatctgcctgctgctggccagctaccagggcatcctgagagccgtgagaagaagccacggcacccagaagagcagaaaggaccagatccagagactggtgctgagcaccgtggtgatcttcctggcctgcttcctgccctaccacgtgctgctgctggtgagaagcgtgtgggaggccagctgcgacttcgccaagggcgtgttcaacgcctaccacttcagcctgctgctgaccagcttcaactgcgtggccgaccccgtgctgtactgcttcgtgagcgagaccacccacagagacctggccagactgagaggcgcctgcctggccttcctgacctgcagcagaaccggcagagccagagaggcctaccccctgggcgcccccgaggccagcggcaagagcggcgcccagggcgaggagcccgagctgctgaccaagctgcaccccgccttccagacccccaacagccccggcagcggcggcttccccaccggcagactggcctag

SEQ ID NO: 69951 - DNA, 1017 bp, Artificial Sequence
  derived and/or modified sequence
atgggcaacatcacggcggacaattcctctatgtcctgcactattgaccataccatccatcagacactggcgcctgtcgtttatgttactgttcttgtcgtggggtttcccgccaattgcctgtccctgtactttggatatcttcaaatcaaggcgcgtaatgagctcggcgtgtacctctgtaatttgaccgtcgcggatctcttttacatttgtagcctgccattctggctccagtatgtgctgcagcacgataattggtcccacggcgatttatcctgccaggtatgcggaatcctattatacgaaaacatatacatttctgtaggctttctgtgctgcatttccgtagacaggtatctggcagtggcccatccctttcgcttccaccagtttcgcacgttgaaggccgccgtcggcgtgtcagtcgtcatctgggccaaggagctactcacctcaatctactttctcatgcatgaggaggtgattgaggacgaaaatcagcaccgcgtttgttttgagcactacccaatccaggcgtggcagcgcgccatcaactactaccgcttcctggtgggcttcttattccctatctgcctattactggccagctatcagggtatacttcgcgctgtgcggcggagccacggcacacagaaatctagaaaggaccagatccagaggctggttctatcaaccgttgtcatattcttggcttgcttcctgccatatcatgtgctcctgttggtgaggagcgtgtgggaagctagttgcgactttgcaaagggggtgttcaacgcctatcatttttccttgctcctcaccagcttcaattgtgtggccgatccagtcctgtactgcttcgtctctgagactacacatcgggatctggctaggctgcgaggcgcgtgcctagccttcctgacttgttcacgaaccggccgggccagagaagcttacccactcggtgctcctgaggcctccggcaaaagtggggctcagggagaagagccatag

SEQ ID NO: 69952 - DNA, 1098 bp, Artificial Sequence
  derived and/or modified sequence
atgggaaatatcacagctgacaactcatctatgagttgcaccatcgaccataccattcatcagacacttgcccctgtagtgtacgtgacagtattggttgtcggctttccagccaattgcttgtctctctacttcggctacctgcagattaaggcacgcaatgagcttggagtatacctgtgcaacctcaccgtcgctgacctattttatatatgctctttgcccttttggttgcagtatgttctgcagcacgacaattggagccacggtgatctgagttgccaagtgtgcggaatactgctgtatgagaatatatacatctcggttggatttctctgctgcatctcagtcgacagatatctcgcagtggcccatccctttcggttccaccagtttagaaccctgaaagctgcagttggagtctctgtggttatctgggccaaggaactactgacgtccatttactttctgatgcacgaggaagtgatagaggacgaaaatcaacatagagtctgtttcgaacactacccaatacaagcttggcagcgagccatcaactactaccggttcctggtgggatttttgttccctatctgtttgctcctcgcctcataccagggcatcctgagagctgtgcggaggagtcacgggacccaaaaaagtagaaaagatcagattcaacgcctggttttgtccacagtggtgatttttctcgcttgcttcttgccttaccacgtgctcttgctggtccgctctgtgtgggaggctagctgtgattttgctaaaggggtcttcaacgcttatcacttctcactccttcttacatcatttaattgcgtcgcagatcccgtgctatactgttttgtgtccgagaccactcacagagatctggcgagactgcggggagcatgcttagcgttcttaacttgtagcaggaccggcagagccagggaggcctacccacttggagctccagaggcctctgggaaatctggcgcccagggcgaagagccagaacttttgaccaagctgcatccagcctttcagacaccgaacagtccagggtccgggggatttcctacaggtcggttggcgtag

SEQ ID NO: 69953 - DNA, 1098 bp, Artificial Sequence
  derived and/or modified sequence
atggggaacataactgccgataactcgagtatgtcatgtaccatcgatcataccatacatcagacactcgctcctgtagtctacgtaactgttttggtagtcggcttccccgccaactgtctgagcctgtattttggttacctgcagataaaagctaggaatgagctgggggtgtacctctgtaatctcacggtggcagaccttttctacatttgtagcctgccattctggctccagtatgtattacagcatgataattggagccacggcgatctgtcgtgccaagtttgcggaatccttctctacgagaatatctatatctcggtgggattcctgtgctgcatatcagtggaccgatatttggccgttgcacaccctttccgatttcatcaatttagaaccctgaaagccgctgtcggagtgtctgtcgtcatctgggccaaggaactcctcactagtatctacttcctcatgcacgaggaagtgatcgaggacgaaaatcagcaccgggtgtgcttcgaacattatcccatccaggcctggcagagggcaattaactactataggttccttgtcggatttctcttccccatctgcctgttattagcttcgtaccagggcatactgagggccgtgaggaggtcccacggcacacagaagtcccgcaaagaccaaatccagcgcctggtgcttagtacagtcgtgatctttctggcttgcttcctgccttaccacgtactgctcctcgttcggtcagtgtgggaggctagctgcgacttcgccaagggagtgtttaacgcatatcatttttctctgttgttgacaagctttaattgcgtcgcagatcccgttttgtattgttttgtctccgagacaacgcacagagacctggctcgcctcaggggagcttgtctggcttttctcacctgttctcggaccggcagggccagggaggcttacccactcggggctccagaggctagtgggaagtctggggcacaaggcgaggaaccagagctgctaacaaagctccaccctgcatttcagacaccaaactctcccggatccggcggattcccgaccggcagactggcttag

SEQ ID NO: 69954 - DNA, 1017 bp, Artificial Sequence
  derived and/or modified sequence
atgggcaacatcacagctgacaacagctccatgagctgcaccatcgaccacaccatccaccagaccctggcccctgtggtgtatgtgacagtgctggtggtgggcttccctgccaactgcctgagcctgtacttcggctacctgcagatcaaggccagaaatgagctgggcgtgtacctgtgcaacctgactgtggccgacctcttctacatctgcagcctgcccttctggctgcagtatgtgctgcagcacgacaactggagccatggagacctgagctgccaggtgtgtggcatcctgctgtatgagaacatctacatctctgtgggcttcctgtgctgcatctctgtggaccgctacctggccgtggcccaccccttccgcttccaccagttccgcaccctgaaggctgctgtgggcgtgtctgtggtgatctgggccaaggagctgctgaccagcatctacttcctgatgcatgaggaggtgattgaagatgagaaccagcaccgggtgtgctttgagcactaccccatccaggcctggcagagggccatcaactactaccgcttcctggtgggcttcctgttccccatctgcctgctgctggccagctaccagggcatcctgcgggctgtgagaagaagccacggcacccagaagagcaggaaggaccagatccagaggctggtgctgagcacagtggtgatcttcctggcctgcttcctgccctaccacgtgctgctgctggtgcgctctgtgtgggaggccagctgtgactttgccaagggcgtcttcaatgcctaccacttcagcctgctgctgaccagcttcaactgtgtggccgaccctgtgctgtactgctttgtgtctgagaccacccaccgggacctggcccggctgcggggggcctgcctggccttcctgacctgcagcaggacaggccgggcccgggaggcctaccccctgggcgcccctgaggccagcggcaagagcggggcccagggcgaggagccctag

SEQ ID NO: 69955 - DNA, 1098 bp, Artificial Sequence
  derived and/or modified sequence
atgggcaacatcacagctgacaacagctccatgagctgcaccatcgaccacaccatccaccagaccctggcccctgtggtgtatgtgacagtgctggtggtgggcttccctgccaactgcctgagcctgtacttcggctacctgcagatcaaggccagaaatgagctgggcgtgtacctgtgcaacctgactgtggccgacctcttctacatctgcagcctgcccttctggctgcagtatgtgctgcagcacgacaactggagccatggagacctgagctgccaggtgtgtggcatcctgctgtatgagaacatctacatctctgtgggcttcctgtgctgcatctctgtggaccgctacctggccgtggcccaccccttccgcttccaccagttccgcaccctgaaggctgctgtgggcgtgtctgtggtgatctgggccaaggagctgctgaccagcatctacttcctgatgcatgaggaggtgattgaagatgagaaccagcaccgggtgtgctttgagcactaccccatccaggcctggcagagggccatcaactactaccgcttcctggtgggcttcctgttccccatctgcctgctgctggccagctaccagggcatcctgcgggctgtgagaagaagccacggcacccagaagagcaggaaggaccagatccagaggctggtgctgagcacagtggtgatcttcctggcctgcttcctgccctaccacgtgctgctgctggtgcgctctgtgtgggaggccagctgtgactttgccaagggcgtcttcaatgcctaccacttcagcctgctgctgaccagcttcaactgtgtggccgaccctgtgctgtactgctttgtgtctgagaccacccaccgggacctggcccggctgcggggggcctgcctggccttcctgacctgcagcaggacaggccgggcccgggaggcctaccccctgggcgcccctgaggccagcggcaagagcggggcccagggcgaggagcctgagctgctgaccaagctgcacccagccttccagacccccaacagccctggcagcggcggcttccccaccggccgcctggcctag

SEQ ID NO: 69956 - DNA, 1017 bp, Artificial Sequence
  derived and/or modified sequence
atgggcaacatcaccgccgacaacagcagcatgagctgcaccatcgatcacaccatacatcagactctggccccagtggtgtatgtgaccgtgctggtcgttgggttcccagcaaactgtctgtcattatactttggctacctacaaattaaagctagaaatgaactaggagtatatctgtgtaacctaacagtcgcagatcttttttatatctgttctttgcccttctggctccaatatgtgctgcaacatgataactggagccatggagatttgtcctgtcaagtctgcggcatactgttgtacgagaatatctatatcagtgtgggttttctctgctgcatctctgttgatcggtatctcgccgttgctcatcccttccgctttcatcagtttcgcaccctgaaagcagcagtcggtgtgagtgttgtgatatgggccaaagaacttttaaccagcatctacttccttatgcacgaggaggtcattgaagacgagaaccaacacagagtctgcttcgaacattaccctatccaagcttggcagcgcgccataaactattacaggttcctcgtaggctttctgtttcccatctgcctactcttggcgtcctaccaggggattcttagagccgttcggcgctcccatggcacccagaaaagtagaaaagaccagattcaaagactggtgttatccacagtggtgatttttctggcatgctttcttccctatcacgtcctgctgctcgtccggtccgtttgggaggccagctgtgactttgccaagggggtctttaacgcgtaccatttttcgctcctgctaacttcattcaactgcgtggccgatccagtgctttattgcttcgtttcagaaacaactcacagagatcttgccaggctgcgcggcgcttgtttggccttcctgacatgctcaaggacaggccgggcccgggaagcctacccattgggcgctccggaggcctccgggaagagtggggcacagggcgaggagccttag

SEQ ID NO: 69957 - DNA, 1098 bp, Artificial Sequence
  derived and/or modified sequence
atgggcaacatcaccgccgacaacagcagcatgagctgcaccatcgaccataccattcatcagacattggcacctgttgtctacgtaaccgtgctcgtggtggggtttcctgccaactgcctctcactatatttcgggtacctgcagatcaaggctaggaacgaactgggggtatacttgtgtaacctcacagtggcagatcttttttacatctgcagtttgcccttctggctccagtatgtgttgcagcacgacaactggtctcacggtgatctgagctgccaggtgtgtgggattctgctttatgagaatatttacattagtgtcggattcctgtgttgcattagcgtggatagatacctagccgttgcccacccgttccgcttccatcaattccgtaccctgaaagcagctgtcggggtctcagttgtcatttgggccaaggaactgctaactagcatttattttctcatgcacgaagaagtgatagaagacgagaatcagcaccgagtttgtttcgaacactatccgatacaggcttggcagagagctataaattactaccgatttctggttgggttcctgttccccatatgtcttctgcttgcgagctatcaggggatattgcgtgctgttcgaaggagccacgggacccagaaaagccggaaggatcagatacaaaggcttgtgctcagtaccgtggttatcttcttggcttgtttcctgccataccacgtcctgctgctagtcagaagtgtttgggaagcgagctgcgatttcgccaaaggtgttttcaatgcataccatttcagcctgctccttacttcattcaattgtgtagcagaccccgtgttgtattgcttcgtttccgagaccacacaccgcgacttagctcggctgcgtggggcttgcctggccttcctgacgtgctcacgtaccggacgcgcacgggaagcctatcccttaggagccccggaagccagcggcaaaagcggtgctcaaggagaagagccggagctgctgacaaaactgcatcctgcatttcagacacctaatagcccagggtccggcggtttccccaccggtcgtctggcgtag

SEQ ID NO: 69958 - DNA, 1098 bp, Artificial Sequence
  derived and/or modified sequence
atgggcaacatcaccgccgacaacagcagcatgagctgcaccatcgatcacaccattcaccaaacactggcgcccgtggtatacgttactgtgttggtggtaggcttcccagcaaattgcctgtccctctactttggctatctccagataaaggccaggaatgagttaggcgtgtatctgtgtaatctgaccgtggctgaccttttttacatatgcagcttacctttctggctacagtacgtgctccaacatgataactggtctcatggagatctttcctgtcaggtgtgtggaatccttttatacgagaatatctatattagtgtaggattcctttgctgcataagtgttgatagatatttagccgtggcgcatccgttcagattccatcaatttagaacactgaaagccgccgtgggggtgtctgtcgtgatttgggctaaagagctgctcacttccatttattttctcatgcacgaagaggttatagaagatgagaaccagcatcgggtgtgctttgaacattatccgatacaagcatggcagcgggcaataaactattacagatttctggtgggctttctgttccccatctgtttactgctagcttcttatcagggcatattgcgcgctgtgcggaggtcccacggaacccaaaagtccaggaaagaccagatccagagactggtcctgtctaccgtcgttatcttcctggcgtgtttcctaccctaccacgttttgttacttgttagaagtgtgtgggaggctagttgtgattttgctaagggagtgtttaacgcatatcatttcagcctcttattgacctcatttaattgtgttgctgaccccgtgctgtactgcttcgtctcagagactacgcaccgggatctggccagacttcggggtgcctgtttagcttttcttacctgctcccggacaggaagagccagggaggcttaccctcttggtgccccagaggccagcggcaaaagtggtgcccaaggcgaagagccagagctcctgaccaagctgcacccagcatttcagacaccaaattcaccggggagcggcggcttccctaccgggcggcttgcttag

SEQ ID NO: 69959 - DNA, 1017 bp, Artificial Sequence
  derived and/or modified sequence
atgggcaatatcacagcagacaattcttcaatgagctgcactattgaccataccatccaccagactctagccccagttgtttatgtgaccgtattagtggtcggcttccctgcgaattgtctctcactgtactttgggtatttgcagatcaaagcaaggaacgaactaggagtatacttatgcaaccttacagttgcggatttgttttacatctgttctttacccttctggctccagtacgtgctgcagcatgataattggagtcacggcgatctcagctgtcaggtgtgcgggattctactgtacgaaaacatttacatctcagtcgggtttctgtgttgcatttccgtagaccgctatttagctgttgcccaccctttccggtttcatcagttccgtactctcaaagctgcggtcggcgtctcagtagtcatttgggccaaggaactgttgaccagcatctatttcctgatgcatgaggaggtgatcgaggacgagaatcaacatcgggtgtgcttcgaacattatcccatacaggcctggcaacgggcaattaattactacagattcctcgtcggtttcctgttcccaatttgcctccttttagcatcgtaccaggggatattgagggctgtgaggagatcccacggtacccagaagtcacgaaaggaccagatacagcgactggtgctgtcgactgtcgttatattcctcgcatgttttctgccctaccatgtgttgctgctggtccgttctgtgtgggaggcctcctgcgattttgcaaagggggtcttcaatgcgtaccatttctcactgctgctgactagcttcaactgtgttgcagatcctgtcctgtattgcttcgtgtcagaaaccactcatagggacttagctcgccttcgaggagcgtgtttagcttttctaacttgtagtcgcacaggccgagctcgcgaggcctatcctttaggtgcccctgaggccagtgggaaatccggagctcagggcgaagaaccctag

SEQ ID NO: 69960 - DNA, 1098 bp, Artificial Sequence
  derived and/or modified sequence
atgggcaacatcacagccgacaattcaagcatgagctgcacaatcgaccatactatccatcagaccttggccccagtggtttacgtgaccgtgcttgtcgtagggttcccagcgaattgtctctcgctatatttcggatatctgcagattaaggccaggaacgagttgggcgtgtacctgtgtaacctgactgtcgctgacctgttctacatatgcagtctccctttttggctgcaatatgtgttacagcacgacaattggagccacggtgacctttcttgtcaggtatgtggaattctgctttatgaaaacatctacattagtgttgggtttctctgttgcatatccgtggatcggtaccttgctgtggcccacccgtttcgcttccaccaatttcggacgctgaaagctgccgtcggagtgtccgtggtgatttgggcaaaggagcttctcaccagcatttattttctgatgcacgaagaggtgatcgaggacgagaaccaacatagagtctgcttcgagcactatccaatccaggcatggcagcgcgctatcaattattacagatttctggtggggtttctcttcccgatttgcctcctgctggcctcttatcagggcatattaagggcagtgcgacgatcacacgggacccaaaagtcacggaaagaccagattcagaggctcgtcttatccactgtagttatcttcctagcctgctttctgccctaccacgtactcctgctggttagatccgtctgggaagctagctgcgactttgccaagggtgtgttcaatgcttatcacttctccttattactgacctctttcaattgcgtggcagatcccgtgctttattgcttcgtgtctgaaaccacccacagggatctggctagacttcgaggcgcttgccttgcatttctgacatgcagcaggactgggagagccagagaggcctaccccctcggggcacctgaggccagcggaaagtctggcgcacagggggaagagccggaactccttacaaagctacacccggcatttcagactcccaatagccccggttctggaggctttcccacaggtcgactggcctag

SEQ ID NO: 69961 - DNA, 1098 bp, Artificial Sequence
  derived and/or modified sequence
atgggaaacataaccgcagacaacagctctatgtcttgcacaattgatcacacgattcatcaaacattggccccagtggtgtacgtaacagttctggtggtgggctttccagctaactgcttaagtctgtattttggctacttacagattaaagctcgaaacgagctgggcgtgtacctctgtaaccttactgttgccgatctgttttatatttgcagtctgccattctggctgcaatacgtccttcagcacgataactggtcgcacggtgatctttcctgccaggtgtgcggaattctgctgtacgaaaatatttacatctccgtgggattcttatgttgcatctctgtagatcgctacctggcagtggcccatcctttcagattccatcaattcaggacactaaaggcagcggtaggcgtcagtgttgtaatctgggccaaagaactgctcaccagcatctatttccttatgcacgaggaggttatcgaagacgaaaaccaacacagggtttgctttgagcactaccctatccaggcctggcaaagagcaatcaattattatcgattccttgtgggcttcctcttccctatctgccttctgcttgcttcttaccagggcatcctgagagctgtacggaggagccatgggacccagaaaagccggaaagaccaaatacagcggctcgtcttatccactgtggtgatatttctcgcgtgtttcttgccgtaccatgtgcttctgctggtaagatcggtatgggaagcctcctgtgacttcgccaagggggtgtttaacgcataccacttttctctgctcctcaccagcttcaattgcgtcgctgatcctgtgctgtactgcttcgtgagcgagaccacgcacagagacctggcccgtctgcggggtgcttgcctggctttcctgacctgttcccgaaccggcagggcgagagaggcttacccactcggcgctccagaggccagcggaaagtccggcgcacagggcgaagaaccagagctgctgactaagcttcatcccgcattccaaacgccgaactctcctggtagcggcggatttcctacgggacgactggcatag

SEQ ID NO: 69962 - protein, 1705 aa, Artificial Sequence
  derived and/or modified sequence
MELSCSEAPLYGQMMIYAKFDKNVYLPEDAEFYFTYDGSHQRHVMIAERIEDNVLQSSVPGHGLQETVTVSVCLCSEGYSPVTMGSGSVTYVDNMACRLARLLVTQANRLTACSHQTLLTPFALTAGALPALDEELVLALTHLELPLEWTVLGSSSLEVSSHRESLLHLAMRWGLAKLSQFFLCLPGGVQALALPNEEGATPLDLALREGHSKLVEDVTNFQGRWSPSFSRVQLSEEASLHYIHSSETLTLTLNHTAEHLLEADIKLFRKYFWDRAFLVKAFEPEARPEERTAMPSSGAETEEEIKNSVSSRSAAEKEDIKRVKSLVVQHNEHEDQHSLDLDRSFDILKKSKPPSTLLAAGRLSDMLNGGDEVYANCMVIDQVGDLDISYINIEGITATTSPESRGCTLWPQSSKHTLPTETSPSVYPLSENVEGTAHTEAQQSFMSPSSSCASNLNLSFGWHGFEKEQSHLKKRSSSLDALDADSEGEGHSEPSHICYTPGSQSSSRTGIPSGDELDSFETNTEPDFNISRAESLPLSSNLQSKESLLSGVRSRSYSCSSPKISLGKTRLVRELTVCSSSEEQRAYSLSEPPRENRIQEEEWDKYIIPAKSESEKYKVSRTFSFLMNRMTSPRNKSKTKSKDAKDKEKLNRHQFAPGTFSGVLQCLVCDKTLLGKESLQCSNCNANVHKGCKDAAPACTKKFQEKYNKNKPQTILGNSSFRDIPQPGLSLHPSSSVPVGLPTGRRETVGQVHPLSRSVPGTTLESFRRSATSLESESDHNSCRSRSHSDELLQSMGSSPSTESFIMEDVVDSSLWSDLSSDAQEFEAESWSLVVDPSFCNRQEKDVIKRQDVIFELMQTEMHHIQTLFIMSEIFRKGMKEELQLDHSTVDKIFPCLDELLEIHRHFFYSMKERRQESCAGSDRNFVIDRIGDILVQQFSEENASKMKKIYGEFCCHHKEAVNLFKELQQNKKFQNFIKLRNSNLLARRRGIPECILLVTQRITKYPVLVERILQYTKERTEEHKDLRKALCLIKDMIATVDLKVNEYEKNQKWLEILNKIENKTYTKLKNGHVFRKQALMSEERTLLYDGLVYWKTATGRFKDILALLLTDVLLFLQEKDQKYIFAAVDQKPSVISLQKLIAREVANEERGMFLISASSAGPEMYEIHTNSKEERNNWMRRIQQAVESCPEEKGGRTSESDEDKRKAEARVAKIQQCQEILTNQDQQICAYLEEKLHIYAELGELSGFEDVHLEPHLLIKPDPGEPPQAASLLAAALKEAESLQVAVKASQMGAVSQSCEDSCGDSVLADTLSSHDVPGSPTASLVTGGREGRGCSDVDPGIQGVVTDLAVSDAGEKVECRNFPGSSQSEIIQAIQNLTRLLYSLQAALTIQDSHIEIHRLVLQQQEGLSLGHSILRGGPLQDQKSRDADRQHEELANVHQLQHQLQQEQRRWLRRCEQQQRAQATRESWLQERERECQSQEELLLRSRGELDLQLQEYQHSLERLREGQRLVEREQARMRAQQSLLGHWKHGRQRSLPAVLLPGGPEVMELNRSESLCHENSFFINEALVQMSFNTFNKLNPSVIHQDATYPTTQSHSDLVRTSEHQVDLKVDPSQPSNVSHKLWTAAGSGHQILPFHESSKDSCKNDLDTSHTESPTPHDSNSHRPQLQAFITEAKLNLPTRTMTRQDGETGDGAKENIVYL

SEQ ID NO: 69963 - protein, 83 aa, Artificial Sequence
  derived and/or modified sequence
MELSCSEAPLYGQMMIYAKFDKNVYLPEDAEFYFTYDGSHQRHVMIAERIEDNVLQSSVPGHGLQETVTVSVCLCSEGYSPVT

SEQ ID NO: 69964 - DNA, 5118 bp, Artificial Sequence
  derived and/or modified sequence
atggagctgagctgcagcgaggcccccctgtacggccagatgatgatctacgccaagttcgacaagaacgtgtacctgcccgaggacgccgagttctacttcacctacgacggcagccaccagagacacgtgatgatcgccgagagaatcgaggacaacgtgctgcagagcagcgtgcccggccacggcctgcaggagaccgtgaccgtgagcgtgtgcctgtgcagcgagggctacagccccgtgaccatgggcagcggcagcgtgacctacgtggacaacatggcctgcagactggccagactgctggtgacccaggccaacagactgaccgcctgcagccaccagaccctgctgacccccttcgccctgaccgccggcgccctgcccgccctggacgaggagctggtgctggccctgacccacctggagctgcccctggagtggaccgtgctgggcagcagcagcctggaggtgagcagccacagagagagcctgctgcacctggccatgagatggggcctggccaagctgagccagttcttcctgtgcctgcccggcggcgtgcaggccctggccctgcccaacgaggagggcgccacccccctggacctggccctgagagagggccacagcaagctggtggaggacgtgaccaacttccagggcagatggagccccagcttcagcagagtgcagctgagcgaggaggccagcctgcactacatccacagcagcgagaccctgaccctgaccctgaaccacaccgccgagcacctgctggaggccgacatcaagctgttcagaaagtacttctgggacagagccttcctggtgaaggccttcgagcccgaggccagacccgaggagagaaccgccatgcccagcagcggcgccgagaccgaggaggagatcaagaacagcgtgagcagcagaagcgccgccgagaaggaggacatcaagagagtgaagagcctggtggtgcagcacaacgagcacgaggaccagcacagcctggacctggacagaagcttcgacatcctgaagaagagcaagccccccagcaccctgctggccgccggcagactgagcgacatgctgaacggcggcgacgaggtgtacgccaactgcatggtgatcgaccaggtgggcgacctggacatcagctacatcaacatcgagggcatcaccgccaccaccagccccgagagcagaggctgcaccctgtggccccagagcagcaagcacaccctgcccaccgagaccagccccagcgtgtaccccctgagcgagaacgtggagggcaccgcccacaccgaggcccagcagagcttcatgagccccagcagcagctgcgccagcaacctgaacctgagcttcggctggcacggcttcgagaaggagcagagccacctgaagaagagaagcagcagcctggacgccctggacgccgacagcgagggcgagggccacagcgagcccagccacatctgctacacccccggcagccagagcagcagcagaaccggcatccccagcggcgacgagctggacagcttcgagaccaacaccgagcccgacttcaacatcagcagagccgagagcctgcccctgagcagcaacctgcagagcaaggagagcctgctgagcggcgtgagaagcagaagctacagctgcagcagccccaagatcagcctgggcaagaccagactggtgagagagctgaccgtgtgcagcagcagcgaggagcagagagcctacagcctgagcgagccccccagagagaacagaatccaggaggaggagtgggacaagtacatcatccccgccaagagcgagagcgagaagtacaaggtgagcagaaccttcagcttcctgatgaacagaatgaccagccccagaaacaagagcaagaccaagagcaaggacgccaaggacaaggagaagctgaacagacaccagttcgcccccggcaccttcagcggcgtgctgcagtgcctggtgtgcgacaagaccctgctgggcaaggagagcctgcagtgcagcaactgcaacgccaacgtgcacaagggctgcaaggacgccgcccccgcctgcaccaagaagttccaggagaagtacaacaagaacaagccccagaccatcctgggcaacagcagcttcagagacatcccccagcccggcctgagcctgcaccccagcagcagcgtgcccgtgggcctgcccaccggcagaagagagaccgtgggccaggtgcaccccctgagcagaagcgtgcccggcaccaccctggagagcttcagaagaagcgccaccagcctggagagcgagagcgaccacaacagctgcagaagcagaagccacagcgacgagctgctgcagagcatgggcagcagccccagcaccgagagcttcatcatggaggacgtggtggacagcagcctgtggagcgacctgagcagcgacgcccaggagttcgaggccgagagctggagcctggtggtggaccccagcttctgcaacagacaggagaaggacgtgatcaagagacaggacgtgatcttcgagctgatgcagaccgagatgcaccacatccagaccctgttcatcatgagcgagatcttcagaaagggcatgaaggaggagctgcagctggaccacagcaccgtggacaagatcttcccctgcctggacgagctgctggagatccacagacacttcttctacagcatgaaggagagaagacaggagagctgcgccggcagcgacagaaacttcgtgatcgacagaatcggcgacatcctggtgcagcagttcagcgaggagaacgccagcaagatgaagaagatctacggcgagttctgctgccaccacaaggaggccgtgaacctgttcaaggagctgcagcagaacaagaagttccagaacttcatcaagctgagaaacagcaacctgctggccagaagaagaggcatccccgagtgcatcctgctggtgacccagagaatcaccaagtaccccgtgctggtggagagaatcctgcagtacaccaaggagagaaccgaggagcacaaggacctgagaaaggccctgtgcctgatcaaggacatgatcgccaccgtggacctgaaggtgaacgagtacgagaagaaccagaagtggctggagatcctgaacaagatcgagaacaagacctacaccaagctgaagaacggccacgtgttcagaaagcaggccctgatgagcgaggagagaaccctgctgtacgacggcctggtgtactggaagaccgccaccggcagattcaaggacatcctggccctgctgctgaccgacgtgctgctgttcctgcaggagaaggaccagaagtacatcttcgccgccgtggaccagaagcccagcgtgatcagcctgcagaagctgatcgccagagaggtggccaacgaggagagaggcatgttcctgatcagcgccagcagcgccggccccgagatgtacgagatccacaccaacagcaaggaggagagaaacaactggatgagaagaatccagcaggccgtggagagctgccccgaggagaagggcggcagaaccagcgagagcgacgaggacaagagaaaggccgaggccagagtggccaagatccagcagtgccaggagatcctgaccaaccaggaccagcagatctgcgcctacctggaggagaagctgcacatctacgccgagctgggcgagctgagcggcttcgaggacgtgcacctggagccccacctgctgatcaagcccgaccccggcgagcccccccaggccgccagcctgctggccgccgccctgaaggaggccgagagcctgcaggtggccgtgaaggccagccagatgggcgccgtgagccagagctgcgaggacagctgcggcgacagcgtgctggccgacaccctgagcagccacgacgtgcccggcagccccaccgccagcctggtgaccggcggcagagagggcagaggctgcagcgacgtggaccccggcatccagggcgtggtgaccgacctggccgtgagcgacgccggcgagaaggtggagtgcagaaacttccccggcagcagccagagcgagatcatccaggccatccagaacctgaccagactgctgtacagcctgcaggccgccctgaccatccaggacagccacatcgagatccacagactggtgctgcagcagcaggagggcctgagcctgggccacagcatcctgagaggcggccccctgcaggaccagaagagcagagacgccgacagacagcacgaggagctggccaacgtgcaccagctgcagcaccagctgcagcaggagcagagaagatggctgagaagatgcgagcagcagcagagagcccaggccaccagagagagctggctgcaggagagagagagagagtgccagagccaggaggagctgctgctgagaagcagaggcgagctggacctgcagctgcaggagtaccagcacagcctggagagactgagagagggccagagactggtggagagagagcaggccagaatgagagcccagcagagcctgctgggccactggaagcacggcagacagagaagcctgcccgccgtgctgctgcccggcggccccgaggtgatggagctgaacagaagcgagagcctgtgccacgagaacagcttcttcatcaacgaggccctggtgcagatgagcttcaacaccttcaacaagctgaaccccagcgtgatccaccaggacgccacctaccccaccacccagagccacagcgacctggtgagaaccagcgagcaccaggtggacctgaaggtggaccccagccagcccagcaacgtgagccacaagctgtggaccgccgccggcagcggccaccagatcctgcccttccacgagagcagcaaggacagctgcaagaacgacctggacaccagccacaccgagagccccaccccccacgacagcaacagccacagaccccagctgcaggccttcatcaccgaggccaagctgaacctgcccaccagaaccatgaccagacaggacggcgagaccggcgacggcgccaaggagaacatcgtgtacctgtag

SEQ ID NO: 69965 - DNA, 5118 bp, Artificial Sequence
  derived and/or modified sequence
atggagctgtcttgttcagaagctccgttgtacggccagatgatgatctatgccaaatttgataaaaatgtctatttgcctgaggatgcagagttttattttacttatgatggcagtcaccaacgccacgtcatgattgcagaaagaattgaagataacgttctgcagagtagtgtaccaggtcacggcctgcaggagacagtgactgtaagcgtgtgtttatgtagtgagggttactctcccgttactatgggctcgggctctgtgacatacgtggataatatggcctgccggctggcgagattgctggtgactcaggcgaacaggctcacagcctgttctcaccaaaccttattgactccatttgcactgacagccggtgccctccccgcgctcgacgaagaactcgtactggccctgacccatctcgaactgcccctggaatggactgtccttgggtccagttccttggaggtgtcctcacatcgggaatcattgttgcaccttgctatgcgctggggtctggccaaactgtcccagttctttctttgtctgcccggcggggttcaggcactggctcttcccaacgaagaaggagcaacaccgctggaccttgccctacgcgagggccacagtaagttagtcgaagatgtcacgaacttccagggcagatggtccccgagcttctctcgagtccagctgtcggaggaggcttccttgcactatatccactcctccgagactctcacccttactctgaatcatacagccgagcacttgctggaagctgacattaaattattccgcaagtacttttgggaccgagctttcctggtgaaagcatttgaacctgaagccaggcccgaggaacgaaccgctatgccaagctctggagccgagacggaggaagagattaagaattcagtcagctcccggagcgctgctgagaaagaggacataaagcgtgtgaaaagtctcgtagtccagcacaatgagcacgaagaccagcattcgctggacttggaccgtagctttgatatcttaaaaaagagcaaaccaccatctactttgctggctgccggcagactcagtgatatgttgaatggcggcgatgaggtctatgccaattgcatggttatcgatcaggtaggtgatttagacatctcgtacataaatatagaaggcatcaccgcaaccacatctcctgaatcccgggggtgtaccctgtggcctcagagcagcaagcacaccctccctactgagactagtccttcagtatacccactttcagagaatgtggaggggaccgcacacactgaagctcagcagtcctttatgtccccatcgagctcttgtgccagtaacttgaatttgtcatttggctggcatgggttcgaaaaagagcaatcacatctgaaaaaaaggtcctcatcattggacgcgctggatgcagattctgagggcgaggggcattccgaacccagccacatttgttacaccccaggcagtcagagctccagccggactggcataccctcaggcgatgagctggattcatttgagacaaacaccgagcccgattttaacatcagtcgcgccgagtctctcccactgagcagcaatctccagagtaaggaatcactgctgtccggggtgagaagccgaagttacagttgcagtagcccgaaaatctcacttggcaaaacaagactggtgagggagctgacagtgtgctcgagttctgaggaacaacgcgcttattcattaagtgaacctcctcgggaaaatcggattcaggaggaggagtgggacaaatatattattcctgcaaagtcggaatcggagaaatataaggtgagccgaactttttcttttctgatgaatcgaatgacctctccccggaataagagcaagacaaagagcaaggacgccaaagataaggagaaactgaataggcaccagttcgcccccggcacttttagcggcgtgcttcagtgtttagtgtgcgacaagactttgctcggaaaggaaagcctacagtgctcaaactgtaacgcgaatgtgcacaaagggtgtaaagacgccgctcctgcttgtaccaaaaaatttcaggaaaagtataataagaacaagccacagaccatattaggcaattccagttttagggatatcccccagcccggattgtctcttcatcccagttcttccgtgccagttggcttgccaaccggcaggagggagaccgtaggccaggttcacccactctctagaagcgttcccgggactactctggagtcattccgacgcagtgccacaagtctagagtctgaatccgatcacaactcatgcagatcaagatctcactctgacgagcttctccagtcaatgggctcctcaccatcaacagagtctttcatcatggaagatgtggtcgactcatccctgtggagcgatctttcaagcgatgctcaggaatttgaagctgaatcctggtcccttgttgtcgaccctagcttttgcaaccggcaggaaaaagacgttatcaagagacaggacgtgatctttgaactgatgcagactgaaatgcaccacattcaaaccctcttcatcatgagcgagatttttaggaagggcatgaaagaagagcttcaattggaccattccacagttgacaaaatcttcccgtgcctcgatgagctgttagaaatccatagacattttttctattccatgaaagagaggaggcaggaaagttgcgccgggtccgatcggaacttcgtgatcgatcgcatcggcgatattctggtgcagcaattctccgaagagaatgcatcaaaaatgaaaaagatttacggggagttttgctgtcatcacaaagaggctgtgaacctcttcaaagagttgcaacagaacaagaagttccagaattttataaagcttcggaactctaacctcctcgccaggagacgtggcattcccgaatgcattctgctcgtgacgcagaggatcacaaagtaccctgtcctggttgagcgcatcctgcagtacacaaaggaaaggactgaggagcataaggacctgaggaaggctctctgtctgatcaaagacatgattgcgacagttgatctgaaagtcaatgagtacgagaaaaaccagaaatggctcgagatacttaacaaaatcgagaataagacatatactaagttgaaaaacggccacgtgtttcgtaagcaggcactcatgtctgaggagcgaaccctattgtatgacggacttgtttactggaagactgcaactggcaggttcaaggatattctcgccttgctgctgacagacgtgctgctcttccttcaggaaaaagaccagaagtatattttcgccgctgtcgatcagaagcctagcgtgatctcgttgcagaagctcattgcgcgggaggtggccaatgaagaaaggggtatgttcctgatctccgccagctccgctggtccagagatgtacgaaattcacacaaattcaaaagaggaacgcaacaactggatgagaagaattcagcaggcggttgaatcctgcccagaagagaaaggcgggcggacatcggagtcagatgaggacaagcgtaaggccgaggcgcgggttgccaagattcagcagtgtcaagaaatcttgacaaatcaagatcagcagatttgtgcatacctggaagaaaaactgcacatctatgcagaacttggcgaactgagcggatttgaggatgtgcacctggaacctcacctgctgataaagcctgatccaggggagcccccacaggcagcatcccttctagccgctgctttgaaggaagcggaatccttacaggtggcagtgaaagcctcacagatgggggccgttagccagtcatgcgaggattcctgcggcgactcagtgctcgcggacacactcagttcccatgacgttccggggagtccaacagcatctctggtcactggaggacgggagggaagaggctgctccgacgttgaccccgggattcaaggagtagtcacggaccttgcagtctctgatgcaggcgaaaaggttgaatgtagaaactttccaggttcatcacaatccgaaattattcaggccatccaaaacctgacacggttactttattccctccaagccgcactcactattcaggattctcatattgagattcacaggttggtgctgcaacagcaggagggactgtccctcggacacagtatcctacggggaggcccattgcaggatcagaaatcccgggacgcagaccgtcagcatgaagaattagctaacgtgcatcagctgcaacatcagctgcagcaggaacagaggagatggctgaggcggtgcgaacagcagcaaagagctcaggccactcgggaatcatggctccaggagagagagcgcgagtgtcagagccaggaagaactgctcctgaggtcccgcggtgagttggatttgcaactgcaggagtaccagcattctttggagcgcttgcgagagggacagagactcgtcgagcgggagcaggccagaatgcgagcacagcaaagtctgctcggacactggaagcatgggaggcagaggagcctgccagctgtgctgctgcctgggggtcctgaggtgatggagcttaatcgatccgaatctctctgccatgaaaacagcttctttattaacgaggccctcgtgcagatgagtttcaacacgttcaataagttaaatcccagcgtcattcaccaggacgccacttaccccacaactcagagtcattccgatctggtgaggactagtgagcaccaagtcgaccttaaggtagacccttcccaacctagcaacgtgtcccacaagctgtggacagcagccggtagcggacaccagattctgccctttcacgagagtagcaaggattcctgcaaaaacgacttggacaccagtcacacagagagtccaaccccgcacgatagtaattcgcatcgcccccaattgcaagcattcattaccgaagccaaattaaatctgcccacacggaccatgacccgccaagatggggaaacaggcgacggggccaaggagaatatagtctatctctag

SEQ ID NO: 69966 - DNA, 5118 bp, Artificial Sequence
  derived and/or modified sequence
atggaactgtcttgctccgaagcccccctgtatggacagatgatgatatacgctaagttcgataagaatgtgtacctgcccgaagatgctgaattttattttacttacgatggctcccatcaaagacacgtcatgatagctgaaagaatagaggacaacgtgttacagtcaagcgtgccagggcacgggctgcaggaaactgttacagtttcggtgtgcttgtgttctgagggctacagtcccgtaacaatgggctccggtagtgtcacatacgtggacaacatggcctgccggctagctaggctgttggtgacccaagcaaatcggctgactgcctgtagccaccaaacccttctcactccatttgccctcacggcaggcgctctgcctgcactggatgaggaacttgttctggcccttactcacctggaacttcccctggagtggactgtgctcggatccagttctttggaagtgtcctcacacagagagtccctcttgcacctggctatgaggtgggggctcgctaagctgagccagttctttctgtgcctgcccggaggtgttcaggcactcgctcttcctaatgaggagggagccaccccactcgatctagccctgcgggaagggcactcaaaattggtcgaggacgtcacaaatttccagggcagatggtctcctagtttttcacgggttcagttgtccgaggaggcttctctccattacatacactcatccgagaccctgaccctgacattaaatcataccgctgagcacctcttagaggccgacataaagctgtttcggaagtacttctgggatcgggcgtttttggtgaaggccttcgaaccagaggccagacctgaggaaaggaccgcaatgccttcctctggtgccgagacagaggaagagattaaaaattccgtgtcttcaagaagcgctgctgagaaggaagacataaagcgggtaaagtctctggtagtgcagcacaatgagcatgaagatcagcacagtctcgaccttgatagaagcttcgacatactgaaaaagtctaagcctccttctacactactggccgcgggtcgcctgtccgatatgttaaacgggggagacgaggtatatgccaactgtatggttatagaccaggtgggcgacctggacatctcctatatcaatatcgaagggattaccgccacgacgagccccgaaagccggggatgcactctatggccccagtcatctaagcacaccctgcccaccgaaaccagcccaagcgtgtatcccttgagtgagaatgtggagggaactgcacatacagaagcccaacagagttttatgagcccatctagtagttgcgcttctaatctcaacctgtcatttgggtggcacgggttcgagaaggagcagtcgcaccttaagaaacgcagcagtagcctggatgctttagatgctgactctgagggagaaggacactcagagccgtcccacatttgctatacccccgggagccaaagttcttcccgaaccggtatcccaagtggggacgagcttgactcttttgagactaatacggagcccgattttaatattagcagagcggagtcactgcctctgtcatcgaatttacagtcgaaagagtccctgcttagcggggtcagatcgagaagctactcctgctcatcacctaagatcagtctcggaaagacgagactggtacgcgagttgactgtctgctcgagttcggaagaacagcgtgcctacagtcttagcgaaccgcctagagagaatcgaatacaggaggaggaatgggacaagtacattatccctgcaaagtctgagagtgagaagtataaggtgtccagaactttctccttcctgatgaatcgaatgacatctccaaggaataagagtaaaaccaaatcaaaagacgcaaaagacaaggagaagttaaaccggcatcagttcgcccccgggaccttctccggtgtcctgcagtgcctcgtttgcgacaagaccctgctgggcaaagaaagcctgcaatgtagtaattgcaatgctaacgtccataagggatgtaaagacgccgcccctgcatgcactaaaaagttccaggaaaagtataataagaataagccccaaacaatactggggaacagcagctttcgggacataccccagccgggcttgagcctccatccatcttcttccgtgccagtcggcctgcccactggtcggagagaaacagtggggcaagtccatccactttctagaagtgttccaggcacaaccttagaaagctttcgtcgttccgccacctcattggaaagcgagtcagaccacaactcatgcaggagtcgttcgcattcagacgagttactgcagtctatgggatcttcaccttccactgagtcgttcatcatggaggacgtggtggattcttctttgtggtccgatctgtccagtgacgcacaggaattcgaggccgaatcgtggagtctcgtggtcgatccttcattttgcaacaggcaggaaaaagacgtcatcaaacgtcaggacgtgatatttgaactgatgcagacagagatgcaccacatccagaccctgttcattatgtcagaaatttttcgtaaaggaatgaaagaagagctgcaattggaccacagtactgtggacaaaattttcccttgcctcgatgagttgctagaaatacaccgccactttttctactcaatgaaggaacggcgtcaagagtcctgtgccggtagtgatcggaatttcgtcattgacagaatcggagacatcctggttcagcagttctctgaagagaacgcctccaaaatgaagaagatatatggcgaattttgttgccaccataaagaggcggtgaacctattcaaagaacttcagcagaacaagaagttccagaattttatcaagcttagaaactccaacctgctggctagaagaagaggcattcctgaatgcattttgttggttacccagagaatcaccaaatatccagtgctggttgagcggatcttgcagtataccaaggaacgtaccgaggagcacaaagatctgcgcaaggctttgtgccttattaaagacatgatcgcaacagttgacctcaaagtaaacgagtatgagaaaaatcagaaatggctggaaatcctcaacaaaattgagaataaaacctatactaaactgaagaatggacacgtctttcgcaaacaagccctgatgagcgaagaacgcactctactctacgacgggcttgtctactggaaaactgcgacaggccgatttaaggatatactagccctgcttttaacagacgttctgctgttcctccaggagaaggatcagaagtacatcttcgcagccgttgatcaaaaacccagtgtgatctctctgcaaaagttaatcgccagggaagtggcaaacgaagagaggggcatgttcctcatctccgcgtcctccgcaggtcccgaaatgtatgaaatccataccaatagtaaggaggagagaaataactggatgcgcagaatccagcaggcagtcgagagttgcccagaagagaagggtgggcgcaccagcgaatctgacgaggacaagcggaaagctgaggcgagggtggccaagatccagcagtgtcaggaaatcctaactaatcaagaccaacagatttgtgcatatttagaggagaaactccatatctacgcggagctcggggaactgagcgggtttgaggatgttcacctggagcctcaccttctcatcaagcctgaccccggggaacccccacaggccgcatctctcctcgcggctgcactgaaggaggccgaaagcctgcaggtggctgtgaaggccagccagatgggtgcggtttcacagagctgtgaggactcgtgcggagattctgtgctcgccgataccctctctagtcacgatgtgcccgggtcacctacagcctcacttgtcaccggcggaagggaggggcgagggtgttccgatgtggacccaggcattcagggtgttgtgacggatctagctgtcagtgacgccggcgaaaaggtcgaatgtagaaactttcccggaagtagccagtcagagatcatccaggcgatacagaatctcactcggttgctgtattcattgcaggccgcgctgacaatccaggacagtcacatagagattcatcgcttagttctgcaacagcaggaaggcctctctctgggccattctattctgcggggagggcccctgcaggatcagaaaagcagagatgctgatcgtcaacacgaagaactcgcaaacgtacatcaattgcagcaccagctccagcaggagcagcgaaggtggctccggcgctgtgagcagcagcagcgcgctcaagccacacgcgagtcgtggttgcaggaaagggaacgcgagtgccagagtcaggaagagctgctgctgcgttccagaggggagttggatctgcagttacaggaataccaacatagcctcgagagacttagagaaggacaacgattggtcgaaagagaacaggcacggatgcgcgcccagcaaagcctcctggggcactggaaacatgggcgccagcgcagcctcccagccgttcttctgcctggaggtcctgaagtgatggaactgaataggtccgagtctctttgccacgagaactccttttttatcaacgaggctcttgtgcagatgtccttcaacacatttaacaagctgaacccttctgtgatacaccaggacgcgacgtatcccacgacccagtctcactctgacctcgtaagaacctctgagcatcaggtcgatctaaaggtggatccaagccaacctagcaacgtttctcacaaattatggactgccgcgggttctggccaccagatcctgcccttccatgagagcagcaaagacagctgcaaaaacgacctcgacacaagccacaccgagagtcccacaccccacgacagtaatagtcatagaccccaactgcaagcctttatcaccgaggcaaagcttaatcttcccacccgcactatgactcgacaggacggcgaaaccggcgatggggcaaaagagaatattgtgtatctctag

SEQ ID NO: 69967 - DNA, 5118 bp, Artificial Sequence
  derived and/or modified sequence
atggagctgagctgcagcgaggcccccctgtatggccagatgatgatctatgccaagtttgacaagaatgtgtacctgcctgaagatgctgagttctacttcacctatgatggcagccaccagagacatgtgatgattgctgagagaattgaagataatgtgctgcagagctctgtgcccggccacggcctgcaggagaccgtgacagtgtctgtgtgcctgtgcagcgagggctacagccctgtgaccatgggcagcggctctgtgacctacgtggacaacatggcctgccgcctggcccggctgctggtgacccaggccaaccggctgacagcctgcagccaccagaccctgctgaccccatttgccctgacagctggggccctgcctgccctggatgaggagctggtgctggccctgacccacctggagctgcccctggagtggacagtgctgggcagcagcagcctggaggtgagcagccaccgggagagcctgctgcacctggccatgcgctggggcctggccaagctgagccagttcttcctgtgcctgcccggcggcgtgcaggccctggccctgcccaatgaggagggcgccacccccctggacctggccctgcgggagggccacagcaagctggtggaggatgtgaccaacttccagggccgctggagccccagcttcagccgggtgcagctgtctgaggaggccagcctgcactacatccacagcagcgagaccctgaccctgaccctgaaccacacagctgagcacctgctggaggccgacatcaagctgttcaggaagtacttctgggaccgggccttcctggtgaaggcctttgagcctgaggcccggcctgaggagaggacagccatgcccagcagtggagctgagacagaggaggagatcaagaacagcgtgagcagccgctctgctgctgagaaggaggacatcaagagggtgaagagcctggtggtgcagcacaatgaacatgaggaccagcacagcctggacctggacaggagctttgacatcctgaagaagagcaagccacccagcaccctgctggccgccggccgcctgagtgacatgctgaatggaggagatgaggtgtatgccaactgcatggtgattgaccaggtgggggacctggacatctcctacatcaacatcgagggcatcacagccaccaccagccctgagagccggggctgcaccctgtggccccagagcagcaagcacaccctgcccacagagaccagccccagcgtgtaccccctgtctgaaaatgtggagggcacagcccacacagaggcccagcagagcttcatgagccccagcagcagctgtgccagcaacctgaacctgagctttggctggcacggctttgagaaggagcagagccacctgaagaagaggagcagcagcctggatgccctggatgctgacagcgagggggagggccacagcgagcccagccacatctgctacaccccaggcagccagagcagcagcaggacaggcatccccagcggagatgagctggacagctttgagaccaacacagagccagacttcaacatcagcagagctgagagcctgcccctgagcagcaacctgcagagcaaggagagcctgctgagcggcgtgcgcagccgcagctacagctgcagcagccccaagatcagcctgggcaagacccggctggtgcgggagctgactgtgtgcagcagcagcgaggagcagagggcctacagcctgtctgagcccccaagagaaaatcgcatccaggaggaggagtgggacaagtacatcatcccagccaagtctgagagcgagaagtacaaggtgtccaggaccttctccttcctgatgaacaggatgaccagccccaggaacaagagcaagaccaagagcaaggatgccaaggacaaggagaagctgaacagacaccagtttgcccctggcaccttctctggagtgctgcagtgcctggtgtgtgacaagaccctgctgggcaaggagagcctgcagtgcagcaactgcaatgccaacgtgcacaagggctgcaaggatgctgccccagcctgcaccaagaagttccaggagaagtacaacaagaacaagccccagaccatcctgggcaacagcagcttccgggacatcccccagcccggcctgagcctgcaccccagcagctctgtgcctgtgggcctgcccactggaagaagagagaccgtgggccaggtgcaccccctgagccgctctgtgcccggcaccaccctggagagcttccgccgcagcgccaccagcctggagagcgagagtgaccacaacagctgccgcagccgcagccacagtgatgagctgctgcagagcatgggcagcagccccagcacagagagcttcatcatggaggatgtggtggacagcagcctgtggagcgacctgagcagtgatgcccaggagtttgaggccgagagctggagcctggtggtggaccccagcttctgcaaccggcaggagaaggatgtgatcaagaggcaggacgtcatctttgagctgatgcagacagagatgcaccacatccagaccctcttcatcatgtctgagatcttcaggaagggcatgaaggaggagctgcagctggaccacagcacagtggacaagatcttcccctgcctggatgagctgctggagatccaccgccacttcttctacagcatgaaggagcggcggcaggagagctgtgccggcagtgacaggaacttcgtcatcgacagaattggagacatcctggtgcagcagttcagcgaggagaatgccagcaagatgaagaagatctatggagagttctgctgccaccacaaggaggccgtgaacctcttcaaggagctgcagcagaacaagaagttccagaacttcatcaagctgaggaacagcaacctgctggccaggagaagaggcatccctgagtgcatcctgctggtgacccagaggatcaccaagtaccctgtgctggtggagcgcatcctgcagtacaccaaggagaggacagaggagcacaaggacctgaggaaggccctgtgcctgatcaaggacatgattgccaccgtggacctgaaggtgaatgaatatgagaagaaccagaagtggctggagatcctgaacaagattgagaacaagacctacaccaagctgaagaatggacatgtgttcaggaagcaggccctgatgtctgaggagaggaccctgctgtatgatggcctggtgtactggaagacagccaccggccgcttcaaggacatcctggccctgctgctgacagatgtgctgctcttcctgcaggagaaggaccagaagtacatctttgctgctgtggaccagaagcccagcgtcatcagcctgcagaagctgattgcccgggaggtggccaatgaggagcggggcatgttcctgatcagcgccagcagcgctggccctgagatgtatgagatccacaccaacagcaaggaggagaggaacaactggatgaggcgcatccagcaggccgtggagagctgcccagaggagaagggcggccgcaccagcgagagtgatgaggacaagaggaaggccgaggcccgggtggccaagatccagcagtgccaggagatcctgaccaaccaggaccagcagatctgtgcctacctggaggagaagctgcacatctatgcagagctgggggagctgagcggctttgaagatgtgcacctggagccccacctgctgatcaagccagaccccggggagcccccccaggccgccagcctgctggccgccgccctgaaggaggccgagagcctgcaggtggccgtgaaggccagccagatgggcgctgtgtcccagagctgtgaggacagctgtggggacagcgtgctggccgacaccctgagcagccatgatgtgcccggcagccccacagccagcctggtgactggaggccgggagggccggggctgcagtgatgtggaccccggcatccagggcgtggtgacagacctggccgtgtctgatgctggggagaaggtggagtgcaggaacttccctggcagcagccagagcgagatcatccaggccatccagaacctgacccggctgctgtacagcctgcaggccgccctgaccatccaggacagccacatcgagatccaccggctggtgctgcagcagcaggagggcctgagcctgggccacagcatcctgcggggcggccccctgcaggaccagaagagcagagatgctgaccggcagcacgaggagctggccaacgtgcaccagctgcagcaccagctgcagcaggagcagaggcgctggctgcggcgctgtgagcagcagcagagggcccaggccacccgggagagctggctgcaggagcgggagcgggagtgccagagccaggaggagctgctgctgcggagcagaggagagctggacctgcagctgcaggagtaccagcacagcctggagcggctgcgggagggccagaggctggtggagcgggagcaggccaggatgagggcccagcagagcctgctgggccactggaagcacggccggcagaggagcctgcctgctgtgctgctgcccggcggccctgaggtgatggagctgaacagaagtgagagcctgtgccacgagaacagcttcttcatcaatgaggccctggtgcagatgtccttcaacaccttcaacaagctgaaccccagcgtcatccaccaggatgccacctaccccaccacccagagccacagcgacctggtgaggaccagcgagcaccaggtggacctgaaggtggaccccagccagcccagcaatgtgagccacaagctgtggacagctgctggcagcggccaccagatcctgcccttccacgagagcagcaaggacagctgcaagaatgacctggacaccagccacacagagagccccacccctcatgacagcaacagccaccggccccagctgcaggccttcatcacagaggccaagctgaacctgcccaccaggaccatgacccggcaggatggagaaacaggagatggagccaaggagaacatcgtgtacctgtag

SEQ ID NO: 69968 - DNA, 5118 bp, Artificial Sequence
  derived and/or modified sequence
atggagctgagctgcagcgaggcccccctgtacggccagatgatgatttatgctaagtttgacaagaacgtgtacctacccgaggacgccgagttctatttcacttatgatggcagtcaccagagacacgtaatgatcgcagagcggatcgaggacaacgtcttgcagtctagcgtcccggggcatgggctgcaggaaacagtgaccgtcagcgtgtgtctctgcagtgagggatatagtccagtaactatggggagcggctccgtgacttatgtagataatatggcatgtaggttagcaagactgctagtcacacaggccaacaggctgacagcctgtagtcatcagacacttcttacgccctttgccttaaccgctggcgcccttccagccttggatgaagaactggttcttgcactcacgcatctcgagctgccattggaatggacagtgttgggcagtagttcactggaggtgtcatcccatagagagtccttgttacacctcgccatgagatggggcctcgcgaagttgtcacagttttttctctgcctgcccggcggagtgcaggccctggcactgccaaacgaggagggcgccactcccctggacctcgccctccgagaaggccattccaaattagtggaagatgtcacaaattttcaggggcgatggagcccctccttcagcagggtccaactcagcgaggaggcatccttacactacatccattcttctgaaacactaacactcaccctgaaccacactgcggagcatttactcgaagctgatatcaagctttttagaaagtacttctgggaccgggcatttctggtgaaggccttcgaacccgaggcccgcccagaggaaagaactgcaatgccctccagcggcgctgaaactgaagaggaaattaagaacagtgtgtcatccaggtccgccgccgaaaaagaagacatcaaacgggtcaaatcactggttgttcagcacaacgaacatgaggaccagcattctttggacttggatcgcagcttcgacatactgaagaaatctaaaccccctagtacactgctggctgcgggacgcttgtccgacatgctcaatggaggcgacgaagtttacgccaactgcatggtcatcgaccaggtgggcgatttggacatatcatatatcaatatcgaaggtataactgctactacatcccccgagtcgagaggttgtacattgtggcctcaaagtagtaagcatactctgcccaccgagacaagcccctccgtctatccactgagcgaaaacgtggaaggaaccgcccacacggaagcccaacagagtttcatgagccctagtagctcatgcgcctccaacctgaatctgtctttcggatggcacggttttgaaaaagaacagagtcacctgaagaagagaagctcaagtctggatgcgcttgatgccgattctgagggtgagggccatagtgagccttcgcacatttgctacacacctggaagccagtcttctagtcggaccggcattccatcaggggacgagctcgactctttcgagactaacactgagccagactttaacatctcgagggcggaatctctgccactctcatccaacctccaatccaaagagagcctgctgtcaggagtgcggagtcggagttactcttgcagctcaccgaagatatcgctcggtaagacccggctcgtccgggaactgactgtgtgcagctcaagcgaagaacagagggcctacagcctgtctgagccaccaagagaaaacaggattcaagaggaggaatgggataaatacatcattccagccaagtcggagagtgaaaaatataaagtgtctcgtaccttcagcttcctcatgaatcgaatgacctccccaaggaataagagcaagacgaaatcaaaggacgccaaggacaaagagaaactcaatagacatcagtttgctcccggcacattttccggagtgctccaatgcttggtctgcgacaaaaccctgcttggtaaagagtcactacagtgtagcaattgtaacgctaacgtgcacaagggttgtaaagatgcagctcccgcctgtactaagaagtttcaggaaaaatacaacaaaaacaaaccccagaccatacttggaaactctagtttccgggatatcccacagcccgggctttctctgcatccatcctcctctgtgccagtcggtctgcctaccgggcggcgcgagacagttgggcaagtgcaccccttatcccgcagcgtccctggaacaaccctggaaagctttaggaggtcggcaacctccttagagtctgagtctgaccataatagctgcagaagcagaagtcatagtgacgagttgctgcagtcaatgggttcttctcctagtaccgagtcttttataatggaagatgtagtcgatagttctctatggtccgacctgtctagcgacgcgcaggaattcgaggccgaatcatggagcctcgtcgtcgacccatctttttgcaatcgccaagaaaaagatgtaattaagcgccaggatgtgatattcgagctaatgcagaccgaaatgcatcacatccagacgctattcattatgtccgaaatatttcgtaaaggcatgaaggaagagctacagctcgaccattcaactgtcgacaaaatatttccgtgcctggatgaattactggaaattcaccgccactttttttactccatgaaggaacgcagacaggagtcatgcgccggatcagaccggaatttcgtgatagatcgcatcggcgacatcctggttcaacagtttagtgaagagaacgcttctaaaatgaaaaaaatttatggcgagttttgttgtcatcataaagaagcagtgaacctttttaaagaactgcagcaaaacaagaaattccagaactttatcaagttacgaaactcgaacctgcttgccaggagaaggggcattcccgaatgcatattgctggtgacccagagaattacgaagtatcccgtgctggtcgagaggatcctgcagtacactaaagagaggaccgaagagcataaagacttgcgcaaagcactatgcctaattaaggatatgatagcgactgtggatctcaaggttaatgagtatgaaaaaaaccagaaatggctggagatcctgaataagattgagaacaagacctacacaaagttaaagaatggccacgtctttcgcaagcaggctctcatgtctgaggagagaactctgttgtatgatggcctggtgtattggaagacagccactggacgctttaaagatatcctggcgctgctgctgacggacgtactcctttttctgcaagaaaaagaccagaaatacatattcgccgctgtagatcagaagccttccgtaatctcgctgcagaagcttatcgcccgggaagtagccaatgaagaaagaggcatgttcttgattagcgctagctcagcagggcctgaaatgtatgagattcacacaaattcgaaggaggagcgcaataactggatgcggcgcatccaacaagccgtggagagttgccccgaggagaaaggcggaaggacatctgagtctgacgaagataaacgcaaggccgaagcccgggttgcaaagattcaacagtgccaggaaatattaaccaaccaggaccagcagatatgcgcatacctggaggaaaaattacacatatacgccgaactgggcgaactcagcggcttcgaagacgtgcacctggagccccacctattaatcaagcccgatcctggcgagccccctcaggccgccagcctgctcgccgctgccctcaaggaggccgagtccctccaggtcgccgtgaaggcttcacaaatgggcgctgtcagccaaagttgtgaggattcctgcggtgacagtgtcctcgccgacaccctctcatcccacgatgttcccggatctcccactgccagcctggtaaccgggggccgcgaaggacgagggtgcagtgatgttgaccctggcattcagggggttgttactgacctcgcggtgagtgacgcgggcgagaaagtagagtgtcggaacttcccaggcagcagtcagagcgaaatcattcaagcgatacagaacttaactaggctcctctattccctgcaggcagcgttaacaatacaggacagccatattgagatccatcgcctggtcctccaacagcaggagggactctccctcggacactccatcttgcgtggaggacccctgcaggaccagaagagtcgcgacgctgacagacaacacgaggaactggccaatgttcatcagttacaacatcaactacagcaagagcagcgacgttggttgaggaggtgtgagcaacagcagagagctcaggcaactcgggagagctggcttcaagaacgggagcgggaatgccaaagtcaggaagagttgctgctccggtccagaggtgaactggatctgcagctgcaagagtaccagcactccctggagagactgagggaggggcagcggctagtggaacgcgagcaggcccgcatgcgcgctcagcagtcattgctgggacactggaagcacggccgtcagcgctctctgcccgctgtcttactgccggggggacccgaggtcatggaactgaacagaagcgagtcactttgtcacgaaaattcttttttcatcaatgaggccttggttcagatgagcttcaacactttcaacaagctgaacccaagcgttattcatcaagacgccacttatccaacaacgcagagccactccgaccttgtgagaaccagcgagcaccaggttgacctgaaagttgacccatctcagccatctaacgtttcccacaaactgtggaccgccgctggaagcggacaccagatacttccgtttcacgagtcttcgaaggattcctgcaaaaatgacctggatacctcgcatacagaatcacctacccctcacgacagtaacagccaccggcctcagttacaggcattcatcactgaggccaaactgaacctgccaactagaacaatgaccagacaggatggcgaaacaggagatggggcaaaagagaatatcgtgtacttgtag

SEQ ID NO: 69969 - DNA, 5118 bp, Artificial Sequence
  derived and/or modified sequence
atggagctgagctgcagcgaggcccccctgtacggccagatgatgatttacgctaagttcgataagaatgtatatctaccagaggatgccgaattctactttacttacgatggcagccaccagagacacgtcatgatcgccgagcggattgaagacaacgttctgcagtcttcagttcccgggcacggactgcaggaaacagtgaccgtctccgtgtgcctgtgctccgaagggtattctcccgtcaccatgggtagcggcagcgttacctacgtggacaatatggcatgccggctcgccagattattagtgacccaggccaacagattgaccgcctgctctcatcagacactgttgacgcccttcgccttaacagcaggtgccctccctgccctcgacgaagaactagttctcgctcttacccatctggaactaccattagaatggaccgtgctgggatctagttctctggaggtatcatcccatcgggagtcattgctccaccttgccatgcgatggggactagccaagcttagccagttcttcctttgcctgccaggtggcgtccaggctctcgcactcccgaatgaggagggcgctacacccctggacctcgcactcagagaaggtcacagcaaacttgtggaggacgttacgaatttccagggtcgttggagtccttcttttagcagggtgcagctgtctgaggaagcaagtttacactatattcactcttctgaaactctgacactgacactcaaccacacagcagagcaccttctggaggcagacattaagttattccggaaatatttttgggacagggcatttcttgtgaaggcttttgagcccgaagctcggcctgaagagaggaccgccatgccttcctccggtgctgaaaccgaggaggagattaaaaactcagtgagttcgcgcagcgctgccgagaaagaggacataaagcgagtcaagtccctcgtcgtgcagcacaacgaacatgaggaccagcacagcttggacctggacagatccttcgatatactcaaaaaatctaagccgccttccacactccttgccgccggaagactgagcgacatgttgaacgggggcgacgaggtgtacgctaactgtatggtgatcgaccaagttggtgatctcgatatctcgtacattaatatcgaaggcattacagcaaccactagcccagagagccgtggatgcactctgtggcctcagtcttctaagcacacattgccaacagagaccagccccagcgtgtacccgctgtccgaaaacgtagaggggactgcgcacactgaagcacagcagagcttcatgtcccccagttcatcttgtgccagcaaccttaatctgtccttcggatggcacggattcgagaaggaacagagtcatttgaagaagcgttcatcatctctggacgctcttgatgctgattctgaaggagaaggacactctgaaccatcacatatctgctatacccccggatcacagagctcctctagaacaggcattccttcaggcgacgagcttgattcattcgagacaaatacggaacccgatttcaatatcagtagggccgaatctctcccacttagtagcaacctgcagtctaaagaatccctcttatctggagtccggtctcgttcctacagttgcagctctcctaagatctcactgggaaagacccgcttagtacgggaattgaccgtatgctcgtccagtgaggagcagcgtgcttactcactgagcgagcctccccgtgagaaccgaatccaagaagaggagtgggataagtacattattcctgccaagtctgagagcgaaaaatataaagtgagtaggacattcagcttcctcatgaatcgtatgacttctcctcgaaacaagagcaaaacaaaaagcaaagatgccaaagacaaagagaaactgaataggcatcagttcgcacctgggacttttagtggagtgctccagtgtttggtgtgcgacaaaacactgttgggcaaagagtctcttcagtgtagtaattgtaacgccaacgtacataaggggtgcaaggacgcagcccctgcctgcacaaaaaaattccaggaaaaatataacaagaacaaaccacagacgattctcggcaacagttcatttcgcgacataccacagcccggattgtcactgcacccctctagctctgtgcccgtgggtctgccgacagggcggagggaaacagttggacaggtacacccacttagcaggtcagtcccgggcacaacactggagtcctttcgacgatcggcaacctccttggaaagtgagagtgatcataactcttgccgaagtagatcacattcagatgagctccttcagtccatggggtcctccccgtctactgagtcctttatcatggaagacgttgtggattccagtctctggtctgacctctcatctgatgctcaggaattcgaggctgaatcttggtcactggtcgtggacccatctttctgtaatcgccaggaaaaggatgtaataaagaggcaggacgtgatttttgaactgatgcagactgaaatgcatcacatccagacgctcttcataatgagtgagatttttcgcaagggaatgaaggaggaactacagctcgatcattcaaccgtggacaagatcttcccgtgtctggacgaactgctggagatccaccgacacttcttttactcaatgaaggagcgcagacaggagagctgcgccggcagtgatagaaacttcgtgatagataggatcggcgacatactcgtccaacagttcagtgaagagaacgcttctaagatgaagaaaatctacggcgagttctgttgccaccacaaagaggctgtcaatctgtttaaagagctgcagcaaaataagaaatttcaaaactttatcaagctgagaaacagtaatttgctagcccgcagaagggggatccccgagtgtattctgctggtgacgcagagaattactaaataccccgttctggttgaacgcattctccagtacacaaaggaacgcacagaagagcacaaagatctgagaaaggccctgtgcctcatcaaagacatgattgcgaccgtggatctcaaggtgaatgaatacgagaaaaaccagaaatggttggaaatactgaacaagatagagaataagacttacaccaaactgaagaatggacatgtgtttcgcaagcaggccctcatgtctgaagaaagaaccttgctgtatgacggcctcgtctattggaaaacggccacgggcaggttcaaggatatactggcgctactcttgacagacgtgctgctctttctacaggaaaaggatcaaaagtacatttttgcggcggtggatcagaaacctagtgtgattagcttgcagaaactgatcgcccgggaagtcgctaatgaggaacggggtatgttccttattagcgcttcttcagctggcccagaaatgtacgagattcacacaaatagtaaggaagagcgaaacaattggatgcgtaggattcagcaggcagtggaaagctgccccgaggagaaaggagggaggacctccgagagtgatgaggataaacgcaaagccgaggccagggtcgctaagatccaacaatgtcaggaaatcctcaccaatcaggaccaacagatttgtgcttacctggaggaaaagctgcacatttacgcagaactcggtgagctaagtggatttgaggatgtgcacttagaaccacacctactgatcaagccagacccgggggagccacctcaagcggcctccctcttggccgccgctttaaaggaagctgaatcattgcaggtagcggtgaaggcctcccagatgggcgccgtatctcagagttgcgaggacagttgcggcgacagtgtgctcgctgacacgctgtcgtctcatgacgtacctggatctcccaccgccagtcttgtcaccggcgggcgcgagggacgtggatgctccgacgtagacccaggaatccagggcgtcgttacagacctggcagtctctgatgccggagagaaagtggaatgccgtaacttcccgggcagctctcagtcagaaattatacaagctattcagaatttgacacgcctcctgtacagtttacaggcagccctgacgatccaggattcccatatcgagattcacaggcttgtgcttcaacaacaagagggattgagtctggggcattcgattctgcggggggggcctctgcaggaccaaaagagccgggatgccgatcggcagcacgaagaattggctaatgtccaccagctgcagcaccagctgcagcaggagcagcgtagatggctccgaaggtgtgagcagcaacagagggcccaggccacacgagagagttggctgcaggaaagagaaagggagtgtcagtcccaggaagaactgctgctgaggtcccggggggagctcgatttacagctgcaagaatatcaacattcacttgaacgcttgagggaaggacaaaggctggtggagcgggaacaggctaggatgagagcacagcagagcctcttgggccactggaaacatggccgtcaacgtagcttgccagccgtgctgctccctgggggcccagaggtgatggagctcaatcggtctgaatctctgtgtcatgagaactcattttttataaatgaagctcttgtccagatgagctttaacaccttcaataaattgaacccaagtgttatccaccaagacgctacctatccaacaacccagagccattcagatctggttcgaacaagcgaacatcaggtcgacctgaaggtggacccatctcaaccttctaatgtgagtcacaagttgtggactgcagcgggttccggccaccaaattctgccctttcacgagagctcaaaggattcatgtaaaaacgatctggatacctcccacaccgagagccccactcctcatgattctaactcacaccgcccccagctgcaggccttcattaccgaggctaaactgaacttgccaacccgcacaatgacacggcaggacggcgaaaccggtgatggggcgaaggagaatatcgtgtatctctag

SEQ ID NO: 69970 - DNA, 5117 bp, Artificial Sequence
  derived and/or modified sequence
atggagctgagctgttccgaggcgcctctgtacggacagatgatgatatacgcaaaatttgacaagaacgtatatctccccgaggacgcagaattctactttacttatgatggctcgcatcagaggcacgttatgatcgcagagaggatcgaagacaacgtgttacagtcctctgtccccggtcacgggcttcaagagacagtgaccgtatcagtatgcttgtgttctgaaggctattcaccagtgaccatgggctccggctctgtgacatatgtggacaatatggcgtgccgattggctaggcttttagttacgcaggccaataggttaaccgcctgctctcatcagacgctcttgaccccgtttgctctgacagccggagcactgccggctctggatgaagaactggtcctggcgctaacacatctcgagctgccattagaatggaccgtcctgggcagcagctccttggaggtttcgtcacatcgggaatccctcctccatttagctatgagatggggactggctaagttgtcacagtttttcctgtgtctgccaggcggagtgcaggcactggctctgcctaatgaagagggcgctacgccactcgatctggccctcagagaaggccactctaaactcgtagaagacgtgaccaactttcagggcaggtggagtcctagtttttcgagagtacaattgagtgaggaagcctctttacattacattcatagctctgagacactgaccctgacgctcaatcacacagccgagcacctcttggaagccgacattaagttattccgcaaatatttttgggacagggccttcctggtcaaagcctttgagcctgaggcgcgaccggaggaaagaactgccatgccgagctcaggagcggaaacagaagaggagattaaaaattctgtaagctcacgaagtgccgcagagaaggaggatataaagcgggtaaagtcgctggttgtgcagcataacgaacacgaggaccaacacagcctcgatctggataggtctttcgatattctgaaaaaaagcaaacccccaagcacacttcttgcggcaggaagactaagtgacatgttgaacggcggtgacgaggtctatgccaactgtatggttatcgaccaggtgggcgatctggacattagctacattaacatagaaggtatcaccgccacgacaagccccgaaagccgcggttgcacactttggccgcagtcatcgaaacacacactaccaaccgagacctcaccctcagtgtatccattaagcgaaaacgtcgagggcaccgctcacaccgaggctcagcagagcttcatgagcccttcaagtagttgcgcatctaatcttaatctgtcgtttgggtggcacgggtttgagaaggaacaatcccatcttaagaaacgatccagttctctggatgctctggacgcagattcagagggcgaggggcactccgagccttcacatatttgctacacgcccggatctcagtcatcgtctcgaacaggcatcccctcgggagatgagctggacagctttgaaaccaacaccgaacccgatttcaatattagcagggccgaatctctaccactctctagtaacctgcaaagtaaagagtcacttctcagtggagtgcgctccagatcatactcatgtagttcccccaagatcagcctcggaaagacgagacttgtaagggagttaacggtgtgttcctcttctgaggagcaaagggcttacagcctgtccgagccccctagggaaaacaggatccaggaagaggagtgggataagtatatcatccccgctaaatccgagtctgaaaagtataaggtgtcccggacattttctttcctaatgaatcggatgacatctccccgtaataaatctaagaccaagtccaaggatgccaaagataaagagaagctaaatcgtcatcaatttgcccctggcaccttctcaggcgtgttacagtgccttgtttgcgacaaaacgttattgggcaaagagtctctgcaatgtagcaattgcaatgccaacgtgcataaagggtgcaaagacgccgcaccagcgtgtaccaagaagtttcaggaaaagtacaacaaaaacaagccacagacgatactgggtaatagcagctttcgggatatcccccaacccggattgagtttacatccctccagttcagttcctgttgggttacccaccgggaggagagagactgtgggtcaggtgcaccctctgtcccgttccgtgcctggaacaacactcgagtccttccggagaagcgctactagcctagaatccgaatcagaccataattcctgccgtagcagaagtcacagcgatgaactgcttcagtcaatgggttcctctccatctacagaatccttcattatggaggatgtggtggatagctccctgtggtctgacctgtcaagcgatgcccaggagtttgaggctgagagctggtctctcgtggtggacccgagcttttgtaacaggcaggaaaaggatgtgatcaaaaggcaagacgtgatttttgaattgatgcagacggagatgcatcatattcagaccctgttcattatgagcgaaatttttaggaaaggaatgaaggaggagttgcaattagaccattctaccgttgataagattttcccatgtctagatgagctgttggaaatccaccgtcattttttttacagcatgaaggaacgcagacaagagtcctgtgcaggttcggacagaaacttcgtgatcgaccgaatcggagacatactggtgcagcagttctccgaggagaatgcaagcaaaatgaagaaaatttacggcgaattttgctgtcaccacaaggaggcagtcaacctgttcaaagaattacagcagaataaaaagttccaaaattttatcaagttgagaaattctaacctgctcgccagacgaagagggataccagagtgtattctactcgtcacgcagagaataaccaaatacccagtgctcgtcgagcgaattcttcagtacactaaggaaaggactgaagagcacaaggatctgcgcaaagcactgtgcctgattaaggacatgattgcaactgtcgatttgaaagtcaatgaatacgaaaagaatcagaaatggctggagatactgaataagatcgaaaacaaaacctacacaaagctcaaaaacggacacgtcttccgtaaacaagctctgatgtccgaggagagaacactgctttatgacggccttgtgtactggaagacagctacgggccgtttcaaggatatcctagcgctcttactcactgacgtacttttatttctgcaggagaaagatcaaaagtacatttttgcagccgtagatcagaagccctctgtgatctcccttcagaagctcatcgccagggaggtcgccaacgaggaacggggaatgttcctgatcagtgctagttcagctgggcctgagatgtatgagattcatactaattcgaaggaggagaggaataattggatgcggaggattcagcaagcggtggagagctgcccggaggaaaaggggggaaggacgtctgagtctgatgaggataagaggaaggcagaggccagggtcgctaagatccagcagtgtcaagaaattctcacgaaccaggatcagcagatctgcgcctatcttgaggagaagctgcatatctatgccgagttgggggagctgtctggatttgaggacgttcatcttgagccccacctgcttatcaagccggacccgggtgaaccaccccaggctgcctccctcctcgccgctgcattaaaagaagcagaaagccttcaggttgccgtgaaggcttctcagatgggcgctgtgtcacaatcatgcgaagacagctgtggagactcagtgctggcggatacattatccagccacgacgttcccggatctcctactgcctcacttgtgactggaggacgggagggtcgcggatgcagcgacgtagaccctggcattcagggagtcgtaactgacctggccgtgtccgacgcaggcgaaaaagtggagtgcagaaactttcccggaagcagtcagagtgaaatcatccaggcaattcaaaatttgaccagactgttgtattctttgcaagccgctctgacaatccaggatagccatatcgagattcaccggttggtgctccagcagcaggagggcttgtcattaggccacagcatcctgagagggggtcctctccaagaccagaagtctagagatgctgatcggcagcatgaggaacttgcgaacgtacaccaactccagcaccagctccaacaggaacaacgtcggtggctgcgacgatgtgagcagcagcaacgagcacaggcaacaagagagagctggctacaggagagggagagagaatgccaatcccaggaggaactactgctgcgaagccgcggagagctcgatctgcaactccaagaatatcagcattcactcgaaaggctacgagaaggacagcgcctagtggagcgtgaacaggctcggatgcgcgctcagcagagtcttttgggccattggaagcatggcaggcaaagatcgctgcccgctgttctgcttccgggtggcccagaggtcatggaactgaacaggagcgaaagcctgtgccacgaaaactccttcttcatcaacgaagcacttgttcagatgagcttcaatacatttaacaaactcaatccatcagtaatccaccaagacgccacataccctacgacccagtcccactcagaccttgtaagaacaagcgagcaccaggtcgacctaaaggtagacccctcccagccttccaacgtgagccacaagctatggactgctgcaggaagtggccatcagatcctcccattccacgagtccagtaaggattcgtgcaaaaatgaccttgacaccagtcataccgaatctcccacgcctcatgactctaactcacaccgccctcagctccaagcctttatcacagaggcaaaattgaacctccccaccagaacaatgacgcgccaagatggagagaccggtgacggcgctaaggagaatatagtgtatctgta

SEQ ID NO: 69971 - DNA, 5117 bp, Artificial Sequence
  derived and/or modified sequence
atggagctgagctgttccgaggcgcctctgtatgggcagatgatgatctacgcaaagtttgataaaaatgtataccttccggaggacgcagagttctatttcacttacgacgggtcccaccagcgtcatgtgatgattgcggagcggatagaagataacgtcctccagtcctcagtccccggacatggacttcaagagacggtcactgtgtccgtctgcctgtgttcagaaggttatagtcctgtaactatgggttccggatccgtcacctacgtggataacatggcctgtagactggccaggttgctagtgacccaagctaatagactcactgcatgtagccaccagacactcctgacccccttcgctctcaccgctggagccctgccggctctcgacgaagaactggtactagcccttacccatcttgagttgccgctggagtggaccgtccttggcagctctagccttgaggtgagtagccatagggagagtctgctgcacctagcgatgaggtggggcttggctaaactctcacagttttttctctgtctgcccggtggggtccaagcgctggctctacctaatgaggagggggctacccccctggatcttgcccttcgcgaaggccatagcaaactggtcgaagacgtgactaatttccaaggccgatggagtccttcttttagccgagtgcagctatcggaggaggcgtcattgcactatatacatagctccgagacattgactctgacactgaaccacactgccgaacacttattggaagccgacatcaagctgtttcgtaagtatttctgggaccgcgcatttcttgtcaaggccttcgaacctgaagcgagacccgaagaaaggaccgccatgcccagctctggtgcggaaaccgaggaagaaataaaaaactcagtgtcaagtcgctccgccgcagagaaggaagacattaagagggtgaagtccctggttgtccagcacaatgagcacgaggatcagcattcactcgacctcgataggagtttcgatattctgaaaaaatctaagccaccaagcacattactggccgcaggtaggctttctgatatgctaaacggcggagatgaagtatatgcgaactgcatggtgatcgatcaggttggtgatttagatatttcttatataaacatcgaaggtatcactgcaacaacatcacctgagtcaagggggtgtacactgtggccccaatcttccaagcacactctccctaccgaaacttcacctagtgtgtatcccctttccgagaatgtggaggggacagcgcataccgaagctcaacaatcattcatgtccccctcctcctcctgcgccagcaacttgaatctgtccttcggctggcacggcttcgagaaagagcagtcacatctgaagaagcgttcatcctcattggacgcgcttgacgccgatagtgagggggaggggcacagtgagccttcccacatttgctatactcctgggagtcagtccagtagccgaactggaattccctctggggacgaattggatagcttcgaaactaatactgagcccgattttaacatttcaagagccgagagcctgccgctgagcagcaacctccagtccaaagaatccttgctgagcggggtgagaagcaggagctacagttgttcaagtcctaaaatttcactcggcaaaactagacttgtgcgcgaactgactgtatgcagtagcagtgaagagcagagagcttattctctgagcgaaccacccagggaaaacaggatacaagaagaggaatgggataagtacattatacccgcaaaatctgaatcagaaaaatacaaggtgtcccggacgtttagcttcctcatgaatcgcatgacctctcctaggaataaaagcaagacaaaatccaaggatgctaaagacaaggagaagctaaacagacaccagttcgctcccggaactttctcgggagtcctgcagtgcctggtctgcgacaaaacccttctgggcaaggagtccctccagtgttcaaattgtaatgctaatgtgcacaagggttgcaaggacgctgccccagcatgcacgaaaaaattccaagaaaagtataacaagaataagccacagacaatcctggggaactcatcgtttcgtgacatcccacagcccggtctgagccttcatccctcttcaagcgttccagtgggacttcctaccggacggagagaaactgtgggccaggtgcacccactcagcagaagcgtgccaggcactacactggagagcttccgtcggagcgctaccagcctggaaagcgaaagcgatcataactcatgtcgtagtcgttcccactctgacgaactccttcaatcgatgggctcttccccttctaccgaatcctttatcatggaggacgtggttgactcctccctgtggtcagacttatcatcggacgctcaggagttcgaagcagagtcctggtctttagtagtcgatccttcattctgtaacaggcaagaaaaagacgtcatcaagaggcaggatgtgatattcgagttgatgcagaccgaaatgcaccatatacagaccctcttcatcatgtctgagatctttaggaagggaatgaaggaagagttacagctagaccacagcacagtggacaagatctttccctgtctcgatgaactgctagagattcaccgccatttcttctactccatgaaggagcgcagacaggagtcgtgtgctggatccgatcggaactttgtcattgacaggattggcgatatcctcgtgcagcagttcagcgaagaaaacgcttctaaaatgaagaagatttacggtgagttttgttgccatcacaaggaagccgtgaacctgttcaaagagctgcagcagaataagaaattccagaactttataaagctacgcaatagcaacctgcttgcccgtaggaggggaatccccgaatgcatcctgctcgtgacccaacggataacgaagtaccccgtgctcgttgaacgtatcctgcagtacacaaaagagcgcaccgaagaacataaagatttgcggaaagctctctgccttattaaagatatgattgccaccgtggatctcaaagtgaatgaatacgaaaagaatcagaagtggctggaaatcctgaacaagatcgagaataagacctatacaaagctcaaaaatggacatgtgtttcgaaagcaagcattaatgagtgaagagcgcactttgctctacgatgggctagtgtattggaaaaccgccacaggaaggtttaaagatatactggctttattactgacagatgtgctgttgtttctccaggaaaaggaccagaaatatatcttcgccgctgtcgaccagaagcctagcgttatttctctccagaagcttattgcgagagaagtggcaaacgaagaaagaggtatgtttttaatctccgcttcttctgccggacctgagatgtatgagatccacactaattcaaaggaggagcgaaacaactggatgagaagaatccagcaggccgttgaaagctgcccagaagagaagggcggaaggacaagcgagtcggacgaagataaaagaaaggccgaggcccgagtggccaaaatccaacagtgtcaggagattttgactaatcaggatcagcaaatctgtgcttatctggaggagaagctccatatctacgcggagctgggggagctgtcaggtttcgaggacgtacatctggagcctcatctgctcataaagccggatcccggagagcctccacaggcagccagcctactcgccgctgcattaaaggaggccgaatcattacaggtcgccgttaaggcctcgcagatgggtgctgtttcccagtcatgcgaggactcttgcggggactccgtgctcgctgacacattgagcagtcacgatgtacctggctcacccaccgcctccctggtgacagggggaagagaaggaagagggtgtagcgatgtcgacccaggcattcagggagtggtcactgacctggcagtctcagacgctggggaaaaagtcgaatgcaggaactttcccggatctagtcagtcagaaataattcaggcaatccagaatctgactcgcctgttatattcactgcaagcggcactgacaatccaggattcccacatcgaaatacaccgactggttctgcagcagcaggaagggctgtccctcggacatagtatcctgagaggcggtcctctgcaggatcagaagtccagagatgctgacagacaacatgaggaactggcaaatgtacaccaattacagcaccaactccaacaggaacagagacggtggctgagacgatgcgaacagcagcagagggcgcaggcaacacgagagtcgtggttacaagagcgcgaacgtgaatgccagagtcaggaggaacttctcctccgaagtcgcggagaactggacctacagctgcaagagtatcaacacagcctggagcggttaagagaagggcaacggctggtggagcgagagcaggccaggatgcgcgcacagcagtcccttctcggccattggaagcacggaagacagcgctccctccccgctgttctgctgcctggtgggcctgaggtcatggagctgaatcggtcagagtctctctgccacgaaaactctttctttattaatgaagccctggtccaaatgagcttcaacaccttcaataagctcaacccatcagtcatccatcaggacgcaacataccctacaacccagtcccactctgatttggtccgcactagtgagcatcaggtcgacctaaaggtggacccaagccagccatccaacgtctctcacaaactttggacggcagcaggttctggacaccaaatccttcccttccacgagtctagtaaagacagttgtaagaatgacctggacacgtcacacaccgaaagtcccaccccccatgattcaaatagtcatcgtccacagcttcaggcattcattactgaggccaaactcaacttgccaacgcgcaccatgacccggcaagatggggagactggcgatggggctaaggaaaatattgtttaccttta

SEQ ID NO: 69972 - DNA, 6118 bp, Artificial Sequence
  derived and/or modified sequence
tcattgcagatgcgaaagccatggagttgagctgcagcgaagcacctctttacgggcagatgatgatctatgcgaagtttgacaaaaatgtgtatcttcctgaagatgctgagttttactttacttatgacggatctcatcagcgacatgtcatgattgcagagcgcatcgaggataacgttctccagtccagcgtcccaggccatgggcttcaggagacggtgacggtatctgtgtgcctctgctcggaaggttactctccggtgaccatgggctctggctcagtgacctacgtggacaacatggcttgcaggctggctcgtctgctggtgacgcaggccaatcgcctcacagcctgcagccaccagaccctgctgaccccatttgccttgacggcaggagcactgcctgccttggatgaggagctcgtgctggctctgacccatctggaattgcctctagagtggactgtgttgggaagttcttcacttgaagtatcttctcacagagaatctcttctacacctggctatgagatggggcctggctaaactttcccagttcttcttgtgtctcccggggggagtccaggccttggctttacccaacgaagagggtgccacaccattagacttagctttacgtgaaggacactccaagctggtggaagacgtcacaaattttcagggcagatggtccccaagcttctcccgagtgcagctcagtgaagaagcctccttgcattacattcactcatcggaaacgctgaccctgaccctgaaccacacagccgagcatttgttggaggcagatattaaactcttccggaaatacttttgggatagagcctttcttgtcaaggcctttgagccagaagccaggccagaggaaagaacagctatgccctccagcggtgcagaaactgaagaagagattaagaattcagtgtccagcagatcagcagctgaaaaggaagatataaagcgtgtcaaaagcctggtggttcaacacaatgaacatgaagaccagcacagcctagatttggatcgctccttcgatatcctaaaaaaatccaagccgccctcgacattgcttgctgcaggccggctttcagacatgctgaatggaggtgatgaagtctacgctaactgtatggtgattgatcaggttggtgatttggatatcagctatattaatatagagggaatcactgccactaccagccctgaatccagaggttgcactctgtggcctcagagcagcaaacacacccttcctacagaaaccagtcccagtgtgtacccacttagtgaaaatgtcgaagggacagcacacactgaagcccagcagtccttcatgtcaccatcaagttcgtgtgcttccaacttgaatctttcttttggttggcatggatttgaaaaggaacaaagtcatctaaagaaaagaagttctagccttgatgccttggacgccgacagtgaaggggaagggcattctgagccatcccacatctgttacactccagggtctcagagctcctcaagaactgggattcctagtggggatgaattggactcttttgagactaacactgaaccggattttaatatctccagggctgaatcccttcctctatcaagtaatctacagtcgaaggaatcactgctttctggagttcgctcacgttcttattcttgctcatcacccaaaatttctttaggaaaaactcgtttggtgcgtgaattaacagtatgcagttcaagtgaagagcaaagagcttacagcttatcggagccaccaagagaaaacagaattcaggaagaagaatgggataaatacatcatacctgccaaatcagagtctgaaaaatataaagtgagtcgaactttcagtttcctcatgaataggatgactagccctcggaataaatcaaagacaaaaagcaaggatgccaaagataaagagaagctgaatcgacatcagtttgccccaggaacattctctggggttctgcagtgtttggtttgtgataaaacactcctggggaaagagtcactgcagtgttctaactgtaatgcaaatgtgcacaaaggttgtaaagatgctgcgcctgcatgcaccaagaaattccaagagaaatataacaagaacaaaccacagaccatccttggaaattcttcatttagagacatcccacagcctggtctctccttgcacccttcttcctccgtgcctgttggattgccgactggaaggagggagactgtgggacaggtccatccattgtccagaagtgttccaggcaccaccttggaaagcttcaggaggtcagccacatccttggagtctgagagtgaccataacagctgcagaagcaggtctcattctgatgagctgctacagtccatgggctcttctccctctacagagtctttcataatggaagatgttgtggattcttctctgtggagtgacctcagcagtgatgcccaggagtttgaagcagaatcttggagtcttgtggtggatccctcattttgtaataggcaggagaaggatgtcatcaaaagacaggatgtcatttttgagctaatgcaaacagagatgcatcacatccagaccctgttcatcatgtctgagatcttcaggaaaggcatgaaagaggagctgcagctggaccacagcaccgtggataaaattttcccctgtttagatgagttgcttgaaatccacaggcatttcttctacagtatgaaggaacgaaggcaggaatcctgtgctggcagcgacaggaattttgtgatcgaccgaattggagatattttggtacaacagttttcagaagaaaatgcaagtaaaatgaagaaaatatatggagaattctgttgccatcataaagaagctgttaacctctttaaagaactccagcagaataaaaagtttcagaattttattaagctccgaaatagtaatcttttggctcgacgccgaggaattccagaatgcattctgttggtcactcagcgtattacaaaataccctgtcttggtggaaaggatattgcagtacacaaaggaaagaactgaggaacataaagacttacgcaaagcgctttgcttaattaaagacatgattgcaacagtggatttaaaagtcaatgaatatgagaaaaaccaaaaatggcttgagatcctaaataagattgaaaacaaaacatacacgaagctcaaaaatggacatgtgtttaggaagcaggcactgatgagtgaagaaaggactctgttatatgatggccttgtttactggaaaactgctacaggtcgtttcaaagatatcctagctctacttctaactgatgtgctgctctttttacaagaaaaagaccagaaatacatctttgcagccgttgatcagaagccatcagttatttcccttcaaaagcttattgctagagaagttgctaatgaggagagaggaatgtttctgatcagtgcttcatctgctggtcctgagatgtatgaaattcacaccaattccaaggaggaacgcaataactggatgagacggatccagcaggctgtagaaagttgtcctgaagaaaaagggggaaggacaagtgaatctgatgaagacaagaggaaagctgaagccagagtggccaaaattcagcaatgtcaagaaatactcactaaccaagaccaacaaatttgtgcgtatttggaggagaagctgcatatctatgctgaacttggagaactgagcggatttgaggacgtccatctagagccccacctccttattaaacctgacccaggcgagcctccccaggcagcctcattactggcagcagcactgaaagaagctgagagcctacaagttgcagtgaaggcctcacagatgggcgccgtgagtcaatcatgtgaggacagttgtggagactctgtcttggcggacacactcagttctcatgatgtaccaggatcaccgactgcctcattagtcacaggagggagagaaggaagaggctgttcggatgtggatcccgggatccagggtgtggtaaccgacttggccgtctctgatgcaggggagaaggtggaatgtagaaattttccaggttcttcacaatcagagattatacaagccatacagaatttaacccgtctcttatacagccttcaggccgccttgaccattcaggacagccacattgagatccacaggctggttctccagcagcaggagggcctgtctctcggccactctatcctccgaggcggccccttgcaggaccagaagtctcgcgacgcggacaggcagcatgaggagctggccaatgtgcaccagcttcagcaccagctccagcaggagcagcggcgctggctgcgcaggtgtgagcagcagcagcgggcgcaggcgaccagggagagctggctgcaggagcgggagcgggagtgccagtcgcaggaggagctgctgctgcggagccggggcgagctggacctccagctccaggagtaccagcacagcctggagcggctgagggagggccagcgcctggtggagagggagcaggcgaggatgcgggcccagcagagcctgctgggccactggaagcacggccggcagaggagcctgcccgcggtgctccttccgggtggccccgaggtaatggaacttaatcgatctgagagtttatgtcatgaaaactcattcttcatcaatgaagctttagtacaaatgtcatttaacactttcaacaaactgaatccatcagttatccatcaggatgccacttaccctacaactcaatctcattctgacttggtgaggactagtgaacatcaagtagacctcaaggtggacccttctcagccttcgaatgtcagtcacaaactgtggacagccgctggttccggccatcagatacttcctttccatgaaagcagcaaggattcttgtaaaaatgatttggacacctcccacactgagtccccaaccccccatgactcaaattcacaccgccctcaactgcaggcgtttataacagaagcaaagctaaatctaccgacaaggacaatgaccagacaagatggggaaactggagatggagccaaagaaaatattgtttacctctaattgtgttgtcatttttccaaacaaaacaaaacactggcacttttgggagaaactttttgtctccattccttatgtatgtgtgattgtctgtgtccaaattgctttaagaataatatttaatatttcctggaagctcatttttttggcatgagtctaattaaattattgaaagccaccctgtttgtataatctttaacttatcaaatctaatttcagatttctggaggagaaactaacttgaataagcaggactattttaaaagttgttttgacgctagagtaaaattccatgtcacattttctacccaatcatctggatttcaagattccttttaagatctcaatgaagcaatttggatttaaagagtggtattcacaaggggtgaactttcacagtcagggcagttgcctcagtgcccacataggcagaggaggatgtgggaaagggtttttctcagctagtttttgtgtgctcatttcttctgggagcattaaaagtggtgatctgttacagtcactattcaactgggcacgtgttgtgattggtcagtcactgagccagggatacagtccggacttgcttagtacctaagcctaatgctggtggggtttcaagacatggttcagcatcatcttttaacaaggcccagaggcccagagcccccatcaagtcattttgatgtaaatagtgaactttgttagagccctcacttctatcaatcagctgtcctgtccctgccagcacctggagcaccaactaccactccctggaaagaacccttccctgcagttttttaaggacaaaactgcccactcctcattaagtttgctgcctggatacacttttccacaaaggaaaactggcatatcctgccttccgagtagtatgggtctctgtgtgagaaaccaggagatattttcatcttgttcggaaatacttgtatgtattttggtgtcaataaatatcttgtacctcatta

SEQ ID NO: 69973 - DNA, 560 bp, Artificial Sequence
  derived and/or modified sequence
atcgccggggagagccttccggactccgggcggcggctggctgggggcgcgttccgaggcgccctcaggcagggcgcgggggcagagcctcgcctgggttctggaggctgcggggccatcgctccaggcccacagcgtccccgcattggttggctgggtgggccgaggaacagtggcaacatctgtgtttgtgcggcttctcccgccttgacccctgcctgggtatccacacatctcctcacaccaggagttatagaggttcaccacggaccacaccaattgggcaaaatccaaagaaaatgcgaaagccatggagttgagctgcagcgaagcacctctttacgggcagatgatgatctatgcgaagtttgacaaaaatgtgtatcttcctgaagatgctgagttttactttacttatgacggatctcatcagcgacatgtcatgattgcagagcgcatcgaggataacgttctccagtccagcgtcccaggccatgggcttcaggagacggtgacggtatctgtgtgcctctgctcggaaggttactctccggtgacca

SEQ ID NO: 69974 - DNA, 6273 bp, Artificial Sequence
  derived and/or modified sequence
aaaccttggcttcagcccggccgccgccaggcgttggcatcgccggggagagccttccggactccgggcggcggctggctgggggcgcgttccgaggcgccctcaggcagggcgcgggggcagagcctcgcctgggttctggaggctgcggggccatcgctccagatgcgaaagccatggagttgagctgcagcgaagcacctctttacgggcagatgatgatctatgcgaagtttgacaaaaatgtgtatcttcctgaagatgctgagttttactttacttatgacggatctcatcagcgacatgtcatgattgcagagcgcatcgaggataacgttctccagtccagcgtcccaggccatgggcttcaggagacggtgacggtatctgtgtgcctctgctcggaaggttactctccggtgaccatgggctctggctcagtgacctacgtggacaacatggcttgcaggctggctcgtctgctggtgacgcaggccaatcgcctcacagcctgcagccaccagaccctgctgaccccatttgccttgacggcaggagcactgcctgccttggatgaggagctcgtgctggctctgacccatctggaattgcctctagagtggactgtgttgggaagttcttcacttgaagtatcttctcacagagaatctcttctacacctggctatgagatggggcctggctaaactttcccagttcttcttgtgtctcccggggggagtccaggccttggctttacccaacgaagagggtgccacaccattagacttagctttacgtgaaggacactccaagctggtggaagacgtcacaaattttcagggcagatggtccccaagcttctcccgagtgcagctcagtgaagaagcctccttgcattacattcactcatcggaaacgctgaccctgaccctgaaccacacagccgagcatttgttggaggcagatattaaactcttccggaaatacttttgggatagagcctttcttgtcaaggcctttgagccagaagccaggccagaggaaagaacagctatgccctccagcggtgcagaaactgaagaagagattaagaattcagtgtccagcagatcagcagctgaaaaggaagatataaagcgtgtcaaaagcctggtggttcaacacaatgaacatgaagaccagcacagcctagatttggatcgctccttcgatatcctaaaaaaatccaagccgccctcgacattgcttgctgcaggccggctttcagacatgctgaatggaggtgatgaagtctacgctaactgtatggtgattgatcaggttggtgatttggatatcagctatattaatatagagggaatcactgccactaccagccctgaatccagaggttgcactctgtggcctcagagcagcaaacacacccttcctacagaaaccagtcccagtgtgtacccacttagtgaaaatgtcgaagggacagcacacactgaagcccagcagtccttcatgtcaccatcaagttcgtgtgcttccaacttgaatctttcttttggttggcatggatttgaaaaggaacaaagtcatctaaagaaaagaagttctagccttgatgccttggacgccgacagtgaaggggaagggcattctgagccatcccacatctgttacactccagggtctcagagctcctcaagaactgggattcctagtggggatgaattggactcttttgagactaacactgaaccggattttaatatctccagggctgaatcccttcctctatcaagtaatctacagtcgaaggaatcactgctttctggagttcgctcacgttcttattcttgctcatcacccaaaatttctttaggaaaaactcgtttggtgcgtgaattaacagtatgcagttcaagtgaagagcaaagagcttacagcttatcggagccaccaagagaaaacagaattcaggaagaagaatgggataaatacatcatacctgccaaatcagagtctgaaaaatataaagtgagtcgaactttcagtttcctcatgaataggatgactagccctcggaataaatcaaagacaaaaagcaaggatgccaaagataaagagaagctgaatcgacatcagtttgccccaggaacattctctggggttctgcagtgtttggtttgtgataaaacactcctggggaaagagtcactgcagtgttctaactgtaatgcaaatgtgcacaaaggttgtaaagatgctgcgcctgcatgcaccaagaaattccaagagaaatataacaagaacaaaccacagaccatccttggaaattcttcatttagagacatcccacagcctggtctctccttgcacccttcttcctccgtgcctgttggattgccgactggaaggagggagactgtgggacaggtccatccattgtccagaagtgttccaggcaccaccttggaaagcttcaggaggtcagccacatccttggagtctgagagtgaccataacagctgcagaagcaggtctcattctgatgagctgctacagtccatgggctcttctccctctacagagtctttcataatggaagatgttgtggattcttctctgtggagtgacctcagcagtgatgcccaggagtttgaagcagaatcttggagtcttgtggtggatccctcattttgtaataggcaggagaaggatgtcatcaaaagacaggatgtcatttttgagctaatgcaaacagagatgcatcacatccagaccctgttcatcatgtctgagatcttcaggaaaggcatgaaagaggagctgcagctggaccacagcaccgtggataaaattttcccctgtttagatgagttgcttgaaatccacaggcatttcttctacagtatgaaggaacgaaggcaggaatcctgtgctggcagcgacaggaattttgtgatcgaccgaattggagatattttggtacaacagttttcagaagaaaatgcaagtaaaatgaagaaaatatatggagaattctgttgccatcataaagaagctgttaacctctttaaagaactccagcagaataaaaagtttcagaattttattaagctccgaaatagtaatcttttggctcgacgccgaggaattccagaatgcattctgttggtcactcagcgtattacaaaataccctgtcttggtggaaaggatattgcagtacacaaaggaaagaactgaggaacataaagacttacgcaaagcgctttgcttaattaaagacatgattgcaacagtggatttaaaagtcaatgaatatgagaaaaaccaaaaatggcttgagatcctaaataagattgaaaacaaaacatacacgaagctcaaaaatggacatgtgtttaggaagcaggcactgatgagtgaagaaaggactctgttatatgatggccttgtttactggaaaactgctacaggtcgtttcaaagatatcctagctctacttctaactgatgtgctgctctttttacaagaaaaagaccagaaatacatctttgcagccgttgatcagaagccatcagttatttcccttcaaaagcttattgctagagaagttgctaatgaggagagaggaatgtttctgatcagtgcttcatctgctggtcctgagatgtatgaaattcacaccaattccaaggaggaacgcaataactggatgagacggatccagcaggctgtagaaagttgtcctgaagaaaaagggggaaggacaagtgaatctgatgaagacaagaggaaagctgaagccagagtggccaaaattcagcaatgtcaagaaatactcactaaccaagaccaacaaatttgtgcgtatttggaggagaagctgcatatctatgctgaacttggagaactgagcggatttgaggacgtccatctagagccccacctccttattaaacctgacccaggcgagcctccccaggcagcctcattactggcagcagcactgaaagaagctgagagcctacaagttgcagtgaaggcctcacagatgggcgccgtgagtcaatcatgtgaggacagttgtggagactctgtcttggcggacacactcagttctcatgatgtaccaggatcaccgactgcctcattagtcacaggagggagagaaggaagaggctgttcggatgtggatcccgggatccagggtgtggtaaccgacttggccgtctctgatgcaggggagaaggtggaatgtagaaattttccaggttcttcacaatcagagattatacaagccatacagaatttaacccgtctcttatacagccttcaggccgccttgaccattcaggacagccacattgagatccacaggctggttctccagcagcaggagggcctgtctctcggccactctatcctccgaggcggccccttgcaggaccagaagtctcgcgacgcggacaggcagcatgaggagctggccaatgtgcaccagcttcagcaccagctccagcaggagcagcggcgctggctgcgcaggtgtgagcagcagcagcgggcgcaggcgaccagggagagctggctgcaggagcgggagcgggagtgccagtcgcaggaggagctgctgctgcggagccggggcgagctggacctccagctccaggagtaccagcacagcctggagcggctgagggagggccagcgcctggtggagagggagcaggcgaggatgcgggcccagcagagcctgctgggccactggaagcacggccggcagaggagcctgcccgcggtgctccttccgggtggccccgaggtaatggaacttaatcgatctgagagtttatgtcatgaaaactcattcttcatcaatgaagctttagtacaaatgtcatttaacactttcaacaaactgaatccatcagttatccatcaggatgccacttaccctacaactcaatctcattctgacttggtgaggactagtgaacatcaagtagacctcaaggtggacccttctcagccttcgaatgtcagtcacaaactgtggacagccgctggttccggccatcagatacttcctttccatgaaagcagcaaggattcttgtaaaaatgatttggacacctcccacactgagtccccaaccccccatgactcaaattcacaccgccctcaactgcaggcgtttataacagaagcaaagctaaatctaccgacaaggacaatgaccagacaagatggggaaactggagatggagccaaagaaaatattgtttacctctaattgtgttgtcatttttccaaacaaaacaaaacactggcacttttgggagaaactttttgtctccattccttatgtatgtgtgattgtctgtgtccaaattgctttaagaataatatttaatatttcctggaagctcatttttttggcatgagtctaattaaattattgaaagccaccctgtttgtataatctttaacttatcaaatctaatttcagatttctggaggagaaactaacttgaataagcaggactattttaaaagttgttttgacgctagagtaaaattccatgtcacattttctacccaatcatctggatttcaagattccttttaagatctcaatgaagcaatttggatttaaagagtggtattcacaaggggtgaactttcacagtcagggcagttgcctcagtgcccacataggcagaggaggatgtgggaaagggtttttctcagctagtttttgtgtgctcatttcttctgggagcattaaaagtggtgatctgttacagtcactattcaactgggcacgtgttgtgattggtcagtcactgagccagggatacagtccggacttgcttagtacctaagcctaatgctggtggggtttcaagacatggttcagcatcatcttttaacaaggcccagaggcccagagcccccatcaagtcattttgatgtaaatagtgaactttgttagagccctcacttctatcaatcagctgtcctgtccctgccagcacctggagcaccaactaccactccctggaaagaacccttccctgcagttttttaaggacaaaactgcccactcctcattaagtttgctgcctggatacacttttccacaaaggaaaactggcatatcctgccttccgagtagtatgggtctctgtgtgagaaaccaggagatattttcatcttgttcggaaatacttgtatgtattttggtgtcaataaatatcttgtacctcatt

SEQ ID NO: 69975 - protein, 183 aa, Artificial Sequence
  derived and/or modified sequence
MVKLAAKCILAVPVDKRLSRAEVCSGCCEVCRSVSWTCALPAASEQVPVRGDPAVGKTALAQIFRSDGAHFQKSYTLTTGMDLVVKTVPVPDTGDSVELFIFDSAGKELFSEMLDKLWESPNVLCLVYDVTNEESFNNCSKWLEKARSQAPGISLPGVLVGNKTDLAGRRAVDSAEARAWALG

SEQ ID NO: 69976 - protein, 186 aa, Artificial Sequence
  derived and/or modified sequence
MVKLAAKCILAGDPAVGKTALAQIFRSDGAHFQKSYTLTTGMDLVVKTVPVPDTGDSVELFIFDSAGKELFSEMLDKLWESPNVLCLVYDVTNEESFNNCSKWLEKARSQAPGISLPGVLVGNKTDLAGRRAVDSAEARAWALGQGLECFETSVKEMENFEAPFHCLAKQFHQLYREKVEVFRALA

SEQ ID NO: 69977 - protein, 145 aa, Artificial Sequence
  derived and/or modified sequence
MDLVVKTVPVPDTGDSVELFIFDSAGKELFSEMLDKLWESPNVLCLVYDVTNEESFNNCSKWLEKARSQAPGISLPGVLVGNKTDLAGRRAVDSAEARAWALGQGLECFETSVKEMENFEAPFHCLAKQFHQLYREKVEVFRALA

SEQ ID NO: 69978 - DNA, 552 bp, Artificial Sequence
  derived and/or modified sequence
atggtgaagctggccgccaagtgcatcctggccgtgcccgtggacaagagactgagcagagccgaggtgtgcagcggctgctgcgaggtgtgcagaagcgtgagctggacctgcgccctgcccgccgccagcgagcaggtgcccgtgagaggcgaccccgccgtgggcaagaccgccctggcccagatcttcagaagcgacggcgcccacttccagaagagctacaccctgaccaccggcatggacctggtggtgaagaccgtgcccgtgcccgacaccggcgacagcgtggagctgttcatcttcgacagcgccggcaaggagctgttcagcgagatgctggacaagctgtgggagagccccaacgtgctgtgcctggtgtacgacgtgaccaacgaggagagcttcaacaactgcagcaagtggctggagaaggccagaagccaggcccccggcatcagcctgcccggcgtgctggtgggcaacaagaccgacctggccggcagaagagccgtggacagcgccgaggccagagcctgggccctgggctag

SEQ ID NO: 69979 - DNA, 561 bp, Artificial Sequence
  derived and/or modified sequence
atggtgaagctggccgccaagtgcatcctggccggcgaccccgccgtgggcaagaccgccctggcccagatcttcagaagcgacggcgcccacttccagaagagctacaccctgaccaccggcatggacctggtggtgaagaccgtgcccgtgcccgacaccggcgacagcgtggagctgttcatcttcgacagcgccggcaaggagctgttcagcgagatgctggacaagctgtgggagagccccaacgtgctgtgcctggtgtacgacgtgaccaacgaggagagcttcaacaactgcagcaagtggctggagaaggccagaagccaggcccccggcatcagcctgcccggcgtgctggtgggcaacaagaccgacctggccggcagaagagccgtggacagcgccgaggccagagcctgggccctgggccagggcctggagtgcttcgagaccagcgtgaaggagatggagaacttcgaggcccccttccactgcctggccaagcagttccaccagctgtacagagagaaggtggaggtgttcagagccctggcctag

SEQ ID NO: 69980 - DNA, 552 bp, Artificial Sequence
  derived and/or modified sequence
atggtaaagttggccgccaaatgtatcctggccgttcccgttgataagagactgagccgggctgaggtgtgtagtggctgttgtgaagtctgtcggtccgtgagctggacctgcgccctgcccgcggcgagtgagcaagttcctgtaaggggtgatccagccgtgggtaagactgctttggcacaaatttttcgatctgacggagctcacttccaaaagtcgtatacactaacgaccggcatggacctggtcgtgaagacagtccctgtgccagacaccggagactcagtggagctgttcatttttgattctgccggtaaagaactcttcagtgagatgcttgacaaactgtgggaatcacccaatgtgctgtgcctcgtgtatgatgttacaaacgaagaaagcttcaataattgcagtaaatggttggagaaggcccggtctcaggcccctgggatctcactgcccggtgtgctggttgggaataagacagacttagctggcagacgggctgtggattcggctgaagccagggcatgggcactaggatag

SEQ ID NO: 69981 - DNA, 561 bp, Artificial Sequence
  derived and/or modified sequence
atggtgaagctcgcagctaagtgtattctggccggtgatcccgccgttgggaagacagcactggctcagattttccgatcagatggagcacatttccagaagagttatacgcttactactggaatggatctggtggtgaagacagtcccagtacccgacacaggagactctgtggaactttttatattcgactcggcaggtaaagagctcttttccgagatgctggacaaactttgggagtcgcccaatgttctgtgcttggtgtacgacgtcaccaatgaggaaagttttaacaactgctctaagtggctggagaaagcaaggtcacaagcaccagggatctccctgccaggtgtgctcgtgggtaataagacggatcttgcagggcgtagagccgtggattcagccgaagcacgagcatgggctctgggtcaaggcctggagtgcttcgaaacatctgtgaaagaaatggagaatttcgaggctccttttcactgcctggccaaacagtttcaccagctgtatagggagaaggtggaagtgttccgggcgctcgcgtag

SEQ ID NO: 69982 - DNA, 552 bp, Artificial Sequence
  derived and/or modified sequence
atggtgaagctggccgccaagtgcatcctggccgtgcctgtggacaagaggctgagcagagctgaggtgtgcagcggctgctgtgaggtgtgccgctctgtgtcctggacctgtgccctgcctgctgccagcgagcaggtgcctgtgcggggggaccctgctgtgggcaagacagccctggcccagatcttcagaagtgatggagcccacttccagaagagctacaccctgaccaccggcatggacctggtggtgaagacagtgcctgtgcctgacacaggagacagcgtggagctgttcatctttgacagcgctgggaaggagctgttcagcgagatgctggacaagctgtgggagagccccaacgtgctgtgcctggtgtatgatgtgaccaatgaggagagcttcaacaactgcagcaagtggctggagaaggcccggagccaggcccctggcatcagcctgcccggggtgctggtgggcaacaagacagacctggccggcagaagagctgtggacagcgctgaggcccgggcctgggccctgggctag

SEQ ID NO: 69983 - DNA, 561 bp, Artificial Sequence
  derived and/or modified sequence
atggtgaagctggccgccaagtgcatcctggccggggaccctgctgtgggcaagacagccctggcccagatcttcagaagtgatggagcccacttccagaagagctacaccctgaccaccggcatggacctggtggtgaagacagtgcctgtgcctgacaccggggacagcgtggagctgttcatctttgattctgctgggaaggagctgttcagcgagatgctggacaagctgtgggagagccccaacgtgctgtgcctggtgtatgatgtgaccaatgaggagagcttcaacaactgcagcaagtggctggagaaggcccggagccaggcccctggcatcagcctgcccggggtgctggtgggcaacaagacagacctggccggccggcgggctgtggacagcgctgaggcccgggcctgggccctgggccagggcctggagtgctttgagacctctgtgaaggagatggagaactttgaggcccccttccactgcctggccaagcagttccaccagctgtaccgggagaaggtggaggtgttccgggccctggcctag

SEQ ID NO: 69984 - DNA, 946 bp, Artificial Sequence
  derived and/or modified sequence
tgcttggagagtgcatccggcccggtacttgtgatcggaggagagccggatcgtccttccttgaaccctctgggtagggctgtgctgaggggctgggcggggagcacaggccgtgtccgctcgcttgcaccttttcagactgccgtgtcaggcctcgagccgggcccacctggagccctcccctgcccacccgcccccagcgcccgatatccgcccccggcccagaagggccgggctcggtcatccccagtcccgtcgcggccactgacccttgagatcagccctcccctccccaccttcccgtcccaggccagcccagggcccgaagcccacccactcgcgtctctagcagccgctcttgtcctctgggtacggctcgcgggagtgttggttaccatggtgaagctggcagccaaatgcatcctggcagttcctgtggataaaaggcttagccgtgcagaagtgtgctctggctgttgtgaggtttgcagatcagtctcatggacctgtgccctgcccgcggcctcagaacaagttcccgtgagaggagacccagcagtgggcaagaccgccctggcacagatcttccgcagtgatggagcccatttccagaaaagctacaccctgacaacaggaatggatttggtggtgaagacagtgccagttcctgacacgggagacagtgtggaactcttcatttttgactctgctggcaaggagctgttttcggaaatgctggataaattgtgggagagtcccaatgtcttatgtctcgtctatgatgtgaccaatgaagaatccttcaacaactgcagcaagtggctggagaaggctcggtcacaggctccaggcatctctctcccaggtgttttagttgggaacaagacagacctggccggcagacgagcagtggactcagctgaggcccgggcatgggcgctgggcc

SEQ ID NO: 69985 - DNA, 1090 bp, Artificial Sequence
  derived and/or modified sequence
ggaggcggggcaggtgggctatggttgcttggagagtgcatccggcccggtacttgtgatcggaggagagccggatcgtccttccttgaaccctctgggtagggctgtgctgaggggctgggcggggagcacaggccgtgtccgctcgcttgcaccttttcagactgccgtgtcaggcctcgagccgggcccacctggagccctcccctgcccacccgcccccagcgcccgatatccgcccccggcccagaagggccgggctcggtcatccccagtcccgtcgcggccactgacccttgagatcagccctcccctccccaccttcccgtcccaggccagcccagggcccgaagcccacccactcgcgtctctagcagccgctcttgtcctctgggtacggctcgcgggagtgttggttaccatggtgaagctggcagccaaatgcatcctggcaggagacccagcagtgggcaagaccgccctggcacagatcttccgcagtgatggagcccatttccagaaaagctacaccctgacaacaggaatggatttggtggtgaagacagtgccagttcctgacacgggagacagtgtggaactcttcatttttgactctgctggcaaggagctgttttcggaaatgctggataaattgtgggagagtcccaatgtcttatgtctcgtctatgatgtgaccaatgaagaatccttcaacaactgcagcaagtggctggagaaggctcggtcacaggctccaggcatctctctcccaggtgttttagttgggaacaagacagacctggccggcagacgagcagtggactcagctgaggcccgggcatgggcgctgggccagggcctggaatgttttgaaacatccgtgaaagagatggaaaacttcgaagcccctttccactgccttgccaagcagttccaccagctgtaccgggagaaggtggaggttttccgggccctggcatgacgagctggagcagatcgtgctgcacaaccggagaagacagaattacctctgctcttttaatatataatgatggctttaaataaaattaggagaaaatgtcgaagcagc

SEQ ID NO: 69986 - DNA, 813 bp, Artificial Sequence
  derived and/or modified sequence
gaggagagggagataaagccagtaggtgagagatgagcttggaggaggtgactgctattgcagatagaattggtggagaggcccctgggaagaagaatccttgggtcacagacaggtattctgcgatggagatggagcatagcatttggaaagagatttcagaatgatgaacacagcctcagacttcttgcttcccacaaatgcagagacccttccaccccccacgccccacacaaaaaagtattcaggtggaagctgtcaacccaggttgggtcagttggacaggtgactctgcctgtcagtgccagtcacacttctttaccttcaagacttcaaagtaaattccagtttggaagtgacagcttttccccatagggcgtgtttcagtggaagagcgtcagttccgtttccagggccccaaagccctctgtaagttctgttaccttctgggtcagttcctgtggataaaaggcttagccgtgcagaagtgtgctctggctgttgtgaggtttgcagatcagtctcatggacctgtgccctgcccgcggcctcagaacaagttcccgtgagaggagacccagcagtgggcaagaccgccctggcacagatcttccgcagtgatggagcccatttccagaaaagctacaccctgacaacaggaatggatttggtggtgaagacagtgccagttcctgacacgggagacagtgtggaactcttcatttttgactctgctggcaaggagctgttttcggaaatgctggataaattgtgggagagtcccaatgtcttatgtctcgtctatgatgtgac

SEQ ID NO: 69987 - DNA, 683 bp, Artificial Sequence
  derived and/or modified sequence
catggacctgtgccctgcccgcggcctcagaacaagttcccgtgagaggagacccagcagtgggcaagaccgccctggcacagatcttccgcagtgatggagcccatttccagaaaagctacaccctgacaacaggaatggatttggtggtgaagacagtgccagttcctgacacgggagacagtgtggaactcttcatttttgactctgctggcaaggagctgttttcggaaatgctggataaattgtgggagagtcccaatgtcttatgtctcgtctatgatgtgaccaatgaagaatccttcaacaactgcagcaagtggctggagaaggctcggtcacaggctccaggcatctctctcccaggtgttttagttgggaacaagacagacctggccggcagacgagcagtggactcagctgaggcccgggcatgggcgctgggccagggcctggaatgttttgaaacatccgtgaaagagatggaaaacttcgaagcccctttccactgccttgccaagcagttccaccagctgtaccgggagaaggtggaggttttccgggccctggcatgacgagctggagcagatcgtgctgcacaaccggagaagacagaattacctctgctcttttaatatataatgatggctttaaataaaattaggagaaaatgtcgaagcagc

SEQ ID NO: 69988 - DNA, 552 bp, Artificial Sequence
  derived and/or modified sequence
atggtgaagctggccgccaagtgcatcctggccgtgcccgtggacaaacgcttatcccgagcagaggtgtgttccggctgttgcgaagtttgccgctcagtttcctggacttgcgccctgccagcagcatccgaacaggtccccgtgagaggggacccagccgttggcaagacagccctcgcccagatcttccggtccgatggagcccattttcagaaatcttacacccttaccacgggcatggacctggtggtcaagaccgtcccagtgccagacaccggagactccgtcgaactctttattttcgatagcgcaggaaaggaattattttccgaaatgctggacaagttgtgggagagccccaacgtactgtgtctcgtatatgacgtcacaaatgaggagagcttcaataattgctccaagtggcttgagaaagcccgctcccaggctcctggaatttctctgcctggggttttagttggcaacaaaaccgatctggctggcaggcgagcggtagactcagccgaggcaagagcttgggccctggggtag

SEQ ID NO: 69989 - DNA, 561 bp, Artificial Sequence
  derived and/or modified sequence
atggtgaagctggccgccaagtgcatcctggccggcgaccccgccgtgggcaaaacagcccttgctcaaatttttcgtagtgacggagcacactttcagaagtcttatacgttaaccaccggaatggacctagttgtgaaaacggttccagtgccggacaccggggactccgttgagttattcatttttgactccgctgggaaagagctgttctctgagatgctggacaagctttgggagtcacctaacgtgctgtgtttggtgtacgacgtgactaatgaagaaagcttcaataactgcagcaaatggctcgagaaagcacgatcccaagctcctgggatctcccttcctggcgttctcgtgggaaataaaacggatttagcaggtcgcagagctgtcgatagcgctgaggcccgcgcgtgggcgctggggcagggtctggagtgctttgagacttcagtcaaagaaatggaaaactttgaagcgccgttccactgtttagccaagcagttccatcagctttacagggaaaaggttgaggtttttcgtgccttggcctag

SEQ ID NO: 69990 - DNA, 552 bp, Artificial Sequence
  derived and/or modified sequence
atggtcaaactggcggcaaaatgcattctggccgttcccgtggacaaaagactgtctcgagccgaagtctgctcagggtgctgtgaagtgtgccggtcggtgtcatggacctgtgctctgcccgctgcatctgagcaagtcccggtcagaggagaccctgccgtgggaaagaccgcattggcccagatctttagaagtgacggcgcacattttcagaagtcttatacactgaccacaggaatggacctggtcgttaagactgttcccgtacccgatacaggcgatagcgtggagctgttcatcttcgactccgctggtaaggagttgtttagcgaaatgctcgacaagttgtgggagtcaccgaatgtgttatgcttagtatacgatgtgaccaacgaagagagcttcaacaattgctccaagtggctagagaaggctcggagccaagcccctggcatctcactgcctggcgttctggtgggcaacaaaaccgatctggccggaagacgggcagtggactccgcagaggcacgcgcttgggccctggggtag

SEQ ID NO: 69991 - DNA, 561 bp, Artificial Sequence
  derived and/or modified sequence
atggttaaactggccgctaagtgtatactcgccggagaccctgctgtgggaaaaactgcgctggcccagatttttcgcagcgacggggcacacttccagaagtcttacactctcaccacaggaatggacctagtcgtcaagaccgtgccagtgcccgataccggagattccgtcgagctgtttatttttgacagcgcaggcaaagagctgttctccgagatgcttgacaagctctgggaatctccaaacgtgttatgtttagtctatgacgtgacgaatgaggagtcttttaataattgctcaaagtggttagaaaaggcccgtagccaagccccagggatatcattgccaggggtgttggttgggaacaagactgatctagctggcagaagagccgtggattccgccgaggcccgagcatgggcccttggtcagggcctcgagtgcttcgaaacatctgtgaaggagatggaaaattttgaggcgccatttcattgtcttgcaaagcagtttcaccagctttaccgagaaaaagtggaagtcttcagagcactcgcatag

SEQ ID NO: 69992 - protein, 421 aa, Artificial Sequence
  derived and/or modified sequence
MGKRLDQPQMYPQYTYYYPHYLQTKQSYAPAPHPMAPPSPSTNSSSNNSSNNSSGEQLSKTNLYIRGLPPGTTDQDLIKLCQPYGKIVSTKAILDKNTNQCKGYGFVDFDSPAAAQKAVASLKANGVQAQMAKQQEQDPTNLYISNLPISMDEQELENMLKPFGHVISTRILRDANGVSRGVGFARMESTEKCEVVIQHFNGKYLKTPPGIPAPSEPLLCKFADGGQKKRQNQSKYTQNGRPWPREGEAGMALTYDPTAAIQNGFYSSPYSIATNRMIPQTSITPFIAASPVSTYQVQSTSWMPHPPYVMQPTGAVITPTMDHPMSMQPANMMGPLTQQMNHLSLGTTGTYMTAAAPMQGTYIPQYTPVPPTAVSIEGVVADTSPQTVAPSSQDTSGQQQQIAVDTSNEHAPAYSYQQSKP

SEQ ID NO: 69993 - DNA, 1266 bp, Artificial Sequence
  derived and/or modified sequence
atgggcaagagactggaccagcctcagatgtacccgcagtatacctattactatccacattatcttcaaaccaaacagtcttacgcccccgccccacacccgatggctcctccgagtccaagcaccaatagtagcagtaacaactccagcaataatagctcaggggaacaacttagcaagacaaatctgtacatacgaggactgccaccaggtactactgatcaggatctgataaagctatgccagccatacgggaaaattgtatcaaccaaggccattctcgacaagaataccaaccagtgcaaaggatacggtttcgtcgattttgacagccctgccgcggcgcaaaaagccgtcgccagcctgaaggccaacggtgtgcaggcacaaatggccaagcagcaggaacaagacccaaccaatttatatatttctaatctgccaatctcaatggatgagcaagaacttgagaacatgctgaaaccttttggacacgtgatatctaccaggattcttcgcgatgcaaatggtgtaagccgtggggttggcttcgcccgcatggaatccaccgaaaagtgcgaggtagtcatccagcattttaacgggaagtatctgaagactcctccagggatccctgcgccctccgagccactcctctgcaagttcgcggatgggggccaaaaaaagcggcagaatcaatccaaatatactcagaacgggagaccatggccacgggagggggaggccggaatggcactcacctacgatccaactgccgccatccaaaacgggttctacagttccccttactctatcgccaccaatcgcatgatcccgcagacatccatcactcccttcatagcggcctctcccgtttccacttatcaggtgcagagcaccagctggatgccgcacccaccatacgttatgcagcccaccggagccgtgattacacctacaatggaccacccgatgagcatgcaaccagcaaacatgatgggacccctgacacaacagatgaaccatctgtcactgggaacaacaggcacgtatatgaccgcagccgctccaatgcagggaacgtacataccacagtataccccagtgccacctactgcggtgtccattgaaggcgtggtcgccgacactagcccgcagaccgtggctccctctagtcaagacacaagcggtcaacagcagcaaattgccgtcgacacctcaaacgaacacgctcccgcatactcttatcagcagagcaagccctag

SEQ ID NO: 69994 - DNA, 1266 bp, Artificial Sequence
  derived and/or modified sequence
atgggcaagaggctggaccagccccagatgtacccccagtacacctactactacccccactacctgcagaccaagcagagctatgccccagccccccaccccatggccccacccagccccagcaccaacagcagcagcaacaacagcagcaacaacagcagcggggagcagctgagcaagaccaacctgtacatccggggcctgcccccaggcaccacagaccaggacctgatcaagctgtgccagccctacggcaagatcgtgtccaccaaggccatcctggacaagaacaccaaccagtgcaagggctacggctttgtggactttgacagccctgctgctgcccagaaggctgtggccagcctgaaggccaatggagtgcaggcccagatggccaagcagcaggagcaggaccccaccaacctgtacatcagcaacctgcccatctccatggatgagcaggagctggagaacatgctgaagccctttggacatgtgatcagcacccgcatcctgagagatgccaacggggtgtccagaggagtgggctttgccaggatggagagcacagagaagtgtgaggtggtgatccagcacttcaacgggaagtacctgaagaccccacctggcatcccagcccccagcgagcccctgctgtgcaagtttgctgatggcggccagaagaagaggcagaaccagagcaagtacacccagaatggccggccctggccccgggagggggaggccggcatggccctgacctatgaccccacagctgccatccagaatggcttctacagcagcccctacagcatcgccaccaacaggatgatcccccagaccagcatcacccccttcatcgccgccagccctgtgtccacctaccaggtgcagagcacctcctggatgccccaccccccctacgtgatgcagcccactggagctgtgatcacccccaccatggaccaccccatgtccatgcagcctgccaacatgatgggccccctgacccagcagatgaaccacctgagcctgggcaccaccggcacctacatgacagctgctgcccccatgcagggcacctacatcccccagtacacccctgtgcccccaacagctgtgtccattgagggcgtggtggccgacaccagcccccagacagtggcccccagcagccaggacaccagcggccagcagcagcagattgctgtggacaccagcaatgagcacgccccagcctacagctaccagcagagcaagccctag

SEQ ID NO: 69995 - DNA, 1266 bp, Artificial Sequence
  derived and/or modified sequence
atgggcaagcggctggaccagccccagatgtacccccagtacacctactattatccgcattatctgcaaacaaagcagtcttatgccccggctccacatccaatggctccaccctcaccctctacaaattcttcaagcaataactccagcaacaattcgtcgggggagcaattgtccaagaccaacctgtacattcgaggactccctccgggaactactgatcaggatttaattaagctttgccaaccttacgggaagatcgttagtacgaaagctatccttgataaaaataccaatcaatgcaaaggctatgggtttgtggactttgattcaccggctgctgcgcagaaggccgtggcatctctgaaagccaatggagtccaggctcagatggcaaagcagcaggagcaggaccccacgaatctctacatttccaatctgccaatctctatggacgagcaggaactggaaaacatgttgaaaccattcggccatgttatttccactcgcatcctccgagatgctaatggcgtgagccggggcgtaggattcgcacggatggaatctaccgaaaaatgcgaagttgtgattcagcactttaacggcaagtacctcaaaacaccacccggtatacctgcccccagcgagcctctcctgtgcaaattcgctgatggcggacagaagaagaggcagaaccagtcaaagtacacccagaacggccgtccatggccccgggagggagaggccggaatggcactaacgtatgatcccacagcagctatacaaaatggtttttatagctccccttactccatcgcaacgaaccgaatgattcctcaaacctccattactccattcattgctgcttctcctgtctcgacctaccaggtgcagtcaaccagctggatgcctcaccccccgtacgtgatgcaaccaaccggcgccgttattacaccaactatggaccatccgatgtcaatgcagcccgccaatatgatgggccccctgactcagcagatgaatcacttgagcctggggaccaccgggacctacatgaccgccgctgccccaatgcaaggaacttacattcctcagtatacacccgtaccccccacggcagtatccatcgaaggtgtggtagccgacacatcaccacagaccgttgcaccatcttcacaggataccagcggacagcaacaacagatagccgtcgacacctcaaacgagcacgccccggcgtattcttaccaacagagcaaaccatag

SEQ ID NO: 69996 - DNA, 1266 bp, Artificial Sequence
  derived and/or modified sequence
atggggaagaggctcgaccaaccacaaatgtatccgcagtacacctattattatcctcattatctgcagacaaaacaatcctacgctcctgcccctcaccccatggctccacctagcccctccactaatagtagctccaataacagcagtaacaattctagcggggaacaactgtccaaaactaacctatacattcgcggactgccacccggtacaactgaccaggatctgatcaagctgtgccagccgtacggaaagatcgtgtcaacgaaagccattctcgataaaaacacgaaccaatgtaaagggtacgggtttgtggacttcgactctcccgctgccgctcaaaaagccgtggccagtctgaaggctaacggcgtgcaggcccagatggccaaacagcaggaacaagacccaaccaacttgtacatatcaaacctaccgattagcatggacgaacaggaactagagaacatgttgaagccatttggtcacgtcatctccactagaattctgagggacgccaacggcgtttccagaggggtgggctttgctcggatggagtccacagaaaaatgtgaagtggtgatacagcactttaatggtaagtaccttaagacccctcccggtattcccgctccctccgaaccgcttttatgtaaattcgctgacggcggacagaaaaaaaggcagaatcagagcaaatacactcagaacgggaggccttggccacgtgaaggagaggccggaatggccctaacgtatgaccccaccgctgccattcagaatggtttttatagtagtccctacagcatagcaaccaatagaatgattccgcaaacatcaataacgcctttcattgccgcatctccagtaagtacctatcaggtccagtctacatcatggatgcctcacccaccctatgtcatgcaacctacgggcgcagtgattacacccaccatggaccatcctatgagcatgcagccagcaaatatgatgggacccctcacgcagcaaatgaaccatcttagtttaggcaccacgggcacctacatgaccgcagccgctcccatgcaaggaacatacattccccagtacacgcccgtgccacctactgctgtgagtattgagggggtggtagccgataccagccctcaaaccgttgctccatctagtcaagacacgtctggacaacagcagcagatagcagtggacacctcaaacgagcacgccccagcttacagctaccagcagagcaaaccgtag

SEQ ID NO: 69997 - DNA, 1547 bp, Artificial Sequence
  derived and/or modified sequence
gagtggtggagtctctgaagcctcatcagtcaccgggactgtcaggaatagtggtttaagaggaagctcggcctggggcactataccctgtcatccagttccctgcctcggagataaagattccagctacatgggcaaacgcctggatcagccacaaatgtacccccagtacacttactactatcctcattatctccaaaccaagcagtcctatgcaccagctccccaccccatggctcctcccagccccagcacaaacagcagcagcaacaacagcagcaacaacagcagcggggaacagttgagtaaaaccaacctgtacattcgaggcctcccaccaggcaccactgaccaggacctaatcaagctgtgccaaccgtatggaaaaattgtatctacaaaggcaattcttgacaaaaacacaaatcagtgcaaaggttatggttttgtagattttgacagtcctgcagccgcacagaaagcggtagcatctctcaaggcaaatggcgtgcaggcacagatggctaagcaacaagagcaagacccaacaaacctatacatctcaaatctccccatttctatggatgagcaggagcttgagaatatgctgaaaccctttggacatgtcatttccacaagaatactaagagacgctaatggagtcagcagaggtgttggctttgccagaatggagtctactgaaaaatgtgaagtggtaattcaacattttaatggaaaatatctgaaaacaccaccaggcatcccagcccccagtgagcctttgctgtgcaaattcgctgatggaggacaaaagaagcgacagaatcaaagcaaatatacccagaatgggaggccttggcccagggaaggagaggctggcatggctttgacctatgaccccacagctgccatacagaatggattttattcttcaccgtacagtattgcaaccaaccgcatgattccacagacatctatcacgccattcattgctgcttcccctgtctccacataccaggtccagagtacttcatggatgcctcatccgccatacgttatgcaaccaacaggtgctgtgattacaccaaccatggaccatcccatgtcaatgcagccagccaacatgatgggcccactgacacagcagatgaatcacctttcgttgggcacaacaggaacgtatatgactgctgctgctcctatgcaagggacctacattcctcagtacacgcctgtgcctccgacagctgtttctattgaaggtgttgttgctgatacctctccccagacagtggcaccttcatcccaggacaccagtggtcagcagcaacagatagcagtggacacatccaacgaacatgcacctgcatattcttaccaacagtctaaaccataaacaggactgaagaatgtctgtctgaatctttgccttgaatgaagaaacttcattgaacaagaagttggcttccagtttgcacagacgtcaatggaatgcatttttttgttgttgttgttgttttttttttagtgttataccttacccaatg

SEQ ID NO: 69998 - DNA, 1266 bp, Artificial Sequence
  derived and/or modified sequence
atgggcaagagactggaccagccccagatgtacccccagtacacctactactacccccactacctgcagaccaagcagagctacgcccccgccccccaccccatggccccccccagccccagcaccaacagcagcagcaacaacagcagcaacaacagcagcggcgagcagctgagcaagaccaacctgtacatcagaggcctgccccccggcaccaccgaccaggacctgatcaagctgtgccagccctacggcaagatcgtgagcaccaaggccatcctggacaagaacaccaaccagtgcaagggctacggcttcgtggacttcgacagccccgccgccgcccagaaggccgtggccagcctgaaggccaacggcgtgcaggcccagatggccaagcagcaggagcaggaccccaccaacctgtacatcagcaacctgcccatcagcatggacgagcaggagctggagaacatgctgaagcccttcggccacgtgatcagcaccagaatcctgagagacgccaacggcgtgagcagaggcgtgggcttcgccagaatggagagcaccgagaagtgcgaggtggtgatccagcacttcaacggcaagtacctgaagaccccccccggcatccccgcccccagcgagcccctgctgtgcaagttcgccgacggcggccagaagaagagacagaaccagagcaagtacacccagaacggcagaccctggcccagagagggcgaggccggcatggccctgacctacgaccccaccgccgccatccagaacggcttctacagcagcccctacagcatcgccaccaacagaatgatcccccagaccagcatcacccccttcatcgccgccagccccgtgagcacctaccaggtgcagagcaccagctggatgccccaccccccctacgtgatgcagcccaccggcgccgtgatcacccccaccatggaccaccccatgagcatgcagcccgccaacatgatgggccccctgacccagcagatgaaccacctgagcctgggcaccaccggcacctacatgaccgccgccgcccccatgcagggcacctacatcccccagtacacccccgtgccccccaccgccgtgagcatcgagggcgtggtggccgacaccagcccccagaccgtggcccccagcagccaggacaccagcggccagcagcagcagatcgccgtggacaccagcaacgagcacgcccccgcctacagctaccagcagagcaagccctag

SEQ ID NO: 69999 - protein, 433 aa, Artificial Sequence
  derived and/or modified sequence
MGKRLDQPQMYPQYTYYYPHYLQTKQSYAPAPHPMAPPSPSTNSSSNNSSNNSSGEQLSKTNLYIRGLPPGTTDQDLIKLCQPYGKIVSTKAILDKNTNQCKGYGFVDFDSPAAAQKAVASLKANGVQAQMAKQQEQDPTNLYISNLPISMDEQELENMLKPFGHVISTRILRDANGVSRGVGFARMESTEKCEVVIQHFNGKYLKTPPGIPAPSEPLLCKFADGGQKKRQNQSKYTQNGRPWPREGEVLRGRTVPRQNREAGMALTYDPTAAIQNGFYSSPYSIATNRMIPQTSITPFIAASPVSTYQVQSTSWMPHPPYVMQPTGAVITPTMDHPMSMQPANMMGPLTQQMNHLSLGTTGTYMTAAAPMQGTYIPQYTPVPPTAVSIEGVVADTSPQTVAPSSQDTSGQQQQIAVDTSNEHAPAYSYQQSK

SEQ ID NO: 70000 - protein, 434 aa, Artificial Sequence
  derived and/or modified sequence
MGKRLDQPQMYPQYTYYYPHYLQTKQSYAPAPHPMAPPSPSTNSSSNNSSNNSSGEQLSKTNLYIRGLPPGTTDQDLIKLCQPYGKIVSTKAILDKNTNQCKGYGFVDFDSPAAAQKAVASLKANGVQAQMAKQQEQDPTNLYISNLPISMDEQELENMLKPFGHVISTRILRDANGVSRGVGFARMESTEKCEVVIQHFNGKYLKTPPGIPAPSEPLLCKFADGGQKKRQNQSKYTQNGRPWPREGEVLRGRTVPRQNREAGMALTYDPTAAIQNGFYSSPYSIATNRMIPQTSITPFIAASPVSTYQVQSTSWMPHPPYVMQPTGAVITPTMDHPMSMQPANMMGPLTQQMNHLSLGTTGTYMTAAAPMQGTYIPQYTPVPPTAVSIEGVVADTSPQTVAPSSQDTSGQQQQIAVDTSNEHAPAYSYQQSKP

SEQ ID NO: 70001 - DNA, 1394 bp, Artificial Sequence
  derived and/or modified sequence
agctcggcctggggcactataccctgtcatccagttccctgcctcggagataaagattccagctacatgggcaaacgcctggatcagccacaaatgtacccccagtacacttactactatcctcattatctccaaaccaagcagtcctatgcaccagctccccaccccatggctcctcccagccccagcacaaacagcagcagcaacaacagcagcaacaacagcagcggggaacagttgagtaaaaccaacctgtacattcgaggcctcccaccaggcaccactgaccaggacctaatcaagctgtgccaaccgtatggaaaaattgtatctacaaaggcaattcttgacaaaaacacaaatcagtgcaaaggttatggttttgtagattttgacagtcctgcagccgcacagaaagcggtagcatctctcaaggcaaatggcgtgcaggcacagatggctaagcaacaagagcaagacccaacaaacctatacatctcaaatctccccatttctatggatgagcaggagcttgagaatatgctgaaaccctttggacatgtcatttccacaagaatactaagagacgctaatggagtcagcagaggtgttggctttgccagaatggagtctactgaaaaatgtgaagtggtaattcaacattttaatggaaaatatctgaaaacaccaccaggcatcccagcccccagtgagcctttgctgtgcaaattcgctgatggaggacaaaagaagcgacagaatcaaagcaaatatacccagaatgggaggccttggcccagggaaggagaggtactcagaggcaggactgtccctaggcaaaatcgtgaagctggcatggctttgacctatgaccccacagctgccatacagaatggattttattcttcaccgtacagtattgcaaccaaccgcatgattccacagacatctatcacgccattcattgctgcttcccctgtctccacataccaggtccagagtacttcatggatgcctcatccgccatacgttatgcaaccaacaggtgctgtgattacaccaaccatggaccatcccatgtcaatgcagccagccaacatgatgggcccactgacacagcagatgaatcacctttcgttgggcacaacaggaacgtatatgactgctgctgctcctatgcaagggacctacattcctcagtacacgcctgtgcctccgacagctgtttctattgaaggtgttgttgctgatacctctccccagacagtggcaccttcatcccaggacaccagtggtcagcagcaacagatagcagtggacacatccaacgaacatgcacctgcatattcttaccaacagtctaagtaagtctgggctgtgctaagctcttttcc

SEQ ID NO: 70002 - DNA, 8208 bp, Artificial Sequence
  derived and/or modified sequence
tttttttccccctttacgaacgctggcaattgacatcactacagacagcctggttagagaacaaactgcctcatcccaagtggaccccggcagctgggggaagccaggcaagatctgggaaggctgtgtgtgggtgttttttctacagatctcactcctcgccctttttttttttcctttggtgtgtgttttttgttttgttttgttttttaaaaaaattcttgctgtgttggaactagcgagtggtggagtctctgaagcctcatcagtcaccgggactgtcaggaatagtggtttaagaggaagctcggcctggggcactataccctgtcatccagttccctgcctcggagataaagattccagctacatgggcaaacgcctggatcagccacaaatgtacccccagtacacttactactatcctcattatctccaaaccaagcagtcctatgcaccagctccccaccccatggctcctcccagccccagcacaaacagcagcagcaacaacagcagcaacaacagcagcggggaacagttgagtaaaaccaacctgtacattcgaggcctcccaccaggcaccactgaccaggacctaatcaagctgtgccaaccgtatggaaaaattgtatctacaaaggcaattcttgacaaaaacacaaatcagtgcaaaggttatggttttgtagattttgacagtcctgcagccgcacagaaagcggtagcatctctcaaggcaaatggcgtgcaggcacagatggctaagcaacaagagcaagacccaacaaacctatacatctcaaatctccccatttctatggatgagcaggagcttgagaatatgctgaaaccctttggacatgtcatttccacaagaatactaagagacgctaatggagtcagcagaggtgttggctttgccagaatggagtctactgaaaaatgtgaagtggtaattcaacattttaatggaaaatatctgaaaacaccaccaggcatcccagcccccagtgagcctttgctgtgcaaattcgctgatggaggacaaaagaagcgacagaatcaaagcaaatatacccagaatgggaggccttggcccagggaaggagaggtactcagaggcaggactgtccctaggcaaaatcgtgaagctggcatggctttgacctatgaccccacagctgccatacagaatggattttattcttcaccgtacagtattgcaaccaaccgcatgattccacagacatctatcacgccattcattgctgcttcccctgtctccacataccaggtccagagtacttcatggatgcctcatccgccatacgttatgcaaccaacaggtgctgtgattacaccaaccatggaccatcccatgtcaatgcagccagccaacatgatgggcccactgacacagcagatgaatcacctttcgttgggcacaacaggaacgtatatgactgctgctgctcctatgcaagggacctacattcctcagtacacgcctgtgcctccgacagctgtttctattgaaggtgttgttgctgatacctctccccagacagtggcaccttcatcccaggacaccagtggtcagcagcaacagatagcagtggacacatccaacgaacatgcacctgcatattcttaccaacagtctaaaccataaacaggactgaagaatgtctgtctgaatctttgccttgaatgaagaaacttcattgaacaagaagttggcttccagtttgcacagacgtcaatggaatgcatttttttgttgttgttgttgttttttttttagtgttataccttacccaatgaaagcaaagtttttatgtgctgtgcaaatggtcttcatgtggtctgacaatttatttttgccatcatttttttaattaaagaaaaaatttccagaagaggaaaaaaaaactacaaaaaacaaaacattgaaggttgatattttatgtggaagaacatttgaattgaattcagaatttttctgaaggtgtagatactttttttttttttttaacagaaaacctgatgtcaagaggtgggcaatagaaatggaaacaaattgtcttcctcaataattaagctactttctctttttcccttcttgttttaatctagtgggttttttattttattttttcttagaaatatgtaggtaaggtttatcttgaatcttaattgccttaattttaaggacgtcaaaggctctcgaggcaagctgtcaacgtcttgttgaaaacaaaaatcaagaaagaattgaaatactgtgccggctttcactggcacagaagtttaagactatgagtttttagggtgaagaaaaaactgtacagtttaaatgaaaatgtttttcttcatttgaagaaaatttgttgataaaccatggcaactgcaagaattggaaaaatgctgggacttttcatgaactttgtcttaagtgttgacatgaatcattctaaaaggctaaaacattttacagtaaagttattaaggttggtttaaaaacaactgcattagaaataatgcgtgtttggggggcagaatgcagatttttttaatttacaaagcgtgatcgctagcaaaagcattagtgctttttatctgcagtcttttttatgagctttacaaagtttttagtcagctttgcttgtcacattgcaaaacctagcttaagagcattaaaaaaaaaaacttaagtagataggagcttatggtcaaaaagtgcaaaaaaaaaaacaaaaaaaaagcaatagatagagaaattgttgacaatttctgtagtctttcctagttgtgatcaaattcagcctatggatggcctattttataccaaagatgaagtgacaccctattacagtccagaagatagaggttgttttcgtttcttttctttttaaaaaaaaaaaaatttatttgaccgacatggccggaccagttctttctttgttgtttgtttaaactaccttccactggtgttttacatagtgcaaaaaaaaaaagagggtggggggagttgtctctcttttctttaaatgtgtattcattgatagcagaagcttgtacctgctgtgtttagcagtttcagcatgaagagttctggatatgaactgattcatagagccaagtggctttaaattctgtgagcttttctggtttctcactagctgtcttgaatagtgaaacctgtattgatggccactagtaaaccaagatgcttatttaacaggtggaatattctttatatgaaatttcagctaaagacactttctggacctggtctgaaaggtcatttgtcaaaaaagcttagggatattctgtgaaatggtgagtggtctcctggaaaggtctcattgtatttgaacaatagtcttccctctaaattacaacacctctgggttttgtctttacacctctgtctttgtcatcacctaccatgaatagtcaccttggttttgcaaatggggagggggtatcatctttttgcctgttttcactgtatttttgtatattggtgttgccgaaagaactttttctttcagtttaattctttgaggcatgtaggaccaataagattgagaattctattggtggaatttagggaagtccttaaaatgctagttgacaatcaaggaacagtatgatttatatcaataagaaccaaaagaattaggtttgatcaatcatttaagccaaggaggaatacttgcatttagaacaatgcaaaactttgtctaaaatgaattaaattgacccacctgtaaaatatatctacatttttaattcatgagatgatatgtgttcaacctttacagttttacctgaaattaaggacaatggaatagaatttgttaagtgaaccattcactagattgctttctgaatgaatcctttgaatcaaataggtgaaactcttttcaaaaactaagtcagtcacaggagcctgtcttagtccaaaagaagcagggaaatgtatttaagtgtactataaaacagggtaggctttttaaaaactaaaaagttttaaaggtaaatcatattcccattaggtcaacatgagtaataaggttgactcatgtgaaattgtcaatattctactatttctgtaaactctggttctcttatttgcaaccccatgcactggaagcccaaatcagagaatgactccatatatttatggtcacattggagacaaaagtgtatccaagaaaatgtagtgtgcgttatagagaaattccaactggtcacactcaccattatggtttttcatgctttagagaaaatgctagatttatactgtcttttgttccatccttcagcttcccatgcattataaaggtggcacttaagtttttatctttgaaaagtgggccccaaagttttttggggtacaaaaagacatgtatgagaaccatattttctgtttctctttttcactctctaaactctttttgtataaataaggattatcctgggcataattcatttgaatatgaaaccaacatactttctttcatttttgtgaaaaaataaccaaaaacatgtattaatgtgatacaaagaaagtctcattcacacaatcaacaatgaggctaagaggtagctaccatgtggctaatgaatgtgcctaggtaacttcctgtttctattcaaaactgctgctttatttgtacattcagaaatatttttttcaactatgaaatttcaatatcaattttttaagccagtttctgcaaaaggaaatgacctgtcatttgatgtgttcatgtgtgttttgtgtttggatagtttatatcatgccattctataaaatgtatgttttcaaaccaaaaagaaaaaaaatagaaggaaaacaacggcacatactcaaatttgccctgctttgtctgttgtcttacctaagacttgttttgaagagccaagtctgggagagaaaaaaaagcatcaacaggtaagcagcattacattgtgtggtaataaaccaaaataagttttcaatatatacagacaacagaattcaaatttaatcaacaaaatatattgtagtgatttgtttgtttgtttgtttgagacggagtctcgctctgtcgcccatcctaactaggactataatctttttttttttctttaagttgaagttaattttctgtgcattctggtccaccagattttcaagcatttatttggatgtttccatttttccttttgactttaatagccaagacttagcttaaacatcaggaaacaaactaaagccacaatccaaatgagagaaacactgtctcgtctaaactctagtttcatggtcagtgcaacagtgagttttcttttaataatggtatggtattgtcaagggaggcaaagtgttcatggtaacttggagctccccaatacatggccatgtcttctaaagacaacgtaatgagcccaagtgaactgaaggtcatactggcaggtgctgatgacagtttgtccttgaatgctgacatgtcttgaatattgcaaatgtcataatactcttttaaaacagtcctctacctgactctagttttgcgaggattagtttgtttccttggtagatttcaacatttcagaatgttacctccaaatttcacttgaattacttcctcctgtgaccttagcagatctgtcacatttgaaagcatatgactcacttccacccccttctaatgaaaaactgcatggtgttaaaagcactctcattagaaatataaggctgagaactgaagaaggctgtttaaagcaggaatttcactttattttactatgcctaaaaatacatctttggaccccttgcaaagtgctttaaaagtactttcaatttatgcatgactccaaaaaagtaatttttttttcccaaaaaaacctctttatttaaataattgggatatttgctaaatacctatttttttttacagtggcctaaaacccctattaatgaaaagtgaaatttgatttaattaggactcttgcagtcatcttcacgactgaggagaagtttcaataggctgtctagacattatgatgttaataggagattaaaatacatttggcaattcattttcattcttaatttgagtgcatgaaccactgcagatgagctgataagcagaaattctcaagtgggtttcactaataaatgtttttttatatgatttgaaatcaagtaaagggacaatgtttatgtacgtgtataacaacattcagcacatttgaggaatcacacactataataaagcttaaacctgtcatagaaccttgatctatattactttgtcttcagtaaaaagtgaaggatgagattttgtctttcatgttattgtagctggcatgcttcaaaattttgagcttactgggactgacagcctctcacttcaatctgagggattgacagaatttaaacaggctcattgattctgtacactctacccttcctgtggcaagtgataatgggatttcattaatgaatcaatttgttttacaaatgacatccactgtggcattggaagacagttgggtctgactcaagtttaacatttcttaccaaacattcttaagtatgaaattggtcctttaatccaaatgctcttggtcatggctgtcctttgcggattacatagcattcaggaaagtacaaaaactaaacactaaatccccaactggccccaaagaccttttatgatgtgagagacaagagttcaccccagattaatttcttttatcattggctttatactctaacatatagatactctctatagcaaaaaagggatgaatggctttcaatattcatttctgtttatttttgtgagggaaaataatatatcaagaaaattttcttccacttagaaagctttaaagctgaagtagaggtgcagtcaagcttggatctgcaggaagaaccactaggccactgagtcatacttgagcttttcttactactgccccaatttctaaattgtgcataaatacaatcactctcaatttttgaagggctaattatctactttgtgggtgtgttttgttttttcttttcagcgtgtagggcttgggctctgtttccttttattagcatgtcacctgagggtggaacaaacaattggaaataaaatttgattattttatttcttataaagtattaatttcttaagggggtttgaaatcattggtaaaattaatatcagtacattatatgtcataaattttgattatctataatgtcttttcttatctaccacaaataattgagagttggctaaattcttgcagaatatatgggaaaaaaatcatagcaaagaattcagcttccctcaaaagaaagctatttttgtttccttcactccactaaatttgaaccagtagcacggatcaacacgacttctgcaatgagagtataacggtagctcttggtacagtcatattcatatttttaaatctttctttgaccaaaactattgcattgttttcattacattttgactgcgttacttattaaggccgaatgactttgacacccccgtggattatttttatgatcacatcaaatttaaacaatgtccaaagtgtaactttaatgttatattttgtttcaaaccctctggtctaagattattgagaaagatgttttttcctcctccctcaaatatgttatctcttcatatataaaaaaataagttattccatgcttttcaggaactgtaaaaattatttcaaaaagatatttgaaaaagttttctctattctggacacaaatgcttccatttatttcaaaagaagaagaagaaaaatggaatcttaatttaaaaaaatatatgtagtagtatctgctatgagatattcagtctctataaaaaaaaaaagggacacagcttcttttaaaacccttgtttcagtccatattcaacttcatggaacttctgaaacatcattcaattttgaactttatttaagagcatttttgtactgctgtctctgactgtcatggaaagttctgtaattctaaggtgtttctggttttatttttaatttcttcatctgtaccacagtcaaattagcaaccatctcccccatcccttgggctttctgtagatcagtggatgttaggtttaaacttctgttttctttgatgaagctttcaataaaaaatgaaaataaaatcaattgaatagg

SEQ ID NO: 70003 - DNA, 1305 bp, Artificial Sequence
  derived and/or modified sequence
atgggcaaacggttagatcagccgcagatgtacccacagtatacttattattacccgcattatcttcaaaccaaacagagttacgcccctgcgccacacccaatggctcctcccagcccaagcacgaatagtagctccaacaactcctctaataacagcagcggcgaacaattgtctaagaccaacctgtatattcggggcctccctccaggcacaaccgatcaagacctgataaaactgtgccagccttacgggaaaatagtgagcacaaaagcaatcttggacaaaaacaccaatcaatgcaaaggctacggatttgtcgattttgacagtccagcggcagctcaaaaggccgtggcgtcgctgaaggctaacggggtgcaagcacagatggcgaaacagcaggaacaagacccgacaaatctttacatcagcaacctccccatatccatggacgaacaggagctggaaaatatgctgaagcctttcggacatgttatctccacgcgcattctgcgggatgctaacggagtttcccggggcgttggcttcgctcgtatggagtctacagaaaagtgtgaagtggtgattcagcattttaacggaaagtatcttaagaccccacccggaatacctgctcctagtgaacccctgctgtgcaaattcgccgatggaggacagaagaagcggcaaaatcagtccaagtatacccagaacggccgcccctggccccgagaaggcgaagtactcagggggcggactgttcctcggcaaaatcgcgaggccggcatggctctgacatacgatcctactgctgcgatccaaaacggcttttactcttctccctactctatcgctacgaacaggatgatcccccagacttccattaccccttttatagcagcgtcccctgtttcaacatatcaggtgcagagtacctcatggatgccccacccaccctacgtcatgcagcctaccggggccgtgattacgcccacaatggatcatccaatgtctatgcagcccgccaacatgatgggcccactcacccagcagatgaatcacctgtctctgggtactacaggcacctacatgaccgctgccgcaccaatgcaaggcacctatatacctcagtataccccagtgcctccgactgcggtttcaattgagggcgtggtcgcagacacaagtccccagactgtggccccaagcagtcaggatacttccggccaacagcaacagatagctgtggatacttctaatgaacacgcgccggcttattcataccagcaaagcaagccttag

SEQ ID NO: 70004 - DNA, 1302 bp, Artificial Sequence
  derived and/or modified sequence
atgggcaaaagactggaccagccccagatgtacccccagtatacgtattactacccacactacctccagaccaagcagtcctacgcccccgcacctcaccctatggcaccaccatcccccagcacaaacagctcatcgaataacagctccaacaattctagcggagaacagctctctaagaccaatctgtacatccgcggactcccgcctggcaccaccgaccaggacctcataaagctgtgccagccatatgggaaaattgttagcacaaaggcaatccttgataagaatacaaatcagtgtaaaggatacggatttgtggacttcgacagcccggctgccgcgcagaaggccgtagcctcactcaaagcaaacggagtacaggctcaaatggctaaacagcaggagcaggacccaactaacctttacattagtaaccttccaattagcatggatgagcaagaattagaaaacatgctcaaaccctttggacatgtgatatctacccggatactccgtgatgcgaacggcgtgtctagaggggtgggatttgctcgaatggaatctacagaaaaatgtgaggtcgttatccagcacttcaacgggaagtatcttaaaacgcctccagggatccccgcgcccagtgagccccttctctgtaaattcgcagacggcggtcaaaaaaaaaggcagaaccagagcaagtacacccagaacggaagaccctggccaagggaaggcgaagtacttcgggggagaacagtcccccggcagaacagggaggccgggatggcactgacgtacgaccctacggcggctatacagaatggcttttactcctcgccgtattcgattgctaccaaccggatgattcctcagacctctattactccctttattgcagcctcgccagtgtcgacctaccaggtccagagtacctcttggatgccccatcctccatacgtaatgcagcctactggcgctgtcatcactccaacgatggaccaccccatgtctatgcagccagctaatatgatgggccccttaacgcagcaaatgaaccatctttccctaggcaccaccgggacgtacatgaccgccgccgctcccatgcaggggacctacattccacagtatacacctgttcccccaacagcagtttctatcgagggggtggtagccgacacctccccacagactgtggctccaagttcccaggacaccagtggacagcaacaacagatcgcggtggacacaagcaatgaacacgcgcccgcgtatagctaccagcagtccaagtag

SEQ ID NO: 70005 - DNA, 1305 bp, Artificial Sequence
  derived and/or modified sequence
atgggcaagaggctggaccagccccagatgtacccccagtacacctactactacccccactacctgcagaccaagcagagctatgccccagccccccaccccatggccccacccagccccagcaccaacagcagcagcaacaacagcagcaacaacagcagcggggagcagctgagcaagaccaacctgtacatccggggcctgcccccaggcaccacagaccaggacctgatcaagctgtgccagccctacggcaagatcgtgtccaccaaggccatcctggacaagaacaccaaccagtgcaagggctacggctttgtggactttgacagccctgctgctgcccagaaggctgtggccagcctgaaggccaatggagtgcaggcccagatggccaagcagcaggagcaggaccccaccaacctgtacatcagcaacctgcccatctccatggatgagcaggagctggagaacatgctgaagccctttggacatgtgatcagcacccgcatcctgagagatgccaacggggtgtccagaggagtgggctttgccaggatggagagcacagagaagtgtgaggtggtgatccagcacttcaacgggaagtacctgaagaccccacctggcatcccagcccccagcgagcccctgctgtgcaagtttgctgatggcggccagaagaagaggcagaaccagagcaagtacacccagaatggccggccctggccccgggagggggaggtgctgcggggccgcacagtgccccggcagaaccgggaggccggcatggccctgacctatgaccccacagctgccatccagaatggcttctacagcagcccctacagcatcgccaccaacaggatgatcccccagaccagcatcacccccttcatcgccgccagccctgtgtccacctaccaggtgcagagcacctcctggatgccccaccccccctacgtgatgcagcccaccggggccgtcatcacccccaccatggaccaccccatgtccatgcagcctgccaacatgatgggccccctgacccagcagatgaaccacctgagcctgggcaccaccggcacctacatgacagctgctgcccccatgcagggcacctacatcccccagtacacccctgtgcccccaacagctgtgtccattgaaggagtggtggccgacaccagcccccagacagtggcccccagcagccaggacaccagcggccagcagcagcagattgctgtggacaccagcaatgaacatgccccagcctacagctaccagcagagcaagccctag

SEQ ID NO: 70006 - DNA, 1302 bp, Artificial Sequence
  derived and/or modified sequence
atgggcaagaggctggaccagccccagatgtacccccagtacacctactactacccccactacctgcagaccaagcagagctatgccccagccccccaccccatggccccacccagccccagcaccaacagcagcagcaacaacagcagcaacaacagcagcggggagcagctgagcaagaccaacctgtacatccggggcctgcccccaggcaccacagaccaggacctgatcaagctgtgccagccctacggcaagatcgtgtccaccaaggccatcctggacaagaacaccaaccagtgcaagggctacggctttgtggactttgacagccctgctgctgcccagaaggctgtggccagcctgaaggccaatggagtgcaggcccagatggccaagcagcaggagcaggaccccaccaacctgtacatcagcaacctgcccatctccatggatgagcaggagctggagaacatgctgaagccctttggacatgtgatcagcacccgcatcctgagagatgccaacggggtgtccagaggagtgggctttgccaggatggagagcacagagaagtgtgaggtggtgatccagcacttcaacgggaagtacctgaagaccccacctggcatcccagcccccagcgagcccctgctgtgcaagtttgctgatggcggccagaagaagaggcagaaccagagcaagtacacccagaatggccggccctggccccgggagggggaggtgctgcggggccgcacagtgccccggcagaaccgggaggccggcatggccctgacctatgaccccacagctgccatccagaatggcttctacagcagcccctacagcatcgccaccaacaggatgatcccccagaccagcatcacccccttcatcgccgccagccctgtgtccacctaccaggtgcagagcacctcctggatgccccaccccccctacgtgatgcagcccaccggggccgtcatcacccccaccatggaccaccccatgtccatgcagcctgccaacatgatgggccccctgacccagcagatgaaccacctgagcctgggcaccaccggcacctacatgacagctgctgcccccatgcagggcacctacatcccccagtacacccctgtgcccccaacagctgtgtccattgaaggagtggtggccgacaccagcccccagacagtggcccccagcagccaggacaccagcggccagcagcagcagattgctgtggacaccagcaatgaacatgccccagcctacagctaccagcagagcaagtag

SEQ ID NO: 70007 - DNA, 1305 bp, Artificial Sequence
  derived and/or modified sequence
atgggcaagcggctggaccagccccagatgtacccccagtacacctattactaccctcattacttgcagactaagcagtcttatgccccagcccctcacccgatggctcccccgagcccctccaccaactcgtcatcaaacaactcatcaaacaattcgtcaggtgagcagctttccaagacaaacttgtatattcgaggcctgccccctggaaccactgaccaagacctgatcaagctgtgtcagccctatggcaaaattgtgtctacaaaggcaatcctggacaagaacactaaccagtgtaaaggatatgggttcgttgatttcgactcgcctgcggccgcccagaaggccgtggcaagcctcaaagccaacggcgtgcaggcccaaatggccaaacagcaggaacaagatccaacgaacctgtacatttctaacctacccatttctatggatgaacaggagctggaaaacatgcttaagcctttcggtcatgttatctcaactcgcatcttgagagatgcaaatggtgtgagtaggggggttggattcgcacggatggaatccactgagaagtgcgaagtggtcatccaacatttcaacgggaaatacctaaaaactcctcctggtatccccgctccaagtgagcccctactctgtaagtttgccgatggcggccagaagaaacgacagaaccagtcaaagtacactcagaacggacggccttggcctagggaaggagaagtgctgagaggccggaccgtacctcggcaaaaccgggaggccggaatggcattgacctacgaccctaccgccgctatccagaatggcttctactcctcaccttatagcatcgcaacgaatcgaatgatcccacagacatcaattacgcccttcatagccgcctctccagttagcacctaccaggttcagtcaacctcttggatgcctcaccctccatatgtgatgcagcctaccggcgctgtgataacaccgactatggaccaccccatgtcaatgcagcctgccaacatgatgggacctctcacgcaacaaatgaatcatcttagcttgggcacaactggcacatatatgacggctgccgcacctatgcaagggacgtatataccacagtacaccccagtgccgccaaccgcagtttcaatagaaggggtggtcgccgatacttcccctcagaccgtcgctccaagtagccaagacacgtctggacagcaacagcagatcgcagtggatacctctaacgagcacgcacccgcctattcgtaccagcaatctaaaccctag

SEQ ID NO: 70008 - DNA, 1302 bp, Artificial Sequence
  derived and/or modified sequence
atgggcaagcggctggaccagccccagatgtacccccagtacacctattactatccacactacttacagacaaaacagagttacgccccggcaccccatcccatggctcccccatctcctagcactaatagttcctctaacaacagcagtaacaactcatccggcgagcaactctctaaaaccaatctctatatcagagggctgccacccggcaccaccgatcaggacctgatcaagctgtgccaaccttacggtaaaatcgtgagcaccaaagctatactagacaagaacactaaccagtgtaaaggatacggattcgtcgactttgatagcccggccgcggctcagaaggcggtcgccagcctcaaagccaacggagtgcaagcccagatggcaaagcagcaagaacaggacccaacaaacttgtatataagcaatctgcccatctccatggatgagcaggaactggagaatatgctaaagcccttcgggcatgtgatatccacacgaattctgagggatgcaaatggcgtttcaaggggcgttggctttgcccgaatggagtcaacagagaaatgtgaggtcgtcattcagcactttaacggcaaatatctgaaaaccccacccgggatcccggctccgtccgagcctttactttgcaaatttgccgatggtggccagaaaaaacgccaaaaccagtccaagtatacacagaacggcaggccctggccacgggaaggggaagttttgcgcggtcgaacagtcccgcgacaaaatcgagaagccgggatggccttgacatatgatcccaccgccgcaattcagaatggtttctatagcagcccatactccatagccacaaatcgaatgatcccccagacttcaatcacaccctttattgccgcttcaccagtgtctacctatcaggtgcagtcaacctcttggatgcctcatccaccatacgttatgcagccgactggagctgtgataacccctaccatggatcacccaatgagcatgcagcccgccaatatgatgggaccgctgacacagcaaatgaaccatttgtcccttgggactacagggacatatatgacagctgcggcccctatgcagggcacatacattccccaatacacaccagtacctccaacagccgtgtcaatagagggagtggtagccgacactagtcctcagacagtagccccttcatctcaagacacttctgggcaacagcagcagatcgccgtcgatacctccaacgagcacgcccctgcatattcttatcaacaatcaaagtag

SEQ ID NO: 70009 - DNA, 1305 bp, Artificial Sequence
  derived and/or modified sequence
atggggaagcgcttggatcaaccccagatgtatccccaatacacatactattacccccattacctgcaaaccaagcaatcttacgctccagcaccccacccaatggctcccccaagtccatcaactaacagcagctccaacaactcaagtaacaatagctcaggggaacagctgtcaaagactaacctgtacatacgtggactccctcccggtaccaccgaccaggatctcatcaaattgtgccaaccctacggaaagattgtgagtactaaggcaattctggataaaaataccaaccagtgtaaagggtacggatttgtcgacttcgactcgcccgcagcggcacagaaagccgtagctagcctgaaagccaacggggtccaggcacaaatggccaagcagcaggaacaggaccctacgaacttatatatttctaacctgccaataagcatggatgagcaggaactggagaatatgctaaagcctttcggccacgtcattagcaccaggatattgagagacgccaatggggtttcccgcggagtcggcttcgccaggatggagagcactgaaaagtgtgaggtggtcatccagcacttcaacggaaagtacctcaagacaccacctgggatcccagcgcctagcgaaccactgctttgcaaattcgcagacgggggacaaaagaagaggcagaatcagtccaagtatactcagaacgggaggccatggcccagggagggtgaggttctgaggggcaggacagtgccacgacagaacagagaggcagggatggccctgacatacgacccgacagccgcaatccaaaatggattttatagttctccatacagtatagcaaccaatagaatgattccacagacttccataacaccatttatcgccgcttccccggtgtctacttaccaagtgcaatccacttcatggatgccacatcccccatatgtgatgcagccaacaggggctgtcatcacgccaaccatggatcaccccatgtctatgcagcctgccaacatgatggggccattaacccagcagatgaaccatctatctctcgggaccacgggtacctacatgaccgcagctgcaccgatgcaagggacgtacataccccaatacacacccgtccctcccacagctgtctctattgagggtgtggtggccgacacgagccctcaaacagtcgctcccagctctcaggacacaagcgggcagcagcaacagatagctgttgatacctccaacgagcatgctccggcttattcttaccagcagagtaaaccatag

SEQ ID NO: 70010 - DNA, 1302 bp, Artificial Sequence
  derived and/or modified sequence
atgggaaagaggctggaccaaccacaaatgtaccctcagtacacatactactacccacactacctacagactaagcagtcctacgccccagcacctcaccccatggcgccacctagtcccagtacaaattcatctagtaacaattcgtcgaacaacagttcaggggagcaactgtctaagactaatctgtacattagagggctgcctccgggaaccaccgatcaggacctgattaagctatgtcaaccttacgggaagattgtcagcacaaaggctatactcgacaaaaacaccaaccagtgcaaggggtacgggtttgttgacttcgattctcccgctgcggctcagaaggccgtagcttccctcaaggccaatggtgtgcaagcccaaatggccaaacagcaggagcaggacccgacaaacctctacattagtaacctgcctatttcaatggacgagcaggagctggaaaacatgcttaaacctttcggacacgttatcagcacacggatcctcagggacgccaatggagtctcgagaggcgtggggttcgccaggatggaatcaactgagaagtgcgaagtggtaatacagcatttcaatggcaaatacctcaagacaccgcctgggatacccgcaccctcagagcctctgctttgtaaattcgcagatggtggccaaaaaaaaagacaaaatcagagtaagtacacccagaatggaagaccctggccccgagaaggagaagtgctgaggggaaggaccgtgcctcgacagaaccgtgaggcgggaatggccctaacttacgatcctactgcagcaattcagaacggattttacagctcaccatacagtattgccaccaacaggatgattccccaaactagtatcacccctttcatcgctgccagtcccgtgtccacttaccaagttcagtccacatcatggatgccccatccgccttatgtgatgcagccgacaggtgcagtgatcacaccaacaatggaccaccctatgtccatgcagcccgctaatatgatgggacctctgactcagcagatgaaccatctgagtctgggtactaccggcacctatatgactgccgcagcccctatgcagggcacatacatacctcagtacacaccggtcccccctaccgcagttagcattgagggagtagtggcggacacgtcaccccagaccgtcgccccttcttcacaggatacgtccggacagcagcagcagatcgccgtagacacctcaaacgagcacgcacctgcatactcataccagcagtcaaaatag

SEQ ID NO: 70011 - DNA, 1305 bp, Artificial Sequence
  derived and/or modified sequence
atgggcaagagactggaccagccccagatgtacccccagtacacctactactacccccactacctgcagaccaagcagagctacgcccccgccccccaccccatggccccccccagccccagcaccaacagcagcagcaacaacagcagcaacaacagcagcggcgagcagctgagcaagaccaacctgtacatcagaggcctgccccccggcaccaccgaccaggacctgatcaagctgtgccagccctacggcaagatcgtgagcaccaaggccatcctggacaagaacaccaaccagtgcaagggctacggcttcgtggacttcgacagccccgccgccgcccagaaggccgtggccagcctgaaggccaacggcgtgcaggcccagatggccaagcagcaggagcaggaccccaccaacctgtacatcagcaacctgcccatcagcatggacgagcaggagctggagaacatgctgaagcccttcggccacgtgatcagcaccagaatcctgagagacgccaacggcgtgagcagaggcgtgggcttcgccagaatggagagcaccgagaagtgcgaggtggtgatccagcacttcaacggcaagtacctgaagaccccccccggcatccccgcccccagcgagcccctgctgtgcaagttcgccgacggcggccagaagaagagacagaaccagagcaagtacacccagaacggcagaccctggcccagagagggcgaggtgctgagaggcagaaccgtgcccagacagaacagagaggccggcatggccctgacctacgaccccaccgccgccatccagaacggcttctacagcagcccctacagcatcgccaccaacagaatgatcccccagaccagcatcacccccttcatcgccgccagccccgtgagcacctaccaggtgcagagcaccagctggatgccccaccccccctacgtgatgcagcccaccggcgccgtgatcacccccaccatggaccaccccatgagcatgcagcccgccaacatgatgggccccctgacccagcagatgaaccacctgagcctgggcaccaccggcacctacatgaccgccgccgcccccatgcagggcacctacatcccccagtacacccccgtgccccccaccgccgtgagcatcgagggcgtggtggccgacaccagcccccagaccgtggcccccagcagccaggacaccagcggccagcagcagcagatcgccgtggacaccagcaacgagcacgcccccgcctacagctaccagcagagcaagccctag

SEQ ID NO: 70012 - DNA, 1302 bp, Artificial Sequence
  derived and/or modified sequence
atgggcaagagactggaccagccccagatgtacccccagtacacctactactacccccactacctgcagaccaagcagagctacgcccccgccccccaccccatggccccccccagccccagcaccaacagcagcagcaacaacagcagcaacaacagcagcggcgagcagctgagcaagaccaacctgtacatcagaggcctgccccccggcaccaccgaccaggacctgatcaagctgtgccagccctacggcaagatcgtgagcaccaaggccatcctggacaagaacaccaaccagtgcaagggctacggcttcgtggacttcgacagccccgccgccgcccagaaggccgtggccagcctgaaggccaacggcgtgcaggcccagatggccaagcagcaggagcaggaccccaccaacctgtacatcagcaacctgcccatcagcatggacgagcaggagctggagaacatgctgaagcccttcggccacgtgatcagcaccagaatcctgagagacgccaacggcgtgagcagaggcgtgggcttcgccagaatggagagcaccgagaagtgcgaggtggtgatccagcacttcaacggcaagtacctgaagaccccccccggcatccccgcccccagcgagcccctgctgtgcaagttcgccgacggcggccagaagaagagacagaaccagagcaagtacacccagaacggcagaccctggcccagagagggcgaggtgctgagaggcagaaccgtgcccagacagaacagagaggccggcatggccctgacctacgaccccaccgccgccatccagaacggcttctacagcagcccctacagcatcgccaccaacagaatgatcccccagaccagcatcacccccttcatcgccgccagccccgtgagcacctaccaggtgcagagcaccagctggatgccccaccccccctacgtgatgcagcccaccggcgccgtgatcacccccaccatggaccaccccatgagcatgcagcccgccaacatgatgggccccctgacccagcagatgaaccacctgagcctgggcaccaccggcacctacatgaccgccgccgcccccatgcagggcacctacatcccccagtacacccccgtgccccccaccgccgtgagcatcgagggcgtggtggccgacaccagcccccagaccgtggcccccagcagccaggacaccagcggccagcagcagcagatcgccgtggacaccagcaacgagcacgcccccgcctacagctaccagcagagcaagtag

SEQ ID NO: 70013 - protein, 244 aa, Artificial Sequence
  derived and/or modified sequence
MLLLGAVLLLLALPGHDQETTTQGPGVLLPLPKGACTGWMAGIPGHPGHNGAPGRDGRDGTPGEKGEKGDPGLIGPKGDIGETGVPGAEGPRGFPGIQGRKGEPGEGAYVYRSAFSVGLETYVTIPNMPIRFTKIFYNQQNHYDGSTGKFHCNIPGLYYFAYHITVYMKDVKVSLFKKDKAMLFTYDQYQENNVDQASGSVLLHLEVGDQVWLQVYGEGERNGLYADNDNDSTFTGFLLYHDTN

SEQ ID NO: 70014 - DNA, 735 bp, Artificial Sequence
  derived and/or modified sequence
atgcttctgctgggcgccgtccttctgctgctcgccttgcctggacacgaccaggagaccaccacacagggcccaggagtcctgctgccactgcctaaaggagcctgtactgggtggatggccggcattcctgggcacccaggtcacaatggcgcaccaggccgcgacggccgtgacggcactccaggcgagaagggagaaaagggagaccctggcctaatcggacccaaaggggatatcggggaaaccggtgtccctggcgccgagggtccgcggggttttccaggaatccaaggcaggaagggcgagccaggtgagggtgcttacgtctatcgctccgcctttagcgtgggcctggaaacctatgtgacgatccccaacatgcccatccgtttcaccaagatcttctataaccagcagaatcactatgatgggtctaccgggaagtttcattgcaacatcccggggctttattactttgcttaccacattacagtctatatgaaggacgtgaaggtgtctctcttcaagaaagataaagcaatgcttttcacttacgaccagtaccaggaaaacaatgtagaccaagcttccggcagtgtcttgctgcatcttgaggttggagatcaggtctggctccaagtgtacggagaaggagagaggaatggactttacgctgacaacgacaacgatagcaccttcaccgggttcctgctctaccacgacaccaattag

SEQ ID NO: 70015 - DNA, 735 bp, Artificial Sequence
  derived and/or modified sequence
atgttgctcttgggcgccgtactcctgctactggcgctgcccgggcatgaccaagagacaaccacccaggggcccggggtgctacttccgctccctaaaggtgcatgcacaggatggatggccggcataccaggacacccaggccacaacggagcaccaggacgtgatgggcgggatggcacccctggtgaaaaaggagagaagggcgaccctggcttgatcgggccgaaaggggatatcggtgaaactggggtgccgggtgctgaaggccctaggggcttcccgggaatccaggggagaaaaggggagcccggcgagggcgcttatgtctatcgcagtgctttttccgtagggctcgagacctatgtgacaatccctaacatgccaataagattcacaaaaattttttataaccaacagaatcattacgacggctccacagggaaattccactgcaatatccccggtctgtattacttcgcctatcacattaccgtctatatgaaggatgttaaagtgtctctattcaagaaggataaagccatgctcttcacttatgaccagtatcaagagaacaatgtggaccaggcctctggatctgtgctgcttcatctggaggtcggcgaccaggtctggctccaggtgtatggtgaaggtgagagaaatggcctgtacgctgacaacgataatgacagtacctttaccggctttctgctgtatcatgacactaactag

SEQ ID NO: 70016 - DNA, 735 bp, Artificial Sequence
  derived and/or modified sequence
atgttactgctgggggccgtactgctcctgctcgccctgcccggacatgaccaagagaccaccacgcagggtcctggggttctcctgcccctccccaaaggggcctgtactgggtggatggccggcattcctggacatcccggtcacaatggggctccggggcgtgacgggcgcgacggcactcctggagagaaaggagaaaaaggcgaccccggcctcatcggaccaaagggggatatcggggagacgggggtacccggggcggagggaccacgggggtttcctggaatccagggcaggaagggtgaaccaggtgagggagcctacgtgtataggtcagcgttctccgtgggcctggagacatatgtaacgatacccaatatgcccattaggttcactaagatcttctataatcagcagaatcattacgacggcagtacaggaaagttccactgcaatataccagggttgtactattttgcataccatataacagtatatatgaaagatgttaaggtcagtctgtttaagaaagacaaagccatgctcttcacttatgatcaatatcaggaaaataacgtggaccaagcaagcggtagtgtgctgttacaccttgaggtgggggaccaggtgtggttgcaggtctacggagagggagagaggaacggactgtacgcagataacgataacgactcgacatttacgggattccttctgtaccatgacacaaattag

SEQ ID NO: 70017 - DNA, 4562 bp, Artificial Sequence
  derived and/or modified sequence
gccatctcctcctcacttccattctgactgcagtctgtggttctgattccataccagaggggctcaggatgctgttgctgggagctgttctactgctattagctctgcccggtcatgaccaggaaaccacgactcaagggcccggagtcctgcttcccctgcccaagggggcctgcacaggttggatggcgggcatcccagggcatccgggccataatggggccccaggccgtgatggcagagatggcacccctggtgagaagggtgagaaaggagatccaggtcttattggtcctaagggagacatcggtgaaaccggagtacccggggctgaaggtccccgaggctttccgggaatccaaggcaggaaaggagaacctggagaaggtgcctatgtataccgctcagcattcagtgtgggattggagacttacgttactatccccaacatgcccattcgctttaccaagatcttctacaatcagcaaaaccactatgatggctccactggtaaattccactgcaacattcctgggctgtactactttgcctaccacatcacagtctatatgaaggatgtgaaggtcagcctcttcaagaaggacaaggctatgctcttcacctatgatcagtaccaggaaaataatgtggaccaggcctccggctctgtgctcctgcatctggaggtgggcgaccaagtctggctccaggtgtatggggaaggagagcgtaatggactctatgctgataatgacaatgactccaccttcacaggctttcttctctaccatgacaccaactgatcaccactaactcagagcctcctccaggccaaacagccccaaagtcaattaaaggctttcagtacggttaggaagttgattattatttagttggaggcctttagatattattcattcatttactcattcatttattcattcattcatcgagtaactttaaaaaaatcatatgctatgttcccagtcctggggagcttcacaaacatgaccagataactgactagaaagaagtagttgacagtgctattttgtgcccactgtctctcctgatgctcatatcaatcctataaggcacagggaacaagcattctcctgtttttacagattgtatcctgaggctgagagagttaagtgaatgtctaaggtcacacagtattaagtgacagtgctagaaatcaaacccagagctgtggactttgttcactagactgtgcccttttatagaggtacatgttctctttggagtgttggtaggtgtctgtttcccacctcacctgagagccattgaatttgccttcctcatgaattaaaacctcccccaagcagagcttcctcagagaaagtggttctatgatgacgtcctgtcttggaaggactactactcaatggcccctgcactactctacttcctcttacctatgtcccttctcatgcctttccctccaacggggaaagccaactccatctctaagtgccgaactcatccctgttcctcaaggccacctggccaggagcttctctgatgtgatatccactttttttttttttgagatggagtctcactctgtcacccaggctggagtacagtgacacgacctcggctcactgcagcctccttctcctgggtccaagcaattattgtgcctcagcctcccgagtagctgagacttcaggtgcattccaccacacatggctaatttttgtatttttagtagaaatggggtttcgtcatgttggccaggctggtctcgaactcctggcctaggtgatccacccgcctcgacctcccaaagtgctgggattacaggcatgagccaccatgcccagtcgatatctcactttttattttgccatggatgagagtcctgggtgtgaggaacacctcccaccaggctagaggcaactgcccaggaaggactgtgcttccgtcacctctaaatcccttgcagatccttgataaatgcctcatgaagaccaatctcttgaatcccatatctacccagaattaactccattccagtctctgcatgtaatcagttttatccacagaaacattttcattttaggaaatccctggttttaagtatcaatccttgttcagctggacaatatgaatcttttccactgaagttagggatgactgtgattttcagaacacgtccagaatttttcatcaagaaggtagcttgagcctgaaatgcaaaacccatggaggaattctgaagccattgtctccttgagtaccaacagggtcagggaagactgggcctcctgaatttattattgttctttaagaattacaggttgaggtagttgatggtggtaaacattctctcaggagacaataactccagtgatgttcttcaaagattttagcaaaaacagagtaaatagcattctctatcaatatataaatttaaaaaactatctttttgcttacagttttaaattctgaacaattctctcttatatgtgtattgctaatcattaaggtattattttttccacatataaagctttgtctttttgttgttgttgttgtttttaagatggagtttccctctgttgccaggctagagtgcagtggcatgatctcggcttactgcaacctttgcctcccaggttcaagcgattcttctgcctcagcctcccgagtagctgggaccacaggtgcctaccaccatgccaggctaatttttgtatttttagtaaagacagggtttcaccatattggccaggctggtctcgaactcctgaccttgtgatctgcccgcctccatttttgttgttattttttgagaaagatagatatgaggtttagagagggatgaagaggtgagagtaagccttgtgttagtcagaactctgtgttgtgaatgtcattcacaacagaaaacccaaaatattatgcaaactactgtaagcaagaaaaataaaggaaaaatggaaacatttattcctttgcataatagaaattaccagagttgttctgtctttagataaggtttgaaccaaagctcaaaacaatcaagacccttttctgtatgtccttctgttctgccttccgcagtgtaggctttaccctcaggtgctacacagtatagttctagggtttccctcccgatatcaaaaagactgtggcctgcccagctctcgtatccccaagccacaccatctggctaaatggacatcatgttttctggtgatgcccaaagaggagagaggaagctctctttcccagatgccccagcaagtgtaaccttgcatctcattgctctggctgagttgtgtgcctgtttctgaccaatcactgagtcaggaggatgaaatattcatattgacttaattgcagcttaagttaggggtatgtagaggtattttccctaaagcaaaattgggacactgttatcagaaataggagagtggatgatagatgcaaaataatacctgtccacaacaaactcttaatgctgtgtttgagctttcatgagtttcccagagagacatagctggaaaattcctattgattttctctaaaatttcaacaagtagctaaagtctggctatgctcacagtctcacatctggttggggtgggctccttacagaacacgctttcacagttaccctaaactctctggggcagggttattcctttgtggaaccagaggcacagagagagtcaactgaggccaaaagaggcctgagagaaactgaggtcaagatttcaggattaatggtcctgtgatgctttgaagtacaattgtggatttgtccaattctctttagttctgtcagcttttgcttcatatattttagcgctctattattagatatatacatgtttagtattatgtcttattggtgcatttactctcttatcattatgtaatgtccttctttatctgtgataattttctgtgttctgaagtctactttgtctaaaaataacatacgcactcaacttccttttctttcttccttcctttctttcttccttcctttctttctctctctctctctttccttccttccttcctccttttctttctctctctctctctctctctttttttgacagactctcgttctgtggccctggctggagttcagtggtgtgatcttggctcactgctacctctaccatgagcaattctcctgcctcagcctcccaagtagctggaactacaggctcatgccactgcgcccagctaatttttgtatttttcgtagagacggggtttcaccacattcgtcaggttggtttcaaactcctgactttgtgatccacccgcctcggcctcccaaagtgctgggattacaggcatgagccatcacacctggtcaactttcttttgattagtgtttttgtggtatatctttttccatcatgttactttaaatatatctatattattgtatttaaaatgtgtttcttacagactgcatgtagttgggtataatttttatccagtctaaaaatatctgtcttttaattggtgtttagacaatttatatttaataaaattgttgaatttaa

SEQ ID NO: 70018 - DNA, 4635 bp, Artificial Sequence
  derived and/or modified sequence
aggctgttgaggctgggccatctcctcctcacttccattctgactgcagtctgtggttctgattccataccagagggtaagagcaattctgtgaagttccaggctgggctgacagtgcacatgtggattccagggctcaggatgctgttgctgggagctgttctactgctattagctctgcccggtcatgaccaggaaaccacgactcaagggcccggagtcctgcttcccctgcccaagggggcctgcacaggttggatggcgggcatcccagggcatccgggccataatggggccccaggccgtgatggcagagatggcacccctggtgagaagggtgagaaaggagatccaggtcttattggtcctaagggagacatcggtgaaaccggagtacccggggctgaaggtccccgaggctttccgggaatccaaggcaggaaaggagaacctggagaaggtgcctatgtataccgctcagcattcagtgtgggattggagacttacgttactatccccaacatgcccattcgctttaccaagatcttctacaatcagcaaaaccactatgatggctccactggtaaattccactgcaacattcctgggctgtactactttgcctaccacatcacagtctatatgaaggatgtgaaggtcagcctcttcaagaaggacaaggctatgctcttcacctatgatcagtaccaggaaaataatgtggaccaggcctccggctctgtgctcctgcatctggaggtgggcgaccaagtctggctccaggtgtatggggaaggagagcgtaatggactctatgctgataatgacaatgactccaccttcacaggctttcttctctaccatgacaccaactgatcaccactaactcagagcctcctccaggccaaacagccccaaagtcaattaaaggctttcagtacggttaggaagttgattattatttagttggaggcctttagatattattcattcatttactcattcatttattcattcattcatcgagtaactttaaaaaaatcatatgctatgttcccagtcctggggagcttcacaaacatgaccagataactgactagaaagaagtagttgacagtgctattttgtgcccactgtctctcctgatgctcatatcaatcctataaggcacagggaacaagcattctcctgtttttacagattgtatcctgaggctgagagagttaagtgaatgtctaaggtcacacagtattaagtgacagtgctagaaatcaaacccagagctgtggactttgttcactagactgtgcccttttatagaggtacatgttctctttggagtgttggtaggtgtctgtttcccacctcacctgagagccattgaatttgccttcctcatgaattaaaacctcccccaagcagagcttcctcagagaaagtggttctatgatgacgtcctgtcttggaaggactactactcaatggcccctgcactactctacttcctcttacctatgtcccttctcatgcctttccctccaacggggaaagccaactccatctctaagtgccgaactcatccctgttcctcaaggccacctggccaggagcttctctgatgtgatatccactttttttttttttgagatggagtctcactctgtcacccaggctggagtacagtgacacgacctcggctcactgcagcctccttctcctgggtccaagcaattattgtgcctcagcctcccgagtagctgagacttcaggtgcattccaccacacatggctaatttttgtatttttagtagaaatggggtttcgtcatgttggccaggctggtctcgaactcctggcctaggtgatccacccgcctcgacctcccaaagtgctgggattacaggcatgagccaccatgcccagtcgatatctcactttttattttgccatggatgagagtcctgggtgtgaggaacacctcccaccaggctagaggcaactgcccaggaaggactgtgcttccgtcacctctaaatcccttgcagatccttgataaatgcctcatgaagaccaatctcttgaatcccatatctacccagaattaactccattccagtctctgcatgtaatcagttttatccacagaaacattttcattttaggaaatccctggttttaagtatcaatccttgttcagctggacaatatgaatcttttccactgaagttagggatgactgtgattttcagaacacgtccagaatttttcatcaagaaggtagcttgagcctgaaatgcaaaacccatggaggaattctgaagccattgtctccttgagtaccaacagggtcagggaagactgggcctcctgaatttattattgttctttaagaattacaggttgaggtagttgatggtggtaaacattctctcaggagacaataactccagtgatgttcttcaaagattttagcaaaaacagagtaaatagcattctctatcaatatataaatttaaaaaactatctttttgcttacagttttaaattctgaacaattctctcttatatgtgtattgctaatcattaaggtattattttttccacatataaagctttgtctttttgttgttgttgttgtttttaagatggagtttccctctgttgccaggctagagtgcagtggcatgatctcggcttactgcaacctttgcctcccaggttcaagcgattcttctgcctcagcctcccgagtagctgggaccacaggtgcctaccaccatgccaggctaatttttgtatttttagtaaagacagggtttcaccatattggccaggctggtctcgaactcctgaccttgtgatctgcccgcctccatttttgttgttattttttgagaaagatagatatgaggtttagagagggatgaagaggtgagagtaagccttgtgttagtcagaactctgtgttgtgaatgtcattcacaacagaaaacccaaaatattatgcaaactactgtaagcaagaaaaataaaggaaaaatggaaacatttattcctttgcataatagaaattaccagagttgttctgtctttagataaggtttgaaccaaagctcaaaacaatcaagacccttttctgtatgtccttctgttctgccttccgcagtgtaggctttaccctcaggtgctacacagtatagttctagggtttccctcccgatatcaaaaagactgtggcctgcccagctctcgtatccccaagccacaccatctggctaaatggacatcatgttttctggtgatgcccaaagaggagagaggaagctctctttcccagatgccccagcaagtgtaaccttgcatctcattgctctggctgagttgtgtgcctgtttctgaccaatcactgagtcaggaggatgaaatattcatattgacttaattgcagcttaagttaggggtatgtagaggtattttccctaaagcaaaattgggacactgttatcagaaataggagagtggatgatagatgcaaaataatacctgtccacaacaaactcttaatgctgtgtttgagctttcatgagtttcccagagagacatagctggaaaattcctattgattttctctaaaatttcaacaagtagctaaagtctggctatgctcacagtctcacatctggttggggtgggctccttacagaacacgctttcacagttaccctaaactctctggggcagggttattcctttgtggaaccagaggcacagagagagtcaactgaggccaaaagaggcctgagagaaactgaggtcaagatttcaggattaatggtcctgtgatgctttgaagtacaattgtggatttgtccaattctctttagttctgtcagcttttgcttcatatattttagcgctctattattagatatatacatgtttagtattatgtcttattggtgcatttactctcttatcattatgtaatgtccttctttatctgtgataattttctgtgttctgaagtctactttgtctaaaaataacatacgcactcaacttccttttctttcttccttcctttctttcttccttcctttctttctctctctctctctttccttccttccttcctccttttctttctctctctctctctctctctttttttgacagactctcgttctgtggccctggctggagttcagtggtgtgatcttggctcactgctacctctaccatgagcaattctcctgcctcagcctcccaagtagctggaactacaggctcatgccactgcgcccagctaatttttgtatttttcgtagagacggggtttcaccacattcgtcaggttggtttcaaactcctgactttgtgatccacccgcctcggcctcccaaagtgctgggattacaggcatgagccatcacacctggtcaactttcttttgattagtgtttttgtggtatatctttttccatcatgttactttaaatatatctatattattgtatttaaaatgtgtttcttacagactgcatgtagttgggtataatttttatccagtctaaaaatatctgtcttttaattggtgtttagacaatttatatttaataaaattgttgaatttaa

SEQ ID NO: 70019 - DNA, 4599 bp, Artificial Sequence
  derived and/or modified sequence
acttccattctgactgcagtctgtggttctgattccataccagaggagacgggatttcaccatgttgtccaggctggtctgaaactcctgacatcagggctcaggatgctgttgctgggagctgttctactgctattagctctgcccggtcatgaccaggaaaccacgactcaagggcccggagtcctgcttcccctgcccaagggggcctgcacaggttggatggcgggcatcccagggcatccgggccataatggggccccaggccgtgatggcagagatggcacccctggtgagaagggtgagaaaggagatccaggtcttattggtcctaagggagacatcggtgaaaccggagtacccggggctgaaggtccccgaggctttccgggaatccaaggcaggaaaggagaacctggagaaggtgcctatgtataccgctcagcattcagtgtgggattggagacttacgttactatccccaacatgcccattcgctttaccaagatcttctacaatcagcaaaaccactatgatggctccactggtaaattccactgcaacattcctgggctgtactactttgcctaccacatcacagtctatatgaaggatgtgaaggtcagcctcttcaagaaggacaaggctatgctcttcacctatgatcagtaccaggaaaataatgtggaccaggcctccggctctgtgctcctgcatctggaggtgggcgaccaagtctggctccaggtgtatggggaaggagagcgtaatggactctatgctgataatgacaatgactccaccttcacaggctttcttctctaccatgacaccaactgatcaccactaactcagagcctcctccaggccaaacagccccaaagtcaattaaaggctttcagtacggttaggaagttgattattatttagttggaggcctttagatattattcattcatttactcattcatttattcattcattcatcgagtaactttaaaaaaatcatatgctatgttcccagtcctggggagcttcacaaacatgaccagataactgactagaaagaagtagttgacagtgctattttgtgcccactgtctctcctgatgctcatatcaatcctataaggcacagggaacaagcattctcctgtttttacagattgtatcctgaggctgagagagttaagtgaatgtctaaggtcacacagtattaagtgacagtgctagaaatcaaacccagagctgtggactttgttcactagactgtgcccttttatagaggtacatgttctctttggagtgttggtaggtgtctgtttcccacctcacctgagagccattgaatttgccttcctcatgaattaaaacctcccccaagcagagcttcctcagagaaagtggttctatgatgacgtcctgtcttggaaggactactactcaatggcccctgcactactctacttcctcttacctatgtcccttctcatgcctttccctccaacggggaaagccaactccatctctaagtgccgaactcatccctgttcctcaaggccacctggccaggagcttctctgatgtgatatccactttttttttttttgagatggagtctcactctgtcacccaggctggagtacagtgacacgacctcggctcactgcagcctccttctcctgggtccaagcaattattgtgcctcagcctcccgagtagctgagacttcaggtgcattccaccacacatggctaatttttgtatttttagtagaaatggggtttcgtcatgttggccaggctggtctcgaactcctggcctaggtgatccacccgcctcgacctcccaaagtgctgggattacaggcatgagccaccatgcccagtcgatatctcactttttattttgccatggatgagagtcctgggtgtgaggaacacctcccaccaggctagaggcaactgcccaggaaggactgtgcttccgtcacctctaaatcccttgcagatccttgataaatgcctcatgaagaccaatctcttgaatcccatatctacccagaattaactccattccagtctctgcatgtaatcagttttatccacagaaacattttcattttaggaaatccctggttttaagtatcaatccttgttcagctggacaatatgaatcttttccactgaagttagggatgactgtgattttcagaacacgtccagaatttttcatcaagaaggtagcttgagcctgaaatgcaaaacccatggaggaattctgaagccattgtctccttgagtaccaacagggtcagggaagactgggcctcctgaatttattattgttctttaagaattacaggttgaggtagttgatggtggtaaacattctctcaggagacaataactccagtgatgttcttcaaagattttagcaaaaacagagtaaatagcattctctatcaatatataaatttaaaaaactatctttttgcttacagttttaaattctgaacaattctctcttatatgtgtattgctaatcattaaggtattattttttccacatataaagctttgtctttttgttgttgttgttgtttttaagatggagtttccctctgttgccaggctagagtgcagtggcatgatctcggcttactgcaacctttgcctcccaggttcaagcgattcttctgcctcagcctcccgagtagctgggaccacaggtgcctaccaccatgccaggctaatttttgtatttttagtaaagacagggtttcaccatattggccaggctggtctcgaactcctgaccttgtgatctgcccgcctccatttttgttgttattttttgagaaagatagatatgaggtttagagagggatgaagaggtgagagtaagccttgtgttagtcagaactctgtgttgtgaatgtcattcacaacagaaaacccaaaatattatgcaaactactgtaagcaagaaaaataaaggaaaaatggaaacatttattcctttgcataatagaaattaccagagttgttctgtctttagataaggtttgaaccaaagctcaaaacaatcaagacccttttctgtatgtccttctgttctgccttccgcagtgtaggctttaccctcaggtgctacacagtatagttctagggtttccctcccgatatcaaaaagactgtggcctgcccagctctcgtatccccaagccacaccatctggctaaatggacatcatgttttctggtgatgcccaaagaggagagaggaagctctctttcccagatgccccagcaagtgtaaccttgcatctcattgctctggctgagttgtgtgcctgtttctgaccaatcactgagtcaggaggatgaaatattcatattgacttaattgcagcttaagttaggggtatgtagaggtattttccctaaagcaaaattgggacactgttatcagaaataggagagtggatgatagatgcaaaataatacctgtccacaacaaactcttaatgctgtgtttgagctttcatgagtttcccagagagacatagctggaaaattcctattgattttctctaaaatttcaacaagtagctaaagtctggctatgctcacagtctcacatctggttggggtgggctccttacagaacacgctttcacagttaccctaaactctctggggcagggttattcctttgtggaaccagaggcacagagagagtcaactgaggccaaaagaggcctgagagaaactgaggtcaagatttcaggattaatggtcctgtgatgctttgaagtacaattgtggatttgtccaattctctttagttctgtcagcttttgcttcatatattttagcgctctattattagatatatacatgtttagtattatgtcttattggtgcatttactctcttatcattatgtaatgtccttctttatctgtgataattttctgtgttctgaagtctactttgtctaaaaataacatacgcactcaacttccttttctttcttccttcctttctttcttccttcctttctttctctctctctctctttccttccttccttcctccttttctttctctctctctctctctctctttttttgacagactctcgttctgtggccctggctggagttcagtggtgtgatcttggctcactgctacctctaccatgagcaattctcctgcctcagcctcccaagtagctggaactacaggctcatgccactgcgcccagctaatttttgtatttttcgtagagacggggtttcaccacattcgtcaggttggtttcaaactcctgactttgtgatccacccgcctcggcctcccaaagtgctgggattacaggcatgagccatcacacctggtcaactttcttttgattagtgtttttgtggtatatctttttccatcatgttactttaaatatatctatattattgtatttaaaatgtgtttcttacagactgcatgtagttgggtataatttttatccagtctaaaaatatctgtcttttaattggtgtttagacaatttatatttaataaaattgttgaatttaa

SEQ ID NO: 70020 - DNA, 735 bp, Artificial Sequence
  derived and/or modified sequence
atgctgctgctgggcgctgtgctgctgctgctggccctgcccggccatgaccaggagaccaccacccagggccctggggtgctgctgcccctgcccaagggggcctgcaccggctggatggccggcatccctggccaccctggccacaacggggcccctggaagagatggaagagatggcaccccaggagagaagggggagaagggggaccccggcctcatcggccccaagggggacatcggggagactggagtgcctggagctgagggcccccggggcttccctggcatccagggcaggaaaggagagcccggggagggcgcctacgtgtacagaagtgccttctctgtgggcctggagacctacgtgaccatccccaacatgcccatccgcttcaccaagatcttctacaaccagcagaaccactatgatggcagcacaggcaagttccactgcaacatccctggcctgtactactttgcctaccacatcaccgtgtacatgaaggatgtgaaggtgtccctcttcaagaaggacaaggccatgctgttcacctatgaccagtaccaggagaacaacgtggaccaggccagcggctctgtgctgctgcacctggaggtgggggaccaggtgtggctgcaggtgtatggagagggggagagaaatggcctgtatgctgacaatgacaatgacagcaccttcaccggcttcctgctgtaccatgacaccaactag

SEQ ID NO: 70021 - DNA, 735 bp, Artificial Sequence
  derived and/or modified sequence
atgctgctgctgggcgccgtgctgctgctgctggccctgcccggccacgatcaggagaccacaacccagggccctggcgtgctgctccctctcccaaagggcgcatgcaccggttggatggccggcattcccgggcatcctggacataatggcgcaccaggacgggacggtcgcgacggaacacctggggaaaagggggaaaaaggagaccctggactgatcgggccgaagggggacatcggagagactggagttccaggcgccgaggggccacgcggcttcccggggattcagggccggaaaggtgagcctggggaaggcgcatatgtgtatcggtcagctttctctgtgggtctggagacttacgtcaccattcctaacatgcctatccggtttaccaagatattttacaaccagcaaaaccactatgatggaagcactgggaaatttcactgcaacattcccggcctgtactacttcgcctaccatattactgtgtacatgaaagacgtgaaagtcagcctgtttaagaaggacaaggctatgttgttcacttacgatcagtatcaagaaaataatgttgatcaagccagtggaagtgtgctcctccatctcgaggtgggcgatcaggtatggctgcaggtgtatggcgagggtgaaaggaacggtctgtacgcagataatgacaatgatagcacttttactggtttcctgctgtatcacgacaccaattag

SEQ ID NO: 70022 - DNA, 735 bp, Artificial Sequence
  derived and/or modified sequence
atgctgctgctgggcgccgtgctgctgctgctggccctgcccggccatgaccaggagaccactacacagggccccggtgtgctgctgccccttccaaaaggggcgtgtacaggatggatggcgggcattccagggcatcctggccacaacggagcacctggacgagatgggcgcgacgggacacccggggaaaaaggagaaaaaggagaccctggtctgatcggacccaagggtgacattggcgaaaccggcgttccaggcgcggagggcccccggggcttccccggcattcagggacggaagggagagcctggtgaaggagcttatgtatatagatccgcgttcagcgtcgggctggagacatatgtgacaattccaaacatgccaattagattcactaaaatcttttacaatcaacaaaaccactacgatggaagcaccgggaagttccactgcaacataccgggactgtactacttcgcttaccacatcaccgtttatatgaaggacgtgaaagtctccctgttcaaaaaggacaaggccatgctgtttacctacgatcagtaccaagagaacaatgtggaccaggccagcggctctgtgttgctccacctggaagtcggcgaccaggtgtggctccaggtgtatggcgagggggaacgcaacggcctctacgccgataacgacaacgattcaacttttaccggctttttgctgtatcatgacaccaactag

SEQ ID NO: 70023 - DNA, 735 bp, Artificial Sequence
  derived and/or modified sequence
atgctgctgctgggcgccgtgctgctgctgctggccctgcccggccacgatcaggaaactacaacacaggggcccggtgtgctgttgccacttcccaagggagcatgtactgggtggatggctggcattccgggccaccctggccataacggagcacctggccgggatggacgagacgggaccccaggggaaaaaggtgagaaaggggatccaggtctgattggccctaaaggagatatcggtgagaccggggtgcccggcgcagagggaccacgcggctttcccggaattcagggaagaaagggagaacccggcgaaggggcttatgtgtatcggagcgccttctcggttgggttggaaacctatgtcaccatcccaaatatgccgatacggtttactaagatcttttacaaccagcagaaccactatgacggatccacagggaaatttcactgcaacattcccggactttactatttcgcctatcacataactgtctacatgaaggacgttaaagtctcactgtttaaaaaagacaaggctatgcttttcacatatgaccagtaccaggaaaataatgtggatcaggcatccggctcagtgttgttgcacctggaagtcggagaccaggtgtggctgcaggtctacggcgaaggggagaggaacggcctatacgctgacaacgataacgactcgacattcacgggctttcttctgtaccacgacactaactag

SEQ ID NO: 70024 - DNA, 735 bp, Artificial Sequence
  derived and/or modified sequence
atgcttctcctgggagccgtcctactgctcctggccctaccaggccatgatcaggagacgaccacacaggggcctggagtgctgcttcctctgcccaagggtgcgtgcaccggatggatggccggaatccccggtcaccccggacataatggagcccctgggagggacgggagggacgggaccccaggggaaaagggcgaaaagggggacccaggcctgattggccctaaaggtgatattggagagacgggggtgcccggagcggagggaccaagaggattccctggaatacagggcaggaagggcgagcctggggagggcgcttacgtttaccggtccgccttcagtgtagggctggagacctacgtgacaatccccaacatgccaatccggtttacgaaaattttctacaatcaacagaaccactatgatgggtccactgggaaattccattgcaacattcctggtttatattacttcgcatatcatatcacggtgtacatgaaggacgttaaggtgagcctttttaagaaagacaaagccatgctctttacctacgaccagtatcaggagaataatgtagaccaagcctctggatcagtacttctgcatctcgaagtgggcgaccaagtgtggttgcaagtgtatggagaaggcgagaggaacggtttgtatgcagacaatgataatgactcaacgttcactggcttcctcctttaccatgatacgaactag

SEQ ID NO: 70025 - DNA, 735 bp, Artificial Sequence
  derived and/or modified sequence
atgctgctccttggggctgtcctcctcctccttgcattaccagggcacgaccaggagacaacgacccagggccctggggtgctgctcccactgccgaaaggcgcttgtaccggatggatggccggaatccccggacaccctgggcacaacggggctcccggacgggatggtcgagacggtacaccaggtgagaagggcgaaaagggagatcccggactcatcgggccaaaaggggacatcggcgagaccggagtcccaggggctgaaggcccacgcggtttccccggaatccagggcagaaagggggagcctggggaaggtgcatacgtttatcggtcggctttcagcgtgggtttggagacatatgttacaatccctaacatgcccatacgctttaccaagattttctataatcagcaaaaccactacgacggcagcacgggcaaattccactgcaacattccgggtctctactacttcgcctatcacattacagtctatatgaaggatgtgaaggtgagcttattcaaaaaggataaagctatgctgtttacctatgatcagtaccaggagaacaatgtggatcaggccagcggcagtgttctactgcacttggaggtgggcgaccaggtctggctccaggtatacggagagggagaaaggaacggtttgtacgcagacaatgacaatgattctacattcactggattcctactctaccacgatactaactag

SEQ ID NO: 70026 - DNA, 735 bp, Artificial Sequence
  derived and/or modified sequence
atgctcctcctgggcgcagtattactgttgctggccctgccaggccacgaccaggagacgactacccagggccctggcgtgctgctaccactccccaaaggtgcttgtaccggctggatggcaggcatccctggtcacccaggacataacggggctccaggcagagatggaagagacggtaccccaggcgagaagggggagaaaggggacccaggcttgataggtcctaaaggggatatcggcgagaccggggtccccggagcggagggtcctaggggattcccgggtatacagggaaggaagggcgagcctggagaaggggcatatgtatatcgctctgctttcagcgtgggacttgaaacgtacgttaccatccccaacatgccaatcagattcacaaagattttttacaaccagcaaaaccattacgatggctctactgggaaatttcattgtaatattccgggactctactattttgcgtaccatataacagtgtacatgaaggatgtaaaagtgagcctgttcaagaaggacaaggccatgctgtttacctacgaccagtatcaagagaataacgttgaccaggcatcgggctcagtgctactgcatctcgaggtcggggaccaggtgtggctccaagtgtacggagaaggggaacggaatggtctttacgcggacaacgacaatgacagcacatttactgggtttctgctatatcatgacacaaactag

SEQ ID NO: 70027 - DNA, 735 bp, Artificial Sequence
  derived and/or modified sequence
atgctgctgctgggcgccgtgctgctgctgctggccctgcccggccacgaccaggagaccaccacccagggccccggcgtgctgctgcccctgcccaagggcgcctgcaccggctggatggccggcatccccggccaccccggccacaacggcgcccccggcagagacggcagagacggcacccccggcgagaagggcgagaagggcgaccccggcctgatcggccccaagggcgacatcggcgagaccggcgtgcccggcgccgagggccccagaggcttccccggcatccagggcagaaagggcgagcccggcgagggcgcctacgtgtacagaagcgccttcagcgtgggcctggagacctacgtgaccatccccaacatgcccatcagattcaccaagatcttctacaaccagcagaaccactacgacggcagcaccggcaagttccactgcaacatccccggcctgtactacttcgcctaccacatcaccgtgtacatgaaggacgtgaaggtgagcctgttcaagaaggacaaggccatgctgttcacctacgaccagtaccaggagaacaacgtggaccaggccagcggcagcgtgctgctgcacctggaggtgggcgaccaggtgtggctgcaggtgtacggcgagggcgagagaaacggcctgtacgccgacaacgacaacgacagcaccttcaccggcttcctgctgtaccacgacaccaactag

SEQ ID NO: 70028 - protein, 146 aa, Artificial Sequence
  derived and/or modified sequence
MEPTRDCPLFGGAFSAILPMGAIDVSDLRPVPDNQEVFCHPVTDQSLIVELLELQAHVRGEAAARYHFEDVGGVQGARAVHVESVQPLSLENLALRGRCQEAWVLSGKQQIAKENQQVAKDVTLHQALLRLPQYQTDLLLTFNQPP

SEQ ID NO: 70029 - DNA, 441 bp, Artificial Sequence
  derived and/or modified sequence
atggagcccaccagagactgccccctgttcggcggcgccttcagcgccatcctgcccatgggcgccatcgacgtgagcgacctgagacccgtgcccgacaaccaggaggtgttctgccaccccgtgaccgaccagagcctgatcgtggagctgctggagctgcaggcccacgtgagaggcgaggccgccgccagataccacttcgaggacgtgggcggcgtgcagggcgccagagccgtgcacgtggagagcgtgcagcccctgagcctggagaacctggccctgagaggcagatgccaggaggcctgggtgctgagcggcaagcagcagatcgccaaggagaaccagcaggtggccaaggacgtgaccctgcaccaggccctgctgagactgccccagtaccagaccgacctgctgctgaccttcaaccagcccccctag

SEQ ID NO: 70030 - DNA, 441 bp, Artificial Sequence
  derived and/or modified sequence
atggagcctacccgagactgcccccttttcggaggagctttcagcgccatcttacccatgggcgcaatcgacgtcagcgacctgaggcctgtgccagacaaccaagaagtattctgtcacccagtgacagaccagagccttattgtggagctgctggagctgcaggcacatgttcgtggagaggccgccgctaggtaccacttcgaggacgtaggaggagtgcagggggccagagccgtgcacgtggaaagcgtccagcccctgtccctcgagaacctggcactgcggggcagatgtcaggaagcttgggtccttagtggcaagcagcaaatagctaaggaaaaccagcaggtggcaaaagatgtcaccctgcaccaggccttgctgcgcctgcctcaatatcagacagatctgcttctcacattcaatcagccaccatag

SEQ ID NO: 70031 - DNA, 441 bp, Artificial Sequence
  derived and/or modified sequence
atggagcccacccgggactgccccctgtttggaggagccttcagcgccatcctgcccatgggcgccattgatgtgtctgacctgcggcctgtgcctgacaaccaggaggtgttctgccaccctgtgacagaccagagcctcatcgtggagctgctggagctgcaggcccacgtgcggggggaggccgccgcccgctaccactttgaagatgtgggcggcgtgcagggcgcccgggctgtgcacgtggagagcgtgcagcccctgagcctggagaacctggccctgcggggccgctgccaggaggcctgggtgctgagcggcaagcagcagatcgccaaggagaaccagcaggtggccaaggatgtgaccctgcaccaggccctgctgcggctgccccagtaccagacagacctgctgctgaccttcaaccagcccccatag

SEQ ID NO: 70032 - DNA, 441 bp, Artificial Sequence
  derived and/or modified sequence
atggagcccacccgggactgccccctgttcggcggcgccttcagcgcaatcttgcccatgggcgcaattgatgtcagcgatttgcggcctgtacccgataatcaggaggtgttttgccaccccgtaaccgatcaatccctgatcgtcgaattactggaactccaggcccacgtgaggggggaagctgcagcacgatatcatttcgaagatgtcgggggcgtgcagggggcgagggcagtgcacgttgagagcgtacaaccattgtccctcgagaacctagcactccgcggaaggtgtcaggaagcatgggtattatctggcaagcagcaaatagccaaggagaaccagcaagttgcaaaagacgtcacgctccaccaggcactgttgagactgccccaataccagactgacctgcttcttaccttcaaccagcccccatag

SEQ ID NO: 70033 - DNA, 441 bp, Artificial Sequence
  derived and/or modified sequence
atggagcctacacgggactgtccgctgttcgggggtgccttcagtgccatattgccgatgggcgctattgacgttagcgacctgagacccgtcccggataaccaggaagtgttctgtcaccctgtgactgatcaaagcctgatcgttgagctcttggaattgcaggctcacgtcaggggagaggcggcagctcgatatcattttgaagacgtcggcggagtgcagggtgcaagggccgtccacgtggaaagtgtacagcctctgagcctggaaaatctcgccctgagaggtcgatgtcaggaggcgtgggttctgtccgggaaacaacagattgctaaggagaaccagcaagtggccaaggatgtgactctgcatcaagcccttctgagattaccgcaataccaaactgacctgttactgaccttcaatcagcctccctag

SEQ ID NO: 70034 - protein, 165 aa, Artificial Sequence
  derived and/or modified sequence
MEPTRDCPLFGGAFSAILPMGAIDVSDLRPVPDNQEVFCHPVTDQSLIVELLELQAHVRGEAAARYHFEDVGGVQGARAVHVESVQPLSLENLALRGRCQEAWVLSGKQQIAKENQQVRARECVMSWKGGSGDAEIQVSILTLIPLGSKGRDTSSGLAEAAPVPD

SEQ ID NO: 70035 - DNA, 498 bp, Artificial Sequence
  derived and/or modified sequence
atggagcccaccagagactgccccctgttcggcggcgccttcagcgccatcctgcccatgggcgccatcgacgtgagcgacctgagacccgtgcccgacaaccaggaggtgttctgccaccccgtgaccgaccagagcctgatcgtggagctgctggagctgcaggcccacgtgagaggcgaggccgccgccagataccacttcgaggacgtgggcggcgtgcagggcgccagagccgtgcacgtggagagcgtgcagcccctgagcctggagaacctggccctgagaggcagatgccaggaggcctgggtgctgagcggcaagcagcagatcgccaaggagaaccagcaggtgagagccagagagtgcgtgatgagctggaagggcggcagcggcgacgccgagatccaggtgagcatcctgaccctgatccccctgggcagcaagggcagagacaccagcagcggcctggccgaggccgcccccgtgcccgactag

SEQ ID NO: 70036 - DNA, 498 bp, Artificial Sequence
  derived and/or modified sequence
atggagcctacaagagattgtcctctgttcggtggggcattctcagcaattctgcctatgggggcaatcgatgttagcgaccttcgacccgtcccagataatcaggaagtcttttgtcacccagtgacagaccagagtctcatcgttgaactgctagaacttcaggctcacgtgcgcggagaagccgcagccaggtatcacttcgaggatgtgggaggagtccagggggcacgagctgtacatgtggagagcgtgcaacctctgagtctggaaaacctcgctctgcgagggcgctgccaagaagcttgggttttgtcagggaagcagcagatcgccaaggagaatcagcaggtgcgagcgcgagagtgtgttatgtcctggaagggcggctcaggcgatgctgaaattcaagtgagcatcctcactttaattcctctaggctctaaaggcagggatactagttctggattagccgaagcagctcccgtgccagactag

SEQ ID NO: 70037 - DNA, 498 bp, Artificial Sequence
  derived and/or modified sequence
atggagcccacccgggactgccccctgtttggaggagccttcagcgccatcctgcccatgggcgccattgatgtgtctgacctgcggcctgtgcctgacaaccaggaggtgttctgccaccctgtgacagaccagagcctcatcgtggagctgctggagctgcaggcccacgtgcggggggaggccgccgcccgctaccactttgaagatgtgggcggcgtgcagggcgcccgggctgtgcacgtggagagcgtgcagcccctgagcctggagaacctggccctgcggggccgctgccaggaggcctgggtgctgagcggcaagcagcagatcgccaaggagaaccagcaggtgcgggcccgggagtgtgtgatgtcctggaagggcggcagcggagatgctgagatccaggtgtccatcctgaccctcatccccctgggcagcaagggccgggacaccagcagcggcctggccgaggccgcccctgtgcctgactag

SEQ ID NO: 70038 - DNA, 498 bp, Artificial Sequence
  derived and/or modified sequence
atggagcccacccgggactgccccctgttcggcggcgccttcagcgcgattctgccgatgggtgcaatcgacgtgtcagacctgcgtcctgtcccggataaccaggaagttttttgtcaccccgtgacagaccagtcacttatcgtggagctcctcgaactgcaggcgcacgtgcgaggcgaagctgctgcccgatatcactttgaagatgtggggggtgtacaaggcgccagggctgtccatgtggagtccgttcagccactgagcttagaaaacctagctcttagaggcaggtgccaagaagcttgggtgctctctggtaagcagcagattgccaaggaaaaccaacaagtgcgcgcaagagagtgtgttatgtcttggaaaggtgggagtggagacgctgagatccaggttagcatcctcactctaatacccctgggcagcaagggacgcgatacctcatccggactggcagaggccgcacccgttcctgattag

SEQ ID NO: 70039 - DNA, 498 bp, Artificial Sequence
  derived and/or modified sequence
atggagccgactcgcgactgccccctctttgggggtgcattcagcgctatcctcccgatgggagctattgacgtgtcagacctgcggccagtgcctgacaaccaagaggtattctgccaccccgtcaccgaccagagcttgatcgtggagctcctggagctacaggctcatgtccgtggcgaggctgcagcgaggtatcactttgaggacgtggggggtgtgcagggagccagggccgtccatgtagagtccgtccagccactatcgctcgaaaatctggctttgcgtgggaggtgccaggaggcttgggtgttaagcggtaagcaacagatcgcaaaggagaatcaacaggtcagagccagggagtgcgtgatgagttggaagggtggcagcggcgacgcggaaattcaggtttctatcttgaccttgatccctcttggttccaaggggagggatacctctagcggtttggccgaggctgcacccgtgccagattag

SEQ ID NO: 70040 - DNA, 1166 bp, Artificial Sequence
  derived and/or modified sequence
gccaaatcttaaaggatccgggagctaagccagacccgggtggcggtggcagctgcgaaacccagggagccgatgccacgtgacccaatgtggacttcttttaaacctttctaatgcccataacccagcctcagacccatggagcccacgagagactgcccgctgttcgggggcgccttttccgccatcctccccatgggggccattgacgtaagcgacctccgaccggtcccggacaatcaagaagttttctgccatcccgtgacggaccagagcctgatagtggaacttctcgagctgcaggcccacgtacggggcgaagcggctgcgcggtaccactttgaggatgttggtggcgtgcagggggctagggctgtccatgtggagtctgttcagcctctcagtttggagaacctggccctgaggggccgctgtcaagaagcctgggtcctctctggcaagcagcagatagctaaggaaaaccagcaggtgagggcccgagagtgtgtaatgtcctggaagggcggtagcggggacgcagagatccaggtaagcatcctgactctgatccccttaggtagcaaaggacgtgacacttcatcaggccttgctgaggctgccccagtaccagactgatctcttgcttaccttcaatcagcccccgtaaggaggaaggaacgggcgggtatctcatgactgggttcccaggagaatcgggctgggagggacagaacagggagactcactggtgggatcctccaaggaagcaggagtgggccagaggtttggggtaactgatacccaggtcctctggggaacaggaattggcaatttccaaacctcaggcctggatgatgttctgtctccatctgttcccccaccccaagccctgacaacaggtcatctcttggccccgaaaatctgtcacctgcaccctggagcctgggtgactttgaacagctggtgaccagtctgacccttcacgatcctaacatctttggtccccagtaaaggcgctgaagcactgcatgatgttgctgagaacttggggactcggttctgtgagggggaaaagaggttgaaaagagggtttcctcttatttcttccctgtgcgtaaacataagacaatccctcttcagaataaacttgctttataatcaatata

SEQ ID NO: 70041 - protein, 610 aa, Artificial Sequence
  derived and/or modified sequence
MLDFFTIFSKGGLVLWCFQGVSDSCTGPVNALIRSVLLQVGFQKILTLTYVDKLIDDVHRLFRDKYRTEIQQQSALSLLNGTFDFQNDFLRLLREAEESSKIRAPTTMKKFEDSEKAKKPVRSMIETRGEKPKEKAKNSKKKGAKKEGSDGPLATSKPVPAEKSGLPVGPENGVELSKEELIRRKREEFIQKHGRGMEKSNKSTKSDAPKEKGKKAPRVWELGGCANKEVLDYSTPTTNGTPEAALSEDINLIRGTGSGGQLQDLDCSSSDDEGAAQNSTKPSATKGTLGGMFGMLKGLVGSKSLSREDMESVLDKMRDHLIAKNVAADIAVQLCESVANKLEGKVMGTFSTVTSTVKQALQESLVQILQPQRRVDMLRDIMDAQRRQRPYVVTFCGVNGVGKSTNLAKISFWLLENGFSVLIAACDTFRAGAVEQLRTHTRRLSALHPPEKHGGRTMVQLFEKGYGKDAAGIAMEAIAFARNQGFDVVLVDTAGRMQDNAPLMTALAKLITVNTPDLVLFVGEALVGNEAVDQLVKFNRALADHSMAQTPRLIDGIVLTKFDTIDDKVGAAISMTYITSKPIVFVGTGQTYCDLRSLNAKAVVAALMKA

SEQ ID NO: 70042 - DNA, 1833 bp, Artificial Sequence
  derived and/or modified sequence
atgctggacttcttcaccatcttcagcaagggcggcctggtgctgtggtgcttccagggcgtgagcgacagctgcaccggccccgtgaacgccctgatcagaagcgtgctgctgcaggtgggcttccagaagatcctgaccctgacctacgtggacaagctgatcgacgacgtgcacagactgttcagagacaagtacagaaccgagatccagcagcagagcgccctgagcctgctgaacggcaccttcgacttccagaacgacttcctgagactgctgagagaggccgaggagagcagcaagatcagagcccccaccaccatgaagaagttcgaggacagcgagaaggccaagaagcccgtgagaagcatgatcgagaccagaggcgagaagcccaaggagaaggccaagaacagcaagaagaagggcgccaagaaggagggcagcgacggccccctggccaccagcaagcccgtgcccgccgagaagagcggcctgcccgtgggccccgagaacggcgtggagctgagcaaggaggagctgatcagaagaaagagagaggagttcatccagaagcacggcagaggcatggagaagagcaacaagagcaccaagagcgacgcccccaaggagaagggcaagaaggcccccagagtgtgggagctgggcggctgcgccaacaaggaggtgctggactacagcacccccaccaccaacggcacccccgaggccgccctgagcgaggacatcaacctgatcagaggcaccggcagcggcggccagctgcaggacctggactgcagcagcagcgacgacgagggcgccgcccagaacagcaccaagcccagcgccaccaagggcaccctgggcggcatgttcggcatgctgaagggcctggtgggcagcaagagcctgagcagagaggacatggagagcgtgctggacaagatgagagaccacctgatcgccaagaacgtggccgccgacatcgccgtgcagctgtgcgagagcgtggccaacaagctggagggcaaggtgatgggcaccttcagcaccgtgaccagcaccgtgaagcaggccctgcaggagagcctggtgcagatcctgcagccccagagaagagtggacatgctgagagacatcatggacgcccagagaagacagagaccctacgtggtgaccttctgcggcgtgaacggcgtgggcaagagcaccaacctggccaagatcagcttctggctgctggagaacggcttcagcgtgctgatcgccgcctgcgacaccttcagagccggcgccgtggagcagctgagaacccacaccagaagactgagcgccctgcacccccccgagaagcacggcggcagaaccatggtgcagctgttcgagaagggctacggcaaggacgccgccggcatcgccatggaggccatcgccttcgccagaaaccagggcttcgacgtggtgctggtggacaccgccggcagaatgcaggacaacgcccccctgatgaccgccctggccaagctgatcaccgtgaacacccccgacctggtgctgttcgtgggcgaggccctggtgggcaacgaggccgtggaccagctggtgaagttcaacagagccctggccgaccacagcatggcccagacccccagactgatcgacggcatcgtgctgaccaagttcgacaccatcgacgacaaggtgggcgccgccatcagcatgacctacatcaccagcaagcccatcgtgttcgtgggcaccggccagacctactgcgacctgagaagcctgaacgccaaggccgtggtggccgccctgatgaaggcctag

SEQ ID NO: 70043 - DNA, 1833 bp, Artificial Sequence
  derived and/or modified sequence
atgcttgacttctttacaattttcagcaagggcgggctggtcctgtggtgttttcagggggtctctgattcttgtacaggccctgtgaacgccctgatcaggtcagtgttactgcaagtcggctttcagaaaattctgacgttgacttatgtagacaaactgatcgatgacgttcacaggctctttcgcgacaaataccggactgagatccagcagcagagcgctttgtctttactcaatggtacctttgattttcagaacgactttctccggctgcttcgcgaagcagaagagagctctaagatccgggcacccactaccatgaaaaagtttgaagacagcgagaaggcgaagaaacctgtgcggtccatgattgagacccgaggagagaagcctaaggagaaggctaaaaactccaaaaagaaaggcgcaaagaaggaaggttccgacgggcccctggccacttcaaaacccgtaccagccgaaaagagtggcctgccagtcggcccggagaacggcgtcgagctaagcaaagaagagctaatccgcaggaaacgagaggaatttatccagaagcatggcagaggaatggaaaaatccaataaatctaccaagtccgatgccccaaaggagaaaggtaaaaaagctccacgggtttgggagctgggggggtgtgccaataaggaagtgctggactatagcacacccaccaccaacggaactcccgaggcagcattgagtgaggatatcaacctcatccggggcactgggagtgggggacagctacaggacctagattgctcatcatcagacgatgagggtgcagctcaaaatagtactaaaccttccgccaccaaggggaccctcggtggcatgtttggtatgttaaaagggcttgtgggctcgaaaagcctctctcgcgaagacatggagtctgtgctggacaaaatgcgcgatcacttaatagctaagaacgtcgcggctgatatcgcagttcaactgtgtgagtccgtggccaacaagctcgagggtaaggttatgggcaccttttccactgttacttctactgtgaaacaggctctgcaggagtcactcgtccaaatcctgcaaccccagcggcgggtcgacatgctgagggatatcatggacgcccagcgcaggcaaaggccatacgttgtgacattctgtggggtcaatggcgtggggaagagcacaaacttggcgaagatttctttctggctgttagagaacggcttctccgtactgatcgcagcatgtgatacatttcgggctggggcggtcgagcagctgagaacccatacacggagactttctgcgcttcatccacccgagaaacatggggggcgaaccatggtgcagcttttcgagaaggggtacggcaaggacgctgcaggtatcgccatggaggccatagccttcgctcgcaaccaggggtttgacgttgttctggtagataccgctggccgcatgcaagacaatgctcctttgatgacggctctcgccaagctgatcaccgtgaacacccccgatcttgttctgttcgtgggggaagctcttgtcggtaacgaagccgttgaccagctcgtgaaattcaatcgggccttggcagatcactccatggctcagaccccccggctgatcgacggcattgtactgacaaaatttgacacgatcgacgataaggtgggtgccgcaatcagcatgacctacatcaccagcaagccaatcgtattcgttgggaccggtcagacctactgtgaccttaggagtctgaatgccaaagccgtggttgccgcactgatgaaagcatag

SEQ ID NO: 70044 - DNA, 1833 bp, Artificial Sequence
  derived and/or modified sequence
atgctggacttcttcaccatcttcagcaagggcggcctggtgctgtggtgcttccagggcgtgtctgacagctgcaccggccctgtgaatgccctgatccgctctgtgctgctgcaggtgggcttccagaagatcctgaccctgacctacgtggacaagctgattgatgatgtgcacaggctcttccgggacaagtacagaacagagatccagcagcagagcgccctgagcctgctgaatggcacctttgacttccagaatgacttcctgcggctgctgcgggaggccgaggagagcagcaagatccgggcccccaccaccatgaagaagtttgaggacagcgagaaggccaagaagcctgtgcgctccatgattgagaccagaggagagaagcccaaggagaaggccaagaacagcaagaagaagggggccaagaaggagggcagtgatggccccctggccaccagcaagcctgtgcctgctgagaagagcggcctgcctgtgggcccagaaaatggagtggagctgagcaaggaggagctgatccggaggaagcgggaggagttcatccagaagcacggccggggcatggagaagagcaacaagagcaccaagagtgatgcccccaaggagaagggcaagaaggccccccgggtgtgggagctgggcggctgtgccaacaaggaggtgctggactacagcacccccaccaccaacggcaccccagaggccgccctgtctgaggacatcaacctgatccggggcaccggcagcggcggccagctgcaggacctggactgcagcagcagtgatgatgagggcgccgcccagaacagcaccaagcccagcgccaccaagggcaccctgggcggcatgtttggcatgctgaagggcctggtgggcagcaagagcctgagccgggaggacatggagagcgtgctggacaagatgagggaccacctgattgccaagaatgtggccgctgacattgctgtgcagctgtgtgagagcgtggccaacaagctggagggcaaggtgatgggcaccttcagcacagtgaccagcacagtgaagcaggccctgcaggagagcctggtgcagatcctgcagccccagaggagagtggacatgctgcgggacatcatggatgcccagaggcggcagaggccctacgtggtgaccttctgtggggtgaatggagtgggcaagagcaccaacctggccaagatctccttctggctgctggagaatggcttctctgtgctgattgctgcctgtgacaccttccgggccggggctgtggagcagctgcggacccacacccggcggctgagcgccctgcaccccccagagaagcatggaggccgcaccatggtgcagctgtttgagaagggctacggcaaggatgctgctggcatcgccatggaggccatcgcctttgccaggaaccagggctttgatgtggtgctggtggacacagctggccgcatgcaggacaatgcccccctgatgacagccctggccaagctgatcaccgtgaacaccccagacctggtgctgtttgtgggggaggccctggtgggcaatgaagctgtggaccagctggtgaagttcaacagagccctggccgaccacagcatggcccagaccccccggctgattgatggcatcgtgctgaccaagtttgacaccattgatgacaaggtgggcgccgccatctccatgacctacatcaccagcaagcccatcgtgtttgtgggcaccggccagacctactgtgacctgcggagcctgaatgccaaggctgtggtggccgccctgatgaaggcctag

SEQ ID NO: 70045 - DNA, 1833 bp, Artificial Sequence
  derived and/or modified sequence
atgctggacttcttcaccatcttcagcaagggcggcctggtgctgtggtgcttccagggtgtgagcgacagctgtacaggccctgtgaatgccctgatccgaagtgtgttactccaggttgggtttcagaaaatactaactctcacctatgttgacaaactcattgatgacgtacataggctgtttcgtgataagtaccgcaccgagatccaacaacaaagtgcattaagccttctcaacggcaccttcgatttccagaatgacttcttacggctgctccgcgaggccgaggagtcaagtaaaattcgggcacccactactatgaaaaagttcgaggactccgagaaggcgaaaaaacccgtgcggtcgatgattgagacccgcggtgagaaacccaaagagaaagctaagaattctaagaagaagggcgctaaaaaagaaggcagtgatggaccgcttgccacaagcaagccagtacccgctgagaaatctggcctgcccgtcggcccggaaaacggagtggaattaagcaaagaggaattgatccggaggaagagagaggaattcatacagaaacacgggagggggatggaaaagtctaataagtcaaccaagtcggatgcgccgaaggagaaaggaaaaaaggccccccgagtatgggagctgggcggctgcgctaataaagaggtgctagattacagcacacctacgacgaatggtacacccgaagctgccctctctgaagatatcaatctgatcagaggcacaggatcaggagggcagctgcaggatctggactgttcatcatctgatgatgagggggcagcgcagaattcaaccaagcccagcgcaacaaaagggactcttggcgggatgtttggaatgctcaaaggtctggtgggcagcaagagcctgagccgcgaagatatggagtccgtgctggacaagatgagggaccatctgatcgctaagaacgttgccgccgatatcgccgtgcaactttgcgagtctgtggccaacaagttggagggaaaggtcatgggtactttctctacggttacatctacagtgaaacaggccctgcaagaatccctggtccagattctgcagccccaacgacgggttgatatgctgagagatattatggacgctcagaggagacaacggccctacgttgtaactttttgtggagtcaacggggttggaaagagcaccaatctggcaaaaatttctttttggttgcttgagaatggcttttccgtgctcattgcagcctgcgacactttcagagccggggctgttgagcagttacgtacacatactaggaggctgtccgccttgcaccctcctgagaagcacgggggcaggaccatggtccagcttttcgagaaaggatacggaaaagacgcagcaggcatcgctatggaagccatcgcgtttgcgcgaaaccagggattcgacgtcgttctagtcgacaccgccggccgcatgcaggacaatgccccactgatgacagcccttgctaaactgatcacagttaacacgcccgatttggtattgtttgtgggcgaggcactagtgggcaacgaggccgtggatcagcttgttaagttcaaccgagcattggcagaccactcaatggcccagacacccaggctcatcgacggaatcgtcctgacgaagttcgacacaatcgacgataaggttggcgccgcaatttccatgacttatatcaccagcaagcccatcgtgttcgttggaaccggacagacttattgcgacctgagaagcctgaacgcgaaggccgtcgtggctgccctcatgaaggcctag

SEQ ID NO: 70046 - DNA, 1833 bp, Artificial Sequence
  derived and/or modified sequence
atgcttgacttcttcactatattcagtaagggcggactggtgctctggtgcttccagggtgtctctgatagctgtaccggccctgtaaacgccctcataaggagcgtgttgttgcaggttggtttccaaaaaattctgaccttgacatatgttgataagctaatcgacgacgttcatcggctgtttcgggataaatatcgaacggaaatacagcagcagtccgcactaagcctcctgaatggtaccttcgactttcagaacgacttcctgagactgctgagggaagcggaagaatcctctaagatcagggcaccaactactatgaaaaagtttgaggatagtgagaaggcaaaaaagccggtgcgctctatgattgaaacaaggggggagaaacctaaagaaaaagcaaagaacagcaaaaagaagggagctaagaaagaagggagcgatgggcctcttgccacttcgaagcctgtgcctgccgagaagtccgggttgcctgtaggcccagaaaatggggtggaactgtctaaggaggaactgattaggagaaagagagaggaattcattcagaagcacgggcgaggcatggagaaatccaacaagagcaccaaatccgacgcacccaaagagaaaggcaagaaagccccaagggtgtgggagctgggtggttgtgccaacaaggaagtgctggactactcaaccccaaccaccaacgggactccggaggctgctctgtccgaggacattaacctgattagggggacgggctctggagggcagctgcaagatcttgactgttcctcttcggacgacgaaggggcagcacagaattccactaagccatcggctacaaagggcactctggggggtatgttcggaatgctgaaaggcctcgttggaagcaagagcctgagccgggaggacatggaatcggtgctcgacaaaatgcgggatcatctaattgctaagaatgtcgcggctgacattgcagtgcagctgtgcgagtccgtggccaataagctggagggcaaggttatgggcacttttagcacagtgacttccaccgtcaaacaagccctgcaggagagtctggtgcaaatactgcaacctcaacggagggttgacatgctccgagacattatggacgcccagcggagacagagaccttacgttgttacattttgcggcgtgaacggcgtgggaaaaagtactaatctggctaaaatctctttctggctgctggagaatggattctccgtgctgatcgctgcgtgtgatacattcagggccggagccgtagaacagctgaggacccacaccagaagactcagcgccttacatccgccagagaaacatggcggaagaactatggtccagttattcgagaagggatatggaaaagacgcagctggcatcgccatggaagctattgcctttgcgaggaaccaggggttcgacgtggtactggtggacactgcagggaggatgcaggataacgcgcctttgatgacggctctggccaaacttatcaccgttaacaccccagatctggtcttattcgtcggagaggctctggtcggaaatgaagccgtggaccagctcgtgaaattcaacagagccctagccgatcacagtatggcacagacaccaagattgatagatggaattgttctgactaagtttgacacgatcgatgataaagtaggtgccgctatcagtatgacatatatcacatcaaaacccatcgtctttgtggggaccggacagacatactgtgacttacggtctttgaatgcaaaggccgttgtagcagctttgatgaaggcctag

SEQ ID NO: 70047 - DNA, 2453 bp, Artificial Sequence
  derived and/or modified sequence
agtcctgcgcgcccccgggcggagatggggagggcacccggcgttctgagcggaagtacggttgagccgatttccggggccactggtgtgacgtgtcccgcgcttggcgcagcaggaagcggcggcgaacgcggcctgaattcccggcgccggccccagctcctctgccgctgccgccatgctcgacttcttcaccattttctccaagggcgggcttgtgctctggtgcttccagggcgttagcgactcatgcaccggacccgttaacgcgttgattcgttccgtgctgctgcaggttggttttcagaagatcctgacactgacatatgtagacaaattgatagatgacgtgcatcggctgtttcgggacaagtaccgcacagagatccaacagcaaagtgctttaagtttattaaatggcacttttgatttccaaaatgacttcctgcggctccttcgtgaagcagaggagagcagtaagatccgtgctcccactaccatgaagaaatttgaagattctgaaaaggccaagaaacctgtgaggtccatgattgagacacggggggaaaagcccaaggaaaaagcaaagaatagcaaaaaaaagggggccaagaaggaaggttctgatggtcctttggctaccagcaaaccagtccctgcagaaaagtcaggtcttccagtgggtcctgagaacggagtagaactttccaaagaggagctgatccgcaggaagcgcgaggagttcattcagaagcatgggaggggtatggagaagtccaacaagtccacgaagtcagatgctccaaaggagaagggcaaaaaagcaccccgggtgtgggaactgggtggctgtgctaacaaagaagtgttggattacagtactcccaccaccaatggaacccctgaggctgccttgtctgaggacatcaacctgattcgagggactgggtctggggggcagcttcaggatctggactgcagcagctctgatgacgaaggggctgctcaaaactctaccaaacctagtgcgaccaagggaacactgggtggcatgtttggtatgctgaagggccttgtgggttcaaagagcttgagtcgtgaagacatggaatctgtgctggacaagatgcgtgatcatctcattgctaagaacgtggctgcagacattgccgtccagctctgtgaatctgttgccaacaagttggaagggaaggtgatggggacgttcagcacggtgacttccacagtaaagcaagccctacaggagtccctggtgcagattctgcagccacagcgtcgtgtagacatgctccgggacatcatggatgcccagcgtcgccagcgcccttatgtcgtcaccttctgcggcgttaatggagtggggaaatctactaatcttgccaagatttccttctggttgttagagaatggcttcagtgtcctcattgctgcctgtgatacatttcgtgctggggccgtggagcagctgcgtacacacacccggcgtttgagtgccctacaccctccagagaagcatggtggccgcaccatggtgcagttgtttgaaaagggctatggcaaggatgctgctggcattgccatggaagccattgcttttgcacgtaaccaaggctttgacgtggtgctggtggacacggcaggccgcatgcaagacaatgcccctctgatgactgccctggccaaactcattactgtcaatacacctgatttggtgctgtttgtaggagaagccttagtaggcaatgaagccgtggaccagctggtcaagttcaacagagccttggctgaccattctatggctcagacacctcggctcattgatggcattgttcttaccaaatttgataccattgatgacaaggtgggagctgctatttctatgacgtacatcacaagcaaacccatcgtctttgtgggcaccggccagacctactgtgacctacgcagcctcaatgccaaggctgtggtggctgccctcatgaaggcttaacgtggctcttgcccaataccaaatcgccgctttccccacaagcccttcttcctgtatcaagaatgtgctttagagtatgtgagcaacctgtcttcagtgtagtacaaaggcagagtgagggggcttgtggctccttccaaccccactccccgttcagcacagccgccatctgcaaggaaggcctaatcatgttacaatcactgcccactgaccctctcccagcgggcctcccccttcctactcaggcacccccttcactctgcctacagactcagtcttattacagctttgaccaatggttggaacccaacaccagagctttgctaataattagtgtggtcaagagccgtctgagcctaatgagtcccagctgcattaggttaagagactcttccagagccagcgccaggtcttgaatggcacctctccctaggatacacag

SEQ ID NO: 70048 - protein, 706 aa, Artificial Sequence
  derived and/or modified sequence
MGKGSISFLFFSQIGSLENHYLFKHKNHPRRSRRSAFHITKRLSDDDRVIWAEQQYEKERSKRSALRDSALNLFNDPMWNQQWYLQDTRMTAALPKLDLHVIPVWQKGITGKGVVITVLDDGLEWNHTDIYANYDPEASYDFNDNDHDPFPRYDPTNENKHGTRCAGEIAMQANNHKCGVGVAYNSKVGGIRMLDGIVTDAIEASSIGFNPGHVDIYSASWGPNDDGKTVEGPGRLAQKAFEYGVKQGRQGKGSIFVWASGNGGRQGDNCDCDGYTDSIYTISISSASQQGLSPWYAEKCSSTLATSYSSGDYTDQRITSADLHNDCTETHTGTSASAPLAAGIFALALEANPNLTWRDMQHLVVWTSEYDPLANNPGWKKNGAGLMVNSRFGFGLLNAKALVDLADPRTWRSVPEKKECVVKDNDFEPRALKANGEVIIEIPTRACEGQENAIKSLEHVQFEATIEYSRRGDLHVTLTSAAGTSTVLLAERERDTSPNGFKNWDFMSVHTWGENPIGTWTLRITDMSGRIQNEGRIVNWKLILHGTSSQPEHMKQPRVYTSYNTVQNDRRGVEKMVDPGEEQPTQENPKENTLVSKSPSSSSVGGRRDELEEGAPSQAMLRLLQSAFSKNSPPKQSPKKSPSAKLNIPYENFYEALEKLNKPSQLKDSEDSLYNDYVDVFYNTKPYKHRDDRLLQALVDILNEEN

SEQ ID NO: 70049 - DNA, 2121 bp, Artificial Sequence
  derived and/or modified sequence
atgggcaaaggttctatcagctttctctttttcagtcaaataggatccctcgagaaccactatctttttaaacataaaaaccatccccggagaagtcgacgtagtgcttttcacataactaaaagactgagtgatgacgatcgcgtcatctgggctgagcaacaatatgagaaagagcgtagtaaaaggtctgccctgcgtgatagcgcacttaacctttttaatgacccaatgtggaaccagcagtggtacctgcaagacacacgtatgactgctgctcttccaaagctcgacttacatgtgattcccgtgtggcagaagggaattactggcaaaggagtggtgatcaccgtcttggacgacgggctcgagtggaaccacaccgacatctacgcaaactacgaccccgaggcttcttatgattttaatgataacgatcatgaccctttccctaggtatgaccctactaacgaaaacaaacacggcacccggtgtgccggcgagatcgccatgcaggccaacaaccataagtgcggagtgggcgtcgcatataattctaaagttggaggcattcggatgctggacggcatagtcactgatgccatagaggcatcttccatcggattcaaccctggtcacgtcgacatttattccgccagttgggggcccaacgacgacggcaagacagttgaaggtcccggacggctggctcagaaggcatttgagtacggggtgaagcaggggagacaggggaaggggagcatttttgtctgggctagtggtaacggcggacgccagggcgacaattgcgattgcgacggctacacagattctatttataccatctccattagttccgcaagccaacagggtctgagcccatggtatgctgagaaatgctcttcaacgttagccacatcctactcttctggcgactatacggaccaacgcatcaccagcgcagatttacacaatgattgcacagaaacccatactggtacatccgcttccgcgccgttggcagcaggaatttttgcacttgcactggaggcaaaccctaacctgacgtggcgagacatgcagcatctggtcgtttggacctcggaatacgatcccttggccaacaaccctggctggaagaaaaacggggctggcctgatggtgaactccagattcggtttcgggctcctcaacgccaaggctcttgtcgatctcgcggacccccgaacgtggcgctcagtgcctgaaaaaaaggaatgcgtagttaaggataacgactttgagccccgcgctctgaaagctaacggagaagtcatcatcgagatcccaacgcgcgcctgtgaaggacaagaaaatgccattaagtctctcgaacatgtccagttcgaggcaaccatcgagtacagtagacgcggggatctccacgtcacactcacttctgcggctggcacttcaactgtcctgttggcggagcgggagcgtgataccagtccgaacggattcaaaaattgggactttatgagcgtacatacatggggcgagaacccgatcggcacatggacgttaagaattaccgacatgtcggggagaatccagaatgaaggcaggatagtaaactggaagctcatcctccatgggacttcgagccagcctgagcatatgaaacagcctcgagtgtacacttcttataatacagtccaaaatgatagaagaggagttgaaaaaatggtcgaccctggagaagagcagcctacccaggagaatccgaaggaaaacactctcgtgagcaagagtccatctagcagtagtgttggaggccgacgagacgaactggaagaaggggccccatcccaggctatgctccgactcctgcagtccgctttctcgaagaacagtccacctaagcagtctcccaagaaatcccccagcgccaagttgaacattccctatgagaatttttatgaggcactggagaaactgaacaagccatcgcagctgaaggacagcgaagactctctctataatgactatgtggatgttttctacaatacgaagccctataagcatagagacgacaggctgctgcaggcgctggtggacattttgaatgaggagaactag

SEQ ID NO: 70050 - DNA, 2121 bp, Artificial Sequence
  derived and/or modified sequence
atgggcaagggcagcatctccttcctgttcttcagccagatcggcagcctggagaaccactacctgttcaagcacaagaaccacccccggcgcagcagaagaagtgccttccacatcaccaagaggctgagtgatgatgacagagtcatctgggccgagcagcagtatgagaaggagaggagcaagaggtctgccctgcgggacagcgccctgaacctcttcaatgaccccatgtggaaccagcagtggtacctgcaggacaccaggatgacagctgccctgcccaagctggacctgcacgtgattcctgtgtggcagaagggcatcaccgggaagggcgtggtgatcaccgtgctggatgatggcctggagtggaaccacacagacatctatgccaactatgaccctgaggccagctatgacttcaatgacaatgaccatgaccccttccccaggtatgaccccaccaatgaaaacaagcacggcacccgctgtgccggggagatcgccatgcaggccaacaaccacaagtgtggggtgggcgtggcctacaacagcaaggtgggcggcatccgcatgctggatggcatcgtgacagatgccatcgaggccagcagcatcggcttcaaccctggccacgtggacatctacagcgcctcctggggccccaatgatgatggcaagacagtggagggccctggccgcctggcccagaaggcctttgaatatggagtgaagcagggccggcagggcaagggcagcatctttgtgtgggccagcggaaatggaggccggcagggcgacaactgtgactgtgatggctacacagacagcatctacaccatcagcatcagcagcgccagccagcagggcctgagcccctggtatgcagagaagtgcagcagcaccctggccaccagctacagcagcggggactacacagaccagaggatcaccagcgctgacctgcacaatgactgcacagagacccacacaggcaccagcgccagcgcccccctggccgccggcatctttgccctggccctggaggccaaccccaacctgacctggagggacatgcagcacctggtggtgtggaccagtgaatatgaccccctggccaacaaccctggctggaagaagaatggagctggcctgatggtgaacagccgcttcggcttcggcctgctgaatgccaaggccctggtggacctggccgaccccaggacctggaggtctgtgcctgagaagaaggaatgtgtggtgaaggacaatgactttgagccccgggccctgaaggccaatggagaggtgatcatcgagatccccacccgggcctgtgagggccaggagaatgccatcaagagcctggagcacgtgcagtttgaggccaccatcgagtacagccggcggggggacctgcacgtgaccctgaccagcgctgctggcaccagcacagtgctgctggccgagcgggagcgggacaccagccccaacggcttcaagaactgggacttcatgtctgtgcacacctggggcgagaaccccatcggcacctggaccctgcgcatcacagacatgagcggccgcatccagaatgaaggaagaattgtgaactggaagctgatcctgcacggcaccagcagccagcctgagcacatgaagcagccccgggtgtacaccagctacaacacagtgcagaatgaccggcggggcgtggagaagatggtggaccctggagaggagcagcccacccaggagaaccccaaggagaacaccctggtgtccaagagccccagcagcagctctgtgggcggcagaagagatgagctggaggagggcgcccccagccaggccatgctgcggctgctgcagagcgccttcagcaagaacagcccccccaagcagagccccaagaagagccccagcgccaagctgaacatcccctatgagaacttctatgaggccctggagaagctgaacaagcccagccagctgaaggacagcgaggacagcctgtacaatgactatgtggatgtgttctacaacaccaagccctacaagcacagagatgaccggctgctgcaggccctggtggacatcctgaatgaagaaaattag

SEQ ID NO: 70051 - DNA, 2121 bp, Artificial Sequence
  derived and/or modified sequence
atgggcaagggcagcatcagcttcctgttcttcagccagatcggctccttggaaaaccactacctttttaagcataagaatcacccccggcgatccagacgcagcgccttccatattacaaagcggttgtccgacgatgaccgcgtgatttgggcagaacagcagtatgagaaggaacgaagcaaacggtccgccctgcgcgattccgccctaaacttgttcaatgatcctatgtggaatcaacagtggtacctgcaggatacgagaatgactgccgcccttcccaaattagacctgcacgtcatacccgtgtggcaaaagggcataacaggaaagggagttgtgattaccgtcctggatgacggactcgagtggaaccatacagatatctacgcaaactatgatccggaagcttcttacgacttcaacgataatgaccatgacccatttccccggtacgatcctacaaatgaaaataagcacgggacccggtgcgctggcgagattgcaatgcaggctaataatcacaaatgtggggtaggggtcgcatacaatagtaaggtggggggaatcaggatgctcgatggcatcgtgacggacgccatcgaagcttcctccatcggtttcaatccaggccacgtggacatttatagtgcaagctggggcccaaacgatgatggaaaaacggtggaagggcccggccgcctcgcacaaaaagcatttgaatatggcgtgaaacagggccgacagggtaaagggtcaattttcgtttgggcctctggaaatggcggacgacagggcgataactgtgattgcgacgggtatacagatagtatctacactattagtatctcttcagctagccagcagggcttaagcccctggtacgcagagaagtgcagttccaccctggctacctcatactcatccggagactacaccgatcaacggattacctccgccgatttgcataatgactgcactgagacacacaccggtacatctgcgagtgctccactggcggccggaatttttgctctcgctctggaagccaatcccaatttgacctggcgcgacatgcagcacctcgtggtatggaccagcgagtatgatccactcgcaaacaatcccgggtggaagaaaaacggtgccggcctgatggtgaacagtcggttcggatttggcctgctgaatgcgaaagcattagtggacctggccgacccgcgtacatggcgcagcgtgcctgaaaaaaaggagtgtgtagtcaaagacaacgatttcgaacccagggccctgaaagccaacggggaggtgataattgaaatacccacgcgcgcatgtgagggccaggaaaacgccatcaagagcttggagcatgtgcaattcgaggctaccatcgaatactccaggagaggtgacctgcacgtgaccctgacttctgcagccggtacaagcaccgtgttgctggccgagagagagagggacacctctcctaacgggttcaaaaactgggacttcatgtctgtccatacatggggcgaaaatccaataggaacctggacactgcgcatcacagacatgtctggtagaatccagaacgaaggtagaattgtgaactggaagctgatcctgcacgggacctccagccagccagaacatatgaaacagcctcgggtgtacacttcttataacacagtgcagaacgacagacgaggggtggaaaaaatggtggatcccggggaagagcagcctacacaggaaaacccgaaggagaacaccctcgtttcaaagtccccttctagtagcagcgtcgggggccgccgggacgagctcgaggaaggcgctcccagccaagctatgcttcggctgcttcagtccgccttttctaagaatagccctccaaagcagtcccccaagaaaagtcctagtgcaaagctaaacattccttacgaaaatttttacgaagccctagagaagcttaataagcctagccagctcaaggactctgaagattctttatataatgattatgtagatgttttttataataccaaaccatataaacaccgtgacgaccgattactgcaggctctggtggatatcctgaacgaagagaattag

SEQ ID NO: 70052 - DNA, 2121 bp, Artificial Sequence
  derived and/or modified sequence
atgggtaagggaagcattagctttcttttcttctcccaaattgggtcactggagaaccactacctgttcaaacataagaaccaccctaggagaagtaggcgctcagcatttcatataaccaaacggttaagcgatgacgatcgtgtcatttgggctgaacagcagtatgagaaagagcgcagcaaacgttctgccttgagagatagcgcactgaatttattcaatgaccctatgtggaaccaacagtggtacttgcaggatacacgtatgacagcagccttgccaaaactagacctccatgtgatcccagtttggcaaaagggaattaccggcaaaggtgtggtgatcaccgtccttgacgatggactggaatggaaccatactgatatctacgccaactacgacccagaggccagctatgactttaatgataatgaccacgatccctttcccaggtatgatcccaccaatgaaaacaagcacggtactaggtgcgccggagagattgccatgcaggctaacaaccataaatgcggcgtcggtgtcgcttacaactcaaaagtgggcggtatccggatgctggacggaatcgttacagatgcaattgaagccagctctatcgggttcaaccccggacacgtcgatatctattccgcctcatgggggcctaacgatgacggcaagactgtggagggtccagggaggttggcccagaaggcattcgaatacggggtaaagcagggtaggcagggaaaaggtagcatcttcgtctgggcctctggaaacggaggcaggcaaggcgacaattgtgattgtgacggttataccgacagcatctatacgatctctatatcgagtgcctctcagcaggggctgtctccttggtacgccgagaaatgcagttccacattggctacgtcctactcatccggggactatacggatcagcgcattacatcagctgaccttcacaacgattgtacagagacacatactgggacttcggcctctgcgccacttgctgctggcatctttgctttggctctggaggcgaatcccaatctgacttggagagacatgcagcacttggtcgtgtggacctctgaatacgatcccctcgccaacaatcccggttggaagaagaacggggcaggactgatggtgaactcaaggtttggatttggcctcctaaatgctaaggccctggtagatttggctgacccacgcacctggagatcggtacccgaaaagaaggagtgcgtggtgaaggacaacgactttgaaccccgagccttgaaggcgaacggcgaagttatcattgagatccccacgagggcttgtgaggggcaggaaaatgcaataaagagtctcgagcacgtgcagttcgaagctaccatagaatactctaggcggggagacctgcatgtaacactcacttctgcggctggaacaagcaccgtcctcttggcagagcgggaacgcgatacaagcccaaacggattcaagaactgggactttatgtccgttcatacttggggtgaaaatcccataggtacgtggacactgcggatcaccgacatgtctggccgaatacagaatgaggggcgtattgtcaactggaagctgatcctgcatggtacttcgtcacagccagagcacatgaaacagcctcgggtttacacaagttacaatacagttcaaaatgatagaagaggcgttgagaaaatggtcgatccaggcgaagagcaacctactcaggagaaccccaaggagaatactctggtgagtaaatcaccatcttcttcttctgtgggcggaaggagagacgaactggaggagggagctccctcacaggccatgttgaggctcctccagagcgctttttctaaaaattcgcctcccaagcaaagccctaaaaaatcaccttctgcgaaactgaacataccttacgagaacttctatgaggccctggagaaattgaacaaaccaagtcaactcaaagattcagaagacagtttatataatgactatgtcgatgtgttctacaacaccaagccatacaaacaccgagacgacagactgcttcaggccctggttgacatcctgaatgaggaaaactag

SEQ ID NO: 70053 - DNA, 2234 bp, Artificial Sequence
  derived and/or modified sequence
cggccagtcccactgcagggtcgagatgccgaactgactatggggaagggatctatttctttcttgttcttcagccaaattggttcacttgaaaatcactacttattcaaacataaaaaccaccccagaaggtctcgaaggagtgcctttcatatcactaagagattatctgatgatgatcgtgtgatatgggctgaacaacagtatgaaaaagaaagaagtaaacgttcagctctaagggactcagcactaaatctcttcaatgatcccatgtggaatcagcaatggtacttgcaagataccaggatgacggcagccctgcccaagctggaccttcatgtgatacctgtttggcaaaaaggcattacgggcaaaggagttgttatcaccgtactggatgatggtttggagtggaatcacacggacatttatgccaactatgatccagaggctagctatgattttaatgataatgaccatgatccatttccccgatatgatcccacaaacgagaacaaacacgggaccagatgtgcaggagaaattgccatgcaagcaaataatcacaaatgcggggttggagttgcatacaattccaaagttggaggcataagaatgctggatggcattgtgacggatgctattgaggccagttcaattggattcaatcctggacacgtggatatttacagtgcaagctggggccctaatgatgatgggaaaactgtggaggggcctggccggctagcccagaaggcttttgaatatggtgtcaaacaggggagacaggggaaggggtccatcttcgtctgggcttcgggaaacggggggcgtcagggagataattgtgactgtgatggctacacagacagcatctacaccatctccatcagcagtgcctcccagcaaggcctatccccctggtacgctgagaagtgctcctccacactggccacctcttacagcagcggagattacaccgaccagagaatcacgagcgctgacctgcacaatgactgcacggagacgcacacaggcacctcggcctctgcacctctggctgctggcatcttcgctctggccctggaagcaaacccaaatctcacctggcgagatatgcagcacctggttgtctggacctctgagtatgacccgctggccaataaccctggatggaaaaagaatggagcaggcttgatggtgaatagtcgatttggatttggcttgctaaatgccaaagctctggtggatttagctgaccccaggacctggaggagcgtgcctgagaagaaagagtgtgttgtaaaggacaatgactttgagcccagagccctgaaagctaatggagaagttatcattgaaattccaacaagagcttgtgaaggacaagaaaatgctatcaagtccctggagcatgtacaatttgaagcaacaattgaatattcccgaagaggagaccttcatgtcacacttacttctgctgctggaactagcactgtgctcttggctgaaagagaacgggatacatctcctaatggctttaagaattgggacttcatgtctgttcacacatggggagagaaccctataggtacttggactttgagaattacagacatgtctggaagaattcaaaatgaaggaagaattgtgaactggaagctgattttgcacgggacctcttctcagccagagcatatgaagcagcctcgtgtgtacacgtcctacaacactgttcagaatgacagaagaggggtggagaagatggtggatccaggggaggagcagcccacacaagagaaccctaaggagaacaccctggtgtccaaaagccccagcagcagcagcgtagggggccggagggatgagttggaggagggagccccttcccaggccatgctgcgactcctgcaaagtgctttcagtaaaaactcaccgccaaagcaatcaccaaagaagtccccaagtgcaaagctcaacatcccttatgaaaacttctacgaagccctggaaaagctgaacaaaccttcccagcttaaagactctgaagacagtctgtataatgactatgttgatgttttttataacactaaaccttacaagcacagagacgaccggctgcttcaagctctggtggacattctgaatgaggaaaattaaaataagtgtgtggtcccaagttggaaatattcatgcttcttccttaccctgcgattttgcctgtgtctgaagtg

SEQ ID NO: 70054 - DNA, 2121 bp, Artificial Sequence
  derived and/or modified sequence
atgggcaagggcagcatcagcttcctgttcttcagccagatcggcagcctggagaaccactacctgttcaagcacaagaaccaccccagaagaagcagaagaagcgccttccacatcaccaagagactgagcgacgacgacagagtgatctgggccgagcagcagtacgagaaggagagaagcaagagaagcgccctgagagacagcgccctgaacctgttcaacgaccccatgtggaaccagcagtggtacctgcaggacaccagaatgaccgccgccctgcccaagctggacctgcacgtgatccccgtgtggcagaagggcatcaccggcaagggcgtggtgatcaccgtgctggacgacggcctggagtggaaccacaccgacatctacgccaactacgaccccgaggccagctacgacttcaacgacaacgaccacgaccccttccccagatacgaccccaccaacgagaacaagcacggcaccagatgcgccggcgagatcgccatgcaggccaacaaccacaagtgcggcgtgggcgtggcctacaacagcaaggtgggcggcatcagaatgctggacggcatcgtgaccgacgccatcgaggccagcagcatcggcttcaaccccggccacgtggacatctacagcgccagctggggccccaacgacgacggcaagaccgtggagggccccggcagactggcccagaaggccttcgagtacggcgtgaagcagggcagacagggcaagggcagcatcttcgtgtgggccagcggcaacggcggcagacagggcgacaactgcgactgcgacggctacaccgacagcatctacaccatcagcatcagcagcgccagccagcagggcctgagcccctggtacgccgagaagtgcagcagcaccctggccaccagctacagcagcggcgactacaccgaccagagaatcaccagcgccgacctgcacaacgactgcaccgagacccacaccggcaccagcgccagcgcccccctggccgccggcatcttcgccctggccctggaggccaaccccaacctgacctggagagacatgcagcacctggtggtgtggaccagcgagtacgaccccctggccaacaaccccggctggaagaagaacggcgccggcctgatggtgaacagcagattcggcttcggcctgctgaacgccaaggccctggtggacctggccgaccccagaacctggagaagcgtgcccgagaagaaggagtgcgtggtgaaggacaacgacttcgagcccagagccctgaaggccaacggcgaggtgatcatcgagatccccaccagagcctgcgagggccaggagaacgccatcaagagcctggagcacgtgcagttcgaggccaccatcgagtacagcagaagaggcgacctgcacgtgaccctgaccagcgccgccggcaccagcaccgtgctgctggccgagagagagagagacaccagccccaacggcttcaagaactgggacttcatgagcgtgcacacctggggcgagaaccccatcggcacctggaccctgagaatcaccgacatgagcggcagaatccagaacgagggcagaatcgtgaactggaagctgatcctgcacggcaccagcagccagcccgagcacatgaagcagcccagagtgtacaccagctacaacaccgtgcagaacgacagaagaggcgtggagaagatggtggaccccggcgaggagcagcccacccaggagaaccccaaggagaacaccctggtgagcaagagccccagcagcagcagcgtgggcggcagaagagacgagctggaggagggcgcccccagccaggccatgctgagactgctgcagagcgccttcagcaagaacagcccccccaagcagagccccaagaagagccccagcgccaagctgaacatcccctacgagaacttctacgaggccctggagaagctgaacaagcccagccagctgaaggacagcgaggacagcctgtacaacgactacgtggacgtgttctacaacaccaagccctacaagcacagagacgacagactgctgcaggccctggtggacatcctgaacgaggagaactag

SEQ ID NO: 70055 - DNA, 1266 bp, Artificial Sequence
  derived and/or modified sequence
atggccgtggacgtggccgagtaccacctgagcgtgatcaagagcccccccggctgggaggtgggcgtgtacgccgccggcgccctggccctgctgggcatcgccgccgtgagcctgtggaagctgtggaccagcggcagcttccccagccccagccccttccccaactacgactacagatacctgcagcagaagtacggcgagagctgcgccgaggccagagagaagagagtgcccgcctggaacgcccagagagccagcaccagaggcccccccagcagaaagggcagcctgagcatcgaggacaccttcgagagcatcagcgagctgggccccctggagctgatgggcagagagctggacctggccccctacggcaccctgagaaagagccagagcgccgacagcctgaacagcatcagcagcgtgagcaacaccttcggccaggacttcaccctgggccaggtggaggtgagcatggagtacgacaccgccagccacaccctgaacgtggccgtgatgcagggcaaggacctgctggagagagaggaggccagcttcgagagctgcttcatgagagtgagcctgctgcccgacgagcagatcgtgggcatcagcagaatccagagaaacgcctacagcatcttcttcgacgagaagttcagcatccccctggaccccaccgccctggaggagaagagcctgagattcagcgtgttcggcatcgacgaggacgagagaaacgtgagcaccggcgtggtggagctgaagctgagcgtgctggacctgcccctgcagcccttcagcggctggctgtacctgcaggaccagaacaaggccgccgacgccgtgggcgagatcctgctgagcctgagctacctgcccaccgccgagagactgaccgtggtggtggtgaaggccaagaacctgatctggaccaacgacaagaccaccgccgaccccttcgtgaaggtgtacctgctgcaggacggcagaaagatgagcaagaagaagaccgccgtgaagagagacgaccccaaccccgtgttcaacgaggccatgatcttcagcgtgcccgccatcgtgctgcaggacctgagcctgagagtgaccgtggccgagagcagcagcgacggcagaggcgacaacgtgggccacgtgatcatcggccccagcgccagcggcatgggcaccacccactggaaccagatgctggccaccctgagaagacccgtgagcatgtggcacgccgtgagaagaaactag

SEQ ID NO: 70056 - DNA, 1266 bp, Artificial Sequence
  derived and/or modified sequence
atggcagtggatgtggctgaatatcacctgagtgttataaagagcccaccgggatgggaagtgggtgtgtacgccgccggcgctctcgcattgctgggcatagccgcagtgagcctctggaagctctggacctcaggtagcttcccaagcccttcgcctttccctaactacgactatcgctatctgcagcagaaatacggcgagtcctgcgcagaggcacgagagaaaagggtgcccgcctggaacgctcagcgggcctcgactcggggtcccccgtccagaaagggatcactgtccattgaagacacattcgagtccatatccgagcttggccccctagagctaatggggcgagaactggacctcgccccatacggcacgctgcgaaagagccagtctgcggactctctgaacagcatttcaagcgtgtctaatacttttggccaggactttaccctgggtcaagtagaagtgtccatggagtacgatacggccagccacaccctcaacgtggcagtgatgcaggggaaagatctcctggaaagagaggaagcttcgtttgaatcctgctttatgcgggtgtctctcctcccagacgagcagatcgtgggaattagtagaatccaaaggaatgcctattcgatctttttcgacgagaaatttagcattccgttggaccccacagccttggaagaaaaaagcctgaggttctcagtgtttggcatcgatgaagacgagaggaatgtcagtaccggcgtggtggaacttaagttgtcagtactcgatcttccactgcagcccttttccggctggctgtatttgcaggatcagaacaaggccgcagacgccgtgggggaaatacttctgtcgctaagctacctgcctacagctgaaagattgactgtcgtggtggtcaaggcgaagaaccttatctggacaaacgacaagacgacggctgatccattcgtgaaggtctatttgctgcaggatggccggaaaatgagcaagaaaaaaacagccgtcaaaagagacgatccaaatccggtgtttaacgaagcaatgatcttttcagttccggcgatcgtgctacaggatctctcacttagagtgaccgtggctgaatcatcctctgacggccggggtgacaacgtgggtcatgtgataattgggccctcagcctctggtatgggcacaacccattggaaccagatgctggctaccctgcggagacccgtgtctatgtggcacgctgtgcgcagaaattag

SEQ ID NO: 70057 - DNA, 1266 bp, Artificial Sequence
  derived and/or modified sequence
atggccgtggacgtcgcggagtaccatttgtctgtgattaagtcccctccagggtgggaagtgggtgtctatgccgccggggccttggctctgttaggcatcgccgctgtgtctctctggaaactttggacaagtggcagtttccctagcccatccccttttccgaattatgattatcggtatctgcagcagaagtacggcgagtcctgtgcagaggctcgagagaagcgagtccccgcttggaacgcccaacgggcctctacacgggggcctccatcacggaaggggtcgctgagcattgaggacacgttcgaaagcatcagcgaacttggccctctcgaactgatgggccgggagctggacctggccccttatggcacactgaggaagtcccagtccgctgatagcctaaacagtatttccagtgtgtcaaacaccttcggccaggattttacacttggccaagtagaagtgtcaatggaatatgatactgcttctcacacgctcaatgtggccgtgatgcaggggaaagacctgcttgagagagaggaagcgtctttcgagagctgtttcatgcgagtctctttgctgcctgacgagcagattgtgggcattagccgcattcagcgtaatgcttatagcatattcttcgatgaaaagtttagtattcctctggaccctaccgccttggaagagaagtctctccgcttctcggtttttggcatcgatgaggatgaaaggaacgtcagtacaggcgtggttgagctgaagctttccgtccttgacttacccctccaaccgttcagcggctggctctatctgcaggatcagaataaggccgctgacgcagtgggcgagattctgttgtcgcttagctatcttccgaccgccgaaaggctgacagtggtagtggtcaaagctaagaacctgatctggactaacgataagaccacagcagatcccttcgtaaaggtgtacctgctgcaggatgggaggaagatgagcaagaagaagactgctgtaaaacgtgatgatcccaacccagtgttcaatgaagcaatgatcttctccgtgcccgcaatagtactccaggacctctccctccgagtaaccgtcgcggaatctagcagcgatggccgcggagacaacgttggccacgttatcattggcccctccgcctctggcatgggaaccacccattggaaccaaatgctagctaccctgagacgacccgtgtccatgtggcacgctgttcgcaggaactag

SEQ ID NO: 70058 - DNA, 1266 bp, Artificial Sequence
  derived and/or modified sequence
atggcggtggatgtggctgaataccatctatctgtaatcaagagtccaccagggtgggaggtcggcgtctacgccgccggcgccttggctctcctgggcattgccgcagtttccctgtggaagctatggacttccggcagctttccaagcccctctcctttccccaattacgactatagatacctgcagcagaagtatggggagtcctgtgccgaggctcgcgagaagcgcgtcccagcctggaatgctcagcgcgccagtactcgtggcccaccttccagaaaaggcagtctttctattgaggatactttcgagagtatttctgagctaggacctctggagcttatgggaagggagttggacctggcgccttatggaacacttcgcaagagccaatcggccgacagcttaaatagcatttcctctgtcagcaacacctttggccaggatttcaccctgggacaggtggaagtgtccatggagtatgacacggcatcacacaccttaaatgttgctgtaatgcagggaaaagacctgctggaaagggaggaggcgagtttcgagtcctgttttatgcgtgtgagcctgcttccagacgaacagatcgttgggatctccagaatccagaggaacgcgtattcaattttcttcgacgagaagttttctattcccttggatcccactgctcttgaagagaaatcgctccgcttttccgtgttcggcattgacgaggatgagaggaatgtaagtacaggggtggtggagcttaaactgtctgttctggacctgccacttcagccgttttcggggtggctctacctccaggaccagaataaggctgccgacgcggttggggaaattctcctgtcactctcctatctaccaacagctgaacgtttgactgttgtagtcgtcaaggcgaagaatctgatttggacaaacgacaagacaacagccgatccatttgtcaaggtctacctgttgcaagatggccgaaagatgagcaaaaaaaaaacagcggtgaagagggatgatccaaacccagtcttcaatgaagccatgatcttctccgttccagccattgtcctgcaggacctatccctcagagtgacggtggccgagtccagcagtgacggacggggtgataatgtaggacatgtaattattggaccgtctgctagcggtatgggtaccacacattggaatcagatgttggcaactttaaggcggcctgtttccatgtggcatgctgtgcgcaggaattag

SEQ ID NO: 70059 - DNA, 1266 bp, Artificial Sequence
  derived and/or modified sequence
atggctgtggatgtggccgagtaccacctgagcgtcatcaagagccccccaggctgggaggtgggcgtgtatgctgctggggccctggccctgctgggcattgctgctgtgtccctgtggaagctgtggaccagcggcagcttccccagccccagccccttccccaactatgactaccgctacctgcagcagaagtacggggagagctgtgccgaggcccgggagaagagggtgcctgcctggaatgcccagagggccagcacccggggcccccccagcaggaagggcagcctgagcattgaggacacctttgagagcatcagcgagctgggccccctggagctgatgggccgggagctggacctggccccctacggcaccctgaggaagagccagagcgctgacagcctgaacagcatcagctctgtgagcaacaccttcggccaggacttcaccctgggccaggtggaggtgtccatggagtatgacacagccagccacaccctgaatgtggccgtgatgcagggcaaggacctgctggagcgggaggaggccagctttgagagctgcttcatgagggtgtccctgctgcctgatgagcagatcgtgggcatcagccgcatccagagaaatgcctacagcatcttctttgatgagaagttcagcatccccctggaccccacagccctggaggagaagagcctgcgcttctctgtgtttggaattgatgaagatgaaagaaatgtgtccactggagtggtggagctgaagctgtctgtgctggacctgcccctgcagcccttcagcggctggctgtacctgcaggaccagaacaaggctgctgatgctgtgggggagatcctgctgagcctgagctacctgcccacagctgagcggctgactgtggtggtggtgaaggccaagaacctgatctggaccaatgacaagaccacagctgacccctttgtgaaggtgtacctgctgcaggacggcaggaagatgagcaagaagaagacagctgtgaagagagatgaccccaaccctgtgttcaatgaggccatgatcttctctgtgcctgccatcgtgctgcaggacctgagcctgcgggtgacagtggccgagagcagcagtgatggccgcggggacaacgtgggccacgtgatcatcggccccagcgccagcggcatgggcaccacccactggaaccagatgctggccaccctgcggcggcctgtgtccatgtggcatgctgtgagaagaaattag

SEQ ID NO: 70060 - DNA, 1266 bp, Artificial Sequence
  derived and/or modified sequence
atggccgtggacgtggccgagtaccacctgagcgtgatcaagagccccccgggatgggaagtaggcgtctacgccgcaggggcgttggccctgctgggtatcgcagccgtttccctgtggaagctctggaccagcggctcgttcccaagtccatcccccttcccaaattacgattatagatatctgcagcagaaatacggcgagagctgtgctgaagccagagagaagcgcgtgcctgcctggaacgcccaacgcgcaagcaccagggggcccccaagtcgtaaggggagcctgtctattgaagatacatttgagagcatcagcgaattgggcccattagagctgatggggagagaactcgacctggccccgtatggaactttaaggaaatctcaatcggctgattcacttaactccatctccagtgtgtctaatacattcggacaggattttaccctgggacaggtagaggtgagcatggaatacgacacagcctcgcatactctcaacgtcgctgtgatgcagggcaaggacctgcttgaaagggaggaggcttcttttgaatcttgcttcatgagggtctcactcctgcctgatgagcagattgtggggatatcccgcatacagaggaacgcttacagcatcttcttcgatgaaaaatttagcatccctctcgatccaactgccctggaagaaaaaagcctgaggtttagcgtgtttggtatcgacgaggacgaacggaacgtctccacaggggtcgtcgagcttaagttaagtgttcttgacctacctttgcaacctttcagcggctggttatatcttcaagaccagaataaggccgccgacgccgtcggcgaaatcctcctctccctgtcgtacctaccaacggctgaacggctgaccgtggtggtcgtcaaagcgaaaaacctcatctggaccaacgacaagacaaccgccgacccctttgtcaaggtgtacctactgcaagatggtcgaaagatgtcaaagaaaaagacagccgtgaaacgagacgacccaaaccctgtattcaatgaggcgatgatcttctcagtgccggcaatagttctgcaagacctctcacttagggtcacagttgccgaatccagttcagacggaaggggtgataacgtgggtcatgtgattattgggcccagcgcaagcggcatgggcactactcattggaaccagatgctggcgactttaagaagacccgtctctatgtggcatgctgtccgcagaaactag

SEQ ID NO: 70061 - DNA, 1266 bp, Artificial Sequence
  derived and/or modified sequence
atggccgtggacgtggccgagtaccacctgagcgtgatcaagagccctcccggctgggaagtaggggtatacgcggctggggccctcgcgctgctcggcatagccgctgtctccttgtggaagctttggactagcggatctttcccctcccccagcccattccccaactacgactacaggtacctacaacagaagtatggcgaaagctgcgcagaagcaagagagaaaagggtgccagcatggaacgctcagcgcgcgtcgacccggggcccccccagcagaaaaggctccctgagcatagaggacactttcgagagcatctcagaactcgggccactagagttaatgggccgggaattagacctggcaccttatggcactctgcgaaagtcccagtctgctgactcactcaattctatctcgtcggtgtctaatacttttgggcaggacttcacactcggtcaggtggaagtgtccatggaatacgacaccgcgtctcacaccttgaacgtggccgtcatgcaaggaaaagatttacttgaacgcgaggaggccagcttcgagagttgcttcatgagggtgtcactgttacctgacgagcagatcgttgggattagccgcatccagagaaatgcttactctattttttttgacgagaaattttccattcccctggaccctacggccttggaggagaaatcactcagattcagtgttttcgggattgacgaggacgagcggaacgtcagcacgggcgtcgttgagctgaaactttccgtcctggatctcccactccaacccttctctggatggttgtacctacaggatcagaacaaagccgcagatgctgtcggcgagattttgctgtcactgtcttatctcccaacagcggaaagactgaccgtcgtggttgtgaaggccaagaacctgatatggacgaacgacaagacgaccgctgaccccttcgtaaaagtgtatctgctccaagatggccgtaagatgagcaagaagaagaccgcggtgaaaagagatgatccaaatcctgtgttcaacgaggcaatgattttctccgtgccagcaatagtgttgcaggatctgtccctcagagttaccgtagccgagtcaagtagtgatggccggggagacaatgtgggtcatgttataatcgggccttcagcctccggaatgggcactacacactggaatcagatgctggccactcttaggcgccccgtgtcaatgtggcatgccgttagaagaaactag

SEQ ID NO: 70062 - DNA, 1266 bp, Artificial Sequence
  derived and/or modified sequence
atggccgtggacgtggccgagtaccacctgagcgtgatcaagagcccacccggctgggaagtcggtgtctatgccgcaggggccctggccctgctgggcattgcagctgtctccttatggaaactgtggactagtgggtccttcccgagcccttcaccttttccgaactacgattaccgctatctccaacagaagtatggtgaatcctgcgctgaggcccgggagaaacgcgtcccagcatggaatgcccaaagagcatctacaaggggtccaccttcgagaaaagggtcattatccatcgaggacacctttgagagcatctcagagctcggccccttggagctgatgggccgggagcttgatctggccccctatggcacacttaggaagtcccagagcgcggacagcctgaactctatctcaagtgtgagtaatactttcggacaggatttcactctcggccaggtggaagtctcaatggaatacgacacggcaagccacacactgaatgtcgccgtgatgcaaggaaaggatctgctggagcgcgaggaggcttcatttgagtcatgttttatgcgggtatcgctgttaccggacgaacagatcgtgggcatctccagaatccagcgcaatgcctattccatattctttgacgagaagttcagtattcccctggatcccactgctcttgaagagaagtctttacgtttttcagtatttgggattgacgaggacgagcgaaacgtgtccactggcgttgtcgagttgaagctgagcgtcttagatttgccactgcagccctttagcggatggctgtacctgcaggatcagaacaaagcagcggacgccgtgggggaaattctcttaagcctaagctatctgcccacagcggagagactgacagtggtcgttgtaaaggccaaaaatctaatctggacaaatgataagactaccgcagacccgttcgtgaaggtgtatctgttgcaagacggtcgcaaaatgtctaagaaaaagactgccgtcaagcgcgacgatccaaatcctgtgttcaatgaagcgatgattttctcagttcccgctatcgtgctacaggacctatccctgcgggtgacagtagccgagagtagctcagacggcagaggagataatgtgggtcacgtgatcataggcccttccgcctctggaatgggcacaactcactggaaccaaatgctggctacactgagacggcctgttagtatgtggcatgccgtgagacggaactag

SEQ ID NO: 70063 - DNA, 1266 bp, Artificial Sequence
  derived and/or modified sequence
atggcagttgacgtggcggagtaccacctgtcagtaatcaaatcaccccctggatgggaggtgggtgtatacgcagcaggggctctggccctccttggcatcgctgcagtgagtctatggaaattgtggactagtggatcttttccatccccttcaccatttccaaattatgactaccgctacctccagcagaagtatggcgagtcatgcgcggaggctcgggagaagcgggtcccagcctggaatgcccagagggcatcaacaaggggccctccatccagaaaggggtccctgtctattgaagataccttcgaatccatctctgaactgggaccactcgagctgatgggcagagagcttgacctggctccctacggaaccctgcgtaaaagccagtcagcggacagccttaattcaattagcagtgtgagcaacactttcgggcaagacttcacattgggccaggtagaggtctccatggagtacgatacggcctctcacacattgaacgtagccgtgatgcagggtaaagacctcctcgagagagaggaagcctccttcgaatcatgctttatgagggtttctctgttgccagatgagcagatagtcgggatctcacggattcagcgaaacgcctattctatcttctttgacgagaagtttagcattcctctggatcctacagctctggaggaaaaatctctgcggttctccgtgtttgggatcgatgaagatgagagaaatgtctccacaggtgtcgtcgaactgaagctctctgtcctggacctccccctccagcctttcagcggttggctatacctgcaggatcagaataaagccgctgacgccgtgggtgaaattctgctttccctaagctatttgccaactgctgaaagactgacagtcgtggtggtcaaagcaaaaaatctgatttggaccaatgataagactaccgccgacccatttgtcaaagtatatctgctccaggatggacgaaagatgtcgaagaaaaaaaccgcagtgaagagagacgatccaaacccagtattcaatgaggccatgatcttcagtgtgcctgccattgtgctgcaggatttgtcattgagagtgacagtagcagagtcctcttccgacggtcgcggagataacgtcggccacgttatcatcggaccgtctgcgtctggaatgggaacgactcactggaaccagatgctcgctacgctccgaagacctgtatcaatgtggcacgcagtgaggcggaattag

SEQ ID NO: 70064 - DNA, 1266 bp, Artificial Sequence
  derived and/or modified sequence
atggcagtcgacgtcgcggaatatcatctcagcgtgattaagagcccacctggatgggaggtcggggtgtacgccgctggggctcttgcactgctaggcatcgccgctgtgtcactctggaagctgtggactagtgggagcttcccgagtccctcaccatttcctaattatgattaccgatatctccagcagaaatacggcgaatcatgtgctgaggcccgtgagaagagggtacccgcatggaatgcgcagagagcttccacacgcggacccccaagccggaagggaagtttgagcattgaggatacgtttgagtcgatttctgaactcggccctctcgagctgatgggacgggagctagacctcgcaccctacggtacactgcggaaatcccaatcagccgacagtctcaactcaattagttctgtttccaataccttcgggcaggacttcacattgggtcaggtggaagtgagcatggaatatgacacagcatcacacactcttaatgtcgccgtcatgcagggcaaggacctcctcgaaagggaagaggcttccttcgaaagctgttttatgagggttagtcttctgcccgacgaacagatcgtcgggatctcacgaatccagcgaaatgcgtactccatcttttttgatgagaaattctcgattcccctagatcccacagctctggaggaaaagagcctcagatttagtgtatttgggatcgacgaggatgagcggaatgtaagtaccggcgttgtggagcttaagctgagcgtcctggacctgcccctgcagccatttagcggctggctgtacctacaggatcaaaacaaggccgcagatgctgtcggggagatattactgtcattgtcgtacctgcccaccgctgaaagactgaccgtggtggtcgtgaaagctaaaaatcttatctggaccaacgataaaacgaccgcagaccccttcgtcaaagtttacctgctgcaagacggcagaaagatgtccaagaagaagacagccgtgaaacgcgacgatcccaatccagtcttcaatgaggccatgattttttctgtgcctgccattgtgttacaggatctgtccctgcgagttacggttgctgagagctcctccgacgggagaggcgacaatgtgggccatgtgattataggacccagcgcgagtggcatgggtactactcactggaaccagatgctggcaactttacggagaccagtgtccatgtggcacgccgtcagaagaaactag

SEQ ID NO: 70065 - DNA, 1266 bp, Artificial Sequence
  derived and/or modified sequence
atggcggtcgacgtggccgaataccatctgtctgtgatcaagagccctcctggttgggaagttggtgtatatgcagcaggtgcactggccctgctggggattgcagcagtgtcactctggaagctgtggacttcaggatccttcccttctccgtcccccttcccaaactacgactatcgctatctgcagcagaagtatggtgagtcgtgtgccgaggcaagggagaaacgggtacccgcatggaatgcccagcgcgcatcaactagaggccctcctagcaggaaagggagtttgagcattgaggacacattcgaatccatctcagagttgggacccctagaattgatgggccgagaactggatctggccccatacgggacgctgcggaaaagccagagtgcggactcacttaactcgatatctagcgtgtccaacacattcgggcaggactttactttgggtcaggtggaagtttcaatggagtatgatacagccagtcacactctgaacgttgctgttatgcagggtaaggacctgctggagcgtgaagaagcctcatttgagagctgcttcatgcgggtctcactgctgcctgatgagcaaatagttgggattagcaggatccagcgcaatgcgtacagcatctttttcgatgagaaatttagtattcctctagaccctaccgcccttgaagagaagtcattgagattctccgtcttcggaatcgacgaggacgagcggaacgtgtctaccggggttgtggagttaaagttgtccgtgttagacttaccattgcaacctttctcaggatggctgtacttgcaggaccaaaacaaggctgccgatgcagtcggggaaatcttgctcagcctttcctacctacctacagccgaaagactgacggtggtggtcgtgaaagccaaaaatctaatttggactaacgataagactactgccgacccattcgtaaaagtgtaccttctacaggatggccgtaagatgtcaaaaaagaaaacagccgtgaaacgtgacgacccgaacccagtgttcaacgaagctatgatattttcggtacccgctatagttctgcaggatctctcactgagggtcacagtggctgagagctcaagtgatggtagaggggacaatgtcggccacgtcattatcggcccttccgctagtggtatggggaccacccactggaatcagatgctggctactctccgcagaccagtgagtatgtggcacgcagtgcgcagaaattag

SEQ ID NO: 70066 - protein, 236 aa, Artificial Sequence
  derived and/or modified sequence
MVSSGKKYSRKSGKPSVEDQFTRAYDFETEDKKDLSGSEEDVIEGKTAVIEKRRKKRSSAGVVEDMGGEVQNMLEGVGVDINKALLAKRKRLEMYTKASLKTSNQKIEHVWKTQQDQRQKLNQEYSQQFLTLFQQWDLDMQKAEEQEEKILNMFRQQQKILQQSRIVQSQRLKTIKQLYEQFIKSMEELEKNHDNLLTGAQNEFKKEMAMLQKKIMMETQQQEIASVRKSLQSMLF

SEQ ID NO: 70067 - DNA, 711 bp, Artificial Sequence
  derived and/or modified sequence
atggtgagcagcggcaagaagtacagcagaaagagcggcaagcccagcgtggaggaccagttcaccagagcctacgacttcgagaccgaggacaagaaggacctgagcggcagcgaggaggacgtgatcgagggcaagaccgccgtgatcgagaagagaagaaagaagagaagcagcgccggcgtggtggaggacatgggcggcgaggtgcagaacatgctggagggcgtgggcgtggacatcaacaaggccctgctggccaagagaaagagactggagatgtacaccaaggccagcctgaagaccagcaaccagaagatcgagcacgtgtggaagacccagcaggaccagagacagaagctgaaccaggagtacagccagcagttcctgaccctgttccagcagtgggacctggacatgcagaaggccgaggagcaggaggagaagatcctgaacatgttcagacagcagcagaagatcctgcagcagagcagaatcgtgcagagccagagactgaagaccatcaagcagctgtacgagcagttcatcaagagcatggaggagctggagaagaaccacgacaacctgctgaccggcgcccagaacgagttcaagaaggagatggccatgctgcagaagaagatcatgatggagacccagcagcaggagatcgccagcgtgagaaagagcctgcagagcatgctgttctag

SEQ ID NO: 70068 - DNA, 711 bp, Artificial Sequence
  derived and/or modified sequence
atggtcagctccggcaaaaagtactcccggaagtctggcaaaccttctgtggaggatcaattcactcgtgcttacgactttgagacagaggataagaaggatctgtctggctccgaggaggacgtgatcgaagggaagacggccgttatcgagaaaagacgcaagaaacggtccagtgcaggggttgtcgaggacatggggggcgaagttcagaatatgctagagggcgtcggagtagacatcaataaggccctactggctaagagaaaacgactggagatgtatactaaagcctcccttaagactagtaaccagaagatcgagcatgtttggaagacacagcaagatcagcggcagaaacttaatcaggagtattcccaacagttcctgacactgtttcagcagtgggacctggatatgcagaaggccgaggaacaagaagaaaagattttgaatatgttcagacagcagcaaaagatcttgcaacaaagcaggatcgttcagtcccagaggttgaagacaattaaacaactgtatgagcaatttataaaaagcatggaagagctggagaaaaatcacgataatctcctaacaggcgcccagaatgaattcaaaaaggagatggccatgctgcagaaaaaaattatgatggagacacagcagcaagaaatcgcgagcgttcgtaaatctctgcagtctatgttattttag

SEQ ID NO: 70069 - DNA, 711 bp, Artificial Sequence
  derived and/or modified sequence
atggttagttctgggaaaaagtacagtcgaaagagcggcaagccttcagttgaagatcaatttactcgtgcttatgatttcgagaccgaggataaaaaagacttatctggctctgaagaggacgtaatcgaaggcaaaaccgcggtaatagaaaagcggcgtaaaaaaagatcatcagcaggtgtcgtcgaggacatggggggagaggtgcagaacatgttggagggagtcggggtcgatatcaacaaggcgctgctggctaagcgcaagcggctggaaatgtacaccaaggccagcttgaagactagtaaccaaaaaatcgaacatgtgtggaaaacccagcaagaccagcgccagaaacttaaccaggaatactcccagcagttcctgaccctctttcagcagtgggatttggatatgcagaaggcagaagagcaggaggagaagattcttaacatgtttaggcagcagcagaagatcttgcagcaaagcaggattgtccagtctcagaggctcaaaacgattaagcagctttacgaacaattcattaagtctatggaggagttggagaaaaatcatgacaatctgctcacaggagcccagaacgagttcaaaaaggaaatggcaatgctgcagaaaaagattatgatggaaacccaacaacaagagatagcctccgtacggaagagcttgcagtccatgctgttttag

SEQ ID NO: 70070 - DNA, 711 bp, Artificial Sequence
  derived and/or modified sequence
atggtaagtagtggaaaaaaatactcaaggaagagcggcaagccctccgtggaagatcagttcaccagagcctatgactttgagacagaagacaagaaagacctttcaggcagtgaggaagacgtcatcgaaggtaagaccgcggtgatagaaaagagaaggaaaaagaggtcatccgctggggttgtcgaggacatggggggtgaggtccagaatatgctggagggcgtcggggtggacatcaacaaagccttgttggccaagcgcaagcggctggagatgtacaccaaagcgtctttgaagacatctaatcaaaagatagagcatgtttggaaaacacagcaggatcagcgacagaagctcaaccaggagtacagccagcaattcctgacattgtttcaacagtgggacctcgacatgcaaaaggcagaagaacaagaggagaagatcctcaatatgtttaggcagcagcaaaaaatcctccagcagtctcgcatcgtccagagccagcggcttaaaactatcaagcagctgtatgagcaatttattaaaagtatggaagagctggagaaaaaccatgataacctgctcaccggcgctcagaacgagttcaagaaggagatggccatgctccagaaaaagattatgatggaaacccagcagcaagaaatcgcgtcagttaggaagtctcttcagtctatgcttttttag

SEQ ID NO: 70071 - DNA, 711 bp, Artificial Sequence
  derived and/or modified sequence
atggtgagcagcggcaagaagtacagcaggaagagcggcaagcccagcgtggaggaccagttcacccgggcctatgactttgaaacagaggacaagaaggacctgagcggcagcgaggaggatgtgattgagggcaagacagctgtgattgagaagaggaggaagaagaggagcagcgctggggtggtggaggacatgggcggggaggtgcagaacatgctggagggcgtgggcgtggacatcaacaaggccctgctggccaagaggaagaggctggagatgtacaccaaggccagcctgaagaccagcaaccagaagattgaacatgtgtggaagacccagcaggaccagaggcagaagctgaaccaggagtacagccagcagttcctgaccctcttccagcagtgggacctggacatgcagaaggccgaggagcaggaggagaagatcctgaacatgttccggcagcagcagaagatcctgcagcagagccgcatcgtgcagagccagaggctgaagaccatcaagcagctgtatgagcagttcatcaagtccatggaggagctggagaagaaccacgacaacctgctgaccggggcccagaatgagttcaagaaggagatggccatgctgcagaagaagatcatgatggagacccagcagcaggagatcgcctctgtgaggaagagcctgcagagcatgctgttctag

SEQ ID NO: 70072 - DNA, 711 bp, Artificial Sequence
  derived and/or modified sequence
atggtgagcagcggcaagaagtacagccggaagagcggcaagccctcagttgaggaccagttcacaagggcttacgatttcgagaccgaggacaagaaggacctgagcgggtccgaggaagacgtcattgagggtaaaacggcagtgatagaaaagcgtagaaaaaaacggagctccgccggggtggtggaagatatgggaggcgaagtacagaacatgctcgagggggtcggtgtggatatcaacaaggccctccttgcaaaacgcaaacgactggagatgtacacaaaggctagcctcaagacatcaaatcagaaaatcgagcatgtctggaaaacacagcaggatcagcgacagaagctgaaccaggagtacagccagcagtttctgacactgtttcagcagtgggacctggatatgcagaaagcggaggaacaggaggagaaaatcctgaacatgttccgccagcagcagaagattttacagcagagccgtattgttcagtcccaacgactcaaaaccataaagcagctgtacgaacagttcattaaatctatggaagagctcgaaaagaatcatgacaacctcttaaccggggcacaaaatgaattcaagaaggagatggcaatgcttcagaaaaagattatgatggagacccagcagcaagagattgccagcgtcagaaagagtttgcagagcatgctcttttag

SEQ ID NO: 70073 - DNA, 711 bp, Artificial Sequence
  derived and/or modified sequence
atggtgagcagcggcaagaagtacagccggaagagcggcaagccctccgtcgaagatcagttcacacgcgcgtacgacttcgaaacggaggacaagaaagacctgagcggcagcgaagaagatgtgattgaggggaaaaccgcagtgattgagaaacgccgaaagaagcgttccagtgcgggagtcgtggaggatatgggcggtgaggtgcaaaatatgcttgaaggcgtgggtgtcgatatcaacaaggcccttttagccaagaggaagcggctcgagatgtacacaaaggctagcctgaagacttctaaccagaaaatcgagcatgtctggaaaacccagcaggaccagcgccaaaaacttaaccaagagtattcacagcagtttctgaccttatttcagcaatgggacctcgatatgcagaaggctgaggaacaggaggagaaaatcctcaatatgtttaggcaacagcagaagatcttacagcagtctcgcatcgtgcagagccaacgcctcaaaacgatcaaacagctgtacgagcaatttatcaagtcaatggaggagcttgaaaagaatcacgataaccttctgacgggagcccagaatgagtttaagaaagagatggctatgttacagaaaaaaatcatgatggagactcagcagcaagaaatcgcatcagtgagaaagtcgctacagtctatgttgttctag

SEQ ID NO: 70074 - DNA, 711 bp, Artificial Sequence
  derived and/or modified sequence
atggtgagcagcggcaagaagtacagccggaagagcggcaagccctccgtggaggatcaattcactcgtgcttatgactttgaaaccgaggataaaaaagacctgtcagggagcgaggaggatgtgattgagggtaaaacagccgtaatcgaaaaacgcagaaaaaagagaagctccgcaggggtggtggaagatatgggcggcgaggtacaaaatatgttggagggggtgggagttgatatcaataaagctttactcgccaaaaggaagcgacttgaaatgtacacaaaggccagtttgaaaactagcaaccagaagatcgagcacgtctggaagacacaacaggaccaacgccagaagctaaaccaggaatactcacagcagtttctgactttgtttcagcagtgggatttagatatgcaaaaagccgaggagcaggaggaaaaaattttaaacatgtttaggcagcaacaaaaaatcctacagcagtctcgcatcgtgcagtcccagcgacttaagaccataaagcaactgtacgagcagttcattaaaagcatggaggagcttgaaaaaaaccacgataaccttttaaccggggcccagaatgagtttaaaaaggaaatggccatgttgcagaaaaaaataatgatggaaacgcaacagcaagagattgcgagcgtgaggaagtccctgcagtctatgcttttctag

SEQ ID NO: 70075 - DNA, 711 bp, Artificial Sequence
  derived and/or modified sequence
atggtgtcctccggcaagaagtacagccggaaaagtggcaagccttctgtggaagatcaatttactcgcgcatacgacttcgagactgaggacaagaaggacctgtccggaagcgaggaggacgtgatcgagggcaagacagcagtgatagagaagcgccgtaaaaaaagaagctccgctggcgtcgtcgaggacatgggaggtgaagttcaaaacatgttggagggggtcggggtcgacattaacaaggccctgctggcaaaacgcaagcgactcgagatgtatacgaaggcctctctgaagacttctaatcagaagattgagcacgtgtggaagacccagcaggatcaacgccaaaagctgaaccaagagtattctcagcagtttctgacgttatttcaacagtgggaccttgacatgcaaaaagccgaggaacaggaggagaaaattctgaacatgtttagacaacagcagaagattctgcagcagagtaggatagtgcaatctcaacgacttaagactatcaagcagctttacgaacagtttatcaaatccatggaagaactggaaaaaaatcacgataacctgctgaccggtgcccaaaatgagttcaaaaaagaaatggcaatgctgcagaagaagatcatgatggaaacccagcagcaggaaatcgcctctgtgcggaagtccctccagagcatgctgttttag

SEQ ID NO: 70076 - DNA, 711 bp, Artificial Sequence
  derived and/or modified sequence
atggtgagctctggcaagaaatattcgcggaagagcggcaagcccagcgtggaagaccagttcaccagggcctatgatttcgaaaccgaagataaaaaagacctgtcaggtagcgaagaggacgttatagaaggaaaaactgcagttattgagaagaggcgaaaaaagcgatcctctgccggagtggtggaggacatgggtggggaggtacagaatatgctggaaggggtcggcgtcgatataaacaaagccctactggctaagagaaagcggctggaaatgtacactaaagcctctttaaaaacgagtaaccagaaaatcgaacatgtctggaaaactcaacaagatcagcgacagaagttaaaccaagaatattcccagcagttccttacgctgttccaacagtgggatctcgacatgcaaaaagctgaagaacaagaagaaaagatccttaatatgtttcgccaacagcagaagatcctgcaacaaagtagaattgtccagagccaacggttaaagacaattaagcagttatatgagcagttcatcaagtctatggaggagctcgagaagaaccatgataacttgctgacaggggcacagaacgagttcaaaaaagagatggctatgctgcagaagaagatcatgatggaaacccagcaacaggagatcgcttcagtccgaaagagtctccagtcaatgctcttttag

SEQ ID NO: 70077 - DNA, 711 bp, Artificial Sequence
  derived and/or modified sequence
atggtttcttcaggcaaaaagtactcccgcaaatctgggaagccttctgtcgaggaccaatttaccagggcctacgacttcgaaacagaggataagaaagaccttagtggaagcgaggaggatgttatcgagggcaagaccgccgttattgagaaacgtcggaagaaaaggagtagcgctggcgttgtcgaggatatgggtggagaggtccagaatatgcttgagggggttggggtggatatcaacaaagctctgttggcgaagcgcaaacgcttggagatgtatacaaaggcctccctgaaaacatctaaccaaaagatagaacatgtgtggaagactcagcaggatcagcgtcagaagcttaaccaagagtactcccagcagtttctgacacttttccagcagtgggatctagatatgcaaaaggcagaggagcaggaggaaaaaatcttgaatatgttcaggcagcagcagaagatcctccagcagagcaggatagtgcagagtcagagattaaaaaccattaaacaactctacgaacaatttatcaagagtatggaagagctcgagaagaatcatgataatctactgacgggggcacaaaacgagttcaagaaggaaatggccatgctacagaaaaaaattatgatggaaacacaacagcaggagatcgcctccgtgcgtaagtctctgcagagtatgttgttctag

SEQ ID NO: 70078 - DNA, 1068 bp, Artificial Sequence
  derived and/or modified sequence
cgcgcttgtggaggagttgtggaggacgcctgtcgacgaccagtaactggtcctcggccattgcggaagcatctaaatatggtgtcctccggaaaaaagtattccaggaaatctgggaagccgtctgtggaagatcagtttacgagagcctatgactttgagactgaagataagaaagatctgagtggatcagaggaagatgttattgaagggaagactgcagtcattgagaaacgtaggaagaaaaggtcttctgcaggagtagttgaagatatggggggtgaagtgcagaatatgctggaaggagttggagttgacattaacaaggctcttcttgccaagagaaagagactagaaatgtataccaaggcttctctcaaaactagtaaccagaaaattgaacatgtttggaaaacacaacaagatcaaaggcagaagcttaaccaagaatattctcagcagtttctgactttgtttcagcagtgggatttagatatgcagaaagctgaggaacaagaagaaaaaatacttaatatgtttcgacagcaacaaaagattcttcaacaatctagaattgttcagagccagagattgaaaacaattaaacagttatatgagcagttcataaagagtatggaagagttggagaagaatcatgataatctacttactggtgcacaaaatgaatttaaaaaagaaatggctatgttgcaaaaaaaaattatgatggaaactcagcagcaagagatagcaagtgttcggaagtctcttcaatccatgttattctgatgactctttgaagaaagaacttgaacctaagtaatatgatacaattataacgttagctaagaagcatattgtaagtctttagaatagtttaattgtaacatctttaatcataaacctgtttcattgtaagacctccctttctgttaagtcaaatctaaatagttatgagttagttagcaactattcctaaagaatatgtattaagctttcagctctttagtaatgatagtgaatttttctctctaacactgtcaattaaataaagacgatttaatttta

SEQ ID NO: 70079 - DNA, 845 bp, Artificial Sequence
  derived and/or modified sequence
gagttgtggaggacgcctgtcgacgaccagtaactggtcctcggccattgcggtgtgtttcagtcaggaagcatctaaatatggtgtcctccggaaaaaagtattccaggaaatctgggaagccgtctgtggaagatcagtttacgagagcctatgactttgagactgaagataagaaagatctgagtggatcagaggaagatgttattgaagggaagactgcagtcattgagaaacgtaggaagaaaaggtcttctgcaggagtagttgaagatatggggggtgaagtgcagaatatgctggaaggagttggagttgacattaacaaggctcttcttgccaagagaaagagactagaaatgtataccaaggcttctctcaaaactagtaaccagaaaattgaacatgtttggaaaacacaacaagatcaaaggcagaagcttaaccaagaatattctcagcagtttctgactttgtttcagcagtgggatttagatatgcagaaagctgaggaacaagaagaaaaaatacttaatatgtttcgacagcaacaaaagattcttcaacaatctagaattgttcagagccagagattgaaaacaattaaacagttatatgagcagttcataaagagtatggaagagttggagaagaatcatgataatctacttactggtgcacaaaatgaatttaaaaaagaaatggctatgttgcaaaaaaaaattatgatggaaactcagcagcaagagatagcaagtgttcggaagtctcttcaatccatgttattctgatgactctttgaagaaagaacttgaacctaagtaatatgatacaattataacgtt

SEQ ID NO: 70080 - protein, 267 aa, Artificial Sequence
  derived and/or modified sequence
MDDQGCPRCKTTKYRNPSLKLMVNVCGHTLCESCVDLLFVRGAGNCPECGTPLRKSNFRVQLFEDPTVDKEVEIRKKVLKIYNKREEDFPSLREYNDFLEEVEEIVFNLTNNVDLDNTKKKMEIYQKENKDVIQKNKLKLTREQEELEEALEVERQENEQRRLFIQKEEQLQQILKRKNKQAFLDELGQHISLAPIHKLEEALYEYQPLQIETYGPHVPELEMLGRLGYLNHVRAASPQDLAGGYTSSLACHRALQDAFSGLFWQPS

SEQ ID NO: 70081 - DNA, 804 bp, Artificial Sequence
  derived and/or modified sequence
atggacgaccagggctgccccagatgcaagaccaccaagtacagaaaccccagcctgaagctgatggtgaacgtgtgcggccacaccctgtgcgagagctgcgtggacctgctgttcgtgagaggcgccggcaactgccccgagtgcggcacccccctgagaaagagcaacttcagagtgcagctgttcgaggaccccaccgtggacaaggaggtggagatcagaaagaaggtgctgaagatctacaacaagagagaggaggacttccccagcctgagagagtacaacgacttcctggaggaggtggaggagatcgtgttcaacctgaccaacaacgtggacctggacaacaccaagaagaagatggagatctaccagaaggagaacaaggacgtgatccagaagaacaagctgaagctgaccagagagcaggaggagctggaggaggccctggaggtggagagacaggagaacgagcagagaagactgttcatccagaaggaggagcagctgcagcagatcctgaagagaaagaacaagcaggccttcctggacgagctgggccagcacatcagcctggcccccatccacaagctggaggaggccctgtacgagtaccagcccctgcagatcgagacctacggcccccacgtgcccgagctggagatgctgggcagactgggctacctgaaccacgtgagagccgccagcccccaggacctggccggcggctacaccagcagcctggcctgccacagagccctgcaggacgccttcagcggcctgttctggcagcccagctag

SEQ ID NO: 70082 - DNA, 804 bp, Artificial Sequence
  derived and/or modified sequence
atggatgatcaggggtgcccccggtgcaaaacaaccaaataccggaaccctagcctgaaattgatggtgaacgtctgcggtcacaccctatgcgagtcttgtgtagacctgttgtttgtaagaggtgccggcaattgccccgaatgcggaacccccttgcgcaagagcaattttagagttcagttgttcgaggacccaacagtggacaaagaggtggagatccgcaaaaaagtactgaagatttataacaaacgcgaagaagacttcccgtccttgcgggaatacaatgatttcctagaagaagttgaggagattgtgtttaatctgacgaacaacgttgacttggataataccaagaagaaaatggagatctatcagaaagagaacaaagatgttatccagaagaacaaattgaagttgacgagggaacaggaagaactcgaggaggctctggaggtcgagcgtcaagaaaatgaacagaggcgactctttattcagaaagaggaacagctgcagcaaatcctgaagcgtaagaataaacaagctttcctcgatgaactcggtcagcatatcagcctggctccaatccacaaattagaggaagcgctgtacgaatatcaaccactacagatcgagacatatggaccacatgttccagaactggagatgctgggccgcttgggctacttaaaccatgtgcgggccgcatctccccaggacctcgctggcggatacactagctctctcgcgtgtcacagagcattgcaagatgccttctcaggcctgttctggcagccttcctag

SEQ ID NO: 70083 - DNA, 804 bp, Artificial Sequence
  derived and/or modified sequence
atggatgaccagggctgcccccgctgcaagaccaccaagtacagaaaccccagcctgaagctgatggtgaatgtgtgtggccacaccctgtgtgagagctgtgtggacctgctgtttgtgagaggagctggcaactgcccagaatgtggcacccccctgaggaagagcaacttccgggtgcagctgtttgaggaccccaccgtggacaaggaggtggagatcaggaagaaggtgctgaagatctacaacaagcgggaggaggacttccccagcctgcgggagtacaatgacttcctggaggaggtggaggagatcgtgttcaacctgaccaacaacgtggacctggacaacaccaagaagaagatggagatctaccagaaggagaacaaggatgtgatccagaagaacaagctgaagctgacccgggagcaggaggagctggaggaggccctggaggtggagcggcaggagaatgagcagaggaggctcttcatccagaaggaggagcagctgcagcagatcctgaagaggaagaacaagcaggccttcctggatgagctgggccagcacatcagcctggcccccatccacaagctggaggaggccctgtatgagtaccagcccctgcagatcgagacctacggcccccacgtgcctgagctggagatgctgggccgcctgggctacctgaaccacgtgcgggccgccagcccccaggacctggccggcggctacaccagcagcctggcctgccaccgggccctgcaggatgccttcagcggcctcttctggcagcccagctag

SEQ ID NO: 70084 - DNA, 1220 bp, Artificial Sequence
  derived and/or modified sequence
ggaacctgcttggtcgcgtctgagggggcttgtaggtggctctggctgaaacaggcgcctgcgagagtctgtaggagggaaaccgccatggacgatcagggttgccctcggtgtaagaccaccaaatatcggaacccctccttgaagctgatggtgaatgtgtgcggacacactctctgtgaaagttgtgtagatttactgtttgtgagaggagctggaaactgccctgagtgtggtactccactcagaaagagcaacttcagggtacaactctttgaagatcccactgttgacaaggaggttgagatcaggaaaaaagtgctaaagatatacaataaaagggaagaagattttcctagtctaagagaatacaatgatttcttggaagaagtggaagaaattgttttcaacttgaccaacaatgtggatttggacaacaccaaaaagaaaatggagatataccaaaaggaaaacaaagatgttattcagaaaaataaattaaagctgactcgagaacaggaagaactggaagaagctttagaagtggaacgacaggaaaatgaacaaagaagattatttatacaaaaagaagaacaactgcagcagattctaaaaaggaagaataagcaggcttttttagatgagctgggtcaacatatttcactggcacctattcacaagcttgaagaagctctgtatgaataccagccactgcagatagagacatatggaccacatgttcctgagcttgagatgctaggaagacttgggtatttaaaccatgtcagagctgcctcaccacaggaccttgctggaggctatacttcttctcttgcttgtcacagagcactacaggatgcattcagtgggcttttctggcagcccagttaaccatttataagatttggaccttggagctgaaccagggagctagcaaaagtaaagcagacttataaaattatagctatgtgcagctgcacaacacagtccttccactagcagctgtgttaaagtatttataaggagaaaatttcagaactaagttgagtaatataggggatatatatttgtgaaaaataatttttacttatatttttcagaggatttgacacgataagcctcatctgatggaagagaggaataaataattcacctatatgtgtttgaggttgtgacagacttataaaatctttttaaaaaataaagctataatttatatt

SEQ ID NO: 70085 - DNA, 804 bp, Artificial Sequence
  derived and/or modified sequence
atggacgaccagggctgcccccggtgcaagaccaccaagtaccggaacccatccctgaaactgatggttaacgtatgcggtcacactctgtgtgaaagttgtgtagaccttttattcgtgaggggggccgggaattgtccagaatgcgggacacctctgagaaagtctaatttccgcgtgcagctcttcgaagatcctacagtggataaggaagttgaaatacggaagaaggtgctgaaaatctataacaagcgcgaagaagattttccctctctgagagagtataacgacttcctggaggaagtggaagagatagtctttaacctcacaaataacgtagacctcgacaacactaagaagaaaatggagatataccagaaggagaataaagatgttatacaaaaaaataagctgaaactgacccgcgaacaggaggaactcgaagaagccttagaggtggaacgacaagagaatgaacagcgtagactcttcatccagaaagaggaacagttgcagcagatcctcaagagaaaaaacaaacaggcatttctcgatgaactcggacaacacatatccctggccccaattcataagttggaggaggcactttatgaatatcaaccacttcagattgaaacatacggcccgcacgtaccagagctggagatgctcggcaggcttggctatttaaaccatgtcagagccgcctccccacaggatctggccggcgggtatacaagctctctggcgtgtcaccgcgcgctccaggacgccttttcaggtctgttctggcaacctagctag

SEQ ID NO: 70086 - DNA, 804 bp, Artificial Sequence
  derived and/or modified sequence
atggatgaccagggctgccctagatgtaagacaacaaaatacagaaaccctagtctcaaactcatggtgaacgtctgtggacataccctttgcgaatcttgcgtagacctcctgttcgtgaggggagcgggtaactgcccagagtgcggaacaccattgcgtaaatcgaattttcgtgtgcagctgttcgaggatcctactgtagacaaggaagtagaaattcggaaaaaagtcctgaagatatataataaaagggaggaggactttcccagccttagggaatataacgacttcctcgaggaggtcgaggagattgttttcaaccttaccaataatgtagatctcgataacaccaagaagaaaatggagatctaccaaaaagaaaataaagatgtgattcagaaaaacaaactgaagctcacaagagaacaggaagagttggaagaggctttggaagtggaacgccaggaaaacgaacaaaggagactgtttattcaaaaggaagagcagctgcaacagatacttaagcgtaagaacaaacaagccttcttggacgaacttggccagcatataagtcttgctccaatccacaaactggaggaggccctttacgagtatcagccgctgcaaatcgaaacgtatgggccacacgtgcctgaattggaaatgctcgggaggcttggctaccttaaccacgtccgggctgctagccctcaggacttggcaggcggatacacttcttctctggcttgccaccgggctctgcaagacgccttttcaggcctgttctggcaaccttcatag

SEQ ID NO: 70087 - protein, 678 aa, Artificial Sequence
  derived and/or modified sequence
MRTVVLTMKASVIEMFLVLLVTGVHSNKETAKKIKRPKFTVPQINCDVKAGKIIDPEFIVKCPAGCQDPKYHVYGTDVYASYSSVCGAAVHSGVLDNSGGKILVRKVAGQSGYKGSYSNGVQSLSLPRWRESFIVLESKPKKGVTYPSALTYSSSKSPAAQAGETTKAYQRPPIPGTTAQPVTLMQLLAVTVAVATPTTLPRPSPSAASTTSIPRPQSVGHRSQEMDLWSTATYTSSQNRPRADPGIQRQDPSGAAFQKPVGADVSLGLVPKEELSTQSLEPVSLGDPNCKIDLSFLIDGSTSIGKRRFRIQKQLLADVAQALDIGPAGPLMGVVQYGDNPATHFNLKTHTNSRDLKTAIEKITQRGGLSNVGRAISFVTKNFFSKANGNRSGAPNVVVVMVDGWPTDKVEEASRLARESGINIFFITIEGAAENEKQYVVEPNFANKAVCRTNGFYSLHVQSWFGLHKTLQPLVKRVCDTDRLACSKTCLNSADIGFVIDGSSSVGTGNFRTVLQFVTNLTKEFEISDTDTRIGAVQYTYEQRLEFGFDKYSSKPDILNAIKRVGYWSGGTSTGAAINFALEQLFKKSKPNKRKLMILITDGRSYDDVRIPAMAAHLKGVITYAIGVAWAAQEELEVIATHPARDHSFFVDEFDNLHQYVPRIIQNICTEFNSQPRN

SEQ ID NO: 70088 - DNA, 2037 bp, Artificial Sequence
  derived and/or modified sequence
atgcgaacggtggtgctgaccatgaaggcctcagtcatcgaaatgttcctggtgctgctggtcactggtgttcacagtaacaaggagacagccaagaagattaaacgccctaaatttactgtccctcagattaactgtgacgtcaaggccggaaagatcatcgaccccgagtttatcgtgaaatgccctgccggttgtcaagaccctaagtatcatgtgtacggcactgacgtgtatgcgtcctattcatctgtttgtggagcggctgttcattcaggggtattggacaattccggcggtaaaatactagtgcgaaaagtggctgggcagtcgggatacaagggctcctacagcaacggcgtgcagagtctgagcttgccacggtggcgggagtcattcatcgtccttgagtcgaaaccgaaaaaaggtgttacttacccatctgctctcacctattcatcatccaaatctcccgctgcccaggctggcgaaactaccaaagcttaccaacggcctcccatccccggtaccactgcacagcctgtcaccctgatgcagctccttgcagtgacagtcgccgtagctaccccgaccactttacctcgcccatcaccctccgccgcttctaccacaagcatccccaggccccagagcgtaggacaccgttcccaagaaatggatttgtggagcacggccacctataccagctcacagaaccggccaagagccgaccccggaatacagcggcaggatcctagcggagcagcctttcagaaacctgtgggggctgacgtgtctcttgggctcgtaccaaaagaagaattaagcacgcagagtctggagcctgtgtccttgggggatccaaattgcaagattgatctgagcttcctgatagacggctctacttccatcgggaagaggagatttcgcatccagaaacagctgctggctgatgtggcacaagccctggacatcggccctgcaggaccgcttatgggcgtggtgcagtacggagacaaccccgcaacacatttcaatctaaagacccacacaaatagcagagatctgaaaaccgcaatcgagaagatcacacaacgcggaggtctctccaatgttgggagggcaatttctttcgttaccaaaaatttcttcagtaaggccaatggcaatagatctggagcgcctaatgttgtggtggtgatggtcgacggatggcctactgacaaagtggaagaggcctcaaggttggcccgtgaatcaggcatcaatattttcttcattactattgaaggcgcagctgagaacgagaagcagtatgtcgtggagcctaattttgccaataaggcagtgtgccgaacaaacggcttctactccctgcacgtccagtcatggtttggactgcataaaaccctgcagccgttagtgaaaagggtatgtgacacagaccggctggcctgtagcaaaacgtgcctgaatagcgccgacataggctttgtgatagatggaagctctagcgtaggcacaggaaacttcaggacagtcttgcagttcgtgactaacttaactaaagagtttgagatctcagataccgacaccaggattggagctgttcagtacacatatgagcagaggcttgaattcggttttgataaatattctagcaagcccgatatcctgaatgctatcaaacgcgttgggtactggagtgggggaacctcgactggcgctgccatcaactttgcactagagcagctcttcaagaaatctaagcccaacaaacgcaagcttatgatcctaattacagacgggaggagctacgatgatgtgcggatccccgctatggccgctcacctgaaaggcgtgataacatacgcaatcggtgttgcctgggccgctcaggaagagttggaagttattgcaacacatcctgctcgtgatcatagcttttttgttgatgaattcgataatctgcaccagtatgtgccgagaattattcaaaatatctgcacagaatttaacagccagccccgaaattag

SEQ ID NO: 70089 - DNA, 2037 bp, Artificial Sequence
  derived and/or modified sequence
atgcgtactgtcgtgcttactatgaaggctagtgtcattgaaatgtttctggtactgcttgtgacaggagtccactccaacaaagagactgctaaaaagattaagcgccctaaatttacggtgccccagatcaactgtgatgtgaaagcaggaaagatcatagaccccgaattcattgtgaagtgccccgccggatgccaggatccaaaatatcacgtctatggtaccgacgtttacgcctcgtacagttcagtctgtggggccgctgtccacagcggggtactggataatagtggtggcaagatcctagtgaggaaagtagctggccagtcaggttataaaggatcctactcgaacggcgtgcagtcactcagcctcccgcgctggagagagtctttcatcgtattagaatcaaaaccaaaaaagggcgtcacctacccaagtgccctgacctattcttcgagcaagagtcctgccgcccaggctggggagactactaaagcctaccagcgaccaccaatacctggaaccacagcccagccggtgactttaatgcagctgctggctgtcaccgttgctgtcgcaaccccaactaccctgcctcgcccgtctccatctgctgcatctacaacctcaatccccaggcctcagagcgttggccacaggtcccaagagatggatctctggtctactgctacatatacgagttcacagaatcgaccccgggccgacccaggcatccagaggcaagacccttccggagcggcattccagaagccagttggtgccgatgtttctcttggactggtgccaaaggaagaactgagcacccagagcctggagcctgtctccttgggagaccctaactgtaagattgaccttagttttctcatcgacggatccacctcgattggcaagcgacgtttccggatccaaaagcagctgctcgccgatgtcgcacaggccttagacatcggacccgcaggccccctgatgggagttgtgcaatacggtgataaccctgccactcatttcaacttaaaaacccacactaatagccgtgatctgaaaacagccatcgagaagatcactcagaggggcggccttagcaacgtgggaagggccatctccttcgttacaaagaactttttttccaaagccaacggcaacaggtctggagcaccaaacgtggtcgtcgtcatggtagatggatggcctaccgataaagtagaggaagctagtcgattggcacgcgagtccggaatcaatatcttctttataaccatcgaaggcgcggcagaaaatgaaaagcaatacgttgtcgaaccaaacttcgctaacaaagccgtctgcagaactaatggcttctattcgttacacgttcagtcctggttcggcctacacaagacgctgcagccgttggtgaaacgcgtgtgtgacactgacagactcgcttgtagcaaaacgtgccttaatagcgcagacattggcttcgtaattgatggcagtagcagcgtagggaccgggaatttcagaactgtcctacagtttgtgactaatctgacaaaggaatttgaaatttcggataccgatacccggattggcgctgtgcagtacacttacgagcaaaggcttgaatttggcttcgataagtactccagcaagccggacattctgaacgctattaaacgcgtcggatactggtcaggggggacctccactggcgctgcaatcaactttgcactggaacaactattcaagaaatcaaaacctaacaagcggaaactaatgattctgattaccgacggccgatcatacgacgatgttagaattccggctatggccgcacacttaaagggggtgatcacttatgccataggcgtggcttgggccgcccaagaagagcttgaagtgatcgcaactcatcctgcccgcgatcacagctttttcgtagacgagttcgacaacctgcaccagtacgtccccaggatcattcagaacatctgcactgaattcaatagccaacccagaaactag

SEQ ID NO: 70090 - DNA, 2037 bp, Artificial Sequence
  derived and/or modified sequence
atgagaacagtagtactgaccatgaaagcctccgttatcgagatgttcctggttttgctcgtgaccggtgtgcacagtaacaaggagaccgcaaaaaaaatcaaaaggcctaagttcaccgttccacagataaattgtgatgttaaggccggcaaaatcattgaccccgaatttatcgttaagtgtccagcagggtgtcaggacccaaagtaccacgtctatggaaccgatgtttatgcttcttacagtagcgtatgcggcgccgccgtgcactcaggtgtgctagataattccgggggcaagattcttgtgcgcaaagtggctggccagagtggatataaagggtcttacagcaatggagttcagagcctctccctccctagatggcgagaatcctttattgttttagagtcaaaacccaaaaagggcgtgacgtaccccagcgctttaacatattcaagttcaaagagtcctgcagctcaggcaggtgaaacaaccaaggcatatcaaaggccgccgatacccggaacaaccgctcagccagtgactctaatgcaacttttggcagttaccgtcgccgtcgccacgcctaccaccctcccccggccctcccccagtgccgcatccacaacttctattccccgtccacagtccgtcggtcatcgctcacaagaaatggatctgtggtccaccgctacttacacatcaagccagaaccgcccaagagcagacccaggaattcagagacaggatccttctggagcagcttttcaaaaacctgtgggagcagatgtgtcgctcgggttagtgcccaaagaagaactttccacccaatccctggaacccgtctctctcggggatcctaattgcaagatcgatctgagtttcctgattgacggctcgacctccataggcaagagacgcttccgaatccagaaacagcttctcgctgatgtcgcacaagccttggatatcggacctgccggccctctgatgggagtggtccaatacggggacaatcccgccacccactttaacctcaagacccatactaactcaagggatctcaaaacagcaatcgagaagattacccagcggggcgggctctctaacgtcggtcgagcaatctcattcgtcacaaaaaattttttctccaaagctaacggtaacagatctggtgctcccaacgtagtggttgtgatggtggacggttggcctacagacaaggtcgaagaagcctcccgactagcgagagaatctgggatcaatatcttcttcatcaccatcgaaggagctgctgagaatgaaaagcagtacgtggttgagcctaactttgcgaataaagccgtgtgccgtacaaatgggttctacagtctgcacgtgcagagctggttcgggctacataaaacactacaaccactggtaaaacgcgtttgcgacaccgatagacttgcatgttccaaaacatgtttaaactcagccgacattggatttgtcatcgatggctctagctccgttggtaccggcaacttcaggaccgtgcttcaattcgtgacaaatctgacaaaggagttcgagatatcagacaccgatactaggataggggccgtgcagtatacttacgagcagcgactagaattcggatttgataagtatagtagcaaaccagatattcttaatgccatcaaacgagtgggatattggagcggcggaacatccaccggtgcagccatcaactttgctctagaacagctctttaaaaaatctaaacctaataagcggaaattaatgatcttaattaccgacgggaggagctacgacgatgtccgcatacctgcaatggccgcgcatctaaagggcgtgatcacctatgctattggggttgcttgggccgcacaagaagaattggaagttatagccacccatcctgccagagatcattccttcttcgtagacgaattcgataatctacaccagtatgttcccagaattatccagaatatatgcaccgagtttaacagccagcctcgtaactag

SEQ ID NO: 70091 - DNA, 2650 bp, Artificial Sequence
  derived and/or modified sequence
gttcgattagctcctctgagaagaagagaaaaggttcttggacctctccctgtttcttccttagaataatttggatgggatttgtgatgcaggaaagcctaagggaaaaagaatattcattctgtgtggtgaaaattttttgaaaaaaaaattgccttcttcaaacaagggtgtcattctgatatttatgaggactgttgttctcactatgaaggcatctgttattgaaatgttccttgttttgctggtgactggagtacattcaaacaaagaaacggcaaagaagattaaaaggcccaagttcactgtgcctcagatcaactgcgatgtcaaagccggaaagatcatcgatcctgagttcattgtgaaatgtccagcaggatgccaagaccccaaataccatgtttatggcactgacgtgtatgcatcctactccagtgtgtgtggcgctgccgtacacagtggtgtgcttgataattcaggagggaaaatacttgttcggaaggttgctggacagtctggttacaaagggagttattccaacggtgtccaatcgttatccctaccacgatggagagaatcctttatcgtcttagaaagtaaacccaaaaagggtgtaacctacccatcagctcttacatactcatcatcgaaaagtccagctgcccaagcaggtgagaccacaaaagcctatcagaggccacctattccagggacaactgcacagccggtcactctgatgcagcttctggctgtcactgtagctgtggccacccccaccaccttgccaaggccatccccttctgctgcttctaccaccagcatccccagaccacaatcagtgggccacaggagccaggagatggatctctggtccactgccacctacacaagcagccaaaacaggcccagagctgatccaggtatccaaaggcaagatccttcaggagctgccttccagaaacctgttggagcggatgtcagcctgggacttgttccaaaagaagaattgagcacacagtctttggagccagtatccctgggagatccaaactgcaaaattgacttgtcgtttttaattgatgggagcaccagcattggcaaacggcgattccgaatccagaagcagctcctggctgatgttgcccaagctcttgacattggccctgccggtccactgatgggtgttgtccagtatggagacaaccctgctactcactttaacctcaagacacacacgaattctcgagatctgaagacagccatagagaaaattactcagagaggaggactttctaatgtaggtcgggccatctcctttgtgaccaagaacttcttttccaaagccaatggaaacagaagcggggctcccaatgtggtggtggtgatggtggatggctggcccacggacaaagtggaggaggcttcaagacttgcgagagagtcaggaatcaacattttcttcatcaccattgaaggtgctgctgaaaatgagaagcagtatgtggtggagcccaactttgcaaacaaggccgtgtgcagaacaaacggcttctactcgctccacgtgcagagctggtttggcctccacaagaccctgcagcctctggtgaagcgggtctgcgacactgaccgcctggcctgcagcaagacctgcttgaactcggctgacattggcttcgtcatcgacggctccagcagtgtggggacgggcaacttccgcaccgtcctccagtttgtgaccaacctcaccaaagagtttgagatttccgacacggacacgcgcatcggggccgtgcagtacacctacgaacagcggctggagtttgggttcgacaagtacagcagcaagcctgacatcctcaacgccatcaagagggtgggctactggagtggtggcaccagcacgggggctgccatcaacttcgccctggagcagctcttcaagaagtccaagcccaacaagaggaagttaatgatcctcatcaccgacgggaggtcctacgacgacgtccggatcccagccatggctgcccatctgaagggagtgatcacctatgcgataggcgttgcctgggctgcccaagaggagctagaagtcattgccactcaccccgccagagaccactccttctttgtggacgagtttgacaacctccatcagtatgtccccaggatcatccagaacatttgtacagagttcaactcacagcctcggaactgaattcagagcaggcagagcaccagcaagtgctgctttactaactgacgtgttggaccaccccaccgcttaatggggcacgcacggtgcatcaagtcttgggcagggcatggagaaacaaatgtcttgttattattctttgccatcatgctttttcatattccaaaacttggagttacaaagatgatcacaaacgtatagaatgagccaaaaggctacatcatgttgagggtgctggagattttacattttgacaattgttttcaaaataaatgttcggaatacagtgcagcccttacgacaggcttacgtagagcttttgtgagatttttaagttgttatttctgattagaactctgtaaccctcagcaagtttcatttttgtcatgacaatgtaggaattgctgaattaaatgtttagaaggatga

SEQ ID NO: 70092 - DNA, 2037 bp, Artificial Sequence
  derived and/or modified sequence
atgagaaccgtggtgctgaccatgaaggccagcgtgatcgagatgttcctggtgctgctggtgaccggcgtgcacagcaacaaggagaccgccaagaagatcaagagacccaagttcaccgtgccccagatcaactgcgacgtgaaggccggcaagatcatcgaccccgagttcatcgtgaagtgccccgccggctgccaggaccccaagtaccacgtgtacggcaccgacgtgtacgccagctacagcagcgtgtgcggcgccgccgtgcacagcggcgtgctggacaacagcggcggcaagatcctggtgagaaaggtggccggccagagcggctacaagggcagctacagcaacggcgtgcagagcctgagcctgcccagatggagagagagcttcatcgtgctggagagcaagcccaagaagggcgtgacctaccccagcgccctgacctacagcagcagcaagagccccgccgcccaggccggcgagaccaccaaggcctaccagagaccccccatccccggcaccaccgcccagcccgtgaccctgatgcagctgctggccgtgaccgtggccgtggccacccccaccaccctgcccagacccagccccagcgccgccagcaccaccagcatccccagaccccagagcgtgggccacagaagccaggagatggacctgtggagcaccgccacctacaccagcagccagaacagacccagagccgaccccggcatccagagacaggaccccagcggcgccgccttccagaagcccgtgggcgccgacgtgagcctgggcctggtgcccaaggaggagctgagcacccagagcctggagcccgtgagcctgggcgaccccaactgcaagatcgacctgagcttcctgatcgacggcagcaccagcatcggcaagagaagattcagaatccagaagcagctgctggccgacgtggcccaggccctggacatcggccccgccggccccctgatgggcgtggtgcagtacggcgacaaccccgccacccacttcaacctgaagacccacaccaacagcagagacctgaagaccgccatcgagaagatcacccagagaggcggcctgagcaacgtgggcagagccatcagcttcgtgaccaagaacttcttcagcaaggccaacggcaacagaagcggcgcccccaacgtggtggtggtgatggtggacggctggcccaccgacaaggtggaggaggccagcagactggccagagagagcggcatcaacatcttcttcatcaccatcgagggcgccgccgagaacgagaagcagtacgtggtggagcccaacttcgccaacaaggccgtgtgcagaaccaacggcttctacagcctgcacgtgcagagctggttcggcctgcacaagaccctgcagcccctggtgaagagagtgtgcgacaccgacagactggcctgcagcaagacctgcctgaacagcgccgacatcggcttcgtgatcgacggcagcagcagcgtgggcaccggcaacttcagaaccgtgctgcagttcgtgaccaacctgaccaaggagttcgagatcagcgacaccgacaccagaatcggcgccgtgcagtacacctacgagcagagactggagttcggcttcgacaagtacagcagcaagcccgacatcctgaacgccatcaagagagtgggctactggagcggcggcaccagcaccggcgccgccatcaacttcgccctggagcagctgttcaagaagagcaagcccaacaagagaaagctgatgatcctgatcaccgacggcagaagctacgacgacgtgagaatccccgccatggccgcccacctgaagggcgtgatcacctacgccatcggcgtggcctgggccgcccaggaggagctggaggtgatcgccacccaccccgccagagaccacagcttcttcgtggacgagttcgacaacctgcaccagtacgtgcccagaatcatccagaacatctgcaccgagttcaacagccagcccagaaactag

SEQ ID NO: 70093 - DNA, 2037 bp, Artificial Sequence
  derived and/or modified sequence
atgcgtacagtggtcctaacaatgaaagctagtgtgatcgagatgttcctggtgctgctcgtgaccggggtccactctaataaggaaaccgctaaaaaaattaaacgccccaaattcactgtgccacagataaattgtgatgtaaaagcgggtaagataatcgatcccgaatttatcgtcaagtgtcccgcagggtgtcaggacccgaagtatcatgtttacggcaccgacgtgtacgccagctactctagcgtatgtggtgccgccgtgcacagcggggtcctcgacaacagcggtgggaagatccttgtcaggaaagtggctgggcagtccggatacaaaggctcttactctaatggtgtccagtccttatccttacctaggtggagggagtcatttattgtgttagagagcaagccgaagaagggcgtgacttatccatccgcactgacctattccagcagcaaaagccccgcagcccaggccggggaaacaacaaaggcctaccagagaccacctatacccgggacaacggctcagcccgtcacactgatgcagctgcttgcagttacggtggccgttgcaactcctaccacgctaccacgccccagcccgtcggcagcctcaaccacctctattccgcgtccccagtcagtgggacaccgatcccaggaaatggatttgtggagcaccgcaacctatacgtcatcccaaaaccgccccagggccgaccccggaattcagagacaggacccatccggagccgcctttcagaagccggtgggagccgacgtttcccttggactggtccccaaagaggagctgtccacccagtcattggaacctgtgagtttgggggatccgaactgtaagattgacctgtcgttcttaatcgatggttccacctcgattggaaaaagaaggttccgaattcagaaacaactgctggctgacgtggcccaggccttggacattggcccagccggacccctgatgggtgtcgtgcagtatggggacaatcccgcaactcacttcaatctaaagacccacactaactccagagacctgaagaccgcaatcgagaagattacccaacgtggcgggctgtcaaacgtcggacgggccattagcttcgtcacaaaaaactttttcagtaaggcgaacggaaatagatccggtgcccctaacgtggtagtcgtgatggtagatgggtggccaacagacaaggtcgaggaggcgagtagattggcacgcgagagtggcattaatatcttttttattacgatcgagggggctgcggaaaacgaaaaacaatacgtcgtggagcctaacttcgccaataaagccgtgtgtaggacaaacggattctactccctgcacgtgcaatcctggtttgggctgcacaagacccttcagccactcgtgaagagagtctgcgacaccgatagactcgcttgcagtaagacttgcctcaattctgccgatatcgggtttgttatcgatggaagctcttcagtagggacgggtaactttaggacagtgctgcagttcgtgaccaacctgacgaaagagtttgaaatcagcgatactgacaccaggatcggagctgttcagtatacgtatgagcaacggctagagttcggcttcgacaagtactccagtaagcctgatatcctaaatgcgattaagagagtgggctactggtcaggaggcacgtccaccggggcagccataaatttcgcactggaacagctctttaaaaaatctaaaccaaataagaggaagttgatgattctgatcactgatgggcgctcatacgatgacgtcagaatcccggccatggctgcccacctgaagggggtaataacctacgcaatcggggtggcctgggccgcccaggaggaattagaagtgatcgccacccacccagcccgagaccatagttttttcgtggacgagtttgacaatctacaccagtacgtgcctagaataatacaaaatatctgcaccgaatttaatagccagccacggaattag

SEQ ID NO: 70094 - DNA, 2037 bp, Artificial Sequence
  derived and/or modified sequence
atgaggacagtggtgctgaccatgaaggcctctgtgattgagatgttcctggtgctgctggtgactggagtgcacagcaacaaggagacagccaagaagatcaagaggcccaagttcaccgtgccccagatcaactgtgatgtgaaggccggcaagatcatcgaccctgagttcatcgtgaagtgcccagctggctgccaggaccccaagtaccacgtgtatggaacagatgtgtatgccagctacagctctgtgtgtggggctgctgtgcacagcggcgtgctggacaacagcggcggcaagatcctggtgaggaaggtggccggccagagcggctacaagggcagctacagcaatggagtgcagagcctgagcctgccccgctggagggagagcttcatcgtgctggagagcaagcccaagaagggcgtgacctaccccagcgccctgacctacagcagcagcaagagccctgctgcccaggccggggagaccaccaaggcctaccagaggcctcccatccctggcaccacagcccagcctgtgaccctgatgcagctgctggccgtgacagtggccgtggccacccccaccaccctgccccggcccagccccagcgctgccagcaccaccagcatcccccggccccagagcgtgggccacaggagccaggagatggacctgtggagcacagccacctacaccagcagccagaaccggcccagggctgaccccggcatccagaggcaggaccccagcggggccgccttccagaagcctgtgggcgcagatgtgtccctgggcctggtgcccaaggaggagctgagcacccagagcctggagcctgtgtccctgggggaccccaactgcaagattgacctgtccttcctgattgatggcagcaccagcatcggcaagaggcgcttccgcatccagaagcagctgctggctgatgtggcccaggccctggacatcggccctgctggccccctgatgggcgtggtgcagtatggagacaacccagccacccacttcaacctgaagacccacaccaacagccgggacctgaagacagccatcgagaagatcacccagagaggaggcctgagcaatgtgggccgggccatcagctttgtgaccaagaacttcttcagcaaggccaacggcaacagaagtggggcccccaacgtggtggtggtgatggtggatggctggcccacagacaaggtggaggaggccagccggctggcccgggagagcggcatcaacatcttcttcatcaccattgaaggagctgctgaaaatgagaagcagtatgtggtggagcccaactttgccaacaaggctgtgtgcaggaccaacggcttctacagcctgcacgtgcagagctggtttggcctgcacaagaccctgcagcccctggtgaagagggtgtgtgacacagaccggctggcctgcagcaagacctgcctgaacagcgctgacatcggctttgtgattgatggcagcagctctgtgggcaccggcaacttcagaacagtgctgcagtttgtgaccaacctgaccaaggagtttgagatcagtgacacagacacccgcatcggggctgtgcagtacacctatgagcagaggctggagtttggatttgacaagtacagcagcaagccagacatcctgaatgccatcaagagggtgggctactggagcggcggcaccagcactggagctgccatcaactttgccctggagcagctgttcaagaagagcaagcccaacaagaggaagctgatgatcctgatcacagatggccgctcctatgatgatgtgcgcatcccagccatggccgcccacctgaagggcgtcatcacctacgccatcggcgtggcctgggccgcccaggaggagctggaggtgattgccacccacccagcccgggaccacagcttctttgtggatgaatttgacaacctgcaccagtatgtgccccgcatcatccagaacatctgcacagagttcaacagccagcccagaaattag

SEQ ID NO: 70095 - DNA, 2037 bp, Artificial Sequence
  derived and/or modified sequence
atgcggaccgtggtgctgaccatgaaggccagcgtgatcgagatgttcttggtgctgcttgtgacaggtgttcattctaacaaggagacggccaaaaaaatcaagagaccgaagtttaccgtgcctcagatcaactgcgatgtcaaagctggaaagatcattgatcctgaatttattgtgaaatgtccggcaggctgccaggaccccaaataccacgtgtatggtacagacgtgtacgcgtcttattcctctgtgtgcggagccgctgttcattctggcgtgctagacaactctggtgggaagattctggttcggaaggttgccggacagtccggatacaaagggagctattctaatggtgttcagtccttgtccctgccccgttggcgagagtctttcatcgtccttgaatcgaaaccaaaaaagggcgtcacctacccttctgcccttacctactctagcagtaagtctcccgccgcccaagctggagaaaccacaaaggcataccagcgccccccgattcccgggaccaccgcgcagcctgtcaccctcatgcagcttctcgcagtgaccgtggccgtggccacccccaccaccctgccacggccgtccccatctgccgcctccactacatccatcccgcgacctcaatcagtgggtcatcgatcacaggaaatggatctgtggtcaacagctacctacacctcatctcagaaccgccctagggcagatcctgggatccaaaggcaagacccttcaggcgccgcatttcagaaacccgtgggtgccgatgtgtcactggggctggtgcctaaagaggagctcagtacacagtccctggaacctgtcagcctcggcgatcccaattgtaagattgacctctcattcctgatcgatggcagcaccagcattgggaaaaggcgattccgcattcagaagcagctgctcgctgacgtggcacaggcgttggacataggccccgcagggccactgatgggggtggtgcagtacggagacaacccggcgactcactttaaccttaagacccacaccaactcccgggatttgaagacagctatcgagaagatcacccagagggggggactttctaatgtgggccgtgccatttcgtttgtcactaagaatttcttttccaaggctaatgggaataggagcggcgctcccaatgtcgtcgtagtgatggtggatggttggcctacagacaaagtagaagaagcatctcggctggcccgagagtctggaattaacatttttttcatcacaatcgagggtgcagctgaaaatgagaagcagtatgtcgtggagcccaatttcgctaataaagccgtgtgcagaacgaacggtttctactctctgcacgtgcagtcttggttcggactgcacaagacactgcagccactggtaaaaagggtatgtgataccgatcggctagcttgttcaaagacttgtctcaattccgccgacatcggtttcgtgatcgacggatcttcgtctgtgggaacaggcaactttagaacagtgctgcagttcgtgaccaacctgaccaaggagtttgagattagcgacacagacacacgaatcggagcggttcaatatacgtacgaacagcggttggagttcggtttcgacaagtactcaagcaagcccgatattctaaatgccattaaacgcgtgggatattggagcggcggcactagtaccggcgctgctataaatttcgccttggagcagctgttcaaaaagtctaagcctaataaacggaaactgatgatcttgatcactgatggcaggagctacgatgatgtgagaattccagccatggccgcacacctcaaaggggtcatcacgtatgctataggtgtggcctgggccgcacaagaggagctagaagtaatcgcaacccatcctgctcgagatcatagcttcttcgttgatgagtttgataatctgcaccagtacgtgcctcgcattatacagaacatctgcaccgagtttaattcacagcccaggaattag

SEQ ID NO: 70096 - DNA, 2770 bp, Artificial Sequence
  derived and/or modified sequence
aattcagcactaaaaccagtgtgagaagcagtatgtgtgagcatgtgtgtgtgtgtatgtgtgtgggggggggtgtaaaatgtgtttttcaaagtactgagaggttgatgggactgttcgattagctcctctgagaagaagagaaaaggttcttggacctctccctgtttcttccttagaataatttggatgggatttgtgatgcaggaaagcctaagggaaaaagaatattcattctgtgtggtgaaaattttttgaaaaaaaaattgccttcttcaaacaagggtgtcattctgatatttatgaggactgttgttctcactatgaaggcatctgttattgaaatgttccttgttttgctggtgactggagtacattcaaacaaagaaacggcaaagaagattaaaaggcccaagttcactgtgcctcagatcaactgcgatgtcaaagccggaaagatcatcgatcctgagttcattgtgaaatgtccagcaggatgccaagaccccaaataccatgtttatggcactgacgtgtatgcatcctactccagtgtgtgtggcgctgccgtacacagtggtgtgcttgataattcaggagggaaaatacttgttcggaaggttgctggacagtctggttacaaagggagttattccaacggtgtccaatcgttatccctaccacgatggagagaatcctttatcgtcttagaaagtaaacccaaaaagggtgtaacctacccatcagctcttacatactcatcatcgaaaagtccagctgcccaagcaggtgagaccacaaaagcctatcagaggccacctattccagggacaactgcacagccggtcactctgatgcagcttctggctgtcactgtagctgtggccacccccaccaccttgccaaggccatccccttctgctgcttctaccaccagcatccccagaccacaatcagtgggccacaggagccaggagatggatctctggtccactgccacctacacaagcagccaaaacaggcccagagctgatccaggtatccaaaggcaagatccttcaggagctgccttccagaaacctgttggagcggatgtcagcctgggacttgttccaaaagaagaattgagcacacagtctttggagccagtatccctgggagatccaaactgcaaaattgacttgtcgtttttaattgatgggagcaccagcattggcaaacggcgattccgaatccagaagcagctcctggctgatgttgcccaagctcttgacattggccctgccggtccactgatgggtgttgtccagtatggagacaaccctgctactcactttaacctcaagacacacacgaattctcgagatctgaagacagccatagagaaaattactcagagaggaggactttctaatgtaggtcgggccatctcctttgtgaccaagaacttcttttccaaagccaatggaaacagaagcggggctcccaatgtggtggtggtgatggtggatggctggcccacggacaaagtggaggaggcttcaagacttgcgagagagtcaggaatcaacattttcttcatcaccattgaaggtgctgctgaaaatgagaagcagtatgtggtggagcccaactttgcaaacaaggccgtgtgcagaacaaacggcttctactcgctccacgtgcagagctggtttggcctccacaagaccctgcagcctctggtgaagcgggtctgcgacactgaccgcctggcctgcagcaagacctgcttgaactcggctgacattggcttcgtcatcgacggctccagcagtgtggggacgggcaacttccgcaccgtcctccagtttgtgaccaacctcaccaaagagtttgagatttccgacacggacacgcgcatcggggccgtgcagtacacctacgaacagcggctggagtttgggttcgacaagtacagcagcaagcctgacatcctcaacgccatcaagagggtgggctactggagtggtggcaccagcacgggggctgccatcaacttcgccctggagcagctcttcaagaagtccaagcccaacaagaggaagttaatgatcctcatcaccgacgggaggtcctacgacgacgtccggatcccagccatggctgcccatctgaagggagtgatcacctatgcgataggcgttgcctgggctgcccaagaggagctagaagtcattgccactcaccccgccagagaccactccttctttgtggacgagtttgacaacctccatcagtatgtccccaggatcatccagaacatttgtacagagttcaactcacagcctcggaactgaattcagagcaggcagagcaccagcaagtgctgctttactaactgacgtgttggaccaccccaccgcttaatggggcacgcacggtgcatcaagtcttgggcagggcatggagaaacaaatgtcttgttattattctttgccatcatgctttttcatattccaaaacttggagttacaaagatgatcacaaacgtatagaatgagccaaaaggctacatcatgttgagggtgctggagattttacattttgacaattgttttcaaaataaatgttcggaatacagtgcagcccttacgacaggcttacgtagagcttttgtgagatttttaagttgttatttctgattagaactctgtaaccctcagcaagtttcatttttgtcatgacaatgtaggaattgctgaattaaatgtttagaaggatgacatgc

SEQ ID NO: 70097 - RNA, 2037 nt, Artificial Sequence
  derived and/or modified sequence
augcguacugucgugcuuacuaugaaggcuagugucauugaaauguuucugguacugcuugugacaggaguccacuccaacaaagagacugcuaaaaagauuaagcgcccuaaauuuacggugccccagaucaacugugaugugaaagcaggaaagaucauagaccccgaauucauugugaagugccccgccggaugccaggauccaaaauaucacgucuaugguaccgacguuuacgccucguacaguucagucuguggggccgcuguccacagcgggguacuggauaauagugguggcaagauccuagugaggaaaguagcuggccagucagguuauaaaggauccuacucgaacggcgugcagucacucagccucccgcgcuggagagagucuuucaucguauuagaaucaaaaccaaaaaagggcgucaccuacccaagugcccugaccuauucuucgagcaagaguccugccgcccaggcuggggagacuacuaaagccuaccagcgaccaccaauaccuggaaccacagcccagccggugacuuuaaugcagcugcuggcugucaccguugcugucgcaaccccaacuacccugccucgcccgucuccaucugcugcaucuacaaccucaauccccaggccucagagcguuggccacaggucccaagagauggaucucuggucuacugcuacauauacgaguucacagaaucgaccccgggccgacccaggcauccagaggcaagacccuuccggagcggcauuccagaagccaguuggugccgauguuucucuuggacuggugccaaaggaagaacugagcacccagagccuggagccugucuccuugggagacccuaacuguaagauugaccuuaguuuucucaucgacggauccaccucgauuggcaagcgacguuuccggauccaaaagcagcugcucgccgaugucgcacaggccuuagacaucggacccgcaggcccccugaugggaguugugcaauacggugauaacccugccacucauuucaacuuaaaaacccacacuaauagccgugaucugaaaacagccaucgagaagaucacucagaggggcggccuuagcaacgugggaagggccaucuccuucguuacaaagaacuuuuuuuccaaagccaacggcaacaggucuggagcaccaaacguggucgucgucaugguagauggauggccuaccgauaaaguagaggaagcuagucgauuggcacgcgaguccggaaucaauaucuucuuuauaaccaucgaaggcgcggcagaaaaugaaaagcaauacguugucgaaccaaacuucgcuaacaaagccgucugcagaacuaauggcuucuauucguuacacguucaguccugguucggccuacacaagacgcugcagccguuggugaaacgcgugugugacacugacagacucgcuuguagcaaaacgugccuuaauagcgcagacauuggcuucguaauugauggcaguagcagcguagggaccgggaauuucagaacuguccuacaguuugugacuaaucugacaaaggaauuugaaauuucggauaccgauacccggauuggcgcugugcaguacacuuacgagcaaaggcuugaauuuggcuucgauaaguacuccagcaagccggacauucugaacgcuauuaaacgcgucggauacuggucaggggggaccuccacuggcgcugcaaucaacuuugcacuggaacaacuauucaagaaaucaaaaccuaacaagcggaaacuaaugauucugauuaccgacggccgaucauacgacgauguuagaauuccggcuauggccgcacacuuaaagggggugaucacuuaugccauaggcguggcuugggccgcccaagaagagcuugaagugaucgcaacucauccugcccgcgaucacagcuuuuucguagacgaguucgacaaccugcaccaguacguccccaggaucauucagaacaucugcacugaauucaauagccaacccagaaacuag

SEQ ID NO: 70098 - RNA, 2037 nt, Artificial Sequence
  derived and/or modified sequence
augagaacaguaguacugaccaugaaagccuccguuaucgagauguuccugguuuugcucgugaccggugugcacaguaacaaggagaccgcaaaaaaaaucaaaaggccuaaguucaccguuccacagauaaauugugauguuaaggccggcaaaaucauugaccccgaauuuaucguuaaguguccagcagggugucaggacccaaaguaccacgucuauggaaccgauguuuaugcuucuuacaguagcguaugcggcgccgccgugcacucaggugugcuagauaauuccgggggcaagauucuugugcgcaaaguggcuggccagaguggauauaaagggucuuacagcaauggaguucagagccucucccucccuagauggcgagaauccuuuauuguuuuagagucaaaacccaaaaagggcgugacguaccccagcgcuuuaacauauucaaguucaaagaguccugcagcucaggcaggugaaacaaccaaggcauaucaaaggccgccgauacccggaacaaccgcucagccagugacucuaaugcaacuuuuggcaguuaccgucgccgucgccacgccuaccacccucccccggcccucccccagugccgcauccacaacuucuauuccccguccacaguccgucggucaucgcucacaagaaauggaucugugguccaccgcuacuuacacaucaagccagaaccgcccaagagcagacccaggaauucagagacaggauccuucuggagcagcuuuucaaaaaccugugggagcagaugugucgcucggguuagugcccaaagaagaacuuuccacccaaucccuggaacccgucucucucggggauccuaauugcaagaucgaucugaguuuccugauugacggcucgaccuccauaggcaagagacgcuuccgaauccagaaacagcuucucgcugaugucgcacaagccuuggauaucggaccugccggcccucugaugggagugguccaauacggggacaaucccgccacccacuuuaaccucaagacccauacuaacucaagggaucucaaaacagcaaucgagaagauuacccagcggggcgggcucucuaacgucggucgagcaaucucauucgucacaaaaaauuuuuucuccaaagcuaacgguaacagaucuggugcucccaacguagugguugugaugguggacgguuggccuacagacaaggucgaagaagccucccgacuagcgagagaaucugggaucaauaucuucuucaucaccaucgaaggagcugcugagaaugaaaagcaguacgugguugagccuaacuuugcgaauaaagccgugugccguacaaauggguucuacagucugcacgugcagagcugguucgggcuacauaaaacacuacaaccacugguaaaacgcguuugcgacaccgauagacuugcauguuccaaaacauguuuaaacucagccgacauuggauuugucaucgauggcucuagcuccguugguaccggcaacuucaggaccgugcuucaauucgugacaaaucugacaaaggaguucgagauaucagacaccgauacuaggauaggggccgugcaguauacuuacgagcagcgacuagaauucggauuugauaaguauaguagcaaaccagauauucuuaaugccaucaaacgagugggauauuggagcggcggaacauccaccggugcagccaucaacuuugcucuagaacagcucuuuaaaaaaucuaaaccuaauaagcggaaauuaaugaucuuaauuaccgacgggaggagcuacgacgauguccgcauaccugcaauggccgcgcaucuaaagggcgugaucaccuaugcuauugggguugcuugggccgcacaagaagaauuggaaguuauagccacccauccugccagagaucauuccuucuucguagacgaauucgauaaucuacaccaguauguucccagaauuauccagaauauaugcaccgaguuuaacagccagccucguaacuag

SEQ ID NO: 70099 - protein, 657 aa, Artificial Sequence
  derived and/or modified sequence
MRTVVLTMKASVIEMFLVLLVTGVHSNKETAKKIKRPKFTVPQINCDVKAGKIIDPEFIVKCPAGCQDPKYHVYGTDVYASYSSVCGAAVHSGVLDNSGGKILVRKVAGQSGYKGSYSNGVQSLSLPRWRESFIVLESKPKKGVTYPSALTYSSSKSPAAQAGETTKAYQRPPIPGTTAQPVTLMQLLAVTVAVATPTTLPRPSPSAASTTSIPRPQSVGHRSQEMDLWSTATYTSSQNRPRADPGIQRQDPSGAAFQKPVGADVSLDCKIDLSFLIDGSTSIGKRRFRIQKQLLADVAQALDIGPAGPLMGVVQYGDNPATHFNLKTHTNSRDLKTAIEKITQRGGLSNVGRAISFVTKNFFSKANGNRSGAPNVVVVMVDGWPTDKVEEASRLARESGINIFFITIEGAAENEKQYVVEPNFANKAVCRTNGFYSLHVQSWFGLHKTLQPLVKRVCDTDRLACSKTCLNSADIGFVIDGSSSVGTGNFRTVLQFVTNLTKEFEISDTDTRIGAVQYTYEQRLEFGFDKYSSKPDILNAIKRVGYWSGGTSTGAAINFALEQLFKKSKPNKRKLMILITDGRSYDDVRIPAMAAHLKGVITYAIGVAWAAQEELEVIATHPARDHSFFVDEFDNLHQYVPRIIQNICTEFNSQPRN

SEQ ID NO: 70100 - DNA, 2161 bp, Artificial Sequence
  derived and/or modified sequence
ggatgggatttgtgatgcaggaaagcctaagggaaaaagaatattcattctgtgtggtgaaaattttttgaaaaaaaaattgccttcttcaaacaagggtgtcattctgatatttatgaggactgttgttctcactatgaaggcatctgttattgaaatgttccttgttttgctggtgactggagtacattcaaacaaagaaacggcaaagaagattaaaaggcccaagttcactgtgcctcagatcaactgcgatgtcaaagccggaaagatcatcgatcctgagttcattgtgaaatgtccagcaggatgccaagaccccaaataccatgtttatggcactgacgtgtatgcatcctactccagtgtgtgtggcgctgccgtacacagtggtgtgcttgataattcaggagggaaaatacttgttcggaaggttgctggacagtctggttacaaagggagttattccaacggtgtccaatcgttatccctaccacgatggagagaatcctttatcgtcttagaaagtaaacccaaaaagggtgtaacctacccatcagctcttacatactcatcatcgaaaagtccagctgcccaagcaggtgagaccacaaaagcctatcagaggccacctattccagggacaactgcacagccggtcactctgatgcagcttctggctgtcactgtagctgtggccacccccaccaccttgccaaggccatccccttctgctgcttctaccaccagcatccccagaccacaatcagtgggccacaggagccaggagatggatctctggtccactgccacctacacaagcagccaaaacaggcccagagctgatccaggtatccaaaggcaagatccttcaggagctgccttccagaaacctgttggagcggatgtcagcctggactgcaaaattgacttgtcgtttttaattgatgggagcaccagcattggcaaacggcgattccgaatccagaagcagctcctggctgatgttgcccaagctcttgacattggccctgccggtccactgatgggtgttgtccagtatggagacaaccctgctactcactttaacctcaagacacacacgaattctcgagatctgaagacagccatagagaaaattactcagagaggaggactttctaatgtaggtcgggccatctcctttgtgaccaagaacttcttttccaaagccaatggaaacagaagcggggctcccaatgtggtggtggtgatggtggatggctggcccacggacaaagtggaggaggcttcaagacttgcgagagagtcaggaatcaacattttcttcatcaccattgaaggtgctgctgaaaatgagaagcagtatgtggtggagcccaactttgcaaacaaggccgtgtgcagaacaaacggcttctactcgctccacgtgcagagctggtttggcctccacaagaccctgcagcctctggtgaagcgggtctgcgacactgaccgcctggcctgcagcaagacctgcttgaactcggctgacattggcttcgtcatcgacggctccagcagtgtggggacgggcaacttccgcaccgtcctccagtttgtgaccaacctcaccaaagagtttgagatttccgacacggacacgcgcatcggggccgtgcagtacacctacgaacagcggctggagtttgggttcgacaagtacagcagcaagcctgacatcctcaacgccatcaagagggtgggctactggagtggtggcaccagcacgggggctgccatcaacttcgccctggagcagctcttcaagaagtccaagcccaacaagaggaagttaatgatcctcatcaccgacgggaggtcctacgacgacgtccggatcccagccatggctgcccatctgaagggagtgatcacctatgcgataggcgttgcctgggctgcccaagaggagctagaagtcattgccactcaccccgccagagaccactccttctttgtggacgagtttgacaacctccatcagtatgtccccaggatcatccagaacatttgtacagagttcaactcacagcctcggaactgaattcagagcaggcagagcaccagcaagtgctgctttactaactgacgtgttggaccaccccaccgcttaatg

SEQ ID NO: 70101 - DNA, 1974 bp, Artificial Sequence
  derived and/or modified sequence
atgagaacagtggtgttgacaatgaaagccagcgttatagagatgttcttggtgctactggtaactggcgtgcactccaacaaagaaacggctaaaaaaatcaagaggcctaaattcaccgtcccccaaataaactgtgatgtcaaggccggtaagataattgacccagaatttatcgtgaagtgccctgccggttgccaagacccaaagtaccatgtttatggtactgacgtttatgcaagctacagcagcgtgtgcggggcagccgtccattcaggcgttctggataatagcgggggtaaaattttggtacggaaagtggcaggccagtcaggctataagggttcttatagtaatggggtacaaagcctgagcctgccgagatggcgcgaatccttcattgtcctggagtccaaacccaagaagggggtcacgtatcccagcgcacttacctacagcagcagcaaatccccagccgctcaggctggagagaccacaaaagcctaccagagaccacccatccctgggactacagcccagcccgtgacgctgatgcagctgcttgctgtgactgttgctgtggccactcccacaactctacctcgtccctccccttcagccgctagcacgacctctatccccaggcctcagtctgtgggacatagaagtcaggagatggacctgtggagcaccgccacctatacctcatctcagaatcgacccagggctgaccccggaatccagaggcaggacccaagtggggctgcttttcagaagccagtgggcgctgatgtatctttggactgcaagatagaccttagtttcctcattgacggaagtacgtccataggcaaaaggcgatttcgcatccagaagcagctcctggctgatgttgcacaggccctggacattggaccagctggtcccctcatgggcgtggttcaatacggtgataacccagccacacactttaatcttaagactcataccaactctcgcgatctgaaaacagccattgaaaagataacccaaagaggaggactcagcaacgtcggccgtgctataagttttgttaccaagaattttttctctaaggcaaatggaaatcgctctggcgctccaaacgtggtggtggtgatggtagatggctggccaaccgacaaggtggaggaggccagcaggttggcacgggaatcaggaataaatatattctttataacaatagagggagccgctgagaatgaaaagcagtatgtggtggagccgaatttcgctaacaaagcagtatgccgaacaaatggcttttactccctacacgttcagtcgtggtttggccttcacaagacattgcagcccctggttaagagggtgtgtgataccgatcggcttgcctgctccaaaacgtgtctgaacagcgccgatattggatttgtgatcgatgggtcttcttccgtaggcaccgggaatttccgtaccgtcttacagtttgtcacgaacctgacaaaggagtttgagatatcagacactgatactaggatcggcgcagtgcagtatacttatgaacagcggttagagttcggtttcgacaagtatagtagcaagcctgatattctaaatgcaataaaaagggtgggatactggtccggcggaacatccaccggagccgcaatcaactttgcactcgagcagctattcaagaagtctaagccaaataaacgtaaactgatgatcctgatcactgatggaagatcttacgatgacgtccgcattcccgctatggctgcccacctgaaaggcgtgatcacttatgccattggagtggcctgggccgctcaagaggaacttgaagtcatcgccactcacccagccagggaccacagctttttcgtggacgagtttgacaacctacatcagtacgtcccacgtataatccagaacatatgtactgagtttaacagtcagccaaggaactag

SEQ ID NO: 70102 - DNA, 1974 bp, Artificial Sequence
  derived and/or modified sequence
atgaggacagtcgttctcactatgaaagcgtctgtgatagagatgttcctggtacttttagtcaccggagttcattcgaataaggagacagctaaaaaaatcaaacgacctaagttcaccgtgccacaaatcaactgcgacgtcaaggccggaaagattatagatcccgaattcatcgttaaatgtccagcagggtgtcaggatccaaagtaccatgtgtatggaactgatgtttacgcatcctactcctctgtctgtggtgccgccgttcactccggcgtgctcgataatagtgggggtaagatattagtcagaaaggtggcaggtcagtcaggctacaaagggtcttatagtaacggcgtgcagtctctaagcttaccacggtggagggagtctttcatcgtcctggaaagcaaacccaaaaaaggggtgacctaccctagtgcgcttacgtactctagcagtaaaagccccgcagcccaggcgggcgagacaacaaaagcctaccaaagacccccaattccaggtaccactgctcagccagtcacactaatgcaactacttgcggtgaccgtcgcagtcgctacgccaacgacccttccccgccctagcccatccgctgcttcgacgacctctatccctagacctcaatccgtggggcaccggtctcaggaaatggacctgtggagcactgcaacctatacgtcctcgcagaatcgcccacgagcagatccaggaattcagcgacaggatccgtcaggagccgctttccagaaaccagtgggcgctgacgtgtccttggactgtaaaattgacttatcattcttgatcgacggctcaactagtatagggaagcggcggtttcgaatccagaagcagctgctcgcagacgtagcacaggccctggacattggcccggccggtcctcttatgggcgttgtacagtacggagacaatccagccacacactttaatcttaagacgcacacaaattctcgtgatcttaagaccgccatagagaaaataactcaaagaggtggcctcagcaacgttggaagggccataagctttgtcactaagaattttttttcgaaagcgaatggaaaccgttccggagccccgaatgtagttgtagtgatggttgacggatggcccacagacaaagttgaagaagctagccggctggcaagagagtccggtattaacatcttttttattaccatagaaggggcagccgaaaatgagaagcagtatgtggtggagcccaactttgcaaacaaggcagtctgccgaacaaacgggttttactctttacatgtccaatcatggtttggcctccacaaaacattacagcccctggtgaaacgggtgtgtgacacggacaggctggcctgtagtaagacatgcttaaattctgcagacattggctttgttatcgacggctcatcatcagtgggaaccggaaatttccgcaccgtcctgcagtttgtgacaaatctaaccaaagagtttgagatttctgataccgatacacgcattggtgccgtacaatacacatatgaacaacgtctcgaatttggttttgacaagtactcttcgaaacctgatatactcaatgcaatcaagagagtgggctactggagtggcgggacttcaacgggagccgctatcaattttgcacttgagcagctgtttaaaaaatcaaagccaaataaacgcaaactcatgatattgatcaccgacggccgcagctacgacgatgtgaggattcccgcaatggctgcgcatttaaagggcgtcatcacttacgctattggggtggcctgggctgcgcaagaggagcttgaggtgatcgctacccacccagcccgggatcatagcttcttcgttgatgagttcgacaacctccaccagtacgtcccacgtattatccagaatatctgtacagagttcaacagtcagcccaggaattag

SEQ ID NO: 70103 - DNA, 1974 bp, Artificial Sequence
  derived and/or modified sequence
atgcgcacagttgtactgaccatgaaagcgtctgtgattgaaatgttcttagtacttctggtgactggtgttcactcaaacaaggagacagcaaagaaaatcaaaagacccaaattcactgttccacagatcaactgtgacgtcaaagccggtaagattatcgatcctgagtttatcgttaaatgcccagcaggctgtcaagatcccaagtatcacgtctacggaactgacgtgtatgcctcctattccagtgtctgtggggccgccgtgcattcaggggtgctcgacaattctgggggtaagatcctggtacgtaaggtggctgggcagagcgggtacaaagggtcttattctaacggcgtccagagcttaagtctgcccaggtggcgagaaagcttcattgtactggaaagcaaaccaaaaaagggcgttacttatccatccgcacttacatattcttccagcaaatccccggcagcacaggcgggcgagacaacaaaggcctaccagcggcctcccatacctggcactactgcacaacctgttactcttatgcagctgcttgccgtgaccgtggccgtcgcaacaccaacaacactcccaaggcccagcccaagcgccgcctcaacgacatccataccacgcccccagtccgtaggtcaccgtagccaagagatggatctttggagcacggccacctacacttcctcacagaaccggcctcgagccgaccccggtattcaacgccaggaccccagcggagcagccttccagaagccagttggcgccgatgttagccttgactgcaagatagatctttccttcttaattgatggttctacctctattggcaagagacgctttaggattcaaaaacaattactcgcagacgttgcccaagctctggatatagggccagcaggtccactcatgggcgtggtacagtacggcgataaccccgccacacattttaatctaaagactcacacaaattctcgtgacttgaagacggcgattgaaaagatcactcagaggggcggcttgtcgaacgtgggcagggccatctcttttgttacaaaaaatttcttctctaaagccaacggaaacagaagtggtgcacccaacgtagttgtggttatggtagacggttggccaactgataaggtggaagaggcatctaggcttgctagagaatcgggaattaatatttttttcatcactatagagggcgccgcagaaaatgaaaaacagtacgtggtcgagcccaattttgcgaataaggcagtttgcagaaccaacggtttctattccctgcacgtgcagagctggtttggactccacaagaccctgcagccacttgtcaaacgtgtttgcgacaccgatcgcctggcttgctccaagacgtgcctgaattccgcagacattggctttgtgatcgacggtagcagttccgttggcacaggtaattttagaaccgtgctacagttcgttacgaacctgactaaggagttcgagatcagcgataccgatacaaggattggcgccgtacaatatacatacgagcaacggctagaattcggatttgacaagtacagctctaaacccgatatcctcaatgcaatcaaacgagtgggttactggagtgggggcacttccaccggtgccgccataaactttgcattagaacaactgtttaaaaagtctaaaccaaacaaacgaaaacttatgatactcattaccgacggtcgttcctatgatgatgtgcgaatccccgctatggcagcccacctgaagggagttattacgtatgctattggggtcgcttgggccgctcaagaagaactcgaggtaatcgccacacaccctgctcgcgaccactcctttttcgtcgacgagtttgacaatttgcaccagtatgttccacgtattatccaaaatatctgtacagaatttaacagccagcctcgcaattag

SEQ ID NO: 70104 - DNA, 1974 bp, Artificial Sequence
  derived and/or modified sequence
atgagaaccgtggtgctgaccatgaaggccagcgtgatcgagatgttcctggtgctgctggtgaccggcgtgcacagcaacaaggagaccgccaagaagatcaagagacccaagttcaccgtgccccagatcaactgcgacgtgaaggccggcaagatcatcgaccccgagttcatcgtgaagtgccccgccggctgccaggaccccaagtaccacgtgtacggcaccgacgtgtacgccagctacagcagcgtgtgcggcgccgccgtgcacagcggcgtgctggacaacagcggcggcaagatcctggtgagaaaggtggccggccagagcggctacaagggcagctacagcaacggcgtgcagagcctgagcctgcccagatggagagagagcttcatcgtgctggagagcaagcccaagaagggcgtgacctaccccagcgccctgacctacagcagcagcaagagccccgccgcccaggccggcgagaccaccaaggcctaccagagaccccccatccccggcaccaccgcccagcccgtgaccctgatgcagctgctggccgtgaccgtggccgtggccacccccaccaccctgcccagacccagccccagcgccgccagcaccaccagcatccccagaccccagagcgtgggccacagaagccaggagatggacctgtggagcaccgccacctacaccagcagccagaacagacccagagccgaccccggcatccagagacaggaccccagcggcgccgccttccagaagcccgtgggcgccgacgtgagcctggactgcaagatcgacctgagcttcctgatcgacggcagcaccagcatcggcaagagaagattcagaatccagaagcagctgctggccgacgtggcccaggccctggacatcggccccgccggccccctgatgggcgtggtgcagtacggcgacaaccccgccacccacttcaacctgaagacccacaccaacagcagagacctgaagaccgccatcgagaagatcacccagagaggcggcctgagcaacgtgggcagagccatcagcttcgtgaccaagaacttcttcagcaaggccaacggcaacagaagcggcgcccccaacgtggtggtggtgatggtggacggctggcccaccgacaaggtggaggaggccagcagactggccagagagagcggcatcaacatcttcttcatcaccatcgagggcgccgccgagaacgagaagcagtacgtggtggagcccaacttcgccaacaaggccgtgtgcagaaccaacggcttctacagcctgcacgtgcagagctggttcggcctgcacaagaccctgcagcccctggtgaagagagtgtgcgacaccgacagactggcctgcagcaagacctgcctgaacagcgccgacatcggcttcgtgatcgacggcagcagcagcgtgggcaccggcaacttcagaaccgtgctgcagttcgtgaccaacctgaccaaggagttcgagatcagcgacaccgacaccagaatcggcgccgtgcagtacacctacgagcagagactggagttcggcttcgacaagtacagcagcaagcccgacatcctgaacgccatcaagagagtgggctactggagcggcggcaccagcaccggcgccgccatcaacttcgccctggagcagctgttcaagaagagcaagcccaacaagagaaagctgatgatcctgatcaccgacggcagaagctacgacgacgtgagaatccccgccatggccgcccacctgaagggcgtgatcacctacgccatcggcgtggcctgggccgcccaggaggagctggaggtgatcgccacccaccccgccagagaccacagcttcttcgtggacgagttcgacaacctgcaccagtacgtgcccagaatcatccagaacatctgcaccgagttcaacagccagcccagaaactag

SEQ ID NO: 70105 - DNA, 1974 bp, Artificial Sequence
  derived and/or modified sequence
atgagaaccgtagttctcacgatgaaagcatcagtgatcgaaatgttcctcgtcctcctcgtcactggagtgcattctaacaaagagacggcgaaaaaaataaaacgcccgaagttcacggttcctcagatcaactgtgatgtaaaggcgggcaaaatcatcgaccccgagttcatagtcaaatgtcctgcaggctgtcaggaccccaaatatcacgtatatggcacagatgtgtacgcaagctacagttctgtgtgtggcgcggcagtgcatagtggggtcctggacaactctggggggaagatcctcgtgcggaaagtcgcaggccagtcaggctataagggtagttactcaaacggcgtacagtctctatcattgccaaggtggagggagtctttcatagtgctcgagtctaaaccaaagaagggcgtcacctatccatccgctctgacatactcatctagtaagtccccagcagcccaggcaggggaaacgaccaaagcgtatcagagacccccaatcccagggaccacagcccagcctgtaacattgatgcagcttctagcagtgacagtggccgtcgccacacccactactcttccacgacctagcccatcagcagcaagcactacttcgatcccacgccctcagtcagttgggcaccgctcccaagaaatggatctgtggagtaccgccacctatacctcttcccagaatcggcctcgcgcagatcctggcattcagaggcaggacccttccggtgccgcttttcagaagcccgtgggcgctgatgtgagcctggactgcaagatcgacttatcgttccttattgatggcagtacttcaataggcaaacggagatttcgaattcagaagcagttgttggccgatgtggcgcaggccctggatatcggacctgctgggcctctcatgggggttgtgcagtacggagataatcctgcgacccacttcaatctgaagacgcatacaaatagtcgggatctgaagactgccattgagaaaataacgcaaagaggcggtctatcaaatgtgggcagagcaattagtttcgtgactaagaatttcttcagcaaggcaaacgggaatagatctggggcacccaacgtcgtagtggtgatggtggatggctggcccacagataaggtcgaggaggcgagccgcctggccagagagtccgggatcaacattttttttattacaattgagggcgcggctgagaacgaaaagcagtacgtggtagaaccgaacttcgccaacaaggctgtgtgccggaccaatggcttttactccctgcacgtgcagtcctggtttggactgcacaagacattacagcccctagtcaagagggtgtgcgacacggatagattagcttgtagtaagacgtgtttgaacagcgcagacatagggttcgtcatcgatggctcgtcatccgttggcacggggaactttcgcacagtactgcagttcgtgaccaatctcacaaaggaattcgaaattagcgataccgatactagaattggagccgtccaatacacatacgagcaacgtttagaattcgggttcgacaagtactcttccaaaccggacattctcaacgcaatcaaacgcgtgggatactggagcggggggacatcaactggagcggcgattaatttcgctctcgagcagctgtttaaaaagagcaaacccaataagagaaagctgatgatcctaattaccgatggaagaagttacgatgacgttcggatacctgcaatggccgcacacctgaagggtgtcattacgtacgccatcggcgtcgcatgggccgcccaggaagaactggaagtcatagccacccaccctgctagagaccactcatttttcgtcgacgagttcgacaacctgcaccagtacgtgcctcgtatcattcagaacatctgcactgaatttaattcccaaccccggaactag

SEQ ID NO: 70106 - DNA, 1974 bp, Artificial Sequence
  derived and/or modified sequence
atgaggacagtggtgctgaccatgaaggcctctgtgattgagatgttcctggtgctgctggtgactggagtgcacagcaacaaggagacagccaagaagatcaagaggcccaagttcaccgtgccccagatcaactgtgatgtgaaggccggcaagatcatcgaccctgagttcatcgtgaagtgcccagctggctgccaggaccccaagtaccacgtgtatggaacagatgtgtatgccagctacagctctgtgtgtggggctgctgtgcacagcggcgtgctggacaacagcggcggcaagatcctggtgaggaaggtggccggccagagcggctacaagggcagctacagcaatggagtgcagagcctgagcctgccccgctggagggagagcttcatcgtgctggagagcaagcccaagaagggcgtgacctaccccagcgccctgacctacagcagcagcaagagccctgctgcccaggccggggagaccaccaaggcctaccagaggcctcccatccctggcaccacagcccagcctgtgaccctgatgcagctgctggccgtgacagtggccgtggccacccccaccaccctgccccggcccagccccagcgctgccagcaccaccagcatcccccggccccagagcgtgggccacaggagccaggagatggacctgtggagcacagccacctacaccagcagccagaaccggcccagggctgaccccggcatccagaggcaggaccccagcggggccgccttccagaagcctgtgggcgcagatgtgtccctggactgcaagattgacctgtccttcctgattgatggcagcaccagcatcggcaagaggcgcttccgcatccagaagcagctgctggctgatgtggcccaggccctggacatcggccctgctggccccctgatgggcgtggtgcagtacggggacaacccagccacccacttcaacctgaagacccacaccaacagccgggacctgaagacagccatcgagaagatcacccagaggggcggcctgagcaatgtgggccgggccatcagctttgtgaccaagaacttcttcagcaaggccaatggaaacagaagtggggccccaaatgtggtggtggtgatggtggatggctggcccacagacaaggtggaggaggccagccggctggcccgggagagcggcatcaacatcttcttcatcaccatcgagggcgctgctgaaaatgagaagcagtatgtggtggagcccaactttgccaacaaggctgtgtgcaggaccaacggcttctacagcctgcacgtgcagagctggtttggcctgcacaagaccctgcagcccctggtgaagagggtgtgtgacacagaccggctggcctgcagcaagacctgcctgaacagcgctgacattggatttgtgattgatggcagcagctctgtgggcactggaaacttcagaacagtgctgcagtttgtgaccaacctgaccaaggagtttgagatcagtgacacagacaccagaattggagctgtgcagtacacctatgagcagaggctggagtttggatttgacaagtacagcagcaagccagacatcctgaatgccatcaagagggtgggctactggagcggcggcaccagcactggagctgccatcaactttgccctggagcagctgttcaagaagagcaagcccaacaagaggaagctgatgatcctgatcacagatggccgctcctatgatgatgtgcgcatcccagccatggccgcccacctgaagggcgtcatcacctacgccatcggcgtggcctgggccgcccaggaggagctggaggtgattgccacccacccagcccgggaccacagcttctttgtggatgaatttgacaacctgcaccagtatgtgccccgcatcatccagaacatctgcacagagttcaacagccagcccaggaactag

SEQ ID NO: 70107 - DNA, 1974 bp, Artificial Sequence
  derived and/or modified sequence
atgcggaccgtggtgctgaccatgaaggccagcgtgatcgagatgttcctcgtcttgctggttacaggcgtgcactcaaacaaagaaactgctaagaagatcaagaggcccaagtttactgtcccgcagatcaattgtgatgttaaagccggaaaaatcatcgatccagaatttatcgttaagtgtccagcagggtgccaggaccccaagtatcatgtctacggcaccgatgtgtacgctagttattcgtctgtgtgcggggccgcagtccacagtggggttctggacaatagcggcggcaaaatcctggtgagaaaggtcgcggggcaatctgggtataagggctcttacagtaatggggtgcagtctctctcgctgccccgctggcgagagtcctttattgtcctggaatcaaagccaaagaagggagttacctatcctagcgcgctgacctattccagtagtaagagtcccgctgctcaggctggagaaaccactaaagcttatcagcgaccgccaatcccaggaacaaccgcccagcccgtgaccctcatgcagctcttggccgtcaccgtagccgtggctacacctaccactctcccacgcccttccccatcagcagcatcgactaccagtatcccccggccccagtcagtgggacacagaagccaagagatggatctgtggtctacagcgacatacacatccagccaaaaccggccccgggccgaccctggcatccaaagacaggacccgtcaggggccgcatttcagaagcccgtaggggccgacgtgtctctggattgcaaaatagacctctccttcctcatcgacgggagcacttctattggcaaaaggcgcttccggattcaaaaacaactgctggcagatgtggcccaggccctagatattggtcctgctgggcctctgatgggcgtggttcagtatggcgataatccagccacccactttaatctgaaaacccacacaaattctcgggatttgaaaacagccattgagaagattacgcagagaggggggcttagcaacgtcggccgcgccattagcttcgtcacgaagaatttcttcagtaaggctaatggtaaccgcagcggagctccgaatgtcgtggtagtgatggtggatggttggcccacagacaaggtagaggaggcaagcaggctggcacgcgagagcggcatcaacatattctttataaccattgagggcgctgcggaaaatgaaaaacagtatgtggtcgagcctaacttcgcgaataaagcggtctgcagaactaatgggttctattctctgcacgtgcagtcttggttcgggcttcataagaccttgcagcccctggtgaaacgtgtttgcgataccgaccgcctagcctgttcaaagacctgtctaaactcagccgacatcggcttcgttatcgatggctcaagtagtgtgggaactgggaatttccgcactgtcctccagttcgtcaccaacctgactaaggagttcgaaatttctgatacagacacccggattggcgccgtgcagtacacctatgagcagcggctggagttcgggttcgataaatacagctctaaaccagacatcctgaatgcaatcaagcgtgtgggatactggagtggaggaacatccactggggcagcgattaatttcgcactggaacagctgtttaagaagtctaaacctaataaacggaagctgatgattttaattacggatggccggtcctatgatgatgttagaatacccgcaatggcagctcatctgaagggcgtgatcacctacgcgataggagtcgcctgggcggcacaggaggagctagaggtgatagccactcaccccgccagagaccacagtttctttgtggatgagttcgacaacctacatcagtatgtccctcggatcatccagaatatctgcactgagtttaattcgcagcctagaaactag

SEQ ID NO: 70108 - RNA, 1974 nt, Artificial Sequence
  derived and/or modified sequence
augaggacagucguucucacuaugaaagcgucugugauagagauguuccugguacuuuuagucaccggaguucauucgaauaaggagacagcuaaaaaaaucaaacgaccuaaguucaccgugccacaaaucaacugcgacgucaaggccggaaagauuauagaucccgaauucaucguuaaauguccagcagggugucaggauccaaaguaccauguguauggaacugauguuuacgcauccuacuccucugucuguggugccgccguucacuccggcgugcucgauaauaguggggguaagauauuagucagaaagguggcaggucagucaggcuacaaagggucuuauaguaacggcgugcagucucuaagcuuaccacgguggagggagucuuucaucguccuggaaagcaaacccaaaaaaggggugaccuacccuagugcgcuuacguacucuagcaguaaaagccccgcagcccaggcgggcgagacaacaaaagccuaccaaagacccccaauuccagguaccacugcucagccagucacacuaaugcaacuacuugcggugaccgucgcagucgcuacgccaacgacccuuccccgcccuagcccauccgcugcuucgacgaccucuaucccuagaccucaauccguggggcaccggucucaggaaauggaccuguggagcacugcaaccuauacguccucgcagaaucgcccacgagcagauccaggaauucagcgacaggauccgucaggagccgcuuuccagaaaccagugggcgcugacguguccuuggacuguaaaauugacuuaucauucuugaucgacggcucaacuaguauagggaagcggcgguuucgaauccagaagcagcugcucgcagacguagcacaggcccuggacauuggcccggccgguccucuuaugggcguuguacaguacggagacaauccagccacacacuuuaaucuuaagacgcacacaaauucucgugaucuuaagaccgccauagagaaaauaacucaaagagguggccucagcaacguuggaagggccauaagcuuugucacuaagaauuuuuuuucgaaagcgaauggaaaccguuccggagccccgaauguaguuguagugaugguugacggauggcccacagacaaaguugaagaagcuagccggcuggcaagagaguccgguauuaacaucuuuuuuauuaccauagaaggggcagccgaaaaugagaagcaguaugugguggagcccaacuuugcaaacaaggcagucugccgaacaaacggguuuuacucuuuacauguccaaucaugguuuggccuccacaaaacauuacagccccuggugaaacgggugugugacacggacaggcuggccuguaguaagacaugcuuaaauucugcagacauuggcuuuguuaucgacggcucaucaucagugggaaccggaaauuuccgcaccguccugcaguuugugacaaaucuaaccaaagaguuugagauuucugauaccgauacacgcauuggugccguacaauacacauaugaacaacgucucgaauuugguuuugacaaguacucuucgaaaccugauauacucaaugcaaucaagagagugggcuacuggaguggcgggacuucaacgggagccgcuaucaauuuugcacuugagcagcuguuuaaaaaaucaaagccaaauaaacgcaaacucaugauauugaucaccgacggccgcagcuacgacgaugugaggauucccgcaauggcugcgcauuuaaagggcgucaucacuuacgcuauugggguggccugggcugcgcaagaggagcuugaggugaucgcuacccacccagcccgggaucauagcuucuucguugaugaguucgacaaccuccaccaguacgucccacguauuauccagaauaucuguacagaguucaacagucagcccaggaauuag

SEQ ID NO: 70109 - RNA, 1974 nt, Artificial Sequence
  derived and/or modified sequence
augcgcacaguuguacugaccaugaaagcgucugugauugaaauguucuuaguacuucuggugacugguguucacucaaacaaggagacagcaaagaaaaucaaaagacccaaauucacuguuccacagaucaacugugacgucaaagccgguaagauuaucgauccugaguuuaucguuaaaugcccagcaggcugucaagaucccaaguaucacgucuacggaacugacguguaugccuccuauuccagugucuguggggccgccgugcauucaggggugcucgacaauucuggggguaagauccugguacguaagguggcugggcagagcggguacaaagggucuuauucuaacggcguccagagcuuaagucugcccagguggcgagaaagcuucauuguacuggaaagcaaaccaaaaaagggcguuacuuauccauccgcacuuacauauucuuccagcaaauccccggcagcacaggcgggcgagacaacaaaggccuaccagcggccucccauaccuggcacuacugcacaaccuguuacucuuaugcagcugcuugccgugaccguggccgucgcaacaccaacaacacucccaaggcccagcccaagcgccgccucaacgacauccauaccacgcccccaguccguaggucaccguagccaagagauggaucuuuggagcacggccaccuacacuuccucacagaaccggccucgagccgaccccgguauucaacgccaggaccccagcggagcagccuuccagaagccaguuggcgccgauguuagccuugacugcaagauagaucuuuccuucuuaauugaugguucuaccucuauuggcaagagacgcuuuaggauucaaaaacaauuacucgcagacguugcccaagcucuggauauagggccagcagguccacucaugggcgugguacaguacggcgauaaccccgccacacauuuuaaucuaaagacucacacaaauucucgugacuugaagacggcgauugaaaagaucacucagaggggcggcuugucgaacgugggcagggccaucucuuuuguuacaaaaaauuucuucucuaaagccaacggaaacagaaguggugcacccaacguaguugugguuaugguagacgguuggccaacugauaagguggaagaggcaucuaggcuugcuagagaaucgggaauuaauauuuuuuucaucacuauagagggcgccgcagaaaaugaaaaacaguacguggucgagcccaauuuugcgaauaaggcaguuugcagaaccaacgguuucuauucccugcacgugcagagcugguuuggacuccacaagacccugcagccacuugucaaacguguuugcgacaccgaucgccuggcuugcuccaagacgugccugaauuccgcagacauuggcuuugugaucgacgguagcaguuccguuggcacagguaauuuuagaaccgugcuacaguucguuacgaaccugacuaaggaguucgagaucagcgauaccgauacaaggauuggcgccguacaauauacauacgagcaacggcuagaauucggauuugacaaguacagcucuaaacccgauauccucaaugcaaucaaacgaguggguuacuggagugggggcacuuccaccggugccgccauaaacuuugcauuagaacaacuguuuaaaaagucuaaaccaaacaaacgaaaacuuaugauacucauuaccgacggucguuccuaugaugaugugcgaauccccgcuauggcagcccaccugaagggaguuauuacguaugcuauuggggucgcuugggccgcucaagaagaacucgagguaaucgccacacacccugcucgcgaccacuccuuuuucgucgacgaguuugacaauuugcaccaguauguuccacguauuauccaaaauaucuguacagaauuuaacagccagccucgcaauuag

SEQ ID NO: 70110 - protein, 656 aa, Artificial Sequence
  derived and/or modified sequence
MRTVVLTMKASVIEMFLVLLVTGVHSNKETAKKIKRPKFTVPQINCDVKAGKIIDPEFIVKCPAGCQDPKYHVYGTDVYASYSSVCGAAVHSGVLDNSGGKILVRKVAGQSGYKGSYSNGVQSLSLPRWRESFIVLESKPKKGVTYPSALTYSSSKSPAAQAGETTKAYQRPPIPGTTAQPVTLMQLLAVTVAVATPTTLPRPSPSAASTTSIPRPQSVGHRSQEMDLWSTATYTSSQNRPRADPGLVPKEELSTQSLEPVSLGDPNCKIDLSFLIDGSTSIGKRRFRIQKQLLADVAQALDIGPAGPLMGVVQYGDNPATHFNLKTHTNSRDLKTAIEKITQRGGLSNVGRAISFVTKNFFSKANGNRSGAPNVVVVMVDGWPTDKVEEASRLARESGINIFFITIEGAAENEKQYVVEPNFANKAVCRTNGFYSLHVQSWFGLHKTLQPLVKRVCDTDRLACSKTCLNSADIGFVIDGSSSVGTGNFRTVLQFVTNLTKEFEISDTDTRIGAVQYTYEQRLEFGFDKYSSKPDILNAIKRVGYWSGGTSTGAAINFALEQLFKKSKPNKRKLMILITDGRSYDDVRIPAMAAHLKGVITYAIGVAWAAQEELEVIATHPARDHSFFVDEFDNLHQYVPRIIQNICTEFNSQPRN

SEQ ID NO: 70111 - protein, 347 aa, Artificial Sequence
  derived and/or modified sequence
MGVVQYGDNPATHFNLKTHTNSRDLKTAIEKITQRGGLSNVGRAISFVTKNFFSKANGNRSGAPNVVVVMVDGWPTDKVEEASRLARESGINIFFITIEGAAENEKQYVVEPNFANKAVCRTNGFYSLHVQSWFGLHKTLQPLVKRVCDTDRLACSKTCLNSADIGFVIDGSSSVGTGNFRTVLQFVTNLTKEFEISDTDTRIGAVQYTYEQRLEFGFDKYSSKPDILNAIKRVGYWSGGTSTGAAINFALEQLFKKSKPNKRKLMILITDGRSYDDVRIPAMAAHLKGVITYAIGVAWAAQEELEVIATHPARDHSFFVDEFDNLHQYVPRIIQNICTEFNSQPRN

SEQ ID NO: 70112 - DNA, 1971 bp, Artificial Sequence
  derived and/or modified sequence
atgagaaccgtggttctcactatgaaggcctccgtgatcgagatgtttctggtgttgctggtcaccggagtacactctaataaagagactgcgaagaagataaaaagacctaagtttaccgtcccacaaattaactgcgatgtaaaagccggaaagattattgaccccgagtttattgttaagtgcccagccggttgccaggaccccaagtatcacgtctacggaacagacgtctacgccagctactcaagcgtgtgcggtgctgccgtccatagcggcgtcctggacaattcaggtggcaaaattctggtgaggaaagtggcaggccagtctggttacaagggctcctatagcaatggggtacaatcattgtccctccctcgttggcgtgaaagctttatcgtgctggagagcaagccaaagaagggggtgacgtatccctctgcactcacctacagctcttcaaaaagccccgctgctcaagcaggagaaaccaccaaggcatatcagcgacccccaattccaggcacaacggcccagcctgtgaccctcatgcaactcttagccgtaaccgtggctgtggccaccccgactacactgccaagaccctcacccagcgcagcatcaactacctccatccctagaccccaatccgtcggccaccgaagccaggaaatggatctatggtccaccgccacctatacgtcttcccagaacagacctcgggcagaccccggactcgtgcctaaagaggagttatcgacacagtcccttgagcccgtcagtctgggagatcccaattgcaagattgacttaagcttcctcatcgacgggagtacatcaattggtaagcgacgattcaggattcaaaaacagctccttgcggatgtggcgcaagccctggacatcggcccagccggtcccctgatgggtgttgtgcagtatggagacaatccagcgactcacttcaatctgaaaactcatactaattcaagggatctgaagactgcgatcgagaagatcacacagcgcggtgggctgtctaacgtggggcgtgccatctcctttgtcaccaagaatttctttagtaaggccaacggtaacaggtcaggtgcccctaatgtcgtggtcgttatggtagacggatggcctaccgataaagttgaagaggccagccgcctggccagagaatctggtattaacatatttttcatcactatagaaggggctgccgagaatgaaaaacaatatgtggtcgagccaaacttcgccaacaaagccgtatgtcgaactaatggcttctattccttgcatgtgcagtcctggttcggactgcacaaaacactccagcctctggtgaaacgcgtgtgcgacactgacaggctagcttgttcaaagacctgcctcaactctgctgatataggtttcgttattgatggctcatctagtgttggcaccggcaatttccgaaccgtgctacaattcgtgaccaacctcacaaaggaattcgaaatcagcgacactgatacacggatcggggctgtgcagtatacttatgagcagcggctggagttcggatttgataagtactcttcaaagccagatatcctcaacgctattaagagggtcgggtactggtcaggcggtacatctaccggagctgcaatcaactttgctttggagcagttgttcaagaaaagcaagcccaataagcgtaaactgatgatattaattacggacggccgtagctacgatgatgtacggattcccgcaatggcagcgcacttaaaaggcgtcattacttacgcaattggcgtggcttgggccgcacaggaagagcttgaggttattgctacgcaccccgctagggaccactcttttttcgtggacgaattcgacaatctccaccagtacgtgcctcggatcattcagaacatttgcaccgagtttaattcccagccgaggaactag

SEQ ID NO: 70113 - DNA, 1971 bp, Artificial Sequence
  derived and/or modified sequence
atgagaactgtcgtgctgactatgaaagcctctgtgattgaaatgttcctcgtgctccttgtaaccggagtacactccaacaaagaaactgccaagaaaataaagcgacctaaatttacagtgccacagatcaattgcgatgtaaaagccggcaagatcattgatcccgagtttattgtgaaatgtcccgcaggttgccaggacccaaaataccacgtgtatggcacggacgtgtacgcatcttatagctcggtgtgtggagcagcagtccattccggtgtgctggacaattctggggggaagatcttagtccggaaagtcgccggccagtctggctataagggttcatattcaaatggagtccagagtctgtcactcccgcgctggagggagagctttattgttcttgagtccaaacccaaaaagggcgtaacttatccatctgccctcacgtattcctcgagtaagtcccctgcagcccaagctggtgaaaccacaaaggcctaccaaagacctccaattcccggaacaaccgctcaacccgttacactgatgcagctccttgccgtcaccgttgccgtggcaactcctactactctccccagaccatctccttcggccgcgagcactacttcgatcccccgccctcaatcggtcggccaccggtcccaagagatggatctgtggtctactgccacttatactagttcccagaaccgcccacgagcggaccccggactcgtgcccaaggaggaactttccacccaaagtctggagccagtgagcctgggagaccccaattgcaagattgacttgtcgtttctcattgatggatccacttcgatcggtaaacggagattccgaatccagaagcaactgctggcagatgtggcccaagcgctcgatatcggtccagccggccccctaatgggcgtggttcagtatggcgacaacccagccacccactttaacctgaaaacccatactaattcacgtgatttgaaaacagctatcgaaaagataacccagcgggggggcctgagcaacgtggggcgcgcaatttcctttgttactaagaacttcttttcaaaagccaacggcaatcgctccggagcaccgaatgtggttgttgttatggttgatggatggccaaccgacaaagtggaggaggccagcaggcttgctagagaatcaggaataaatattttttttatcacgatagagggagcggcggagaatgaaaagcaatacgtcgtggaaccgaacttcgctaataaagctgtctgtagaacaaatgggttttactccctgcacgttcagtcatggttcggattacacaaaactctgcaacccttggtcaaaagagtttgcgacacagatcggctcgcttgttcaaaaacatgccttaactcagccgacatcggctttgtcatcgatgggtcatcatcagtcggcacgggtaacttccgtaccgtccttcagttcgtgaccaacttgaccaaagagtttgaaatctcggatacggatacccgaatcggggctgtgcaatacacctacgaacaaagattggagtttggtttcgacaaatattcgtctaagccagatatcttaaacgccatcaagagagtgggatactggagcggcggaacatcaactggggccgcaataaactttgcccttgagcagctctttaagaaatcgaagcctaacaagagaaagttgatgattctgataacagacgggcgttcttacgacgatgtgaggattcccgccatggccgcacatctcaagggcgtgattacctacgccatcggagttgcgtgggccgctcaggaagagcttgaagtcatagctacacacccggctcgtgaccatagctttttcgttgacgagtttgataacctgcaccagtacgtgccaagaatcatccagaacatctgtaccgaatttaactcacagccacgtaattag

SEQ ID NO: 70114 - DNA, 1971 bp, Artificial Sequence
  derived and/or modified sequence
atgcgtacagtagttctaaccatgaaagcaagtgttattgaaatgttcctagtgctgctggtgacaggcgttcatagcaacaaagaaaccgcaaagaagattaaaagaccaaagttcaccgtgcctcaaatcaactgcgacgtaaaggccgggaagatcatcgacccggaattcattgtaaagtgcccagcaggatgccaggatcctaagtatcatgtatacgggaccgacgtttacgccagttacagctcagtgtgtggcgcggccgtgcactcaggagtcttagacaatagtggaggaaagatcttagtccggaaagtcgccggccagtctggctataagggttcatattcaaatggagtccagagtctgtcactcccgcgctggagggagagctttattgttcttgagtccaaacccaaaaagggcgtaacttatccatctgccctcacgtattcctcgagtaagtcccctgcagcccaagctggtgaaaccacaaaggcctaccaaagacctccaattcccggaacaaccgctcaacccgttacactgatgcagctccttgccgtcaccgttgccgtggcaactcctactactctccctaggccctccccatccgcagcaagcacgacctccataccgagaccccagtccgttgggcatagatctcaagagatggacctgtggtcgacggctacatatacctcttcccagaacaggccccgcgcagaccctggactcgtccccaaagaagaactcagcactcaatcattggagccagtgtctctgggggacccaaattgtaagatcgacctatcattcttaatcgacggtagtacctccatcggtaagcggcgcttcagaatccagaaacagctactcgctgacgtcgcacaagccctggacatcgggccggccggaccactaatgggggtggtgcaatacggggataatcctgccactcactttaaccttaagacacacaccaattctagagatttgaagactgcgatcgaaaagattactcaacggggcggacttagtaatgtggggagagctattagttttgtgacaaagaacttcttttcaaaggccaacggcaaccgatctggcgctccgaatgtagtagtcgtgatggttgacgggtggccaaccgacaaggttgaggaggcttctagattggcacgggaaagcggtattaacatcttcttcatcactatcgagggcgcagcagagaatgaaaagcagtatgttgtagaaccaaattttgcaaataaggccgtgtgtcgaacaaacgggttctactctctccacgtccaatcctggttcggtctccacaaaactctgcagccacttgttaagcgtgtatgcgataccgatcgacttgcctgtagcaagacctgcctgaactctgccgatatcgggtttgttattgatgggtcctcctccgtgggtactgggaatttcaggactgttctacagtttgtcactaacctcactaaggaatttgaaattagcgacacagacacaagaatcggcgccgtgcagtatacttatgagcagcgattggaattcggatttgataaatatagctcaaaacctgatatcttgaatgctatcaaacgggttgggtactggtccggcggtacatctactggcgcggcaatcaatttcgccttagaacagttatttaagaagtctaagcctaataagagaaaattgatgattctgattacagatggccggagctacgatgacgtgcgcatcccagccatggcagcgcacctgaagggggtgatcacctacgccattggagtggcctgggcagcccaagaagaactggaagttattgcgactcatccagcccgggatcatagttttttcgttgatgaatttgacaatttgcatcagtacgtgccccgcattatccagaacatctgcaccgaatttaatagtcagccacgcaattag

SEQ ID NO: 70115 - DNA, 1971 bp, Artificial Sequence
  derived and/or modified sequence
atgagaaccgtggtgctgaccatgaaggccagcgtgatcgagatgttcctggtgctgctggtgaccggcgtgcacagcaacaaggagaccgccaagaagatcaagagacccaagttcaccgtgccccagatcaactgcgacgtgaaggccggcaagatcatcgaccccgagttcatcgtgaagtgccccgccggctgccaggaccccaagtaccacgtgtacggcaccgacgtgtacgccagctacagcagcgtgtgcggcgccgccgtgcacagcggcgtgctggacaacagcggcggcaagatcctggtgagaaaggtggccggccagagcggctacaagggcagctacagcaacggcgtgcagagcctgagcctgcccagatggagagagagcttcatcgtgctggagagcaagcccaagaagggcgtgacctaccccagcgccctgacctacagcagcagcaagagccccgccgcccaggccggcgagaccaccaaggcctaccagagaccccccatccccggcaccaccgcccagcccgtgaccctgatgcagctgctggccgtgaccgtggccgtggccacccccaccaccctgcccagacccagccccagcgccgccagcaccaccagcatccccagaccccagagcgtgggccacagaagccaggagatggacctgtggagcaccgccacctacaccagcagccagaacagacccagagccgaccccggcctggtgcccaaggaggagctgagcacccagagcctggagcccgtgagcctgggcgaccccaactgcaagatcgacctgagcttcctgatcgacggcagcaccagcatcggcaagagaagattcagaatccagaagcagctgctggccgacgtggcccaggccctggacatcggccccgccggccccctgatgggcgtggtgcagtacggcgacaaccccgccacccacttcaacctgaagacccacaccaacagcagagacctgaagaccgccatcgagaagatcacccagagaggcggcctgagcaacgtgggcagagccatcagcttcgtgaccaagaacttcttcagcaaggccaacggcaacagaagcggcgcccccaacgtggtggtggtgatggtggacggctggcccaccgacaaggtggaggaggccagcagactggccagagagagcggcatcaacatcttcttcatcaccatcgagggcgccgccgagaacgagaagcagtacgtggtggagcccaacttcgccaacaaggccgtgtgcagaaccaacggcttctacagcctgcacgtgcagagctggttcggcctgcacaagaccctgcagcccctggtgaagagagtgtgcgacaccgacagactggcctgcagcaagacctgcctgaacagcgccgacatcggcttcgtgatcgacggcagcagcagcgtgggcaccggcaacttcagaaccgtgctgcagttcgtgaccaacctgaccaaggagttcgagatcagcgacaccgacaccagaatcggcgccgtgcagtacacctacgagcagagactggagttcggcttcgacaagtacagcagcaagcccgacatcctgaacgccatcaagagagtgggctactggagcggcggcaccagcaccggcgccgccatcaacttcgccctggagcagctgttcaagaagagcaagcccaacaagagaaagctgatgatcctgatcaccgacggcagaagctacgacgacgtgagaatccccgccatggccgcccacctgaagggcgtgatcacctacgccatcggcgtggcctgggccgcccaggaggagctggaggtgatcgccacccaccccgccagagaccacagcttcttcgtggacgagttcgacaacctgcaccagtacgtgcccagaatcatccagaacatctgcaccgagttcaacagccagcccagaaactag

SEQ ID NO: 70116 - DNA, 1971 bp, Artificial Sequence
  derived and/or modified sequence
atgcgcacagttgtgctgactatgaaggcatctgtgatcgagatgttcctggtgttgcttgttacaggcgtgcactcaaacaaagagacagctaagaagatcaagcgacctaagttcaccgtgccacagattaactgtgatgtgaaagccggaaaaattatcgacccagagttcatcgtgaaatgtcccgcaggctgccaagatcctaagtaccacgtgtatggtacagatgtctatgcctcgtactccagcgtgtgcggcgccgctgtccattccggtgtccttgataactccggtggaaaaattcttgtgcggaaagtggctgggcagagtggatacaagggaagctactctaatggagtgcagagccttagtctgccgagatggcgggagagtttcatcgtcctggagagtaaacccaaaaagggcgtgacttatccatctgcccttacctattcctctagcaagtctccggcggcccaggcaggggagacaaccaaagcctatcagcgcccccccataccaggcacaacggcccagccagtaacccttatgcagctcctcgccgtgactgtagctgtcgcgacaccaacgactctcccaaggccatctccaagtgcggcatcaaccacctccatcccaaggccacagtccgtcggccataggtcccaagagatggacttgtggagcactgcaacttatacctcctctcagaacagacctagggccgaccctggactagtgcccaaagaagaattaagcactcagagtctggagccagtatcactcggtgatccaaattgcaagatcgacctttctttcctgattgacggctctacatcaattggaaagcgcagattcaggatccaaaagcagcttcttgccgatgtggcccaagcactcgacattggaccggccggaccattgatgggagtcgtacagtatggggacaacccagctactcatttcaacttgaaaacacacacgaatagtcgcgacctcaagaccgccatcgagaagattacacagcgcggcggcctctcaaatgtgggccgagcgatttccttcgtaacaaagaactttttctccaaggccaacgggaatcgtagtggagccccaaacgtcgtcgtggtgatggtggacggctggcccacagataaggttgaggaggcttcacggctggcccgcgaatctggcattaatatcttttttataaccatcgaaggagctgcagagaacgaaaagcaatatgtggttgagcctaatttcgccaataaagctgtgtgccgcactaacgggttctatagcttgcatgtgcagtcatggttcggcctccataaaaccctccagccattggtcaagcgggtctgcgacaccgatcggttggcctgtagcaagacgtgtctaaatagcgccgacatcggtttcgtgatcgatggctccagttctgtgggcaccggaaattttaggactgttctgcaattcgtgacgaacctgacgaaagagttcgagatctctgatacagatacccggatcggtgccgttcaatatacgtatgagcagagactggagtttgggtttgacaagtatagtagcaagcctgatatattaaatgccatcaagcgagtcggctactggagtggaggcacgtcgacaggtgcggccattaattttgcgctagagcagctttttaagaagtcgaagccgaacaaacgcaagctgatgatactgattaccgatggtcgctcttacgacgatgtccggatccccgccatggctgcccatctcaagggtgtgattacatatgccattggagtcgcttgggccgcacaggaagaattggaagtgattgctacccaccccgccagggaccattcgttcttcgtcgatgaattcgataatctccaccagtacgtgccacgtattatccagaacatatgcacggagtttaattcacagccacgaaattag

SEQ ID NO: 70117 - DNA, 1971 bp, Artificial Sequence
  derived and/or modified sequence
atgaggacagtggtgctgaccatgaaggcctctgtgattgagatgttcctggtgctgctggtgactggagtgcacagcaacaaggagacagccaagaagatcaagaggcccaagttcaccgtgccccagatcaactgtgatgtgaaggccggcaagatcatcgaccctgagttcatcgtgaagtgcccagctggctgccaggaccccaagtaccacgtgtatggaacagatgtgtatgccagctacagctctgtgtgtggggctgctgtgcacagcggcgtgctggacaacagcggcggcaagatcctggtgaggaaggtggccggccagagcggctacaagggcagctacagcaatggagtgcagagcctgagcctgccccgctggagggagagcttcatcgtgctggagagcaagcccaagaagggcgtgacctaccccagcgccctgacctacagcagcagcaagagccctgctgcccaggccggggagaccaccaaggcctaccagaggcctcccatccctggcaccacagcccagcctgtgaccctgatgcagctgctggccgtgacagtggccgtggccacccccaccaccctgccccggcccagccccagcgctgccagcaccaccagcatcccccggccccagagcgtgggccacaggagccaggagatggacctgtggagcacagccacctacaccagcagccagaaccggcccagggctgaccccggcctggtgcccaaggaggagctgagcacccagagcctggagcctgtgtccctgggggaccccaactgcaagattgacctgtccttcctgattgatggcagcaccagcatcggcaagaggcgcttccgcatccagaagcagctgctggctgatgtggcccaggccctggacatcggccctgctggccccctgatgggcgtggtgcagtatggagacaacccagccacccacttcaacctgaagacccacaccaacagccgggacctgaagacagccatcgagaagatcacccagagaggaggcctgagcaatgtgggccgggccatcagctttgtgaccaagaacttcttcagcaaggccaacggcaacagaagtggggcccccaacgtggtggtggtgatggtggatggctggcccacagacaaggtggaggaggccagccggctggcccgggagagcggcatcaacatcttcttcatcaccattgaaggagctgctgaaaatgagaagcagtatgtggtggagcccaactttgccaacaaggctgtgtgcaggaccaacggcttctacagcctgcacgtgcagagctggtttggcctgcacaagaccctgcagcccctggtgaagagggtgtgtgacacagaccggctggcctgcagcaagacctgcctgaacagcgctgacatcggctttgtgattgatggcagcagctctgtgggcaccggcaacttcagaacagtgctgcagtttgtgaccaacctgaccaaggagtttgagatcagtgacacagacacccgcatcggggctgtgcagtacacctatgagcagaggctggagtttggatttgacaagtacagcagcaagccagacatcctgaatgccatcaagagggtgggctactggagcggcggcaccagcactggagctgccatcaactttgccctggagcagctgttcaagaagagcaagcccaacaagaggaagctgatgatcctgatcacagatggccgctcctatgatgatgtgcgcatcccagccatggccgcccacctgaagggcgtcatcacctacgccatcggcgtggcctgggccgcccaggaggagctggaggtgattgccacccacccagcccgggaccacagcttctttgtggatgaatttgacaacctgcaccagtatgtgccccgcatcatccagaacatctgcacagagttcaacagccagcccagaaattag

SEQ ID NO: 70118 - DNA, 2525 bp, Artificial Sequence
  derived and/or modified sequence
tagaataatttggatgggatttgtgatgcaggaaagcctaagggaaaaagaatattcattctgtgtggtgaaaattttttgaaaaaaaaattgccttcttcaaacaagggtgtcattctgatatttatgaggactgttgttctcactatgaaggcatctgttattgaaatgttccttgttttgctggtgactggagtacattcaaacaaagaaacggcaaagaagattaaaaggcccaagttcactgtgcctcagatcaactgcgatgtcaaagccggaaagatcatcgatcctgagttcattgtgaaatgtccagcaggatgccaagaccccaaataccatgtttatggcactgacgtgtatgcatcctactccagtgtgtgtggcgctgccgtacacagtggtgtgcttgataattcaggagggaaaatacttgttcggaaggttgctggacagtctggttacaaagggagttattccaacggtgtccaatcgttatccctaccacgatggagagaatcctttatcgtcttagaaagtaaacccaaaaagggtgtaacctacccatcagctcttacatactcatcatcgaaaagtccagctgcccaagcaggtgagaccacaaaagcctatcagaggccacctattccagggacaactgcacagccggtcactctgatgcagcttctggctgtcactgtagctgtggccacccccaccaccttgccaaggccatccccttctgctgcttctaccaccagcatccccagaccacaatcagtgggccacaggagccaggagatggatctctggtccactgccacctacacaagcagccaaaacaggcccagagctgatccaggacttgttccaaaagaagaattgagcacacagtctttggagccagtatccctgggagatccaaactgcaaaattgacttgtcgtttttaattgatgggagcaccagcattggcaaacggcgattccgaatccagaagcagctcctggctgatgttgcccaagctcttgacattggccctgccggtccactgatgggtgttgtccagtatggagacaaccctgctactcactttaacctcaagacacacacgaattctcgagatctgaagacagccatagagaaaattactcagagaggaggactttctaatgtaggtcgggccatctcctttgtgaccaagaacttcttttccaaagccaatggaaacagaagcggggctcccaatgtggtggtggtgatggtggatggctggcccacggacaaagtggaggaggcttcaagacttgcgagagagtcaggaatcaacattttcttcatcaccattgaaggtgctgctgaaaatgagaagcagtatgtggtggagcccaactttgcaaacaaggccgtgtgcagaacaaacggcttctactcgctccacgtgcagagctggtttggcctccacaagaccctgcagcctctggtgaagcgggtctgcgacactgaccgcctggcctgcagcaagacctgcttgaactcggctgacattggcttcgtcatcgacggctccagcagtgtggggacgggcaacttccgcaccgtcctccagtttgtgaccaacctcaccaaagagtttgagatttccgacacggacacgcgcatcggggccgtgcagtacacctacgaacagcggctggagtttgggttcgacaagtacagcagcaagcctgacatcctcaacgccatcaagagggtgggctactggagtggtggcaccagcacgggggctgccatcaacttcgccctggagcagctcttcaagaagtccaagcccaacaagaggaagttaatgatcctcatcaccgacgggaggtcctacgacgacgtccggatcccagccatggctgcccatctgaagggagtgatcacctatgcgataggcgttgcctgggctgcccaagaggagctagaagtcattgccactcaccccgccagagaccactccttctttgtggacgagtttgacaacctccatcagtatgtccccaggatcatccagaacatttgtacagagttcaactcacagcctcggaactgaattcagagcaggcagagcaccagcaagtgctgctttactaactgacgtgttggaccaccccaccgcttaatggggcacgcacggtgcatcaagtcttgggcagggcatggagaaacaaatgtcttgttattattctttgccatcatgctttttcatattccaaaacttggagttacaaagatgatcacaaacgtatagaatgagccaaaaggctacatcatgttgagggtgctggagattttacattttgacaattgttttcaaaataaatgttcggaatacagtgcagcccttacgacaggcttacgtagagcttttgtgagatttttaagttgttatttctgattagaactctgtaaccctcagcaagtttcatttttgtcatgacaatgtaggaattgctgaattaaatgtttagaaggatgaca

SEQ ID NO: 70119 - DNA, 1971 bp, Artificial Sequence
  derived and/or modified sequence
atgcggaccgtggtgctgaccatgaaggccagcgtgatcgagatgttcttggtgcttctcgtcacaggtgttcacagcaacaaggagactgcgaagaaaatcaagcggccgaagttcactgttccacagataaactgcgatgtaaaggcgggtaagatcatcgatcctgagttcattgtcaagtgtccagctgggtgccaggatccaaagtaccacgtgtacggaactgatgtctatgcctcctactcatcagtgtgcggggccgcagtccatagcggcgtgttggataacagcgggggcaaaatcctggtgcgaaaggttgcaggtcaaagcggctacaagggctcgtacagtaatggggtgcaaagcctgtccctcccaaggtggagagaaagctttatcgtgctggagtccaagccaaaaaagggtgtaacctatccctctgctctgacttattcttcttcgaagagtcccgcagcgcaggctggggagaccacaaaggcctaccagcggcctcctattcccgggacaaccgcccagccagtgactctcatgcagttgctggccgtgactgtcgctgtggctacccctaccacgctgccaagaccaagtccctcagcagcctcaaccaccagtattccacgcccccaatctgtaggtcaccgctctcaggagatggacctgtggagtacagcaacttacacttcttctcaaaaccgcccacgcgccgatcctggccttgtccccaaggaagaactgagcacacagagcttagagccggtgtccctgggcgatcccaactgcaaaattgatctgagctttttgatcgatggctcgacctcgatcgggaaaagacggttccgcattcagaagcagttgctggcagacgtggcccaggctctggacatcgggccagcaggtcccctgatgggcgtcgtacagtacggggacaacccagcgacccactttaatctcaagacacacactaattctcgggatctgaagacagccatcgaaaagattacacagaggggcgggctctccaacgtgggaagggctatctctttcgtcaccaagaatttcttttctaaagctaatggcaatagaagtggggctcccaacgtggtggtggtgatggtcgacgggtggcctactgacaaggtggaggaggccagtcggctcgcgagggagagtggcataaacatattcttcataacgattgaaggtgctgctgagaacgaaaagcagtacgtggtggaaccaaattttgctaacaaggccgtgtgtaggacaaacggattttacagtttgcacgtgcaatcatggttcggcctgcacaaaactctgcagcccctggtcaagcgtgtctgcgacaccgacagactcgcctgcagcaaaacctgcttaaatagcgccgatattggctttgtgattgacgggtccagttccgttgggactggaaactttcggaccgtccttcagttcgtcacaaatttaactaaggagtttgagatcagcgataccgacactcgtattggcgctgtgcagtatacatatgagcagagactggagtttggattcgacaagtatagcagtaagcccgacatcttaaacgccattaaacgtgtcggctattggtcaggcggcacttcgaccggcgcagccatcaatttcgccctagagcaactgttcaagaagagtaaacctaacaagcgaaagctgatgattctaattacagacggaagaagctatgatgacgtgaggatacccgcgatggccgctcatctgaagggagtgattacctacgccataggagtcgcctgggcagcccaggaggaacttgaagtgatcgcaacccaccccgcaagggaccacagtttcttcgtggacgagttcgacaacctgcatcagtacgtgccaagaataatccagaatatttgcactgagtttaattctcagccaagaaactag

SEQ ID NO: 70120 - RNA, 1971 nt, Artificial Sequence
  derived and/or modified sequence
augagaacugucgugcugacuaugaaagccucugugauugaaauguuccucgugcuccuuguaaccggaguacacuccaacaaagaaacugccaagaaaauaaagcgaccuaaauuuacagugccacagaucaauugcgauguaaaagccggcaagaucauugaucccgaguuuauugugaaaugucccgcagguugccaggacccaaaauaccacguguauggcacggacguguacgcaucuuauagcucgguguguggagcagcaguccauuccggugugcuggacaauucuggggggaagaucuuaguccggaaagucgccggccagucuggcuauaaggguucauauucaaauggaguccagagucugucacucccgcgcuggagggagagcuuuauuguucuugaguccaaacccaaaaagggcguaacuuauccaucugcccucacguauuccucgaguaaguccccugcagcccaagcuggugaaaccacaaaggccuaccaaagaccuccaauucccggaacaaccgcucaacccguuacacugaugcagcuccuugccgucaccguugccguggcaacuccuacuacucuccccagaccaucuccuucggccgcgagcacuacuucgaucccccgcccucaaucggucggccaccggucccaagagauggaucuguggucuacugccacuuauacuaguucccagaaccgcccacgagcggaccccggacucgugcccaaggaggaacuuuccacccaaagucuggagccagugagccugggagaccccaauugcaagauugacuugucguuucucauugauggauccacuucgaucgguaaacggagauuccgaauccagaagcaacugcuggcagauguggcccaagcgcucgauaucgguccagccggcccccuaaugggcgugguucaguauggcgacaacccagccacccacuuuaaccugaaaacccauacuaauucacgugauuugaaaacagcuaucgaaaagauaacccagcgggggggccugagcaacguggggcgcgcaauuuccuuuguuacuaagaacuucuuuucaaaagccaacggcaaucgcuccggagcaccgaaugugguuguuguuaugguugauggauggccaaccgacaaaguggaggaggccagcaggcuugcuagagaaucaggaauaaauauuuuuuuuaucacgauagagggagcggcggagaaugaaaagcaauacgucguggaaccgaacuucgcuaauaaagcugucuguagaacaaauggguuuuacucccugcacguucagucaugguucggauuacacaaaacucugcaacccuuggucaaaagaguuugcgacacagaucggcucgcuuguucaaaaacaugccuuaacucagccgacaucggcuuugucaucgaugggucaucaucagucggcacggguaacuuccguaccguccuucaguucgugaccaacuugaccaaagaguuugaaaucucggauacggauacccgaaucggggcugugcaauacaccuacgaacaaagauuggaguuugguuucgacaaauauucgucuaagccagauaucuuaaacgccaucaagagagugggauacuggagcggcggaacaucaacuggggccgcaauaaacuuugcccuugagcagcucuuuaagaaaucgaagccuaacaagagaaaguugaugauucugauaacagacgggcguucuuacgacgaugugaggauucccgccauggccgcacaucucaagggcgugauuaccuacgccaucggaguugcgugggccgcucaggaagagcuugaagucauagcuacacacccggcucgugaccauagcuuuuucguugacgaguuugauaaccugcaccaguacgugccaagaaucauccagaacaucuguaccgaauuuaacucacagccacguaauuag

SEQ ID NO: 70121 - RNA, 1971 nt, Artificial Sequence
  derived and/or modified sequence
augcguacaguaguucuaaccaugaaagcaaguguuauugaaauguuccuagugcugcuggugacaggcguucauagcaacaaagaaaccgcaaagaagauuaaaagaccaaaguucaccgugccucaaaucaacugcgacguaaaggccgggaagaucaucgacccggaauucauuguaaagugcccagcaggaugccaggauccuaaguaucauguauacgggaccgacguuuacgccaguuacagcucaguguguggcgcggccgugcacucaggagucuuagacaauaguggaggaaagaucuuaguccggaaagucgccggccagucuggcuauaaggguucauauucaaauggaguccagagucugucacucccgcgcuggagggagagcuuuauuguucuugaguccaaacccaaaaagggcguaacuuauccaucugcccucacguauuccucgaguaaguccccugcagcccaagcuggugaaaccacaaaggccuaccaaagaccuccaauucccggaacaaccgcucaacccguuacacugaugcagcuccuugccgucaccguugccguggcaacuccuacuacucucccuaggcccuccccauccgcagcaagcacgaccuccauaccgagaccccaguccguugggcauagaucucaagagauggaccuguggucgacggcuacauauaccucuucccagaacaggccccgcgcagacccuggacucguccccaaagaagaacucagcacucaaucauuggagccagugucucugggggacccaaauuguaagaucgaccuaucauucuuaaucgacgguaguaccuccaucgguaagcggcgcuucagaauccagaaacagcuacucgcugacgucgcacaagcccuggacaucgggccggccggaccacuaauggggguggugcaauacggggauaauccugccacucacuuuaaccuuaagacacacaccaauucuagagauuugaagacugcgaucgaaaagauuacucaacggggcggacuuaguaauguggggagagcuauuaguuuugugacaaagaacuucuuuucaaaggccaacggcaaccgaucuggcgcuccgaauguaguagucgugaugguugacggguggccaaccgacaagguugaggaggcuucuagauuggcacgggaaagcgguauuaacaucuucuucaucacuaucgagggcgcagcagagaaugaaaagcaguauguuguagaaccaaauuuugcaaauaaggccgugugucgaacaaacggguucuacucucuccacguccaauccugguucggucuccacaaaacucugcagccacuuguuaagcguguaugcgauaccgaucgacuugccuguagcaagaccugccugaacucugccgauaucggguuuguuauugauggguccuccuccguggguacugggaauuucaggacuguucuacaguuugucacuaaccucacuaaggaauuugaaauuagcgacacagacacaagaaucggcgccgugcaguauacuuaugagcagcgauuggaauucggauuugauaaauauagcucaaaaccugauaucuugaaugcuaucaaacggguuggguacugguccggcgguacaucuacuggcgcggcaaucaauuucgccuuagaacaguuauuuaagaagucuaagccuaauaagagaaaauugaugauucugauuacagauggccggagcuacgaugacgugcgcaucccagccauggcagcgcaccugaagggggugaucaccuacgccauuggaguggccugggcagcccaagaagaacuggaaguuauugcgacucauccagcccgggaucauaguuuuuucguugaugaauuugacaauuugcaucaguacgugccccgcauuauccagaacaucugcaccgaauuuaauagucagccacgcaauuag

SEQ ID NO: 70122 - protein, 203 aa, Artificial Sequence
  derived and/or modified sequence
MRTVVLTMKASVIEMFLVLLVTGVHSNKETAKKIKRPKFTVPQINCDVKAGKIIDPEFIVKCPAGCQDPKYHVYGTDVYASYSSVCGAAVHSGVLDNSGGKILVRKVAGQSGYKGSYSNGVQSLSLPRWRESFIVLESKPKKGVTYPSALTYSSSKSPAAQAGKCSRVIESKPSESMNTRRVLGDSGEINILTGQAPLALAIF

SEQ ID NO: 70123 - DNA, 612 bp, Artificial Sequence
  derived and/or modified sequence
atgagaacggtggtgctgaccatgaaggcttcagtgatcgaaatgttcttagtcctgctggtgactggagtgcatagcaacaaagagactgcgaaaaaaatcaaaaggcctaaattcacggttccacagatcaactgcgacgtcaaagctgggaaaataatcgatcccgagttcatcgtgaagtgcccagcaggatgtcaggatcccaagtaccacgtctatggaaccgatgtctacgcatcctatagcagtgtgtgtggtgcggcagtgcattccggtgtgctagataattccgggggaaagattctcgttaggaaggtggccggtcagagcgggtataaaggctcttattcaaacggtgtgcagtcccttagcctgccgaggtggagagagagcttcatcgtgttggagagcaagcccaagaaaggagtgacatatccctcagccctgacatattcctcctctaagagcccagccgcacaagccggtaaatgctcccgcgtgatcgaatctaaaccgtcggaatccatgaatactcgacgtgttttgggcgattctggagagatcaatatcctaactgggcaggccccactggccctagccattttttag

SEQ ID NO: 70124 - DNA, 612 bp, Artificial Sequence
  derived and/or modified sequence
atgcgcaccgtggtgttaacaatgaaggccagcgtgatcgaaatgtttttagtgctattagtaactggcgtccacagcaataaagaaacagcaaaaaaaatcaagaggcccaagttcaccgtcccccaaattaactgtgatgtcaaggccgggaagataattgaccccgagttcatagtaaagtgtcctgctggatgtcaagatcctaagtatcacgtgtatggaaccgacgtctacgcaagctattcttcggtatgtggagctgccgttcactctggggtcttggataattccggtgggaagatcctcgtacgcaaggttgctggacagagcggatataaagggagttatagcaacggcgtgcagtctctttcgttgcccaggtggcgtgaaagtttcatcgtgctcgagagtaagccgaagaaaggggtcacctaccctagcgctctcacctacagttcatcaaagtccccagcggctcaagccggcaaatgttcccgcgttatcgaatctaaaccttctgagagtatgaatacgcggcgcgtactcggcgatagcggggaaataaatattctgacaggtcaggctccactggctctggcaattttttag

SEQ ID NO: 70125 - DNA, 1344 bp, Artificial Sequence
  derived and/or modified sequence
gtaaaatgtgtttttcaaagtactgagaggttgatgggactgttcgattagctcctctgagaagaagagaaaaggttcttggacctctccctgtttcttccttagaataatttggatgggatttgtgatgcaggaaagcctaagggaaaaagaatattcattctgtgtggtgaaaattttttgaaaaaaaaattgccttcttcaaacaagggtgtcattctgatatttatgaggactgttgttctcactatgaaggcatctgttattgaaatgttccttgttttgctggtgactggagtacattcaaacaaagaaacggcaaagaagattaaaaggcccaagttcactgtgcctcagatcaactgcgatgtcaaagccggaaagatcatcgatcctgagttcattgtgaaatgtccagcaggatgccaagaccccaaataccatgtttatggcactgacgtgtatgcatcctactccagtgtgtgtggcgctgccgtacacagtggtgtgcttgataattcaggagggaaaatacttgttcggaaggttgctggacagtctggttacaaagggagttattccaacggtgtccaatcgttatccctaccacgatggagagaatcctttatcgtcttagaaagtaaacccaaaaagggtgtaacctacccatcagctcttacatactcatcatcgaaaagtccagctgcccaagcaggcaagtgctcacgtgtgattgaatctaaaccttctgagtccatgaacacgcgacgtgttttgggagatagcggagaaattaacatcttaaccggtcaagctccactggctctggcaatattttaacagatgccaggaacatgggcacagaaatcaatgagatcagatggctggggctgaagaatgaaagctttattttttgtttttgcaattccgagattgtgtctctatatttgtgtcattttcattcagattgactgttgccttgagttttaatgtattgttgctttagaaaatgacatgacattctgtccggaaatgtttcctggcagctaaaaggaaaaagctgtatctacttagatatgaaatgaagagaagcaaagagaacgaggtggtttatgtgataacagcaagctgctcatccaaataacccaggccaaaaatacactgtctacaaggttgtgccaactcagctttcatgtgaaccacaaaagggagtatcggtagacctcaggccaagaaaatacctttttccaggtttctgtgttaaatcaagaactgtactatgcattattgtatctccagaggtgttttgatttcccacacaaagagaaactgtgagtcgcttta

SEQ ID NO: 70126 - DNA, 612 bp, Artificial Sequence
  derived and/or modified sequence
atgcgcactgtagtgttaaccatgaaggcaagcgtaatcgaaatgtttctggttctccttgtgaccggggtgcatagcaataaagagactgccaagaaaatcaaaaggcctaagtttactgtgccacaaattaattgcgacgttaaggccggtaagattattgaccccgaattcattgtgaaatgtccagcaggctgccaagacccgaaataccatgtgtatggtaccgatgtctatgctagctactcaagtgtgtgtggagctgccgttcattccggcgttttagacaatagcggcgggaagattctggttcggaaagtagccggtcaaagtggatacaaaggatcttattcaaatggtgtgcagtctctgagcctgccaaggtggcgggaatcatttatcgtcctggaaagtaagcctaaaaaaggagttacatacccgagtgctctaacctatagctcttcaaagagtcctgcagcacaagccggcaagtgtagccgggtcattgagtctaaaccctccgagagcatgaacacgcgcagagtgctgggagatagtggagaaattaacattctgactggccaagcgccactggccttagccattttctag

SEQ ID NO: 70127 - DNA, 612 bp, Artificial Sequence
  derived and/or modified sequence
atgagaaccgtggtgctgaccatgaaggccagcgtgatcgagatgttcctggtgctgctggtgaccggcgtgcacagcaacaaggagaccgccaagaagatcaagagacccaagttcaccgtgccccagatcaactgcgacgtgaaggccggcaagatcatcgaccccgagttcatcgtgaagtgccccgccggctgccaggaccccaagtaccacgtgtacggcaccgacgtgtacgccagctacagcagcgtgtgcggcgccgccgtgcacagcggcgtgctggacaacagcggcggcaagatcctggtgagaaaggtggccggccagagcggctacaagggcagctacagcaacggcgtgcagagcctgagcctgcccagatggagagagagcttcatcgtgctggagagcaagcccaagaagggcgtgacctaccccagcgccctgacctacagcagcagcaagagccccgccgcccaggccggcaagtgcagcagagtgatcgagagcaagcccagcgagagcatgaacaccagaagagtgctgggcgacagcggcgagatcaacatcctgaccggccaggcccccctggccctggccatcttctag

SEQ ID NO: 70128 - DNA, 612 bp, Artificial Sequence
  derived and/or modified sequence
atgagaacagtggtgctgaccatgaaagcttcagtaattgagatgttccttgtactactggtcaccggcgttcacagcaataaagaaaccgcaaagaagatcaaacggccaaaatttacggtgccccagatcaattgcgacgtgaaggccggcaagattatagatccagagttcattgttaaatgccctgccgggtgtcaggatcctaagtaccatgtctatggcaccgacgtatacgcctcatactcttccgtgtgcggtgccgccgttcactcgggagtactggataattcgggggggaagattttagttcgcaaggtagcaggccaatcaggctataagggaagctatagtaacggggtccagagcctgagcttacctaggtggagggaaagttttattgttctcgaaagcaagcccaagaaaggtgtgacatatccatctgcactgacttactctagtagcaagtcacccgctgcccaggccgggaagtgtagccgcgtcatagagagtaaaccttcagaatcgatgaacacccgccgggttttgggcgactccggtgaaattaacatacttacagggcaggcgccgttagctctggccatcttttag

SEQ ID NO: 70129 - DNA, 612 bp, Artificial Sequence
  derived and/or modified sequence
atgaggacagtggtgctgaccatgaaggcctctgtgattgagatgttcctggtgctgctggtgactggagtgcacagcaacaaggagacagccaagaagatcaagaggcccaagttcaccgtgccccagatcaactgtgatgtgaaggccggcaagatcatcgaccctgagttcatcgtgaagtgcccagctggctgccaggaccccaagtaccacgtgtatggaacagatgtgtatgccagctacagctctgtgtgtggggctgctgtgcacagcggcgtgctggacaacagcggcggcaagatcctggtgaggaaggtggccggccagagcggctacaagggcagctacagcaatggagtgcagagcctgagcctgccccgctggagggagagcttcatcgtgctggagagcaagcccaagaagggcgtgacctaccccagcgccctgacctacagcagcagcaagagccctgctgcccaggccggcaagtgcagccgggtgattgagagcaagcccagcgagagcatgaacacccggcgggtgctgggggacagcggggagatcaacatcctgaccggccaggcccccctggccctggccatcttctag

SEQ ID NO: 70130 - DNA, 612 bp, Artificial Sequence
  derived and/or modified sequence
atgcggaccgtggtgctgaccatgaaggccagcgtgatcgagatgttcttagtgttattggtgactggggtacactcaaataaggagactgcaaagaagattaagcgccctaagttcaccgtgccccagatcaactgtgacgtgaaggcaggcaagataattgaccccgagttcatcgttaaatgtcctgcaggctgccaggacccaaagtaccacgtctatgggacagacgtgtacgcttcatattctagcgtctgcggggcggccgtgcattccggagtgttagataactccgggggtaagatcctggttcgaaaggtggccgggcagtcgggatataaggggtcatattccaatggagtgcaatcactaagtctcccgagatggagagaaagcttcattgtcttggaaagcaagcctaagaagggcgtgacgtatccctcagctctgacgtattcctcctcgaagagtcccgctgcgcaggctggcaagtgtagccgggtcattgaatcaaagcccagcgagtccatgaatacgcgtagagtgttgggcgatagcggagagatcaatattctcacggggcaggcccctctggcactcgccattttctag

SEQ ID NO: 70131 - RNA, 612 nt, Artificial Sequence
  derived and/or modified sequence
augcgcaccgugguguuaacaaugaaggccagcgugaucgaaauguuuuuagugcuauuaguaacuggcguccacagcaauaaagaaacagcaaaaaaaaucaagaggcccaaguucaccgucccccaaauuaacugugaugucaaggccgggaagauaauugaccccgaguucauaguaaaguguccugcuggaugucaagauccuaaguaucacguguauggaaccgacgucuacgcaagcuauucuucgguauguggagcugccguucacucuggggucuuggauaauuccggugggaagauccucguacgcaagguugcuggacagagcggauauaaagggaguuauagcaacggcgugcagucucuuucguugcccagguggcgugaaaguuucaucgugcucgagaguaagccgaagaaaggggucaccuacccuagcgcucucaccuacaguucaucaaaguccccagcggcucaagccggcaaauguucccgcguuaucgaaucuaaaccuucugagaguaugaauacgcggcgcguacucggcgauagcggggaaauaaauauucugacaggucaggcuccacuggcucuggcaauuuuuuag

SEQ ID NO: 70132 - RNA, 612 nt, Artificial Sequence
  derived and/or modified sequence
augcgcacuguaguguuaaccaugaaggcaagcguaaucgaaauguuucugguucuccuugugaccggggugcauagcaauaaagagacugccaagaaaaucaaaaggccuaaguuuacugugccacaaauuaauugcgacguuaaggccgguaagauuauugaccccgaauucauugugaaauguccagcaggcugccaagacccgaaauaccauguguaugguaccgaugucuaugcuagcuacucaaguguguguggagcugccguucauuccggcguuuuagacaauagcggcgggaagauucugguucggaaaguagccggucaaaguggauacaaaggaucuuauucaaauggugugcagucucugagccugccaagguggcgggaaucauuuaucguccuggaaaguaagccuaaaaaaggaguuacauacccgagugcucuaaccuauagcucuucaaagaguccugcagcacaagccggcaaguguagccgggucauugagucuaaacccuccgagagcaugaacacgcgcagagugcugggagauaguggagaaauuaacauucugacuggccaagcgccacuggccuuagccauuuucuag

SEQ ID NO: 70133 - protein, 1557 aa, Artificial Sequence
  derived and/or modified sequence
MAARLLAPPGPDSFKPFTPESLANIERRIAESKLKKPPKADGSHREDDEDSKPKPNSDLEAGKSLPFIYGDIPQGLVAVPLEDFDPYYLTQKTFVVLNRGKTLFRFSATPALYILSPFNLIRRIAIKILIHSVFSMIIMCTILTNCVFMTFSNPPDWSKNVEYTFTGIYTFESLVKIIARGFCIDGFTFLRDPWNWLDFSVIMMAYITEFVNLGNVSALRTFRVLRALKTISVIPGLKTIVGALIQSVKKLSDVMILTVFCLSVFALIGLQLFMGNLRNKCVVWPINFNESYLENGTKGFDWEEYINNKTNFYTVPGMLEPLLCGNSSDAGQCPEGYQCMKAGRNPNYGYTSFDTFSWAFLALFRLMTQDYWENLYQLTLRAAGKTYMIFFVLVIFVGSFYLVNLILAVVAMAYEEQNQATLEEAEQKEAEFKAMLEQLKKQQEEAQAAAMATSAGTVSEDAIEEEGEEGGGSPRSSSEISKLSSKSAKERRNRRKKRKQKELSEGEEKGDPEKVFKSESEDGMRRKAFRLPDNRIGRKFSIMNQSLLSIPGSPFLSRHNSKSSIFSFRGPGRFRDPGSENEFADDEHSTVEESEGRRDSLFIPIRARERRSSYSGYSGYSQGSRSSRIFPSLRRSVKRNSTVDCNGVVSLIGGPGSHIGGRLLPEATTEVEIKKKGPGSLLVSMDQLASYGRKDRINSIMSVVTNTLVEELEESQRKCPPCWYKFANTFLIWECHPYWIKLKEIVNLIVMDPFVDLAITICIVLNTLFMAMEHHPMTPQFEHVLAVGNLVFTGIFTAEMFLKLIAMDPYYYFQEGWNIFDGFIVSLSLMELSLADVEGLSVLRSFRLLRVFKLAKSWPTLNMLIKIIGNSVGALGNLTLVLAIIVFIFAVVGMQLFGKSYKECVCKINQDCELPRWHMHDFFHSFLIVFRVLCGEWIETMWDCMEVAGQAMCLIVFMMVMVIGNLVVLNLFLALLLSSFSADNLAATDDDGEMNNLQISVIRIKKGVAWTKLKVHAFMQAHFKQREADEVKPLDELYEKKANCIANHTGADIHRNGDFQKNGNGTTSGIGSSVEKYIIDEDHMSFINNPNLTVRVPIAVGESDFENLNTEDVSSESDPEGSKDKLDDTSSSEGSTIDIKPEVEEVPVEQPEEYLDPDACFTEGCVQRFKCCQVNIEEGLGKSWWILRKTCFLIVEHNWFETFIIFMILLSSGALAFEDIYIEQRKTIRTILEYADKVFTYIFILEMLLKWTAYGFVKFFTNAWCWLDFLIVAVVVNALVGAIPSIMNVLLVCLIFWLIFSIMGVNLFAGKYHYCFNETSEIRFEIEDVNNKTECEKLMEGNNTEIRWKNVKINFDNVGAGYLALLQVATFKGWMDIMYAAVDSRKPDEQPKYEDNIYMYIYFVIFIIFGSFFTLNLFIGVIIDNFNQQKKKFGGQDIFMTEEQKKYYNAMKKLGSKKPQKPIPRPLNKIQGIVFDFVTQQAFDIVIMMLICLNMVTMMVETDTQSKQMENILYWINLVFVIFFTCECVLKMFALRHYYFTIGWNIFDFVVVILSIV

SEQ ID NO: 70134 - protein, 1939 aa, Artificial Sequence
  derived and/or modified sequence
MAARLLAPPGPDSFKPFTPESLANIERRIAESKLKKPPKADGSHREDDEDSKPKPNSDLEAGKSLPFIYGDIPQGLVAVPLEDFDPYYLTQKTFVVLNRGKTLFRFSATPALYILSPFNLIRRIAIKILIHSVFSMIIMCTILTNCVFMTFSNPPDWSKNVEYTFTGIYTFESLVKIIARGFCIDGFTFLRDPWNWLDFSVIMMAYITEFVNLGNVSALRTFRVLRALKTISVIPGLKTIVGALIQSVKKLSDVMILTVFCLSVFALIGLQLFMGNLRNKCVVWPINFNESYLENGTKGFDWEEYINNKTNFYTVPGMLEPLLCGNSSDAGQCPEGYQCMKAGRNPNYGYTSFDTFSWAFLALFRLMTQDYWENLYQLTLRAAGKTYMIFFVLVIFVGSFYLVNLILAVVAMAYEEQNQATLEEAEQKEAEFKAMLEQLKKQQEEAQAAAMATSAGTVSEDAIEEEGEEGGGSPRSSSEISKLSSKSAKERRNRRKKRKQKELSEGEEKGDPEKVFKSESEDGMRRKAFRLPDNRIGRKFSIMNQSLLSIPGSPFLSRHNSKSSIFSFRGPGRFRDPGSENEFADDEHSTVEESEGRRDSLFIPIRARERRSSYSGYSGYSQGSRSSRIFPSLRRSVKRNSTVDCNGVVSLIGGPGSHIGGRLLPEATTEVEIKKKGPGSLLVSMDQLASYGRKDRINSIMSVVTNTLVEELEESQRKCPPCWYKFANTFLIWECHPYWIKLKEIVNLIVMDPFVDLAITICIVLNTLFMAMEHHPMTPQFEHVLAVGNLVFTGIFTAEMFLKLIAMDPYYYFQEGWNIFDGFIVSLSLMELSLADVEGLSVLRSFRLLRVFKLAKSWPTLNMLIKIIGNSVGALGNLTLVLAIIVFIFAVVGMQLFGKSYKECVCKINQDCELPRWHMHDFFHSFLIVFRVLCGEWIETMWDCMEVAGQAMCLIVFMMVMVIGNLVVLNLFLALLLSSFSADNLAATDDDGEMNNLQISVIRIKKGVAWTKLKVHAFMQAHFKQREADEVKPLDELYEKKANCIANHTGADIHRNGDFQKNGNGTTSGIGSSVEKYIIDEDHMSFINNPNLTVRVPIAVGESDFENLNTEDVSSESDPEGSKDKLDDTSSSEGSTIDIKPEVEEVPVEQPEEYLDPDACFTEGCVQRFKCCQVNIEEGLGKSWWILRKTCFLIVEHNWFETFIIFMILLSSGALAFEDIYIEQRKTIRTILEYADKVFTYIFILEMLLKWTAYGFVKFFTNAWCWLDFLIVAVVVNALVGAIPSIMNVLLVCLIFWLIFSIMGVNLFAGKYHYCFNETSEIRFEIEDVNNKTECEKLMEGNNTEIRWKNVKINFDNVGAGYLALLQVATFKGWMDIMYAAVDSRKPDEQPKYEDNIYMYIYFVIFIIFGSFFTLNLFIGVIIDNFNQQKKKFGGQDIFMTEEQKKYYNAMKKLGSKKPQKPIPRPLNKIQGIVFDFVTQQAFDIVIMMLICLNMVTMMVETDTQSKQMENILYWINLVFVIFFTCECVLKMFALRHYYFTIGWNIFDFVVVILSIVGMFLADIIEKYFVSPTLFRVIRLARIGRILRLIKGAKGIRTLLFALMMSLPALFNIGLLLFLVMFIFSIFGMSNFAYVKHEAGIDDMFNFETFGNSMICLFQITTSAGWDGLLLPILNRPPDCSLDKEHPGSGFKGDCGNPSVGIFFFVSYIIISFLIVVNMYIAIILENFSVATEESADPLSEDDFETFYEIWEKFDPDATQFIEYCKLADFADALEHPLRVPKPNTIELIAMDLPMVSGDRIHCLDILFAFTKRVLGDSGELDILRQQMEERFVASNPSKVSYEPITTTLRRKQEEVSAVVLQRAYRGHLARRGFICKKTTSNKLENGGTHREKKESTPSTASLPSYDSVTKPEKEKQQRAEEGRRERAKRQKEVRESKC

SEQ ID NO: 70135 - DNA, 4674 bp, Artificial Sequence
  derived and/or modified sequence
atggctgcaaggctgctagctccccccggacctgattcttttaaaccctttacgcctgaatccctggccaacatagaacgtcgaatagcggaaagcaagctgaaaaagccccccaaagcggacgggtcccaccgcgaagacgatgaagactccaagccaaagcccaatagcgacctggaagccggtaaatccttgccattcatatatggcgatataccacaaggcttggtcgccgtcccgctggaggattttgatccctattatttaacacagaaaacgttcgtcgtgctcaatagaggcaagaccctcttccggttttctgccactcctgctctttacatattaagccccttcaatttgatcaggcggatcgctattaaaatcctcatccacagcgtgttcagtatgatcatcatgtgcacaattctgaccaactgcgttttcatgaccttttctaaccccccggattggtccaagaacgtggagtatactttcaccggcatttacacatttgaatctctcgtgaaaatcatcgcacggggattttgcatcgacggcttcaccttcctgcgcgacccgtggaactggcttgacttttcggtgattatgatggcatacatcacggagtttgtgaatctcggaaatgtcagcgcattgagaactttcagggttttgcgcgccctcaaaacaatatctgttattcctggactcaagacaattgtcggggcactgattcaatcggtgaaaaagctatccgacgtgatgatcctgacagtgttctgtttaagtgtgttcgctctcatcggcctgcagctctttatggggaacttgcgaaacaagtgtgtagtgtggcccatcaactttaatgagtcttacctggaaaacgggacgaaaggcttcgattgggaagagtacataaataataaaactaacttctataccgtgcccggaatgctggaaccactcctgtgtgggaattcatccgacgctgggcaatgcccagaaggttaccaatgtatgaaagccgggcgaaatccaaactacggctacacgtcttttgacaccttttcctgggcttttctagcccttttccgccttatgactcaggactattgggagaacctgtatcagttgacgctgcgggcggcagggaagacctacatgatcttttttgttctggtcatattcgtgggatctttctacctggtgaacctgattctcgctgtagtggctatggcatacgaggaacagaatcaggcaaccctggaagaggcagaacagaaagaggctgagttcaaggctatgctagagcagctcaagaagcagcaggaagaggctcaagcagccgctatggcgacctccgccggaacggtgagtgaggacgcaatagaggaggaaggtgaggaaggggggggctcgccccgctcaagtagcgagatctcaaagctcagcagtaagagtgccaaagaacgcagaaatagacgtaagaaaagaaaacagaaggaattgtctgagggggaagagaagggggacccggagaaggttttcaaatcggaaagcgaagatgggatgcgtcggaaggcttttcgacttccagacaaccggataggaagaaagttttccattatgaaccagtcactgctgagtattccagggtccccatttttatcccggcacaactccaaaagcagtattttctccttccgcggcccagggcggttccgcgatcccggatccgagaacgaattcgccgatgatgaacactccacggtggaggagtccgaaggtagaagggacagcctatttatcccaattagggctagggaaagacggtcctcttatagtggatacagtggatatagccaaggtagccgaagcagtaggatcttcccatctctgaggcggtccgtgaagagaaactccaccgtggactgcaacggcgtcgtctccttaatcggcggaccaggatcccatatcgggggtaggctgcttcccgaagccaccaccgaggtggagataaagaagaagggaccgggctcgctgcttgtgtccatggaccagctggcctcctatggtaggaaggacaggattaattcaataatgtcggtcgtgaccaacactctggtggaagagctggaggagtcccaacgaaagtgtcccccatgctggtataaatttgctaatacattcttgatctgggaatgccatccatactggatcaaactcaaggagattgtgaatctgatcgtgatggaccctttcgttgacctggcaattaccatctgtatagtgctgaacactctctttatggccatggaacatcatcccatgacgccgcagttcgaacatgttttggccgttggaaacctggtcttcacaggaatctttactgccgaaatgtttcttaaactgatagcaatggacccctactactatttccaggaggggtggaatatctttgatggattcattgtatcactgtctcttatggagctgagtctggcagacgtagaaggcctttctgtgctgcgctctttcagattgcttagagtcttcaagctcgctaagagctggcctaccctaaacatgctgatcaaaatcatcggcaatagtgttggggctttaggtaacttgacattagtgctggccatcatcgttttcatattcgccgtcgtcggcatgcaattgtttgggaaaagctacaaagagtgtgtgtgtaaaattaatcaagattgcgagctcccgaggtggcacatgcatgatttctttcactcattcctgatcgtctttcgggtgctctgtggcgaatggatagagacaatgtgggattgtatggaggtggctggccaggcaatgtgtctgatcgtgttcatgatggttatggtcattggtaatctcgttgtgcttaatttgtttttggcgctcctgctatcaagcttctccgcggacaatctggctgccactgacgatgacggtgagatgaacaatttacagatttccgtgatacgcattaaaaaaggcgtagcatggaccaaactcaaggtgcatgctttcatgcaagcgcattttaagcaacgcgaagctgacgaggtcaagcctctggatgaattgtatgagaaaaaagctaactgcattgctaatcacaccggagcggatattcacagaaacggggacttccagaaaaatggtaatggcaccacctctggcattgggagttctgtggaaaagtacatcattgatgaagaccatatgagtttcattaacaacccaaacctgaccgttcgcgtcccaatagcggtaggcgaatccgactttgagaacctcaacaccgaggacgtttctagcgaatcggaccctgaggggtccaaggacaagctcgatgacacatcgagttccgagggcagtactattgatatcaagccagaggtggaggaagtgcccgtcgaacaaccagaggagtatctcgatcccgatgcttgctttacagagggatgcgtgcaacgctttaaatgttgtcaagtgaacattgaggaaggattgggcaagagttggtggatccttaggaaaacatgcttcctcattgtggagcataattggtttgaaacgtttatcatttttatgatcctgctgagtagcggcgcgctggcctttgaggacatctacatcgagcagaggaagaccatccggaccatcctggagtacgccgacaaagtctttacgtacatctttatcctagaaatgcttttgaaatggacagcatacggattcgttaaattttttacaaacgcatggtgttggctggattttttgatcgttgctgtggtggtgaacgccctggtcggtgcaattccttctatcatgaacgtcctcctggtttgcctgattttttggttaattttttctatcatgggcgtcaacttatttgccggtaaatatcattattgcttcaacgagactagtgagattagattcgagatcgaagacgttaacaataagaccgagtgtgagaaactaatggaaggaaataataccgagatccgatggaagaatgtaaaaataaactttgacaatgtgggggccgggtacctcgcactgctccaagtcgcgacattcaagggctggatggatatcatgtacgccgccgtggatagccgcaagcccgacgaacagccaaaatatgaggacaacatttacatgtatatctactttgtcatattcattattttcgggtccttctttaccctcaatttgttcattggcgtcattatcgacaacttcaaccaacagaagaagaaatttggcggtcaagacatatttatgacggaggagcagaaaaagtattataatgctatgaagaagctggggagcaaaaaaccacagaaacccatacctaggcctctcaataagatccagggcatcgtcttcgatttcgtgacccagcaggcattcgatatcgttataatgatgctgatctgcctgaacatggttacaatgatggtcgagaccgatacccagtctaagcagatggagaatattctgtactggattaacttggtgttcgttatcttctttacgtgcgaatgcgttctcaagatgtttgctttgagacattattactttacaatcggatggaacatcttcgactttgtggttgtgatcctcagcatagtctag

SEQ ID NO: 70136 - DNA, 3588 bp, Artificial Sequence
  derived and/or modified sequence
ttcctaagtccgcagacctttgtggtcctaaatcggggcaaaacgctgttcaggtttagtgccacacccgcattgtacattctgagtccattcaatctgatacggaggatcgccattaaaattcttatacatagtctgttttccatgattatcatgtgcactattctcactaattgcgtcttcatgactttttcaaatcctcctgattggagcaagaacgtggaatacacattcaccggcatatataccttcgaaagcctggtaaagattattgccagaggcttctgcattgacgggtttacgtttctgagagacccatggaattggttggatttcagtgtcattatgatggcatacattacagaattcgtaaacctggggaacgtttccgccctgcgcacgtttagagtcttgagggcacttaagacaatatccgtgatacctggtcttaaaacaatcgttggtgcgctgatccagagcgtcaagaaactctcagatgttatgattcttactgtattttgtttgagcgtgtttgcactcattggtctgcagctgtttatgggaaacctccggaataagtgtgtggtgtggcccataaatttcaatgagagctacctcgagaatgggaccaagggcttcgattgggaagagtacatcaataataagaccaatttctacactgtgcccggtatgttggagcctcttttgtgtggaaactcatccgacgcaggccagtgccccgaaggctatcagtgcatgaaggcgggcaggaatcccaattacggctacacatcatttgatacctttagttgggcctttcttgcgctttttagacttatgacacaggactattgggagaatctgtaccagctgacactgcgggcggccggaaaaacttatatgatcttttttgttctagtgatcttcgttggcagcttctatctggtcaacctgattctggccgtggtggccatggcttatgaggaacagaatcaggccacactggaggaggctgaacagaaggaggctgagttcaaagctatgctggaacaactgaagaagcaacaggaggaagctcaggcagccgccatggcaactagcgccgggaccgtgagtgaggacgctatagaggaggaaggagaagagggcgggggctcgccccgcagctccagcgaaatctccaaattgtcctctaaatctgcaaaggagaggagaaatagaagaaagaagcggaaacagaaagaacttagcgagggcgaggaaaagggcgaccctgagaaagtattcaagtcagaatccgaggacggcatgcgtaggaaggcctttcggctgcccgataatagaattggcagaaaattttccattatgaaccagagcctcttgtcaattcctgggagtccatttctgagccgccataattccaaatcatccatcttttcattccgaggtcccggccgtttccgcgacccagggagcgagaatgaatttgccgacgatgaacatagtacagtggaagaatctgaagggcgtagggactctttattcatacctataagagctcgggagcgtcgttcctcttacagcggttactctggctactctcagggttccagatccagccgaatctttccatcactgcggcgctccgtgaaacgcaactcgactgtagactgcaacggggttgttagtctaataggaggacccggaagccacatcggtggaaggcttctcccagaagctaccaccgaagtggagatcaaaaaaaagggacctggctccttgctcgtctcaatggatcagctcgcgagctatggaaggaaggaccgcatcaacagcatcatgtccgtggtgaccaataccctggtggaagagttggaagagtctcagaggaaatgtccaccatgctggtataaatttgcgaatacttttctcatctgggagtgccatccctactggattaaactgaaagagattgttaatctgattgtgatggatcctttcgtcgacctggctattacaatttgtattgtgttaaatacactttttatggcaatggagcatcatcccatgacaccccagttcgaacacgttcttgcggttggaaacctggtgttcactggtatcttcaccgcggaaatgtttctaaagctgattgctatggacccctattattactttcaggaaggctggaatatttttgacggcttcattgtgtccctgtccctgatggagctgtcgttggccgatgttgagggacttagcgttttgcgatccttcaggctgttgcgggtgtttaagttagccaagagctggccaaccctcaacatgctaatcaaaattatcggtaattccgtcggagccctgggtaacctcaccctggtgctagctatcatcgtttttatttttgcagtagtggggatgcagctgtttggaaaatcgtacaaggaatgcgtttgcaagatcaaccaggattgcgaactgccaaggtggcacatgcatgatttctttcactcctttctgatcgtttttcgggtgttatgcggtgaatggattgagacaatgtgggattgtatggaggtggctggtcaggcgatgtgtctgattgtttttatgatggtcatggtgatcggcaatctcgttgttctgaatttgtttcttgccctgctgctgtcatctttttcagctgataacctggctgccaccgacgatgacggcgaaatgaacaatttgcagatcagcgtcatccggataaaaaaaggggtggcctggacaaaactcaaagtgcacgccttcatgcaagcacatttcaagcagagggaagctgatgaggtgaagcccctggacgagctgtacgaaaagaaagccaactgcatagccaaccacaccggggcagatattcatcgtaatggcgattttcagaaaaacggcaacggcacaacttctggcatcggttctagcgtcgagaaatatatcatcgatgaagatcacatgagcttcattaacaaccccaatctgaccgttagagtgcccatagcagttggagaatccgatttcgagaacctcaacacggaggatgtttcctctgagagtgacccagaaggcagcaaagacaagctggatgatacatcttcctcagaaggcagtactattgatatcaagcccgaagtggaagaagtgcccgttgagcagcccgaggaatatctagatcctgatgcttgtttcaccgaggggtgtgtgcagagattcaagtgctgccaagtgaacattgaagaggggttggggaaaagctggtggatactgcgcaaaacgtgttttctgattgttgagcacaattggtttgagacatttattatctttatgattctgctgtcaagcggtgctctggctttcgaggacatctatatcgagcagagaaagactattagaacaatcctggaatacgccgacaaagtatttacatacattttcatattagagatgcttctgaagtggacagcttacgggttcgtcaagttcttcacaaacgcctggtgctggctggattttctgattgtcgctgtgccgttgaatctttccggattaatctag

SEQ ID NO: 70137 - DNA, 5820 bp, Artificial Sequence
  derived and/or modified sequence
atggctgcccgtctgctagccccaccaggacctgactcgttcaaacccttcacgcctgagtctttggctaacatcgaaagaagaatcgctgagtccaagctcaagaaaccgccgaaagccgacggatcacatcgggaggacgatgaggacagtaaaccaaagcccaactccgacctggaggccggaaagtctctgcccttcatatatggagatatcccccagggtctcgttgctgtgccactagaagactttgacccatattacttaacccagaagaccttcgttgtgctaaaccggggaaaaaccctcttcaggttcagcgccacacccgccctatatatcctttctccttttaatttaatcaggagaattgccataaagatacttattcactctgtgtttagcatgattatcatgtgtacaattttgaccaattgcgtcttcatgacattcagtaatcctcctgactggagcaagaacgtcgagtacactttcaccggcatctacactttcgaatctttggttaagattatcgcaagagggttctgcatagacggatttaccttccttcgagacccatggaactggctggatttctcggtaattatgatggcttacattactgagtttgtcaatttgggcaatgtatctgctctgaggacttttcgggtgctgcgggcacttaaaactatctccgtgattcccggcctgaagacaatcgttggggccctgattcagagtgtgaagaagctcagtgacgtcatgatcctcaccgtattctgcctatccgtatttgctcttattgggctgcagcttttcatggggaatttgaggaacaagtgcgtcgtgtggcctatcaatttcaatgagtcgtacctggaaaacggtactaaaggctttgactgggaagaatacatcaacaataaaacgaacttttacacggtgcccggcatgcttgagcctttactgtgtggcaatagtagtgacgccggacagtgtccagaaggctaccaatgtatgaaggctgggcgcaaccctaattatgggtatacatccttcgacaccttctcctgggctttcctagccctgttccgactaatgactcaagactattgggagaatctataccagctgactttaagggccgcagggaaaacctacatgatttttttcgtgctcgtgatcttcgtcgggagcttctatctggtcaacctgatactagctgtggtggccatggcctatgaggagcagaaccaggccaccttggaggaggcagagcagaaggaagccgagttcaaggccatgctggagcagctgaaaaagcaacaggaagaagctcaggccgccgcaatggctacgtcagcgggaacagtctcagaggacgcgatcgaagaagagggcgaggaaggcggggggtctccccggtcaagcagcgagattagcaaattgtcatccaaaagtgccaaagaacgacggaatagaagaaagaagaggaagcaaaaggaactttccgaaggagaagaaaagggggatcctgagaaggtttttaaatcagagtctgaggatggtatgaggcgcaaggcatttaggctgcctgataatcgtatcggtagaaaattctccattatgaatcagtccctgctgtctatccctggctcacccttccttagccgccacaattctaaatcctccatcttcagtttccgaggtccaggcaggttccgcgaccctggatctgagaacgaatttgccgacgatgagcatagcaccgttgaagagtcagaaggaaggagagattcccttttcatacctattagggccagagaacgcagatcgtcttactccgggtatagcggctacagtcagggatctcgatccagccggatatttccgagtcttcggcgttccgtaaagagaaactctaccgtggactgtaatggggtggttagcctcattgggggccctggatctcatattggaggacggttgctgcccgaagcaaccacagaggttgagatcaagaaaaaggggcccggatccctgctcgtgagtatggaccaattggcatcttatgggcgaaaggatcgaatcaactccattatgtctgtggtgacgaatacactggtggaggaactggaagaaagtcagaggaaatgtcccccttgctggtacaagttcgccaacactttccttatttgggaatgccatccttactggatcaagctgaaggaaattgtgaatctgatagtgatggaccccttcgtcgacctagctatcactatctgcatcgtgcttaacacacttttcatggccatggagcatcatcctatgactccccagtttgagcacgtgctcgctgtgggtaacctggtttttactggtattttcactgccgagatgtttttaaaactaatcgctatggacccctattattactttcaagagggctggaacatatttgatgggtttattgttagtctctcactcatggaactgagtctcgcggacgtggaagggctgagtgtgttacgcagctttcggcttctcagagtcttcaaacttgctaagtcatggcctacgctgaatatgctgatcaaaatcattggcaacagcgttggcgcacttgggaaccttactttagtgctagctataatagtttttattttcgccgttgtcggtatgcagttgtttggcaagagctacaaagagtgtgtgtgtaagattaaccaggattgcgagttaccacgctggcacatgcatgatttctttcactctttcctgatagtgttccgagttttgtgcggggaatggattgaaaccatgtgggactgtatggaggtggctgggcaggcgatgtgtcttatcgtgtttatgatggttatggtgatcggcaacctcgtggtgttgaacctgttcttagcgcttctgttatcatccttcagcgccgacaacctggccgcaacggacgatgatggtgagatgaacaaccttcaaattagtgtgatcagaatcaaaaaaggcgtcgcttggactaaattaaaagtccacgcttttatgcaggcccattttaagcagcgagaagctgatgaggtgaagccattggacgaactttacgagaagaaggctaactgtattgctaaccacacaggtgctgatatacatcgcaacggcgacttccaaaagaatggaaacggcactacctccggtatcgggtcttcggtcgagaagtacatcattgatgaggatcacatgagttttatcaataaccctaatctgaccgtgagagtgccgattgccgtgggagagtcagatttcgaaaatctgaacacggaggatgtctcgtctgaaagcgaccccgagggtagcaaggacaagcttgacgacacctcctctagtgagggatctactatagacattaaacccgaagtggaggaagtgcctgtggagcagccggaggaatacctggacccggatgcctgtttcactgaagggtgcgtccagaggtttaagtgttgccaggtcaatatcgaagaaggactgggcaaaagctggtggattctgaggaaaacctgcttcctgatcgtggaacataattggtttgaaacctttatcattttcatgatcctgctgtccagcggagctttggctttcgaggatatatacatcgagcaacgcaagactattagaacaattttagagtatgcggacaaggtcttcacatacatcttcatactcgaaatgctgctgaagtggaccgcctacgggttcgtgaaattctttacgaacgcttggtgctggttggacttccttatcgttgcagtcgtagttaacgctttagtgggcgccattcccagtatcatgaacgtgttgctggtgtgcttgatcttttggttaatcttcagtattatgggagtgaatctgttcgccgggaaataccattattgcttcaatgagacttcagagatccgatttgaaatcgaagatgtgaacaacaaaacagagtgtgagaaactgatggaaggcaacaatacagaaattcgctggaaaaacgtaaaaatcaatttcgacaatgtcggagcaggatacctggctctgttgcaggttgccacttttaaggggtggatggacatcatgtatgccgctgtggactctcgcaagcctgatgagcaaccaaagtacgaggacaacatctacatgtacatttattttgtgatattcatcatctttggctctttcttcacactgaacctcttcatcggagtgatcattgataactttaaccagcagaagaaaaaattcggggggcaggatatttttatgacagaagagcaaaagaagtattacaacgccatgaagaagctggggagcaagaaaccgcagaagcccatacctcgcccattaaataagatacaggggattgtgtttgacttcgtaacacaacaagcctttgatatcgtcatcatgatgttgatatgtctcaacatggtgaccatgatggtggagacggacacccaaagtaagcagatggaaaacatcttatattggattaacttagtctttgtaatattctttacgtgcgagtgcgtactgaaaatgtttgctctgcgtcactattactttacaatcggctggaacatatttgacttcgtagtggtgattctgtctatcgtaggtatgttccttgcagacatcatcgaaaagtattttgtgtcgccaacgttgttccgcgtgatccgcctcgctcgcattggcaggattttgcggttgataaagggagccaaggggataagaaccctgcttttcgctctgatgatgtccctccctgcattatttaacatcggtttgttgctctttctggtcatgtttatcttctctatttttggaatgtccaacttcgcatatgttaagcacgaggctggcattgacgatatgttcaatttcgagactttcggcaattctatgatctgcctgttccagatcacaacctctgccggctgggacgggttgttactgccaattcttaaccgacctcccgactgttccctggataaagagcatcctggctccgggtttaaaggcgactgcggaaatccctcagttgggatctttttctttgtgagctacattatcatcagcttcctcatagtggtgaacatgtatattgctatcattctggagaatttttctgttgctacagaggagagcgccgacccactatcggaggacgacttcgaaacattctacgagatttgggaaaagttcgatcccgacgcaacccagttcatcgagtactgtaagctcgccgacttcgctgatgcacttgagcaccctctgcgtgtaccaaaacctaataccatcgaacttatcgctatggatctgccgatggtgtccggcgacagaatacactgtcttgatatactgttcgcctttaccaaaagagttttaggagattcgggagagctggatatcctgagacaacagatggaagaacgcttcgttgcctccaatccgagcaaggtttcatacgaacccatcactaccactctgcgtcggaagcaggaggaagtgagcgccgtggtactgcagagagcttaccgaggacacctcgctcggcggggatttatctgcaagaagacgacatcaaacaagcttgagaatggaggcacacacagggaaaagaaggaatctaccccctctacagcttcactgcctagttacgattctgtgacaaagcctgagaaggagaaacagcagagggccgaagagggtcgcagggaacgtgctaaacgccagaaagaggtgagggaaagtaagtgctag

SEQ ID NO: 70138 - DNA, 4674 bp, Artificial Sequence
  derived and/or modified sequence
atggccgcccggctgctggcccctcctggccctgacagcttcaagcccttcaccccagagagcctggccaacattgaaagaagaattgctgagagcaagctgaagaagccacccaaggcagatggcagccaccgggaggatgatgaggacagcaagcccaagcccaacagcgacctggaggccggcaagagcctgcccttcatctatggagacatcccccagggcctggtggccgtgcccctggaggactttgacccctactacctgacccagaagacctttgtggtgctgaacagaggcaagaccctcttccgcttcagcgccaccccagccctgtacatcctgagccccttcaacctgatccgccgcatcgccatcaagatcctgatccacagcgtcttctccatgatcatcatgtgcaccatcctgaccaactgtgtgttcatgaccttcagcaaccccccagactggagcaagaatgtggagtacaccttcaccggcatctacacctttgagagcctggtgaagatcatcgcccggggcttctgcattgatggcttcaccttcctgcgggacccctggaactggctggacttcagcgtcatcatgatggcctacatcacagaatttgtgaacctgggcaatgtgtctgccctgcggaccttccgggtgctgcgggccctgaagaccatcagcgtcatccctggcctgaagaccatcgtgggcgccctgatccagagcgtgaagaagctgagtgatgtgatgatcctgaccgtcttctgcctgtctgtgtttgccctgattggcctgcagctgttcatgggcaacctgaggaacaagtgtgtggtgtggcccatcaacttcaatgaaagctacctggagaatggcaccaagggctttgactgggaggagtacatcaacaacaagaccaacttctacacagtgcccggcatgctggagcccctgctgtgtggcaacagcagtgatgctggccagtgcccagagggctaccagtgcatgaaggccggcaggaaccccaactacggctacaccagctttgacaccttctcctgggccttcctggccctcttccggctgatgacccaggactactgggagaacctgtaccagctgaccctgcgggctgctgggaagacctacatgatcttctttgtgctggtgatctttgtgggcagcttctacctggtgaacctgatcctggccgtggtggccatggcctatgaggagcagaaccaggccaccctggaggaggccgagcagaaggaggccgagttcaaggccatgctggagcagctgaagaagcagcaggaggaggcccaggccgccgccatggccaccagcgctggcaccgtgtctgaagatgccatcgaggaggagggggaggagggcggcggcagccccaggagcagcagcgagatcagcaagctgagcagcaagagcgccaaggagaggaggaacagaaggaagaagaggaagcagaaggagctgtctgagggggaggagaagggggaccctgagaaggtgttcaagtctgagagtgaagatggcatgaggaggaaggccttccggctgcctgacaaccgcatcggcaggaagttcagcatcatgaaccagagcctgctgagcatccctggcagccccttcctgagccgccacaacagcaagagcagcatcttctccttccggggccctggccgcttccgggaccccggctctgaaaatgaatttgctgatgatgagcacagcacagtggaggagagcgagggcagaagagacagcctcttcatccccatccgggcccgggagcggcgcagcagctacagcggctacagcggctacagccagggcagccgcagcagccgcatcttccccagcctgcggcgctctgtgaagaggaacagcacagtggactgcaatggagtggtgtccctcatcggcggccctggcagccacatcggcggccgcctgctgcctgaggccaccacagaggtggagatcaagaagaagggccctggcagcctgctggtgtccatggaccagctggccagctatggcaggaaggaccgcatcaacagcatcatgtctgtggtgaccaacaccctggtggaggagctggaggagagccagaggaagtgccccccctgctggtacaagtttgccaacaccttcctgatctgggagtgccacccctactggatcaagctgaaggagatcgtgaacctgattgtgatggacccctttgtggacctggccatcaccatctgcatcgtgctgaacaccctcttcatggccatggagcaccaccccatgaccccccagtttgaacatgtgctggccgtgggcaacctggtgttcaccggcatcttcaccgctgagatgttcctgaagctgattgccatggacccctactactacttccaggagggctggaacatctttgatggcttcatcgtgtccctgagcctgatggagctgagcctggctgatgtggagggcctgtctgtgctgcgctccttccggctgctgcgggtcttcaagctggccaagtcctggcccaccctgaacatgctgatcaagatcatcggcaacagcgtgggcgccctgggcaacctgaccctggtgctggccatcatcgtgttcatctttgctgtggtgggcatgcagctgtttgggaagagctacaaggaatgtgtgtgcaagatcaaccaggactgtgagctgccccgctggcacatgcatgacttcttccacagcttcctgattgtgttccgggtgctgtgtggggagtggattgagaccatgtgggactgcatggaggtggccggccaggccatgtgcctgattgtgttcatgatggtgatggtgattggcaacctggtggtgctgaacctcttcctggccctgctgctgagcagcttctctgctgacaacctggccgccacagatgatgatggagagatgaacaacctgcagatcagcgtcatccgcatcaagaagggcgtggcctggaccaagctgaaggtgcacgccttcatgcaggcccacttcaagcagcgggaggctgatgaggtgaagcccctggatgagctgtatgagaagaaggccaactgcatcgccaaccacactggagctgacatccacagaaatggagacttccagaagaatggaaatggcaccaccagcggcatcggcagctctgtggagaagtacatcattgatgaggaccacatgtccttcatcaacaaccccaacctgactgtgcgggtgcccatcgctgtgggggagagtgactttgagaacctgaacacagaagatgtgtcctctgagagtgaccctgagggcagcaaggacaagctggatgacaccagcagcagcgagggcagcaccatcgacatcaagccagaggtggaggaggtgcctgtggagcagcctgaggagtacctggaccctgatgcctgcttcacagagggctgtgtgcagcgcttcaagtgctgccaggtgaacatcgaggagggcctgggcaagtcctggtggatcctgaggaagacctgcttcctgattgtggagcacaactggtttgagaccttcatcatcttcatgatcctgctgagcagcggggccctggcctttgaggacatctacatcgagcagaggaagaccatccgcaccatcctggagtatgctgacaaggtgttcacctacatcttcatcctggagatgctgctgaagtggacagcctacggctttgtgaagttcttcaccaatgcctggtgctggctggacttcctgattgtggccgtggtggtgaatgccctggtgggcgccatccccagcatcatgaatgtgctgctggtgtgcctgatcttctggctgatcttcagcatcatgggcgtgaacctgtttgctgggaagtaccactactgcttcaatgagaccagcgagatccgctttgaaattgaagatgtgaacaacaagacagaatgtgagaagctgatggagggcaacaacacagagatccgctggaagaatgtgaagatcaactttgacaacgtgggcgccggctacctggccctgctgcaggtggccaccttcaagggctggatggacatcatgtatgctgctgtggacagcaggaagccagatgagcagcccaagtatgaggacaacatctacatgtacatctactttgtgatcttcatcatcttcggcagcttcttcaccctgaacctcttcatcggggtcatcatcgacaacttcaaccagcagaagaagaagtttggaggccaggacatcttcatgacagaggagcagaagaagtactacaatgccatgaagaagctgggcagcaagaagccccagaagcccatcccccggcccctgaacaagatccagggcatcgtgtttgattttgtgacccagcaggcctttgatattgtcatcatgatgctgatctgcctgaacatggtgaccatgatggtggagacagacacccagagcaagcagatggagaacatcctgtactggatcaacctggtgtttgtgatcttcttcacctgtgaatgtgtgctgaagatgtttgccctgcggcactactacttcaccatcggctggaacatctttgattttgtggtggtgatcctgagcatcgtgtag

SEQ ID NO: 70139 - DNA, 3588 bp, Artificial Sequence
  derived and/or modified sequence
ttcctgagcccccagacctttgtggtgctgaacagaggcaagaccctcttccgcttcagcgccaccccagccctgtacatcctgagccccttcaacctgatcagaagaattgccatcaagatcctgatccacagcctcttctccatgatcatcatgtgcaccatcctgaccaactgtgtgttcatgaccttcagcaaccccccagactggagcaagaatgtggagtacaccttcaccggcatctacacctttgagagcctggtgaagatcatcgcccggggcttctgcattgatggcttcaccttcctgcgggacccctggaactggctggacttcagcgtcatcatgatggcctacatcacagaatttgtgaacctgggcaatgtgtctgccctgcggaccttccgggtgctgcgggccctgaagaccatcagcgtcatccctggcctgaagaccatcgtgggcgccctgatccagagcgtgaagaagctgagtgatgtgatgatcctgactgtgttctgcctgtctgtgtttgccctgattggcctgcagctgttcatgggcaacctgagaaataaatgtgtggtgtggcccatcaacttcaatgaaagctacctggagaatggcaccaagggctttgactgggaggagtacatcaacaacaagaccaacttctacacagtgcccggcatgctggagcccctgctgtgtggcaacagcagtgatgctggccagtgcccagagggctaccagtgcatgaaggccggcaggaaccccaactacggctacaccagctttgacaccttctcctgggccttcctggccctcttccggctgatgacccaggactactgggagaacctgtaccagctgaccctgcgggccgccggcaagacctacatgatcttctttgtgctggtgatctttgtgggcagcttctacctggtgaacctgatcctggccgtggtggccatggcctatgaggagcagaaccaggccaccctggaggaggccgagcagaaggaggccgagttcaaggccatgctggagcagctgaagaagcagcaggaggaggcccaggccgccgccatggccaccagcgctggcaccgtgtctgaagatgccatcgaggaggagggggaggagggcggcggcagccccaggagcagcagcgagatcagcaagctgagcagcaagagcgccaaggagaggaggaacagaaggaagaagaggaagcagaaggagctgtctgagggggaggagaagggggaccctgagaaggtgttcaagtctgagagtgaagatggcatgaggaggaaggccttccggctgcctgacaacagaattggaaggaagttcagcatcatgaaccagagcctgctgagcatccctggcagccccttcctgagccgccacaacagcaagagcagcatcttctccttccggggccctggccgcttccgggaccccggctctgaaaatgaatttgctgatgatgagcacagcacagtggaggagagcgagggccggcgggacagcctcttcatccccatccgggcccgggagaggaggagcagctacagcggctacagcggctacagccagggcagccgcagcagccgcatcttccccagcctgcggcgctctgtgaagaggaacagcacagtggactgcaatggagtggtgtccctgattggaggccctggcagccacatcggcggccgcctgctgcctgaggccaccacagaggtggagatcaagaagaagggccctggcagcctgctggtgtccatggaccagctggccagctatggcaggaaggaccgcatcaacagcatcatgtctgtggtgaccaacaccctggtggaggagctggaggagagccagaggaaatgtcctccctgctggtacaagtttgccaacaccttcctgatctgggagtgccacccctactggatcaagctgaaggagatcgtgaacctgattgtgatggacccctttgtggacctggccatcaccatctgcatcgtgctgaacaccctcttcatggccatggagcaccaccccatgaccccccagtttgagcacgtgctggccgtgggcaacctggtgttcaccggcatcttcaccgctgagatgttcctgaagctgattgccatggacccctactactacttccaggagggctggaacatctttgatggcttcatcgtgtccctgagcctgatggagctgagcctggctgatgtggagggcctgtctgtgctgcggagcttccggctgctgcgggtcttcaagctggccaagtcctggcccaccctgaacatgctgatcaagatcatcggcaacagcgtgggcgccctgggcaacctgaccctggtgctggccatcatcgtgttcatctttgctgtggtgggcatgcagctgtttgggaagagctacaaggaatgtgtgtgcaagatcaaccaggactgtgagctgccccgctggcacatgcatgacttcttccacagcttcctgattgtgttccgggtgctgtgtggggagtggattgagaccatgtgggactgcatggaggtggccggccaggccatgtgcctgattgtgttcatgatggtgatggtgattggcaacctggtggtgctgaacctcttcctggccctgctgctgagcagcttctctgctgacaacctggccgccacagatgatgatggagagatgaacaacctgcagatcagcgtcatccgcatcaagaagggcgtggcctggaccaagctgaaggtgcacgccttcatgcaggcccacttcaagcagcgggaggctgatgaggtgaagcccctggatgagctgtatgagaagaaggccaactgcatcgccaaccacactggagctgacatccacagaaatggagacttccagaagaatggaaatggcaccaccagcggcatcggcagctctgtggagaagtacatcattgatgaggaccacatgtccttcatcaacaaccccaacctgactgtgcgggtgcccatcgctgtgggggagagtgactttgagaacctgaacacagaagatgtgagcagcgagagtgaccctgagggcagcaaggacaagctggatgacaccagcagcagcgagggcagcaccatcgacatcaagccagaggtggaggaggtgcctgtggagcagcctgaggagtacctggaccctgatgcctgcttcacagagggctgtgtgcagcgcttcaagtgctgccaggtgaacatcgaggagggcctgggcaagtcctggtggatcctgaggaagacctgcttcctgattgtggagcacaactggtttgagaccttcatcatcttcatgatcctgctgagcagcggggccctggcctttgaggacatctacatcgagcagaggaagaccatccgcaccatcctggagtatgctgacaaggtgttcacctacatcttcatcctggagatgctgctgaagtggacagcctacggctttgtgaagttcttcaccaatgcctggtgctggctggacttcctgattgtggccgtgcccctgaacctgagcggcctcatctag

SEQ ID NO: 70140 - DNA, 5820 bp, Artificial Sequence
  derived and/or modified sequence
atggccgcccggctgctggcccctcctggccctgacagcttcaagcccttcaccccagagagcctggccaacattgaaagaagaattgctgagagcaagctgaagaagccacccaaggcagatggcagccaccgggaggatgatgaggacagcaagcccaagcccaacagcgacctggaggccggcaagagcctgcccttcatctatggagacatcccccagggcctggtggccgtgcccctggaggactttgacccctactacctgacccagaagacctttgtggtgctgaacagaggcaagaccctcttccgcttcagcgccaccccagccctgtacatcctgagccccttcaacctgatccgccgcatcgccatcaagatcctgatccacagcgtcttctccatgatcatcatgtgcaccatcctgaccaactgtgtgttcatgaccttcagcaaccccccagactggagcaagaatgtggagtacaccttcaccggcatctacacctttgagagcctggtgaagatcatcgcccggggcttctgcattgatggcttcaccttcctgcgggacccctggaactggctggacttcagcgtcatcatgatggcctacatcacagaatttgtgaacctgggcaatgtgtctgccctgcggaccttccgggtgctgcgggccctgaagaccatcagcgtcatccctggcctgaagaccatcgtgggcgccctgatccagagcgtgaagaagctgagtgatgtgatgatcctgaccgtcttctgcctgtctgtgtttgccctgattggcctgcagctgttcatgggcaacctgaggaacaagtgtgtggtgtggcccatcaacttcaatgaaagctacctggagaatggcaccaagggctttgactgggaggagtacatcaacaacaagaccaacttctacacagtgcccggcatgctggagcccctgctgtgtggcaacagcagtgatgctggccagtgcccagagggctaccagtgcatgaaggccggcaggaaccccaactacggctacaccagctttgacaccttctcctgggccttcctggccctcttccggctgatgacccaggactactgggagaacctgtaccagctgaccctgcgggctgctgggaagacctacatgatcttctttgtgctggtgatctttgtgggcagcttctacctggtgaacctgatcctggccgtggtggccatggcctatgaggagcagaaccaggccaccctggaggaggccgagcagaaggaggccgagttcaaggccatgctggagcagctgaagaagcagcaggaggaggcccaggccgccgccatggccaccagcgctggcaccgtgtctgaagatgccatcgaggaggagggggaggagggcggcggcagccccaggagcagcagcgagatcagcaagctgagcagcaagagcgccaaggagaggaggaacagaaggaagaagaggaagcagaaggagctgtctgagggggaggagaagggggaccctgagaaggtgttcaagtctgagagtgaagatggcatgaggaggaaggccttccggctgcctgacaaccgcatcggcaggaagttcagcatcatgaaccagagcctgctgagcatccctggcagccccttcctgagccgccacaacagcaagagcagcatcttctccttccggggccctggccgcttccgggaccccggctctgaaaatgaatttgctgatgatgagcacagcacagtggaggagagcgagggcagaagagacagcctcttcatccccatccgggcccgggagcggcgcagcagctacagcggctacagcggctacagccagggcagccgcagcagccgcatcttccccagcctgcggcgctctgtgaagaggaacagcacagtggactgcaatggagtggtgtccctcatcggcggccctggcagccacatcggcggccgcctgctgcctgaggccaccacagaggtggagatcaagaagaagggccctggcagcctgctggtgtccatggaccagctggccagctatggcaggaaggaccgcatcaacagcatcatgtctgtggtgaccaacaccctggtggaggagctggaggagagccagaggaagtgccccccctgctggtacaagtttgccaacaccttcctgatctgggagtgccacccctactggatcaagctgaaggagatcgtgaacctgattgtgatggacccctttgtggacctggccatcaccatctgcatcgtgctgaacaccctcttcatggccatggagcaccaccccatgaccccccagtttgaacatgtgctggccgtgggcaacctggtgttcaccggcatcttcaccgctgagatgttcctgaagctgattgccatggacccctactactacttccaggagggctggaacatctttgatggcttcatcgtgtccctgagcctgatggagctgagcctggctgatgtggagggcctgtctgtgctgcgctccttccggctgctgcgggtcttcaagctggccaagtcctggcccaccctgaacatgctgatcaagatcatcggcaacagcgtgggcgccctgggcaacctgaccctggtgctggccatcatcgtgttcatctttgctgtggtgggcatgcagctgtttgggaagagctacaaggaatgtgtgtgcaagatcaaccaggactgtgagctgccccgctggcacatgcatgacttcttccacagcttcctgattgtgttccgggtgctgtgtggggagtggattgagaccatgtgggactgcatggaggtggccggccaggccatgtgcctgattgtgttcatgatggtgatggtgattggcaacctggtggtgctgaacctcttcctggccctgctgctgagcagcttctctgctgacaacctggccgccacagatgatgatggagagatgaacaacctgcagatcagcgtcatccgcatcaagaagggcgtggcctggaccaagctgaaggtgcacgccttcatgcaggcccacttcaagcagcgggaggctgatgaggtgaagcccctggatgagctgtatgagaagaaggccaactgcatcgccaaccacactggagctgacatccacagaaatggagacttccagaagaatggaaatggcaccaccagcggcatcggcagctctgtggagaagtacatcattgatgaggaccacatgtccttcatcaacaaccccaacctgactgtgcgggtgcccatcgctgtgggggagagtgactttgagaacctgaacacagaagatgtgtcctctgagagtgaccctgagggcagcaaggacaagctggatgacaccagcagcagcgagggcagcaccatcgacatcaagccagaggtggaggaggtgcctgtggagcagcctgaggagtacctggaccctgatgcctgcttcacagagggctgtgtgcagcgcttcaagtgctgccaggtgaacatcgaggagggcctgggcaagtcctggtggatcctgaggaagacctgcttcctgattgtggagcacaactggtttgagaccttcatcatcttcatgatcctgctgagcagcggggccctggcctttgaggacatctacatcgagcagaggaagaccatccgcaccatcctggagtatgctgacaaggtgttcacctacatcttcatcctggagatgctgctgaagtggacagcctacggctttgtgaagttcttcaccaatgcctggtgctggctggacttcctgattgtggccgtggtggtgaatgccctggtgggcgccatccccagcatcatgaatgtgctgctggtgtgcctgatcttctggctgatcttcagcatcatgggcgtgaacctgtttgctgggaagtaccactactgcttcaatgagaccagcgagatccgctttgaaattgaagatgtgaacaacaagacagaatgtgagaagctgatggagggcaacaacacagagatccgctggaagaatgtgaagatcaactttgacaacgtgggcgccggctacctggccctgctgcaggtggccaccttcaagggctggatggacatcatgtatgctgctgtggacagcaggaagccagatgagcagcccaagtatgaggacaacatctacatgtacatctactttgtgatcttcatcatcttcggcagcttcttcaccctgaacctcttcatcggggtcatcatcgacaacttcaaccagcagaagaagaagtttggaggccaggacatcttcatgacagaggagcagaagaagtactacaatgccatgaagaagctgggcagcaagaagccccagaagcccatcccccggcccctgaacaagatccagggcatcgtgtttgattttgtgacccagcaggcctttgatattgtcatcatgatgctgatctgcctgaacatggtgaccatgatggtggagacagacacccagagcaagcagatggagaacatcctgtactggatcaacctggtgtttgtgatcttcttcacctgtgaatgtgtgctgaagatgtttgccctgcggcactactacttcaccatcggctggaacatctttgattttgtggtggtgatcctgagcatcgtgggcatgttcctggccgacatcatcgagaagtactttgtgagccccaccctcttccgggtcatccggctggccagaattggccgcatcctgcggctcatcaagggggccaagggcatccgcaccctgctgtttgccctgatgatgagcctgcctgccctcttcaacatcggcctgctgctcttcctggtgatgttcatcttcagcatcttcggcatgagcaactttgcctacgtgaagcatgaagctggcattgatgacatgttcaactttgagaccttcggcaacagcatgatctgcctcttccagatcaccaccagcgctggctgggatggcctgctgctgcccatcctgaacagacctccagactgcagcctggacaaggagcaccctggcagcggcttcaagggggactgtggcaaccccagcgtgggcatcttcttctttgtgtcctacatcatcatctccttcctgattgtggtgaacatgtacatcgccatcatcctggagaacttctctgtggccacagaggagagcgctgaccccctgtctgaagatgactttgagaccttctatgagatctgggagaagtttgatcctgatgccacccagttcatcgagtactgcaagctggccgactttgctgatgccctggagcaccccctgcgggtgcccaagcccaacaccatcgagctgattgccatggacctgcccatggtgtctggggaccgcatccactgcctggacatcctgtttgccttcaccaagagggtgctgggggacagcggggagctggacatcctgcggcagcagatggaggagagatttgtggccagcaaccccagcaaggtgtcctatgagcccatcaccaccaccctgcggaggaagcaggaggaggtgtctgctgtggtgctgcagagggcctaccggggccacctggcccggcggggcttcatctgcaagaagaccaccagcaacaagctggagaatggaggcacccaccgggagaagaaggagagcacccccagcacagccagcctgcccagctatgacagcgtgaccaagccagagaaggagaagcagcagagagctgaggagggccggcgggagcgggccaagaggcagaaggaggtgcgggagagcaagtgctag

SEQ ID NO: 70141 - DNA, 4674 bp, Artificial Sequence
  derived and/or modified sequence
atggccgcccggctgctggccccccccggccccgacagcttcaagcccttcactccagagtcgctggccaacattgagcgacgtatagccgaatctaaactcaagaagccccccaaggccgatgggagtcacagggaggatgacgaggattccaagcctaagccaaattcagatcttgaggcaggcaagtcgctgcccttcatctacggcgatatcccgcagggcctggtcgccgttccgctggaagacttcgacccctattacctgacccagaaaactttcgtcgtgttgaatcgaggcaaaacgctgttccgctttagcgcaacgccagcgctgtatatcctgtctccattcaacctcatccggcgcatagctataaagattctgatccacagcgtgttcagtatgatcatcatgtgcactatacttacaaactgtgtgtttatgactttttcaaacccgcccgactggtccaagaacgtggaatacacctttaccgggatatacacctttgaaagtctggtaaaaattatcgcgaggggtttttgtattgacggctttaccttcctgagggatccatggaactggctggacttctcagtgattatgatggcctatatcactgagttcgtgaatctggggaatgtgagcgccctgcggacttttcgggtcctgagagccctgaagaccattagtgtgattccgggactaaaaactatagtaggtgccttgattcagagcgtgaaaaagctgtctgatgtgatgattttgaccgtgttctgtttgtctgtattcgccctgatcgggttacagcttttcatgggcaacttaagaaataaatgcgtcgtgtggcctatcaacttcaatgagtcttatctcgaaaatggtacaaagggcttcgactgggaggagtacatcaataataaaaccaatttctacaccgttcccgggatgctggagccgctgttgtgtggcaactcctccgatgcagggcagtgcccggagggttaccagtgcatgaaagcagggcggaatcccaactacggatataccagctttgatacatttagctgggctttcctggccctttttcgacttatgacacaagactactgggaaaacctgtatcagttgaccctcagggctgccggaaaaacatatatgattttttttgtccttgtgatattcgttggctcattctatttagtgaatctgatcctggctgtcgtcgctatggcatacgaagagcagaatcaggcgaccctggaggaagccgagcagaaggaggcggagttcaaggccatgctggagcagctgaagaagcagcaggaagaggcccaggcagccgcaatggccacaagtgcggggactgtgtcagaagatgcgatagaggaggaaggtgaagagggcgggggtagtcctagatcttcttccgaaatcagcaaactgtctagcaaatcggccaaggagagacggaaccgtagaaaaaagcggaagcagaaagagctgtcagagggagaagagaaaggcgatcccgagaaggtatttaaatccgagagtgaagatggtatgaggcgcaaggctttccgccttccagacaaccggattgggagaaagtttagtattatgaaccagtctctcctgtctataccaggaagtccttttttaagccggcacaactctaagtcttcaatctttagctttagagggccgggacgttttagggaccctggatcagagaacgagtttgcagacgatgaacacagtaccgtggaggagtccgaaggccgacgcgattctctgtttatccccatacgggctcgcgagagaagaagctcttacagcggttactctgggtactcccaagggtcccgatcttcgaggatctttccctcactcagaagaagcgtgaagcggaatagcacagtggattgcaacggggtggttagcctgatcgggggtccggggtcccatattggagggagactgctccccgaagccactactgaggtggaaatcaagaagaaggggcctggttcgctgctagtttcaatggaccagctcgcctcctatggtagaaaggatcgaattaattcaattatgtctgtggtgacaaacacccttgtcgaggagctagaagagtctcagcgcaagtgccccccctgctggtacaagttcgctaacacatttttgatttgggaatgccacccatactggatcaagctgaaggagattgttaacctgattgttatggacccattcgtcgacctggcaatcacaatctgtatcgtgctgaacactcttttcatggccatggagcaccatcccatgacaccccaatttgagcatgtgctggctgtcggcaatctggtcttcacaggcattttcactgcggagatgtttctgaaattgatcgccatggacccctactattacttccaggagggctggaatatcttcgacggcttcatcgtcagcctttcattgatggaactgtctttggcagacgttgaagggctttccgtcctcagatcttttcgcctgttgcgcgtgttcaagttagcgaagtcatggcctactctgaatatgcttattaaaatcataggtaattcggtcggggctttagggaacttgactttagtcctcgccataattgtgtttatcttcgcagtggtgggcatgcagctgttcggtaaaagctataaagagtgtgtgtgtaaaattaaccaggactgtgagctgccacgttggcacatgcatgacttcttccactcatttctaatcgtattcagagtgctttgtggagagtggattgaaaccatgtgggattgtatggaggtcgctggccaggctatgtgcctgattgtcttcatgatggttatggttataggcaatttggtggttctgaatttgtttttggcactgctgttaagctcatttagcgccgacaatctggcagctaccgacgatgatggagaaatgaataaccttcagattagcgttatacggattaagaagggagtggcctggaccaagttgaaggtgcatgcatttatgcaggcccattttaaacaaagggaggcggacgaagtcaagccattggatgagctctacgaaaagaaggctaattgcatcgctaatcataccggcgctgacatccaccgcaatggggacttccaaaaaaacggtaacggaacgacttcaggaatcggctcgtcagtggagaaatatattattgatgaggaccatatgtcatttatcaacaaccccaacttaacagtgcgcgtacctatagccgttggagagagtgacttcgagaacctgaataccgaagatgtgagttcagagtctgacccagagggctcaaaggacaagctcgacgatacgtcctcatctgaagggtctacgatcgatattaagcccgaagttgaagaggtcccagtcgagcagcctgaggaatacctcgacccagatgcatgttttacggaggggtgcgtacaacgcttcaagtgctgtcaggttaacatcgaggaaggcctgggtaaaagctggtggattctcaggaaaacttgctttctgatcgtcgaacacaattggttcgaaactttcataatcttcatgatcctgctgagcagcggagctttagcattcgaggatatttacatagaacagaggaagacaatacggacaatcctcgaatatgcagacaaggtgtttacctatatattcatcctggagatgctgttgaagtggacagcatacgggttcgtgaaattcttcacaaatgcgtggtgctggctcgactttcttatcgtggccgtcgtggtcaatgcccttgtcggtgccataccaagtattatgaacgtgctgctggtgtgccttattttctggttgatcttttcaattatgggggttaacctgttcgccggtaagtatcactattgttttaatgagacctctgagattcggttcgagatagaggatgtgaacaacaagacggaatgcgaaaagctcatggagggcaacaacacagagataaggtggaagaacgtcaagatcaacttcgacaacgtcggggcagggtatctcgctctgctccaggttgcaacatttaaagggtggatggatataatgtatgccgccgtggatagccggaaacccgatgaacagccgaaatacgaagacaatatctatatgtacatttacttcgtgatttttattatttttggctcctttttcacactgaatcttttcattggcgtgatcattgacaacttcaatcagcagaagaagaagttcggggggcaggacatcttcatgaccgaggagcaaaagaagtattataacgctatgaagaagctgggtagtaaaaaacctcagaagccaatcccccggcctctgaacaagatccaggggatcgtttttgattttgtgacacagcaggcctttgatattgtgatcatgatgctgatctgtctgaatatggtgacaatgatggttgagactgacactcaatccaaacagatggagaatatcctctattggataaacctggtgtttgtgatatttttcacctgcgaatgcgtattaaagatgtttgcgctgaggcactattattttacaattggatggaacatttttgactttgttgtggtaatcctctcgatcgtgtag

SEQ ID NO: 70142 - DNA, 3588 bp, Artificial Sequence
  derived and/or modified sequence
ttcctgagcccccagaccttcgtggtgctgaaccggggcaagaccctattccggttctccgccacacctgccctgtacatcctatcacccttcaacctgatccgccggattgctataaagatccttatccattctcttttcagtatgattatcatgtgcacgatcctgacaaattgcgtgttcatgacattctccaaccccccggattggagtaaaaacgtcgaatacaccttcaccggaatctacacgttcgaaagcctcgtgaaaatcatcgcgagaggcttttgtattgatggattcactttcctgcgtgatccgtggaactggttggatttcagtgtaattatgatggcctacatcaccgagttcgtgaacctgggaaatgtctccgctctccgcacattccgagtacttagggcgctcaagactatttcagtgattccagggctaaaaaccatcgttggggccttgattcagtcagtgaagaaactgagtgatgttatgatacttaccgtgttttgtctgagcgtatttgccctgatcggcctccagctgttcatggggaacctgcggaataaatgtgtagtatggcctatcaactttaatgagtcctatctggaaaatggtaccaagggcttcgactgggaggagtacattaataacaaaactaacttctatactgtgcccggaatgttagagccattgctgtgcggcaactcaagcgatgccgggcaatgtcccgaggggtatcagtgcatgaaagccggacggaatccaaactacggatacacgtcctttgataccttctcttgggcctttctggctctgttcagattgatgactcaggactactgggagaacctttaccaactgacgttgcgtgcagccgggaaaacatatatgattttttttgtactcgtcatttttgtcggctcattttacctagtgaatcttatcttggccgtggtggcaatggcctatgaagagcaaaatcaggccacgttggaggaagcagaacagaaggaagccgagtttaaagctatgctggagcagctgaagaagcaacaagaagaggcacaagcggccgctatggctacaagtgccggaacagtctccgaggatgccattgaggaggaaggagaagaaggcgggggctccccccgttcctcctcagaaattagtaagctttctagcaagagcgccaaagagcggaggaatcgtagaaagaaaagaaaacagaaggaactatccgagggggaggaaaagggcgatccggaaaaggtgtttaagtcagagagtgaagacggcatgaggcggaaggcgttccgtctgccggacaacaggataggcagaaaatttagtattatgaatcaatccctgttgtcaatcccagggagtccgttcctgtctaggcataattcgaagagctccatattcagttttagaggcccaggcagattccgcgacccaggctcagaaaatgagtttgccgatgatgagcactctaccgtggaagaaagcgagggccggcgggactcactgtttatcccaattagagcacgggagaggagatccagttatagtggatacagtggttatagccagggatccagatccagtaggatcttcccttctctccgtcggtcggttaaacggaattcaacagtagattgtaatggcgttgtatcacttatcggcggcccaggctcccacattggtggccggttactgcctgaggcgacaaccgaggtggaaataaaaaaaaaggggcccggctcccttcttgtgagtatggatcagctcgccagttatgggaggaaagaccgcatcaattccatcatgagtgtggtcactaacactctcgtagaagagctggaagagtcccagaggaagtgcccaccgtgttggtataagtttgcgaatactttccttatttgggagtgtcacccttattggatcaagcttaaggaaattgtgaacctgattgtgatggatccttttgttgacttggccattacgatctgcatcgttctcaatacattgttcatggcaatggagcatcacccaatgacaccccagttcgagcacgtgctcgctgtgggcaacctggtgttcacaggtatttttaccgcagagatgtttttaaaactgattgccatggatccatactactacttccaggaagggtggaatattttcgacggttttatagtctcgctgagtctgatggagttgagtctggctgatgtggagggcctgtcagtcctgcgctccttccgtctgctgagagtgtttaaactggctaagtcatggcccaccctgaatatgcttattaaaatcatcggcaacagcgttggcgcactgggcaaccttacgctggttcttgcaattatcgttttcattttcgccgtcgtggggatgcaactcttcgggaagagctacaaagagtgtgtgtgtaaaatcaatcaagattgcgaactgcctcgctggcacatgcacgacttctttcatagcttcctgattgttttccgggtcctgtgtggcgaatggattgagaccatgtgggactgtatggaggtcgccggtcaagcgatgtgtttaatcgtgtttatgatggtgatggtgattggcaacctcgtcgttctgaacctgttcctggccctgttgctttcatctttttccgcggacaatttggctgccacggacgacgatggcgagatgaataacctccaaatcagcgtcattaggattaagaaaggagtcgcttggacaaagctgaaagtgcatgcttttatgcaagcccacttcaaacagcgcgaggccgatgaggtgaaacctctagacgagttatacgagaagaaggccaactgtattgctaatcatacgggagccgatattcacagaaacggagattttcagaagaacggaaacgggactaccagcgggatcggtagcagcgtggaaaagtacattatcgacgaagaccacatgtcatttattaacaaccccaatctgaccgtgcgagtgcccatcgccgtaggcgaatccgattttgagaatctaaatactgaagacgtgtcctccgaaagcgatcccgagggttctaaggacaagctcgacgatacttccagttcagaaggctcgacaatagatattaagccggaagtggaggaagttcctgtggagcagcccgaggaatacctcgatcctgacgcatgtttcactgagggatgcgtgcaaaggtttaagtgttgtcaggtgaacatcgaggaaggccttgggaagtcttggtggatcctccgcaaaacatgcttcctgatcgtggagcacaactggttcgaaacctttattattttcatgatcctcctgtcgtcgggggcccttgccttcgaggatatctatatcgaacagagaaagaccattaggaccattttggagtatgcggataaagtgtttacctatatttttatcctggaaatgctgttgaagtggaccgcctacggatttgtcaagttctttacaaatgcctggtgttggttggactttctgatagtggccgtcccacttaatctctcaggcctgatctag

SEQ ID NO: 70143 - DNA, 5820 bp, Artificial Sequence
  derived and/or modified sequence
atggccgcccggctgctggccccccccggccccgacagcttcaagccctttactccagaaagccttgcaaatatcgaacgaaggatcgcagagtctaagctcaaaaaaccacctaaggccgatggatcccacagagaggatgacgaagatagtaaacccaaaccaaactctgatcttgaagccgggaaatcccttcccttcatttacggggatattcctcagggcctggtggctgttcctctagaagatttcgacccgtattatctcactcaaaagacctttgtggtgctgaatagagggaagacgctctttcgcttttcagcgactcctgcgctgtacatcctgtctcctttcaatttgatccgcaggattgccatcaagatactcatccactccgtcttttccatgattataatgtgcaccatactgaccaactgcgtattcatgaccttttccaatcctcctgattggagtaaaaacgttgaatacacatttacgggaatctacacgttcgagagcctggtgaagattattgcacgtggcttttgtatcgacgggttcacttttcttagagacccctggaattggctggacttctctgtgattatgatggcttacatcaccgagttcgttaacttgggtaatgtcagcgcgctaagaacattccgcgtactgagggcactgaagactatcagtgtcattccaggactcaaaacaattgtaggggcccttatccaatctgtgaagaagctgtcagacgtcatgattctcaccgtcttctgcttatccgtattcgcgctcatcggcctccagctcttcatgggcaatcttcgtaacaaatgtgtggtgtggcctatcaacttcaatgaatcttaccttgagaacggtacaaaaggcttcgactgggaggaatacattaacaacaagacgaatttttacacagttcctgggatgcttgagccactgctgtgtggcaatagctctgacgcaggccagtgccctgaaggataccagtgtatgaaggctggccgcaaccctaactatggctatacaagcttcgacacattttcttgggcattccttgccttgttcagactaatgactcaagactattgggagaatctctaccagcttacactgcgcgccgcagggaagacgtatatgattttctttgtgctcgtcatctttgtgggctccttctacttggtgaacttaatcttagcagtggtagccatggcctatgaagagcaaaaccaggcgactctggaggaagcagaacagaaagaggctgaattcaaagccatgttagaacaactgaagaaacagcaggaagaagctcaggccgcggccatggcaactagcgccggcacagtgagtgaggatgcgatcgaggaagaaggcgaagaaggcggtggctccccccgcagctcctccgagataagcaaactgtctagtaagtcagcaaaggagagacggaatcgccgaaagaaaagaaagcagaaggagctcagcgagggggaagaaaaaggggaccctgagaaggtgttcaagtcagaaagcgaggatggtatgcgaaggaaggctttcaggctgccagacaatcgaataggcagaaaattttccatcatgaaccagtccctgctctcaatcccaggtagcccttttctatcgagacacaactctaaatcttcaatcttttccttccgcggtcccggacgctttcgagaccctggttctgagaatgagttcgccgacgatgagcattcgacagtcgaggaaagtgaggggaggagagattccctgtttataccgatccgggcgcgagagcggaggtctagctactccggttactctggctatagccaggggtcacgttcttctcgtatctttccatctctccgacgttccgtgaagcgaaattcaacagtcgattgcaacggcgttgtgagtttgattggcggtcctgggtcccatatcggggggcggctcttgcccgaagccactaccgaagtcgaaattaaaaaaaagggtcctggcagcttactcgtgtcgatggatcagctcgcctcttatggacgcaaagataggattaactcgataatgtctgttgtaactaataccctggtggaggaattggaggagagccaacgtaaatgtccaccttgttggtacaagtttgcaaacacctttcttatttgggagtgtcacccttactggattaaactgaaggagatcgtcaatctcattgtgatggaccctttcgtcgaccttgcgatcaccatatgcattgtactcaatacgctgtttatggccatggagcatcatccgatgacacctcagttcgaacatgtgttggcagttggcaacttggtctttaccggaattttcactgctgaaatgttcctaaaattgattgccatggatccctactactattttcaagagggctggaacattttcgatggctttattgtttctctttccctaatggaactgtccttggctgacgttgagggtctgtcagttcttaggtctttccgtttgctacgggtctttaaacttgcaaagtcatggccaacactgaatatgctcatcaaaataattggaaatagcgtcggagctctgggtaatctgacactcgttttagccatcatagttttcatattcgcagtagttgggatgcagttgttcggtaaaagctacaaggaatgtgtttgtaagattaatcaggactgcgagcttccaaggtggcacatgcacgacttctttcatagcttcttaattgtctttagagtgctgtgtggagagtggatcgagacaatgtgggactgcatggaagtggcgggacaagccatgtgcttaattgtcttcatgatggttatggtgattggaaacctggtggtgcttaacctctttctcgcgctgctgctgtctagcttctccgccgataatctggctgcaactgacgatgacggagagatgaacaacttgcaaatcagcgtcatccgaataaagaagggggtagcctggacgaagctgaaggtacatgccttcatgcaggcgcattttaagcagcgtgaagctgatgaggtgaaacccctggacgagctgtatgaaaagaaggccaactgtatcgcaaaccacacaggcgctgacatacaccgcaacggcgattttcagaagaacgggaatgggacaaccagcggcatcggatccagcgtggagaagtatatcatagacgaggatcacatgtccttcattaataaccccaatctcactgtgcgcgttccaattgcagtaggtgagtcggactttgaaaacctcaacactgaggatgtcagtagcgaatcagatccagaaggctccaaagacaagctggatgacaccagctcttccgagggatcaactatcgacatcaagcccgaggtagaagaagtccccgtggaacagccagaggaatatttagatcccgatgcctgcttcaccgagggatgtgtgcagcgttttaagtgttgtcaagtcaatattgaagagggactaggtaaatcttggtggattttaagaaaaacttgctttctgattgtagaacacaactggtttgaaaccttcattatcttcatgatactgctgagtagtggcgctttagcctttgaagatatctacattgaacagcgaaaaactattagaaccattctggagtatgcagacaaggtcttcacctacatcttcatcttggagatgctcctcaagtggacagcatatgggttcgtgaaattcttcacaaacgcctggtgctggttggactttttgatagtggcagtggtggttaacgccctggtcggagcaataccctctatcatgaacgtcctcctggtatgcttaatcttttggcttatattctccatcatgggcgtcaacctcttcgctgggaagtatcactactgcttcaacgagaccagtgagatcaggtttgaaattgaagacgttaataataagaccgaatgcgaaaagctaatggagggcaataatacggaaatccgctggaagaacgtgaagattaattttgacaatgttggggccggatacttggctctcctacaggtggccacctttaaggggtggatggatataatgtatgccgccgtggactctaggaagccggatgagcagccaaaatacgaagacaatatctacatgtatatttactttgtaatcttcatcattttcggcagcttttttaccctaaacctcttcatcggtgtcatcatcgataactttaaccagcaaaagaagaagttcgggggccaagatatattcatgaccgaagagcagaagaagtattacaatgcaatgaaaaaactcggctctaagaagcctcaaaagcctattccccgccccctgaacaaaattcaggggatcgtgttcgattttgtgacacaacaagcctttgatatcgtcatcatgatgctcatctgtctcaacatggtgactatgatggtggaaactgacacacagtctaaacagatggagaatatcttatactggatcaacctagtgtttgtgattttctttacatgtgaatgcgtactgaagatgtttgctctcagacactactattttaccataggctggaatatcttcgatttcgtggttgtcatactgtccatagtggggatgtttctcgctgacataatcgagaagtacttcgtctctcccacattgttcagggtcatcagactggcacgtattggccggatcttgcggctgataaaaggggctaagggtatccgcacactgttgtttgccctgatgatgagcctgcctgccctctttaatatcgggttgttactcttcttggtgatgtttatcttctccattttcggcatgagtaattttgcttacgtgaagcacgaagccgggattgatgacatgtttaatttcgagacatttggcaattccatgatctgtctgttccagatcactactagtgctggctgggatgggttacttctgcccatcctgaataggccccccgactgcagccttgacaaagaacacccaggatctggatttaaaggagactgcggaaatcccagcgtgggcatattctttttcgtctcctacatcattatctctttcctgattgtggtcaacatgtacatcgcaataattctagagaatttttccgtggctaccgaggagagtgccgatcctttatctgaggatgattttgagactttctatgagatctgggaaaagtttgaccccgacgcgacacagttcattgaatactgtaagctagccgattttgccgacgccctggaacatcccttgcgagtgcccaaaccaaacacaattgagctaattgccatggacctgccaatggtttcaggggaccgaatacactgtcttgatatactgttcgccttcacgaagagagtgttaggggattctggggagttggatatacttagacagcagatggaagaaagattcgtggcttctaatccaagtaaagtgtcatatgagcccattacaacaaccctgcgacggaagcaggaggaagtgagcgccgtggtactgcaacgggcctatcgcggacacttggctcgacgcggctttatttgcaaaaagactacctccaataaattggagaacggtgggacacaccgcgagaagaaagaatcgacaccttcaacagcttccttaccttcctacgactctgttaccaagccggaaaaagaaaagcagcagagagctgaggaaggtcgcagagaacgcgcgaagagacaaaaggaggtacgggaatccaaatgctag

SEQ ID NO: 70144 - DNA, 4674 bp, Artificial Sequence
  derived and/or modified sequence
atggctgcccgacttctggcgccacctggtcctgatagcttcaagccctttactccagaatccttagccaatatagaacgaaggatcgctgaatctaaactgaaaaaacctcccaaggccgacggttcccatagggaggatgacgaagatagcaaacccaagcctaacagcgatctcgaagcgggaaagtccttgccattcatctacggggacattcctcagggtcttgtagccgtgccactcgaagacttcgatccatattacctgactcagaagacttttgttgttttgaaccgcggaaagactctgtttcgattttctgcgacgcccgctctgtacattttgtcccctttcaatctgatccgcagaattgccatcaagatcctcattcatagtgttttttctatgatcataatgtgtacgattctgaccaactgtgtgtttatgaccttctctaatccacctgactggtcaaaaaacgtggagtacacattcactggtatatataccttcgaatctctcgtgaagattatcgcacgtggcttctgtattgacggatttacctttctcagggacccctggaactggctggacttctccgtaataatgatggcctacatcaccgaattcgtgaacctgggaaatgtgtccgctcttaggacgttcagagttctccgcgctctcaagactattagcgttattccaggccttaaaacgattgtaggggcactaatccagtctgtaaagaaactttcggacgtgatgattctcacagtgttctgtctgtcggtgtttgccctgatcggcctacagctcttcatgggcaacttgaggaacaaatgcgttgtgtggccaataaacttcaacgagtcctacttagagaatggcacaaaaggattcgactgggaagaatatatcaacaataaaaccaatttctacactgtacctggtatgttggagcctctgctgtgtgggaactcatccgatgctggccagtgtccagagggataccagtgtatgaaggcaggtcgcaacccaaactacggatacacatcttttgatacctttagttgggcctttctggccttgttccgcctcatgactcaggattactgggaaaacttgtatcagcttactctccgagctgccggaaaaacatacatgatatttttcgttttggttattttcgtggggtctttctatttagtaaatctcatcctcgcagttgtggcaatggcgtatgaggagcagaatcaggcaacacttgaggaggcggagcaaaaggaggccgagttcaaggccatgctcgaacaacttaagaaacagcaagaagaggctcaggctgccgcaatggcaacctccgccggaaccgtatccgaggacgcgatcgaagaggagggggaggaggggggtggcagccccaggagtagctccgaaatctccaaattgtcatcaaagtccgctaaagagcggaggaatagacggaagaaacgtaaacagaaggagctttcagagggcgaggagaagggggaccccgagaaagtgttcaagtccgagtctgaagacggcatgcgccgtaaggcattccggctgccagacaatagaatcggcaggaaatttagcatcatgaatcagtccctactgtccattcctggtagcccctttctgagtcgccacaacagcaaaagctcaattttctcgttcagggggcctggcagattccgcgaccctggaagtgaaaacgagtttgcggacgatgaacacagtacggtggaggagtctgaaggaagaagagatagcctcttcatcccaatccgggcaagggagcgaagatccagctatagtggatactctgggtatagccagggcagcaggtcctctagaatcttcccgagcctacggagaagtgtgaagcgaaactcaacagtggactgtaatggcgtcgtttctcttataggcggaccaggtagtcacatcggcggaagattactccctgaagcaacaaccgaagtcgaaatcaaaaagaaaggacccggttccctgctggtatctatggatcagctggcatcttacgggagaaaggaccgtatcaatagtatcatgagcgtagtgacaaatactttagttgaagagctcgaagagtctcagagaaagtgtcccccatgttggtacaagtttgctaataccttcctaatttgggaatgtcatccatactggattaaattgaaggaaattgtcaacttgattgtgatggatccttttgtcgacctggccatcaccatctgtattgttctgaacacgctcttcatggcaatggaacaccaccccatgaccccccagtttgagcacgttctcgccgttggaaatttggtcttcaccggcatctttaccgccgaaatgtttctgaagttgatagccatggacccttattactactttcaggaaggatggaacatcttcgatggctttattgtgtctctctccttaatggagctcagcttggccgacgtggaaggactgagtgtgctccggtccttccgattactccgagtctttaaattggccaaaagctggcccactctaaacatgctaatcaagatcatcggtaattcagtcggtgctttgggcaacttaacccttgttctggctataattgtgttcatattcgcagtggttggcatgcaactgtttgggaaatcctacaaggagtgcgtttgtaaaattaaccaagactgtgagctacctcggtggcacatgcacgacttcttccattccttcctcatcgtttttcgtgtcctttgtggagagtggattgagaccatgtgggactgtatggaggtggctgggcaggccatgtgtctcatcgtgttcatgatggtgatggtgatcggaaacctcgtggtcttaaacctgtttcttgctcttttactctcgtcctttagtgccgacaacctcgccgcaacagacgatgatggagaaatgaataatttgcagattagcgtgatcagaatcaaaaagggggtggcatggacaaaactgaaagtgcacgcatttatgcaagcgcacttcaagcagagagaagcagacgaagtaaaacctctcgatgagctttatgaaaagaaagccaattgcattgccaaccatacaggagctgatatacacagaaatggggactttcagaaaaatggcaacggtaccaccagcgggataggtagctcggtggaaaaatatataattgacgaggatcatatgtcattcattaacaatcccaacctgactgtaagagtaccaatagccgtgggggaatctgatttcgaaaatctgaacaccgaagacgtgtctagcgagtccgatccggaagggagtaaagataagctggatgacaccagcagcagcgaaggcagcactatcgatataaagcctgaagtagaagaggttccagtggagcagcctgaggaatacctggaccctgatgcttgttttactgaggggtgtgtccagcgctttaaatgctgtcaggtaaatattgaggaggggttaggcaaaagctggtggatcttgcgaaagacatgcttcttgatagtggaacataattggtttgaaacattcataattttcatgattctgctcagtagcggcgctttagccttcgaagatatttacattgagcagagaaagactattagaaccatcttagaatacgcagataaggtgttcacttacatatttatattggagatgctcctgaagtggaccgcgtatgggttcgttaagttttttacgaatgcctggtgctggctggacttcttaatcgtcgcagtcgtcgtcaacgcactcgtcggcgcaataccatctatcatgaacgtgttactggtgtgtctaattttctggcttattttctcaatcatgggcgtaaacctgtttgctggtaagtatcactactgcttcaacgagaccagtgaaataaggtttgagatagaagacgtcaataacaaaactgagtgtgagaagctgatggaaggaaacaataccgaaatacgctggaaaaatgtaaagatcaattttgacaatgtaggggctggttacctggccctgcttcaggtagcaacctttaagggctggatggacatcatgtatgctgctgtggatagtcgtaaacctgacgagcagcccaaatacgaagataacatttacatgtatatctatttcgtcatctttattatcttcggaagcttctttacattaaacctgtttatcggggttattatcgataattttaatcaacagaagaagaaattcggtggccaggacatatttatgaccgaagagcaaaaaaagtattataacgctatgaaaaaacttggcagtaaaaagccacagaagcccattcctaggccgcttaacaagatacagggaatcgtgtttgacttcgtcactcagcaagcatttgatatagttattatgatgctgatctgcctaaatatggtgacaatgatggtcgaaacagacacacagtccaagcagatggagaacattctgtactggatcaatctggtgtttgtaatttttttcacatgcgaatgtgtgctgaaaatgtttgctttgaggcattactatttcaccatcgggtggaatattttcgattttgtggtcgttatactctccatcgtgtag

SEQ ID NO: 70145 - DNA, 3588 bp, Artificial Sequence
  derived and/or modified sequence
tttttgtcccctcagactttcgtggtcttaaaccggggaaaaacgttgttccgcttctctgctacaccagcactgtacattctgtcaccttttaaccttatccgccgtatcgctatcaaaatcttgatccatagtctgttttccatgatcataatgtgtacgattcttacgaattgtgtgtttatgactttttctaacccaccagactggagtaaaaacgttgaatacacttttactggtatctacacattcgagagcctcgtgaagatcatcgcaagggggttctgcatagacggtttcaccttcctgagggacccctggaactggcttgacttctccgtgattatgatggcgtacatcaccgaattcgtgaacctcgggaatgtgagtgccctgcggactttccgggtgctgagggccctgaaaaccatttcggtgattccagggctcaagacaatcgtgggcgctctcatccagtccgtcaagaagttatcagatgtgatgattctgactgtgttttgcctgagcgtcttcgcgttgataggcctccagctcttcatgggtaaccttcggaacaagtgtgtcgtgtggccaatcaacttcaacgagtcctacctcgaaaatggcaccaaggggttcgactgggaagagtacatcaacaataagactaacttctacacagtccccggaatgttagaacctttgctctgcgggaactcttccgatgccggacaatgtcctgagggctaccagtgcatgaaggccggacgcaaccctaattacggctatactagctttgatacgttctcatgggctttcctggccttattcagattgatgacacaggattactgggaaaatctttatcaacttactctaagggctgcagggaaaacttacatgatattctttgtcctggtaattttcgtgggcagcttttacctcgtgaatctaattctggcagtggtggctatggcttacgaggagcagaaccaagccaccctagaggaggccgaacagaaggaggcagagttcaaggctatgctggagcagctcaaaaaacagcaagaggaagcgcaggctgctgctatggcaaccagcgctggtactgtgtccgaggatgcgatcgaggaggaaggtgaggaaggtgggggatctcccagatcgtcttccgagatcagcaagctctcatccaagtcagccaaggagcgcagaaaccggcgtaaaaaacgtaaacagaaggaattgtccgaaggagaggaaaagggggatcctgagaaggttttcaaatctgagagcgaagacggcatgcgacggaaagctttccgtctccccgacaatagaatagggaggaaattcagtatcatgaaccaaagtttactgtccattccagggagtcctttcctgagccgtcataactctaaaagctcgattttttcctttcggggacctggacgattccgggatcccggtagtgaaaatgagtttgccgacgacgaacacagcactgtggaggagtcagagggaagacgcgattcccttttcattcctattcgtgccagggagcgaaggtcttcctactccggctactccgggtactcacaaggcagtaggagttcgaggatctttccttccctcagacgttcagtgaaacgcaacagcacggtggattgcaatggagtggtttctcttatcggaggtcctgggagtcacattggaggcaggttgctgccggaagccaccaccgaggtcgagataaagaagaagggaccaggatccctcctcgtgtcaatggaccagctcgcctcgtacggcagaaaagatcggattaattccatcatgagcgtcgttaccaatacgcttgtcgaggaactggaagaaagtcagcgcaagtgtcctccgtgttggtataagtttgccaataccttccttatatgggagtgtcatccttactggatcaaattgaaggagattgtcaaccttattgtaatggacccattcgtagatctggctatcacaatctgtatagtcctgaacacgctcttcatggctatggagcatcatcccatgacacctcagttcgaacatgttctcgccgtgggtaatttggtatttaccgggatctttacagctgaaatgtttctcaaactgatcgcgatggatccatactactatttccaggagggctggaacatatttgatggtttcatcgtgtccctgagcctaatggagctgagtctggccgatgtcgagggtctcagtgttcttagatcatttcgacttttgcgcgtgttcaaactagctaagagttggccaactctgaatatgctgattaaaatcatcgggaatagcgttggcgcactgggaaacctgacattggtgctcgctattatcgtgttcattttcgctgtcgtgggcatgcagctttttggtaagtcatacaaagaatgcgtctgcaaaataaaccaggactgcgaattaccgaggtggcacatgcacgactttttccactcattcttgatagtgttccgcgtgttgtgtggggaatggatcgagacaatgtgggattgcatggaggtggccggacaggcaatgtgcttgatagtatttatgatggtgatggttataggcaacttggtggtattgaatttgttcctcgccctgctgctgtccagtttctccgcagataacctggctgccactgatgatgacggggagatgaacaacttacaaatttccgtaatccgcatcaagaagggcgttgcctggaccaaacttaaggtgcacgcttttatgcaggcacactttaaacagagggaggctgatgaagtaaagcctctggacgaactatacgaaaaaaaggcgaattgtattgcaaaccacacaggcgcagacatacacagaaatggggactttcagaagaatgggaacggcacgacgagtggaatcgggtcatcagtggaaaaatacatcatcgacgaagatcatatgtcattcataaacaatccaaatctaacggtccgggtcccgatcgccgtgggggaatccgacttcgagaatctaaacacagaggatgtgtcaagtgagagcgaccctgaaggatcaaaagataagttagatgacacatcctcaagcgaagggtcgacaatcgacattaaacccgaggtagaagaggtccctgtggagcagcctgaagagtacttggatcccgacgcttgtttcacagaggggtgcgttcagagatttaaatgctgccaggtcaatatagaagagggtcttgggaagagctggtggatcctccggaagacttgctttctgattgtcgaacacaattggtttgaaacattcatcatctttatgatcctcctgagttcaggcgctttggcttttgaggatatctatattgaacaacgtaagacgataagaacaatacttgagtatgcagataaagtgtttacctacatcttcatactggaaatgctgctcaaatggacagcctatgggtttgttaaattttttacaaacgcttggtgttggctggacttcttgatcgtcgctgttcccctcaacctctctggccttatctag

SEQ ID NO: 70146 - DNA, 5819 bp, Artificial Sequence
  derived and/or modified sequence
atggctgccagactcctagctcccccagggccagacagttttaaaccctttactccagaatctctcgcaaatattgaacggagaattgccgaatcgaagctaaagaagccacctaaggccgatggatcccacagggaagatgacgaagactccaaaccaaaacccaactcagacctggaagccggtaaatctttaccttttatatacggtgatatccctcagggcctggtcgccgtgccccttgaggacttcgacccttattatttgacccagaagacttttgtagtcttgaatagagggaagactctatttcgattctccgctaccccggcactctacatcctgtccccctttaacctcatccggagaattgcaatcaagatcctgatccatagtgtctttagtatgatcattatgtgcacgatcttgactaactgcgtgtttatgacgttttccaacccacccgactggtctaaaaatgtggaatatacatttactggtatctacacctttgaatctctagtcaagatcattgcacggggtttctgcattgatggcttcaccttcctacgggatccttggaactggctggacttttccgttattatgatggcgtacataactgagttcgttaacctcgggaatgtatctgcccttcgaaccttcagggttctgagagcactgaagaccatctccgtcattcctggcctgaaaacaattgttggtgctttaatccagagtgtgaagaagctaagtgacgtgatgatcctcaccgttttctgcctttcggtgtttgccctgatcggacttcagttgtttatgggaaacctgcgcaacaaatgcgtagtgtggccgataaacttcaacgaatcctaccttgagaacggaactaagggctttgactgggaggaatatatcaacaataagacaaacttttacacggtaccaggaatgctggagcccttgctgtgtggtaactcctccgacgcaggccagtgcccagaaggttaccagtgcatgaaagccggaagaaaccctaactacgggtacacatctttcgacacattcagttgggctttcctcgcgttattccgccttatgactcaagattattgggaaaatctttaccagttgactttgcgagccgctggaaagacttacatgatcttttttgttctggtgatttttgttggctcattctatctggttaatctgatattggctgtggtggctatggcatatgaggaacagaaccaggcaacccttgaagaggccgagcagaaggaagctgagtttaaagctatgcttgaacagctcaaaaagcagcaggaagaagcccaagccgcagctatggccacgagcgccggtacggtgagtgaagatgctattgaggaagagggtgaagagggtggcggaagcccaagatccagctctgaaatcagcaaattaagctctaagtccgctaaagagcggcgtaacagaagaaagaaaagaaaacagaaagagcttagcgaaggcgaagagaaaggtgatcctgagaaggtttttaaatctgaaagcgaggacgggatgcgacgcaaggcctttcgactgcctgacaatcggatagggaggaaatttagtatcatgaaccagtcccttttgtcaattcctggctccccattcctttctagacataatagtaagtcctctatcttctccttcagagggccaggaaggtttagggaccctggctcagaaaacgagttcgctgatgatgaacattctaccgttgaggaatcggaaggacgacgggactcattatttatacctatccgtgctcgggaacgacgctcctcatattcaggctacagcggatattcacagggaagtagatccagtcgcatcttcccatctctcagacgaagtgtcaaacggaattccacagtggattgtaacggcgtggtctctctcatcggtggcccagggtctcacattggtggacgcctactacctgaagccacaacagaagttgaaatcaaaaagaagggacccggatccctgcttgtgagtatggatcagctagcctcatatggacggaaggaccgaataaatagtataatgtctgtggtcactaacactctggtcgaagaactggaagaatctcagcgcaaatgccccccttgctggtacaaattcgcgaacacttttctcatctgggaatgccacccatactggattaagctcaaagaaattgttaatctcatcgtcatggacccctttgtggacctcgcaataacgatttgtattgtgctcaacacattgtttatggccatggagcaccatcccatgacacctcaattcgagcatgttctcgctgtggggaaccttgtttttactgggatcttcacggcagagatgtttcttaaactgatcgccatggacccctactattattttcaggagggatggaacatctttgacggctttatcgtgagcctgtcactgatggaactgagcctcgcggacgttgagggactttctgtactccggagcttccggctgctccgggtcttcaagctcgccaagtcatggcccactctgaacatgcttattaagataatcgggaactccgtgggggctctggggaatctcactctagtgctggccatcatcgtttttatcttcgccgtggtaggaatgcaactgttcggcaaatcctacaaagaatgcgtgtgtaagattaatcaggactgcgagctccccagatggcatatgcacgactttttccatagcttcctgatcgtgtttcgagttctttgcggtgagtggatagagacaatgtgggactgcatggaggtggctggccaagctatgtgcctgatcgtgttcatgatggtgatggttattgggaatctcgtcgtcttgaacctgttcctcgcactgctgctttcctcattctcagccgacaatctggctgcaactgatgatgacggcgagatgaataacttacagatcagcgtgatcagaatcaagaagggggtggcttggactaagctgaaggtgcacgcttttatgcaggctcacttcaaacagagagaggctgacgaggtgaagccgctggacgaactctacgagaaaaaggccaactgcatcgccaatcacacgggcgcagacattcaccgaaatggcgattttcaaaagaacggtaatggcaccaccagcggcatcggctcttccgtcgaaaaatatataattgacgaagaccacatgagcttcataaataacccaaatcttacagtgagggttccaatcgctgttggcgagtcggacttcgagaacttgaacacagaagatgtttccagtgaaagcgaccccgaggggtctaaagacaagcttgatgatacctcctcatccgagggctccacaattgatataaagcctgaagttgaggaggtgccagtagaacaacccgaagaatatcttgaccctgacgcatgcttcacagagggttgtgttcaaagattcaagtgctgtcaagtgaacattgaggagggtctgggtaagagctggtggatcctgagaaaaacatgcttcctgatcgtcgaacacaactggttcgaaacatttattatcttcatgatcctgctgtcttccggggcattggctttcgaagatatttatatcgaacaaaggaaaaccattcgcaccatcttggaatacgccgacaaggtgttcacttacatcttcatacttgagatgctgttgaaatggaccgcgtacggttttgtaaaattcttcactaacgcatggtgttggctcgatttcttgatcgtcgccgtggttgtcaatgccctggtgggggctatcccgagcatcatgaatgttctgctggtgtgtctcatattctggctgatcttctctatcatgggtgtgaacctgtttgccggaaaatatcactattgttttaatgaaacctcagaaatcagatttgaaatcgaggatgtcaataacaaaactgaatgcgaaaaactaatggaggggaataatactgagattcggtggaagaatgttaagattaacttcgataacgtaggcgctggataccttgccctcttacaagtcgctacattcaagggatggatggatattatgtatgctgcagtggactcccgcaagcctgacgagcagcccaaatatgaggataacatctacatgtacatctattttgtgattttcataatctttgggagtttttttacccttaatctgttcatcggagtgattattgacaactttaaccagcagaagaagaagttcgggggtcaggatatcttcatgacggaagaacaaaagaagtattacaatgccatgaagaaactgggctctaaaaagcctcaaaaacctattccacgcccattgaacaaaatccagggcatcgtgttcgattttgtcactcaacaggcattcgacattgttattatgatgttgatatgcctgaacatggtgaccatgatggtggaaactgacacccagagcaagcagatggagaacattttgtattggatcaacctggtcttcgtcatcttttttacttgcgaatgcgtgctgaaaatgttcgcactgcgccactattacttcacgattggctggaacatttttgattttgtggttgtgatcttatctattgtcggaatgttcctggccgatattatcgaaaagtactttgtctcccccacactattccgcgtcatcaggctggcgcgaatcggtaggattttgcggctcatcaaaggtgccaagggcatccgtacgctgctgttcgcactgatgatgtccttgccagccctcttcaatatcggcttgctccttttcctcgttatgttcattttcagcatttttggaatgtcaaactttgcatatgtgaagcacgaggcaggtatcgacgatatgttcaactttgaaactttcggaaacagcatgatttgtctgttccagatcactacttctgcaggctgggacggtctgttgctgcctattcttaaccgtcctccggattgttccctggacaaagaacacccgggaagcggcttcaagggagactgtggaaatccttccgtggggatcttctttttcgtatcctatataatcatctcctttcttattgttgtcaatatgtatatcgccattattctggaaaacttctccgtggcgactgaggagagcgcagaccctctctctgaggatgactttgagactttttatgagatctgggaaaagtttgaccccgacgccacccagttcattgagtattgcaagctggctgattttgcagatgcgctcgagcaccccctacgcgtgccaaagccaaatacaatcgagctgatcgccatggatctgcccatggtgagcggggatcgtattcactgtttggatatcctcttcgcatttacaaagcgcgtgcttggcgattcgggagagctggacatactgcggcaacagatggaagagaggttcgtggcttcgaatcccagcaaggtgtcgtatgagcccatcactactactctcagaaggaagcaagaggaggtgagtgcagtcgtcctgcagagagcctacagaggacacctagcccgacgcggattcatttgcaagaaaactaccagtaacaagctcgaaaatgggggaacccacagagaaaagaaagaaagtactccctctaccgcgtcattgccatcttatgactctgtcacaaagcctgagaaggagaaacagcagagggcagaagaagggaggcgtgagcgagccaagcggcagaaagaggtgagggagtctaaatgcta

SEQ ID NO: 70147 - DNA, 5820 bp, Artificial Sequence
  derived and/or modified sequence
atggcagcgcggctgcttgcaccaccaggccctgatagtttcaagcctttcacccctgagtcactggcaaacattgagaggcgcattgctgagagcaagctcaagaaaccaccaaaggccgatggcagtcatcgggaggacgatgaggacagcaagcccaagccaaacagcgacctggaagcagggaagagtttgcctttcatctacggggacatcccccaaggcctggttgcagttcccctggaggactttgacccatactatttgacgcagaaaacctttgtagtattaaacagagggaaaactctcttcagatttagtgccacgcctgccttgtacattttaagtccttttaacctgataagaagaatagctattaaaattttgatacattcagtatttagcatgatcattatgtgcactattttgaccaactgtgtattcatgacttttagtaaccctcctgactggtcgaagaatgtggagtacacgttcacagggatttatacatttgaatcactagtgaaaatcattgcaagaggtttctgcatagatggctttacctttttacgggacccatggaactggttagatttcagtgtcatcatgatggcgtatataacagagtttgtaaacctaggcaatgtttcagctctacgcactttcagggtactgagggctttgaaaactatttcggtaatcccaggcctgaagacaattgtgggtgccctgattcagtctgtgaagaaactgtcagatgtgatgatcctgacagtgttctgcctgagtgtttttgccttgatcggactgcagctgttcatggggaaccttcgaaacaagtgtgttgtgtggcccataaacttcaacgagagctatcttgaaaatggcaccaaaggctttgattgggaagagtatatcaacaataaaacaaatttctacacagttcctggcatgctggaacctttactctgtgggaacagttctgatgctgggcaatgcccagagggataccagtgtatgaaagcaggaaggaaccccaactatggttacacaagttttgacacttttagctgggccttcttggcattatttcgccttatgacccaggactattgggaaaacttgtatcaattgactttacgagcagccgggaaaacatacatgatcttcttcgtcttggtcatctttgtgggttctttctatctggtgaacttgatcttggctgtggtggccatggcttatgaagaacagaatcaggcaacactggaggaggcagaacaaaaagaggctgaatttaaagcaatgttggagcaacttaagaagcaacaggaagaggcacaggctgctgcgatggccacttcagcaggaactgtctcagaagatgccatagaggaagaaggtgaagaaggagggggctcccctcggagctcttctgaaatctctaaactcagctcaaagagtgcaaaggaaagacgtaacaggagaaagaagaggaagcaaaaggaactctctgaaggagaggagaaaggggatcccgagaaggtgtttaagtcagagtcagaagatggcatgagaaggaaggcctttcggctgccagacaacagaatagggaggaaattttccatcatgaatcagtcactgctcagcatcccaggctcgcccttcctctcccgccacaacagcaagagcagcatcttcagtttcaggggacctgggcggttccgagacccgggctccgagaatgagttcgcggatgacgagcacagcacggtggaggagagcgagggccgccgggactccctcttcatccccatccgggcccgcgagcgccggagcagctacagcggctacagcggctacagccagggcagccgctcctcgcgcatcttccccagcctgcggcgcagcgtgaagcgcaacagcacggtggactgcaacggcgtggtgtccctcatcggcggccccggctcccacatcggcgggcgtctcctgccagaggctacaactgaggtggaaattaagaagaaaggccctggatctcttttagtttccatggaccaattagcctcctacgggcggaaggacagaatcaacagtataatgagtgttgttacaaatacactagtagaagaactggaagagtctcagagaaagtgcccgccatgctggtataaatttgccaacactttcctcatctgggagtgccacccctactggataaaactgaaagagattgtgaacttgatagttatggacccttttgtggatttagccatcaccatctgcatcgtcctgaatacactgtttatggcaatggagcaccatcctatgacaccacaatttgaacatgtcttggctgtaggaaatctggttttcactggaattttcacagcggaaatgttcctgaagctcatagccatggatccctactattatttccaagaaggttggaacatttttgacggatttattgtctccctcagtttaatggaactgagtctagcagacgtggaggggctttcagtgctgcgatctttccgattgctccgagtcttcaaattggccaaatcctggcccaccctgaacatgctaatcaagattattggaaattcagtgggtgccctgggcaacctgacactggtgctggccattattgtcttcatctttgccgtggtggggatgcaactctttggaaaaagctacaaagagtgtgtctgcaagatcaaccaggactgtgaactccctcgctggcatatgcatgactttttccattccttcctcattgtctttcgagtgttgtgcggggagtggattgagaccatgtgggactgcatggaagtggcaggccaggccatgtgcctcattgtctttatgatggtcatggtgattggcaacttggtggtgctgaacctgtttctggccttgctcctgagctccttcagtgcagacaacctggctgccacagatgacgatggggaaatgaacaacctccagatctcagtgatccgtatcaagaagggtgtggcctggaccaaactaaaggtgcacgccttcatgcaggcccactttaagcagcgtgaggctgatgaggtgaagcctctggatgagttgtatgaaaagaaggccaactgtatcgccaatcacaccggtgcagacatccaccggaatggtgacttccagaagaatggcaatggcacaaccagcggcattggcagcagcgtggagaagtacatcattgatgaggaccacatgtccttcatcaacaaccccaacttgactgtacgggtacccattgctgtgggcgagtctgactttgagaacctcaacacagaggatgttagcagcgagtcggatcctgaaggcagcaaagataaactagatgacaccagctcctctgaaggaagcaccattgatatcaaaccagaagtagaagaggtccctgtggaacagcctgaggaatacttggatccagatgcctgcttcacagaaggttgtgtccagcggttcaagtgctgccaggtcaacatcgaggaagggctaggcaagtcttggtggatcctgcggaaaacctgcttcctcatcgtggagcacaactggtttgagaccttcatcatcttcatgattctgctgagcagtggcgccctggccttcgaggacatctacattgagcagagaaagaccatccgcaccatcctggaatatgctgacaaagtcttcacctatatcttcatcctggagatgttgctcaagtggacagcctatggcttcgtcaagttcttcaccaatgcctggtgttggctggacttcctcattgtggctgtggtggtgaatgccttggtgggcgccatcccctccatcatgaatgtgctgctggtgtgtctcatcttctggctgattttcagcatcatgggagttaacttgtttgcgggaaagtaccactactgctttaatgagacttctgaaatccgatttgaaattgaagatgtcaacaataaaactgaatgtgaaaagcttatggaggggaacaatacagagatcagatggaagaacgtgaagatcaactttgacaatgttggggcaggatacctggcccttcttcaagtagcaaccttcaaaggctggatggacatcatgtatgcagctgtagattcccggaagcctgatgagcagcctaagtatgaggacaatatctacatgtacatctattttgtcatcttcatcatcttcggctccttcttcaccctgaacctgttcattggtgtcatcattgataacttcaatcaacaaaagaaaaagttcggaggtcaggacatcttcatgaccgaagaacagaagaagtactacaatgccatgaaaaagctgggctcaaagaagccacagaaacctattccccgccccttgaacaaaatccaaggaatcgtctttgattttgtcactcagcaagcctttgacattgttatcatgatgctcatctgccttaacatggtgacaatgatggtggagacagacactcaaagcaagcagatggagaacatcctctactggattaacctggtgtttgttatcttcttcacctgtgagtgtgtgctcaaaatgtttgcgttgaggcactactacttcaccattggctggaacatcttcgacttcgtggtagtcatcctctccattgtgggaatgttcctggcagatataattgagaaatactttgtttccccaaccctattccgagtcatccgattggcccgtattgggcgcatcttgcgtctgatcaaaggcgccaaagggattcgtaccctgctctttgccttaatgatgtccttgcctgccctgttcaacatcggccttctgctcttcctggtcatgttcatcttctccatttttgggatgtccaattttgcatatgtgaagcacgaggctggtatcgatgacatgttcaactttgagacatttggcaacagcatgatctgcctgtttcaaatcacaacctcagctggttgggatggcctgctgctgcccatcctaaaccgcccccctgactgcagcctagataaggaacacccagggagtggctttaagggagattgtgggaacccctcagtgggcatcttcttctttgtaagctacatcatcatctctttcctaattgtcgtgaacatgtacattgccatcatcctggagaacttcagtgtagccacagaggaaagtgcagaccctctgagtgaggatgactttgagaccttctatgagatctgggagaagttcgaccccgatgccacccagttcattgagtactgtaagctggcagactttgcagatgccttggagcatcctctccgagtgcccaagcccaataccattgagctcatcgctatggatctgccaatggtgagcggggatcgcatccactgcttggacatcctttttgccttcaccaagcgggtcctgggagatagcggggagttggacatcctgcggcagcagatggaagagcggttcgtggcatccaatccttccaaagtgtcttacgagccaatcacaaccacactgcgtcgcaagcaggaggaggtatctgcagtggtcctgcagcgtgcctaccggggacatttggcaaggcggggcttcatctgcaaaaagacaacttctaataagctggagaatggaggcacacaccgggagaaaaaagagagcaccccatctacagcctccctcccgtcctatgacagtgtaactaaacctgaaaaggagaaacagcagcgggcagaggaaggaagaagggaaagagccaaaagacaaaaagaggtcagagaatccaagtgttag

SEQ ID NO: 70148 - DNA, 3858 bp, Artificial Sequence
  derived and/or modified sequence
tttctttctccacagacctttgtagtattaaacagagggaaaactctcttcagatttagtgccacgcctgccttgtacattttaagtccttttaacctgataagaagaatagctattaaaattttgatacattcattatttagcatgatcattatgtgcactattttgaccaactgtgtattcatgacttttagtaaccctcctgactggtcgaagaatgtggagtacacgttcacagggatttatacatttgaatcactagtgaaaatcattgcaagaggtttctgcatagatggctttacctttttacgggacccatggaactggttagatttcagtgtcatcatgatggcgtatataacagagtttgtaaacctaggcaatgtttcagctctacgcactttcagggtactgagggctttgaaaactatttcggtaatcccaggcctgaagacaattgtgggtgccctgattcagtctgtgaagaaactgtcagatgtgatgatcctgacagtgttctgcctgagtgtttttgccttgatcggactgcagctgttcatggggaaccttcgaaacaagtgtgttgtgtggcccataaacttcaacgagagctatcttgaaaatggcaccaaaggctttgattgggaagagtatatcaacaataaaacaaatttctacacagttcctggcatgctggaacctttactctgtgggaacagttctgatgctgggcaatgcccagagggataccagtgtatgaaagcaggaaggaaccccaactatggttacacaagttttgacacttttagctgggccttcttggcattatttcgccttatgacccaggactattgggaaaacttgtatcaattgactttacgagcagccgggaaaacatacatgatcttcttcgtcttggtcatctttgtgggttctttctatctggtgaacttgatcttggctgtggtggccatggcttatgaagaacagaatcaggcaacactggaggaggcagaacaaaaagaggctgaatttaaagcaatgttggagcaacttaagaagcaacaggaagaggcacaggctgctgcgatggccacttcagcaggaactgtctcagaagatgccatagaggaagaaggtgaagaaggagggggctcccctcggagctcttctgaaatctctaaactcagctcaaagagtgcaaaggaaagacgtaacaggagaaagaagaggaagcaaaaggaactctctgaaggagaggagaaaggggatcccgagaaggtgtttaagtcagagtcagaagatggcatgagaaggaaggcctttcggctgccagacaacagaatagggaggaaattttccatcatgaatcagtcactgctcagcatcccaggctcgcccttcctctcccgccacaacagcaagagcagcatcttcagtttcaggggacctgggcggttccgagacccgggctccgagaatgagttcgcggatgacgagcacagcacggtggaggagagcgagggccgccgggactccctcttcatccccatccgggcccgcgagcgccggagcagctacagcggctacagcggctacagccagggcagccgctcctcgcgcatcttccccagcctgcggcgcagcgtgaagcgcaacagcacggtggactgcaacggcgtggtgtccctcatcggcggccccggctcccacatcggcgggcgtctcctgccagaggctacaactgaggtggaaattaagaagaaaggccctggatctcttttagtttccatggaccaattagcctcctacgggcggaaggacagaatcaacagtataatgagtgttgttacaaatacactagtagaagaactggaagagtctcagagaaagtgcccgccatgctggtataaatttgccaacactttcctcatctgggagtgccacccctactggataaaactgaaagagattgtgaacttgatagttatggacccttttgtggatttagccatcaccatctgcatcgtcctgaatacactgtttatggcaatggagcaccatcctatgacaccacaatttgaacatgtcttggctgtaggaaatctggttttcactggaattttcacagcggaaatgttcctgaagctcatagccatggatccctactattatttccaagaaggttggaacatttttgacggatttattgtctccctcagtttaatggaactgagtctagcagacgtggaggggctttcagtgctgcgatctttccgattgctccgagtcttcaaattggccaaatcctggcccaccctgaacatgctaatcaagattattggaaattcagtgggtgccctgggcaacctgacactggtgctggccattattgtcttcatctttgccgtggtggggatgcaactctttggaaaaagctacaaagagtgtgtctgcaagatcaaccaggactgtgaactccctcgctggcatatgcatgactttttccattccttcctcattgtctttcgagtgttgtgcggggagtggattgagaccatgtgggactgcatggaagtggcaggccaggccatgtgcctcattgtctttatgatggtcatggtgattggcaacttggtggtgctgaacctgtttctggccttgctcctgagctccttcagtgcagacaacctggctgccacagatgacgatggggaaatgaacaacctccagatctcagtgatccgtatcaagaagggtgtggcctggaccaaactaaaggtgcacgccttcatgcaggcccactttaagcagcgtgaggctgatgaggtgaagcctctggatgagttgtatgaaaagaaggccaactgtatcgccaatcacaccggtgcagacatccaccggaatggtgacttccagaagaatggcaatggcacaaccagcggcattggcagcagcgtggagaagtacatcattgatgaggaccacatgtccttcatcaacaaccccaacttgactgtacgggtacccattgctgtgggcgagtctgactttgagaacctcaacacagaggatgttagcagcgagtcggatcctgaaggcagcaaagataaactagatgacaccagctcctctgaaggaagcaccattgatatcaaaccagaagtagaagaggtccctgtggaacagcctgaggaatacttggatccagatgcctgcttcacagaaggttgtgtccagcggttcaagtgctgccaggtcaacatcgaggaagggctaggcaagtcttggtggatcctgcggaaaacctgcttcctcatcgtggagcacaactggtttgagaccttcatcatcttcatgattctgctgagcagtggcgccctggccttcgaggacatctacattgagcagagaaagaccatccgcaccatcctggaatatgctgacaaagtcttcacctatatcttcatcctggagatgttgctcaagtggacagcctatggcttcgtcaagttcttcaccaatgcctggtgttggctggacttcctcattgtggctgtaccattaaatttgtctggcttaatttaatggggacttctgggacctgcagagactgtaaagggcgagggtggtggtgaatgccttggtgggcgccatcccctccatcatgaatgtgctgctggtgtgtctcatcttctggctgattttcagcatcatgggagttaacttgtttgcgggaaagtaccactactgctttaatgagacttctgaaatccgatttgaaattgaagatgtcaacaataaaactgaatgtgaaaagcttatggaggggaacaatacagagatcagatggaagaa

SEQ ID NO: 70149 - DNA, 6958 bp, Artificial Sequence
  derived and/or modified sequence
agctgacctgtcctggacgcagcataactaacgaagctgctgcaggatgagaagatggcagcgcggctgcttgcaccaccaggccctgatagtttcaagcctttcacccctgagtcactggcaaacattgagaggcgcattgctgagagcaagctcaagaaaccaccaaaggccgatggcagtcatcgggaggacgatgaggacagcaagcccaagccaaacagcgacctggaagcagggaagagtttgcctttcatctacggggacatcccccaaggcctggttgcagttcccctggaggactttgacccatactatttgacgcagaaaacctttgtagtattaaacagagggaaaactctcttcagatttagtgccacgcctgccttgtacattttaagtccttttaacctgataagaagaatagctattaaaattttgatacattcagtatttagcatgatcattatgtgcactattttgaccaactgtgtattcatgacttttagtaaccctcctgactggtcgaagaatgtggagtacacgttcacagggatttatacatttgaatcactagtgaaaatcattgcaagaggtttctgcatagatggctttacctttttacgggacccatggaactggttagatttcagtgtcatcatgatggcgtatataacagagtttgtaaacctaggcaatgtttcagctctacgcactttcagggtactgagggctttgaaaactatttcggtaatcccaggcctgaagacaattgtgggtgccctgattcagtctgtgaagaaactgtcagatgtgatgatcctgacagtgttctgcctgagtgtttttgccttgatcggactgcagctgttcatggggaaccttcgaaacaagtgtgttgtgtggcccataaacttcaacgagagctatcttgaaaatggcaccaaaggctttgattgggaagagtatatcaacaataaaacaaatttctacacagttcctggcatgctggaacctttactctgtgggaacagttctgatgctgggcaatgcccagagggataccagtgtatgaaagcaggaaggaaccccaactatggttacacaagttttgacacttttagctgggccttcttggcattatttcgccttatgacccaggactattgggaaaacttgtatcaattgactttacgagcagccgggaaaacatacatgatcttcttcgtcttggtcatctttgtgggttctttctatctggtgaacttgatcttggctgtggtggccatggcttatgaagaacagaatcaggcaacactggaggaggcagaacaaaaagaggctgaatttaaagcaatgttggagcaacttaagaagcaacaggaagaggcacaggctgctgcgatggccacttcagcaggaactgtctcagaagatgccatagaggaagaaggtgaagaaggagggggctcccctcggagctcttctgaaatctctaaactcagctcaaagagtgcaaaggaaagacgtaacaggagaaagaagaggaagcaaaaggaactctctgaaggagaggagaaaggggatcccgagaaggtgtttaagtcagagtcagaagatggcatgagaaggaaggcctttcggctgccagacaacagaatagggaggaaattttccatcatgaatcagtcactgctcagcatcccaggctcgcccttcctctcccgccacaacagcaagagcagcatcttcagtttcaggggacctgggcggttccgagacccgggctccgagaatgagttcgcggatgacgagcacagcacggtggaggagagcgagggccgccgggactccctcttcatccccatccgggcccgcgagcgccggagcagctacagcggctacagcggctacagccagggcagccgctcctcgcgcatcttccccagcctgcggcgcagcgtgaagcgcaacagcacggtggactgcaacggcgtggtgtccctcatcggcggccccggctcccacatcggcgggcgtctcctgccagaggctacaactgaggtggaaattaagaagaaaggccctggatctcttttagtttccatggaccaattagcctcctacgggcggaaggacagaatcaacagtataatgagtgttgttacaaatacactagtagaagaactggaagagtctcagagaaagtgcccgccatgctggtataaatttgccaacactttcctcatctgggagtgccacccctactggataaaactgaaagagattgtgaacttgatagttatggacccttttgtggatttagccatcaccatctgcatcgtcctgaatacactgtttatggcaatggagcaccatcctatgacaccacaatttgaacatgtcttggctgtaggaaatctggttttcactggaattttcacagcggaaatgttcctgaagctcatagccatggatccctactattatttccaagaaggttggaacatttttgacggatttattgtctccctcagtttaatggaactgagtctagcagacgtggaggggctttcagtgctgcgatctttccgattgctccgagtcttcaaattggccaaatcctggcccaccctgaacatgctaatcaagattattggaaattcagtgggtgccctgggcaacctgacactggtgctggccattattgtcttcatctttgccgtggtggggatgcaactctttggaaaaagctacaaagagtgtgtctgcaagatcaaccaggactgtgaactccctcgctggcatatgcatgactttttccattccttcctcattgtctttcgagtgttgtgcggggagtggattgagaccatgtgggactgcatggaagtggcaggccaggccatgtgcctcattgtctttatgatggtcatggtgattggcaacttggtggtgctgaacctgtttctggccttgctcctgagctccttcagtgcagacaacctggctgccacagatgacgatggggaaatgaacaacctccagatctcagtgatccgtatcaagaagggtgtggcctggaccaaactaaaggtgcacgccttcatgcaggcccactttaagcagcgtgaggctgatgaggtgaagcctctggatgagttgtatgaaaagaaggccaactgtatcgccaatcacaccggtgcagacatccaccggaatggtgacttccagaagaatggcaatggcacaaccagcggcattggcagcagcgtggagaagtacatcattgatgaggaccacatgtccttcatcaacaaccccaacttgactgtacgggtacccattgctgtgggcgagtctgactttgagaacctcaacacagaggatgttagcagcgagtcggatcctgaaggcagcaaagataaactagatgacaccagctcctctgaaggaagcaccattgatatcaaaccagaagtagaagaggtccctgtggaacagcctgaggaatacttggatccagatgcctgcttcacagaaggttgtgtccagcggttcaagtgctgccaggtcaacatcgaggaagggctaggcaagtcttggtggatcctgcggaaaacctgcttcctcatcgtggagcacaactggtttgagaccttcatcatcttcatgattctgctgagcagtggcgccctggccttcgaggacatctacattgagcagagaaagaccatccgcaccatcctggaatatgctgacaaagtcttcacctatatcttcatcctggagatgttgctcaagtggacagcctatggcttcgtcaagttcttcaccaatgcctggtgttggctggacttcctcattgtggctgtggtggtgaatgccttggtgggcgccatcccctccatcatgaatgtgctgctggtgtgtctcatcttctggctgattttcagcatcatgggagttaacttgtttgcgggaaagtaccactactgctttaatgagacttctgaaatccgatttgaaattgaagatgtcaacaataaaactgaatgtgaaaagcttatggaggggaacaatacagagatcagatggaagaacgtgaagatcaactttgacaatgttggggcaggatacctggcccttcttcaagtagcaaccttcaaaggctggatggacatcatgtatgcagctgtagattcccggaagcctgatgagcagcctaagtatgaggacaatatctacatgtacatctattttgtcatcttcatcatcttcggctccttcttcaccctgaacctgttcattggtgtcatcattgataacttcaatcaacaaaagaaaaagttcggaggtcaggacatcttcatgaccgaagaacagaagaagtactacaatgccatgaaaaagctgggctcaaagaagccacagaaacctattccccgccccttgaacaaaatccaaggaatcgtctttgattttgtcactcagcaagcctttgacattgttatcatgatgctcatctgccttaacatggtgacaatgatggtggagacagacactcaaagcaagcagatggagaacatcctctactggattaacctggtgtttgttatcttcttcacctgtgagtgtgtgctcaaaatgtttgcgttgaggcactactacttcaccattggctggaacatcttcgacttcgtggtagtcatcctctccattgtgggaatgttcctggcagatataattgagaaatactttgtttccccaaccctattccgagtcatccgattggcccgtattgggcgcatcttgcgtctgatcaaaggcgccaaagggattcgtaccctgctctttgccttaatgatgtccttgcctgccctgttcaacatcggccttctgctcttcctggtcatgttcatcttctccatttttgggatgtccaattttgcatatgtgaagcacgaggctggtatcgatgacatgttcaactttgagacatttggcaacagcatgatctgcctgtttcaaatcacaacctcagctggttgggatggcctgctgctgcccatcctaaaccgcccccctgactgcagcctagataaggaacacccagggagtggctttaagggagattgtgggaacccctcagtgggcatcttcttctttgtaagctacatcatcatctctttcctaattgtcgtgaacatgtacattgccatcatcctggagaacttcagtgtagccacagaggaaagtgcagaccctctgagtgaggatgactttgagaccttctatgagatctgggagaagttcgaccccgatgccacccagttcattgagtactgtaagctggcagactttgcagatgccttggagcatcctctccgagtgcccaagcccaataccattgagctcatcgctatggatctgccaatggtgagcggggatcgcatccactgcttggacatcctttttgccttcaccaagcgggtcctgggagatagcggggagttggacatcctgcggcagcagatggaagagcggttcgtggcatccaatccttccaaagtgtcttacgagccaatcacaaccacactgcgtcgcaagcaggaggaggtatctgcagtggtcctgcagcgtgcctaccggggacatttggcaaggcggggcttcatctgcaaaaagacaacttctaataagctggagaatggaggcacacaccgggagaaaaaagagagcaccccatctacagcctccctcccgtcctatgacagtgtaactaaacctgaaaaggagaaacagcagcgggcagaggaaggaagaagggaaagagccaaaagacaaaaagaggtcagagaatccaagtgttagaggagaacaaaaattcagtattatacagatctaaaactcgcaagtgaaagattgtttacaaacttcctgaatattatcaatgcagaacagctgtggagactctaacctgaagatctataccaaacgtcgtctgcttaccacgtaacacagctgcatcttgagcagtgacctgccaagggcaaaggaccccgctccctagacttacagattttctaatgcttgggcaggtggttactgcatgttccacatcagtcaatgcaacttaggacaaaactaaccagatacagaaacagaagagaggctgccgggaccagcatatttccgttgcagccaaatggattttattttttcattttattgattctcagaagcagaaagcatcactttaaaagttcgtttgttcatgcaaactatatttgcattcttacattagttaagctaagcagcaaaaagaaaacacacacacacactcacatttagcccatgtcatttaattgtcagtttctttgacataaagcgcatcttctccacatgggcttcacgtggtttggagatgggtgggggaaaacaatcaggtttcttcaggctgaggaggacttgctcaggccgattccaaacattgtgctcgttcaatgcgtagaaatgatttgcatgatggcatgccgtgatcagaagtcatgcatgagatccatacaccacaggacactactaatctagtcccttgcactgggtcagcctttggacaggacccagccctgcaccgttcactgtatttggagaaaatggtaagagttccataccggctacaattctttgagttcttaaaagtccttcatacaccttctgggtagggaaacaaccaactaattgactaacaccaccaacaacaaaaaacaaacccaatccaacaagcagatggatccgttgcgtgtatatgtttaacagacatctctaacatacagccattgttgcacattttgcaagatgaactatttaatgctgctctgtgtccagtacatgggggagactttgatcccaaatggcttgtactatttatgtcactgtaaaaccaaatcctagggct

SEQ ID NO: 70150 - DNA, 4674 bp, Artificial Sequence
  derived and/or modified sequence
atggccgccagactgctggccccccccggccccgacagcttcaagcccttcacccccgagagcctggccaacatcgagagaagaatcgccgagagcaagctgaagaagccccccaaggccgacggcagccacagagaggacgacgaggacagcaagcccaagcccaacagcgacctggaggccggcaagagcctgcccttcatctacggcgacatcccccagggcctggtggccgtgcccctggaggacttcgacccctactacctgacccagaagaccttcgtggtgctgaacagaggcaagaccctgttcagattcagcgccacccccgccctgtacatcctgagccccttcaacctgatcagaagaatcgccatcaagatcctgatccacagcgtgttcagcatgatcatcatgtgcaccatcctgaccaactgcgtgttcatgaccttcagcaacccccccgactggagcaagaacgtggagtacaccttcaccggcatctacaccttcgagagcctggtgaagatcatcgccagaggcttctgcatcgacggcttcaccttcctgagagacccctggaactggctggacttcagcgtgatcatgatggcctacatcaccgagttcgtgaacctgggcaacgtgagcgccctgagaaccttcagagtgctgagagccctgaagaccatcagcgtgatccccggcctgaagaccatcgtgggcgccctgatccagagcgtgaagaagctgagcgacgtgatgatcctgaccgtgttctgcctgagcgtgttcgccctgatcggcctgcagctgttcatgggcaacctgagaaacaagtgcgtggtgtggcccatcaacttcaacgagagctacctggagaacggcaccaagggcttcgactgggaggagtacatcaacaacaagaccaacttctacaccgtgcccggcatgctggagcccctgctgtgcggcaacagcagcgacgccggccagtgccccgagggctaccagtgcatgaaggccggcagaaaccccaactacggctacaccagcttcgacaccttcagctgggccttcctggccctgttcagactgatgacccaggactactgggagaacctgtaccagctgaccctgagagccgccggcaagacctacatgatcttcttcgtgctggtgatcttcgtgggcagcttctacctggtgaacctgatcctggccgtggtggccatggcctacgaggagcagaaccaggccaccctggaggaggccgagcagaaggaggccgagttcaaggccatgctggagcagctgaagaagcagcaggaggaggcccaggccgccgccatggccaccagcgccggcaccgtgagcgaggacgccatcgaggaggagggcgaggagggcggcggcagccccagaagcagcagcgagatcagcaagctgagcagcaagagcgccaaggagagaagaaacagaagaaagaagagaaagcagaaggagctgagcgagggcgaggagaagggcgaccccgagaaggtgttcaagagcgagagcgaggacggcatgagaagaaaggccttcagactgcccgacaacagaatcggcagaaagttcagcatcatgaaccagagcctgctgagcatccccggcagccccttcctgagcagacacaacagcaagagcagcatcttcagcttcagaggccccggcagattcagagaccccggcagcgagaacgagttcgccgacgacgagcacagcaccgtggaggagagcgagggcagaagagacagcctgttcatccccatcagagccagagagagaagaagcagctacagcggctacagcggctacagccagggcagcagaagcagcagaatcttccccagcctgagaagaagcgtgaagagaaacagcaccgtggactgcaacggcgtggtgagcctgatcggcggccccggcagccacatcggcggcagactgctgcccgaggccaccaccgaggtggagatcaagaagaagggccccggcagcctgctggtgagcatggaccagctggccagctacggcagaaaggacagaatcaacagcatcatgagcgtggtgaccaacaccctggtggaggagctggaggagagccagagaaagtgccccccctgctggtacaagttcgccaacaccttcctgatctgggagtgccacccctactggatcaagctgaaggagatcgtgaacctgatcgtgatggaccccttcgtggacctggccatcaccatctgcatcgtgctgaacaccctgttcatggccatggagcaccaccccatgaccccccagttcgagcacgtgctggccgtgggcaacctggtgttcaccggcatcttcaccgccgagatgttcctgaagctgatcgccatggacccctactactacttccaggagggctggaacatcttcgacggcttcatcgtgagcctgagcctgatggagctgagcctggccgacgtggagggcctgagcgtgctgagaagcttcagactgctgagagtgttcaagctggccaagagctggcccaccctgaacatgctgatcaagatcatcggcaacagcgtgggcgccctgggcaacctgaccctggtgctggccatcatcgtgttcatcttcgccgtggtgggcatgcagctgttcggcaagagctacaaggagtgcgtgtgcaagatcaaccaggactgcgagctgcccagatggcacatgcacgacttcttccacagcttcctgatcgtgttcagagtgctgtgcggcgagtggatcgagaccatgtgggactgcatggaggtggccggccaggccatgtgcctgatcgtgttcatgatggtgatggtgatcggcaacctggtggtgctgaacctgttcctggccctgctgctgagcagcttcagcgccgacaacctggccgccaccgacgacgacggcgagatgaacaacctgcagatcagcgtgatcagaatcaagaagggcgtggcctggaccaagctgaaggtgcacgccttcatgcaggcccacttcaagcagagagaggccgacgaggtgaagcccctggacgagctgtacgagaagaaggccaactgcatcgccaaccacaccggcgccgacatccacagaaacggcgacttccagaagaacggcaacggcaccaccagcggcatcggcagcagcgtggagaagtacatcatcgacgaggaccacatgagcttcatcaacaaccccaacctgaccgtgagagtgcccatcgccgtgggcgagagcgacttcgagaacctgaacaccgaggacgtgagcagcgagagcgaccccgagggcagcaaggacaagctggacgacaccagcagcagcgagggcagcaccatcgacatcaagcccgaggtggaggaggtgcccgtggagcagcccgaggagtacctggaccccgacgcctgcttcaccgagggctgcgtgcagagattcaagtgctgccaggtgaacatcgaggagggcctgggcaagagctggtggatcctgagaaagacctgcttcctgatcgtggagcacaactggttcgagaccttcatcatcttcatgatcctgctgagcagcggcgccctggccttcgaggacatctacatcgagcagagaaagaccatcagaaccatcctggagtacgccgacaaggtgttcacctacatcttcatcctggagatgctgctgaagtggaccgcctacggcttcgtgaagttcttcaccaacgcctggtgctggctggacttcctgatcgtggccgtggtggtgaacgccctggtgggcgccatccccagcatcatgaacgtgctgctggtgtgcctgatcttctggctgatcttcagcatcatgggcgtgaacctgttcgccggcaagtaccactactgcttcaacgagaccagcgagatcagattcgagatcgaggacgtgaacaacaagaccgagtgcgagaagctgatggagggcaacaacaccgagatcagatggaagaacgtgaagatcaacttcgacaacgtgggcgccggctacctggccctgctgcaggtggccaccttcaagggctggatggacatcatgtacgccgccgtggacagcagaaagcccgacgagcagcccaagtacgaggacaacatctacatgtacatctacttcgtgatcttcatcatcttcggcagcttcttcaccctgaacctgttcatcggcgtgatcatcgacaacttcaaccagcagaagaagaagttcggcggccaggacatcttcatgaccgaggagcagaagaagtactacaacgccatgaagaagctgggcagcaagaagccccagaagcccatccccagacccctgaacaagatccagggcatcgtgttcgacttcgtgacccagcaggccttcgacatcgtgatcatgatgctgatctgcctgaacatggtgaccatgatggtggagaccgacacccagagcaagcagatggagaacatcctgtactggatcaacctggtgttcgtgatcttcttcacctgcgagtgcgtgctgaagatgttcgccctgagacactactacttcaccatcggctggaacatcttcgacttcgtggtggtgatcctgagcatcgtgtag

SEQ ID NO: 70151 - DNA, 3588 bp, Artificial Sequence
  derived and/or modified sequence
ttcctgagcccccagaccttcgtggtgctgaacagaggcaagaccctgttcagattcagcgccacccccgccctgtacatcctgagccccttcaacctgatcagaagaatcgccatcaagatcctgatccacagcctgttcagcatgatcatcatgtgcaccatcctgaccaactgcgtgttcatgaccttcagcaacccccccgactggagcaagaacgtggagtacaccttcaccggcatctacaccttcgagagcctggtgaagatcatcgccagaggcttctgcatcgacggcttcaccttcctgagagacccctggaactggctggacttcagcgtgatcatgatggcctacatcaccgagttcgtgaacctgggcaacgtgagcgccctgagaaccttcagagtgctgagagccctgaagaccatcagcgtgatccccggcctgaagaccatcgtgggcgccctgatccagagcgtgaagaagctgagcgacgtgatgatcctgaccgtgttctgcctgagcgtgttcgccctgatcggcctgcagctgttcatgggcaacctgagaaacaagtgcgtggtgtggcccatcaacttcaacgagagctacctggagaacggcaccaagggcttcgactgggaggagtacatcaacaacaagaccaacttctacaccgtgcccggcatgctggagcccctgctgtgcggcaacagcagcgacgccggccagtgccccgagggctaccagtgcatgaaggccggcagaaaccccaactacggctacaccagcttcgacaccttcagctgggccttcctggccctgttcagactgatgacccaggactactgggagaacctgtaccagctgaccctgagagccgccggcaagacctacatgatcttcttcgtgctggtgatcttcgtgggcagcttctacctggtgaacctgatcctggccgtggtggccatggcctacgaggagcagaaccaggccaccctggaggaggccgagcagaaggaggccgagttcaaggccatgctggagcagctgaagaagcagcaggaggaggcccaggccgccgccatggccaccagcgccggcaccgtgagcgaggacgccatcgaggaggagggcgaggagggcggcggcagccccagaagcagcagcgagatcagcaagctgagcagcaagagcgccaaggagagaagaaacagaagaaagaagagaaagcagaaggagctgagcgagggcgaggagaagggcgaccccgagaaggtgttcaagagcgagagcgaggacggcatgagaagaaaggccttcagactgcccgacaacagaatcggcagaaagttcagcatcatgaaccagagcctgctgagcatccccggcagccccttcctgagcagacacaacagcaagagcagcatcttcagcttcagaggccccggcagattcagagaccccggcagcgagaacgagttcgccgacgacgagcacagcaccgtggaggagagcgagggcagaagagacagcctgttcatccccatcagagccagagagagaagaagcagctacagcggctacagcggctacagccagggcagcagaagcagcagaatcttccccagcctgagaagaagcgtgaagagaaacagcaccgtggactgcaacggcgtggtgagcctgatcggcggccccggcagccacatcggcggcagactgctgcccgaggccaccaccgaggtggagatcaagaagaagggccccggcagcctgctggtgagcatggaccagctggccagctacggcagaaaggacagaatcaacagcatcatgagcgtggtgaccaacaccctggtggaggagctggaggagagccagagaaagtgccccccctgctggtacaagttcgccaacaccttcctgatctgggagtgccacccctactggatcaagctgaaggagatcgtgaacctgatcgtgatggaccccttcgtggacctggccatcaccatctgcatcgtgctgaacaccctgttcatggccatggagcaccaccccatgaccccccagttcgagcacgtgctggccgtgggcaacctggtgttcaccggcatcttcaccgccgagatgttcctgaagctgatcgccatggacccctactactacttccaggagggctggaacatcttcgacggcttcatcgtgagcctgagcctgatggagctgagcctggccgacgtggagggcctgagcgtgctgagaagcttcagactgctgagagtgttcaagctggccaagagctggcccaccctgaacatgctgatcaagatcatcggcaacagcgtgggcgccctgggcaacctgaccctggtgctggccatcatcgtgttcatcttcgccgtggtgggcatgcagctgttcggcaagagctacaaggagtgcgtgtgcaagatcaaccaggactgcgagctgcccagatggcacatgcacgacttcttccacagcttcctgatcgtgttcagagtgctgtgcggcgagtggatcgagaccatgtgggactgcatggaggtggccggccaggccatgtgcctgatcgtgttcatgatggtgatggtgatcggcaacctggtggtgctgaacctgttcctggccctgctgctgagcagcttcagcgccgacaacctggccgccaccgacgacgacggcgagatgaacaacctgcagatcagcgtgatcagaatcaagaagggcgtggcctggaccaagctgaaggtgcacgccttcatgcaggcccacttcaagcagagagaggccgacgaggtgaagcccctggacgagctgtacgagaagaaggccaactgcatcgccaaccacaccggcgccgacatccacagaaacggcgacttccagaagaacggcaacggcaccaccagcggcatcggcagcagcgtggagaagtacatcatcgacgaggaccacatgagcttcatcaacaaccccaacctgaccgtgagagtgcccatcgccgtgggcgagagcgacttcgagaacctgaacaccgaggacgtgagcagcgagagcgaccccgagggcagcaaggacaagctggacgacaccagcagcagcgagggcagcaccatcgacatcaagcccgaggtggaggaggtgcccgtggagcagcccgaggagtacctggaccccgacgcctgcttcaccgagggctgcgtgcagagattcaagtgctgccaggtgaacatcgaggagggcctgggcaagagctggtggatcctgagaaagacctgcttcctgatcgtggagcacaactggttcgagaccttcatcatcttcatgatcctgctgagcagcggcgccctggccttcgaggacatctacatcgagcagagaaagaccatcagaaccatcctggagtacgccgacaaggtgttcacctacatcttcatcctggagatgctgctgaagtggaccgcctacggcttcgtgaagttcttcaccaacgcctggtgctggctggacttcctgatcgtggccgtgcccctgaacctgagcggcctgatctag

SEQ ID NO: 70152 - DNA, 5820 bp, Artificial Sequence
  derived and/or modified sequence
atggccgccagactgctggccccccccggccccgacagcttcaagcccttcacccccgagagcctggccaacatcgagagaagaatcgccgagagcaagctgaagaagccccccaaggccgacggcagccacagagaggacgacgaggacagcaagcccaagcccaacagcgacctggaggccggcaagagcctgcccttcatctacggcgacatcccccagggcctggtggccgtgcccctggaggacttcgacccctactacctgacccagaagaccttcgtggtgctgaacagaggcaagaccctgttcagattcagcgccacccccgccctgtacatcctgagccccttcaacctgatcagaagaatcgccatcaagatcctgatccacagcgtgttcagcatgatcatcatgtgcaccatcctgaccaactgcgtgttcatgaccttcagcaacccccccgactggagcaagaacgtggagtacaccttcaccggcatctacaccttcgagagcctggtgaagatcatcgccagaggcttctgcatcgacggcttcaccttcctgagagacccctggaactggctggacttcagcgtgatcatgatggcctacatcaccgagttcgtgaacctgggcaacgtgagcgccctgagaaccttcagagtgctgagagccctgaagaccatcagcgtgatccccggcctgaagaccatcgtgggcgccctgatccagagcgtgaagaagctgagcgacgtgatgatcctgaccgtgttctgcctgagcgtgttcgccctgatcggcctgcagctgttcatgggcaacctgagaaacaagtgcgtggtgtggcccatcaacttcaacgagagctacctggagaacggcaccaagggcttcgactgggaggagtacatcaacaacaagaccaacttctacaccgtgcccggcatgctggagcccctgctgtgcggcaacagcagcgacgccggccagtgccccgagggctaccagtgcatgaaggccggcagaaaccccaactacggctacaccagcttcgacaccttcagctgggccttcctggccctgttcagactgatgacccaggactactgggagaacctgtaccagctgaccctgagagccgccggcaagacctacatgatcttcttcgtgctggtgatcttcgtgggcagcttctacctggtgaacctgatcctggccgtggtggccatggcctacgaggagcagaaccaggccaccctggaggaggccgagcagaaggaggccgagttcaaggccatgctggagcagctgaagaagcagcaggaggaggcccaggccgccgccatggccaccagcgccggcaccgtgagcgaggacgccatcgaggaggagggcgaggagggcggcggcagccccagaagcagcagcgagatcagcaagctgagcagcaagagcgccaaggagagaagaaacagaagaaagaagagaaagcagaaggagctgagcgagggcgaggagaagggcgaccccgagaaggtgttcaagagcgagagcgaggacggcatgagaagaaaggccttcagactgcccgacaacagaatcggcagaaagttcagcatcatgaaccagagcctgctgagcatccccggcagccccttcctgagcagacacaacagcaagagcagcatcttcagcttcagaggccccggcagattcagagaccccggcagcgagaacgagttcgccgacgacgagcacagcaccgtggaggagagcgagggcagaagagacagcctgttcatccccatcagagccagagagagaagaagcagctacagcggctacagcggctacagccagggcagcagaagcagcagaatcttccccagcctgagaagaagcgtgaagagaaacagcaccgtggactgcaacggcgtggtgagcctgatcggcggccccggcagccacatcggcggcagactgctgcccgaggccaccaccgaggtggagatcaagaagaagggccccggcagcctgctggtgagcatggaccagctggccagctacggcagaaaggacagaatcaacagcatcatgagcgtggtgaccaacaccctggtggaggagctggaggagagccagagaaagtgccccccctgctggtacaagttcgccaacaccttcctgatctgggagtgccacccctactggatcaagctgaaggagatcgtgaacctgatcgtgatggaccccttcgtggacctggccatcaccatctgcatcgtgctgaacaccctgttcatggccatggagcaccaccccatgaccccccagttcgagcacgtgctggccgtgggcaacctggtgttcaccggcatcttcaccgccgagatgttcctgaagctgatcgccatggacccctactactacttccaggagggctggaacatcttcgacggcttcatcgtgagcctgagcctgatggagctgagcctggccgacgtggagggcctgagcgtgctgagaagcttcagactgctgagagtgttcaagctggccaagagctggcccaccctgaacatgctgatcaagatcatcggcaacagcgtgggcgccctgggcaacctgaccctggtgctggccatcatcgtgttcatcttcgccgtggtgggcatgcagctgttcggcaagagctacaaggagtgcgtgtgcaagatcaaccaggactgcgagctgcccagatggcacatgcacgacttcttccacagcttcctgatcgtgttcagagtgctgtgcggcgagtggatcgagaccatgtgggactgcatggaggtggccggccaggccatgtgcctgatcgtgttcatgatggtgatggtgatcggcaacctggtggtgctgaacctgttcctggccctgctgctgagcagcttcagcgccgacaacctggccgccaccgacgacgacggcgagatgaacaacctgcagatcagcgtgatcagaatcaagaagggcgtggcctggaccaagctgaaggtgcacgccttcatgcaggcccacttcaagcagagagaggccgacgaggtgaagcccctggacgagctgtacgagaagaaggccaactgcatcgccaaccacaccggcgccgacatccacagaaacggcgacttccagaagaacggcaacggcaccaccagcggcatcggcagcagcgtggagaagtacatcatcgacgaggaccacatgagcttcatcaacaaccccaacctgaccgtgagagtgcccatcgccgtgggcgagagcgacttcgagaacctgaacaccgaggacgtgagcagcgagagcgaccccgagggcagcaaggacaagctggacgacaccagcagcagcgagggcagcaccatcgacatcaagcccgaggtggaggaggtgcccgtggagcagcccgaggagtacctggaccccgacgcctgcttcaccgagggctgcgtgcagagattcaagtgctgccaggtgaacatcgaggagggcctgggcaagagctggtggatcctgagaaagacctgcttcctgatcgtggagcacaactggttcgagaccttcatcatcttcatgatcctgctgagcagcggcgccctggccttcgaggacatctacatcgagcagagaaagaccatcagaaccatcctggagtacgccgacaaggtgttcacctacatcttcatcctggagatgctgctgaagtggaccgcctacggcttcgtgaagttcttcaccaacgcctggtgctggctggacttcctgatcgtggccgtggtggtgaacgccctggtgggcgccatccccagcatcatgaacgtgctgctggtgtgcctgatcttctggctgatcttcagcatcatgggcgtgaacctgttcgccggcaagtaccactactgcttcaacgagaccagcgagatcagattcgagatcgaggacgtgaacaacaagaccgagtgcgagaagctgatggagggcaacaacaccgagatcagatggaagaacgtgaagatcaacttcgacaacgtgggcgccggctacctggccctgctgcaggtggccaccttcaagggctggatggacatcatgtacgccgccgtggacagcagaaagcccgacgagcagcccaagtacgaggacaacatctacatgtacatctacttcgtgatcttcatcatcttcggcagcttcttcaccctgaacctgttcatcggcgtgatcatcgacaacttcaaccagcagaagaagaagttcggcggccaggacatcttcatgaccgaggagcagaagaagtactacaacgccatgaagaagctgggcagcaagaagccccagaagcccatccccagacccctgaacaagatccagggcatcgtgttcgacttcgtgacccagcaggccttcgacatcgtgatcatgatgctgatctgcctgaacatggtgaccatgatggtggagaccgacacccagagcaagcagatggagaacatcctgtactggatcaacctggtgttcgtgatcttcttcacctgcgagtgcgtgctgaagatgttcgccctgagacactactacttcaccatcggctggaacatcttcgacttcgtggtggtgatcctgagcatcgtgggcatgttcctggccgacatcatcgagaagtacttcgtgagccccaccctgttcagagtgatcagactggccagaatcggcagaatcctgagactgatcaagggcgccaagggcatcagaaccctgctgttcgccctgatgatgagcctgcccgccctgttcaacatcggcctgctgctgttcctggtgatgttcatcttcagcatcttcggcatgagcaacttcgcctacgtgaagcacgaggccggcatcgacgacatgttcaacttcgagaccttcggcaacagcatgatctgcctgttccagatcaccaccagcgccggctgggacggcctgctgctgcccatcctgaacagaccccccgactgcagcctggacaaggagcaccccggcagcggcttcaagggcgactgcggcaaccccagcgtgggcatcttcttcttcgtgagctacatcatcatcagcttcctgatcgtggtgaacatgtacatcgccatcatcctggagaacttcagcgtggccaccgaggagagcgccgaccccctgagcgaggacgacttcgagaccttctacgagatctgggagaagttcgaccccgacgccacccagttcatcgagtactgcaagctggccgacttcgccgacgccctggagcaccccctgagagtgcccaagcccaacaccatcgagctgatcgccatggacctgcccatggtgagcggcgacagaatccactgcctggacatcctgttcgccttcaccaagagagtgctgggcgacagcggcgagctggacatcctgagacagcagatggaggagagattcgtggccagcaaccccagcaaggtgagctacgagcccatcaccaccaccctgagaagaaagcaggaggaggtgagcgccgtggtgctgcagagagcctacagaggccacctggccagaagaggcttcatctgcaagaagaccaccagcaacaagctggagaacggcggcacccacagagagaagaaggagagcacccccagcaccgccagcctgcccagctacgacagcgtgaccaagcccgagaaggagaagcagcagagagccgaggagggcagaagagagagagccaagagacagaaggaggtgagagagagcaagtgctag

SEQ ID NO: 70153 - protein, 262 aa, Artificial Sequence
  derived and/or modified sequence
MAPGSPPGPAIATMKLNERSLAFYATCDAPVDNAGFLYKKGGRHAAYHRRWFVLRGNMLFYFEDAASREPVGVIILEGCTVELVEAAEEFAFAVRFAGTRARTYVLAAESQDAMEGWVKALSRASFDYLRLVVRELEQQLAAVRGGGGMALPQPQPQSLPLPPSLPSALAPVPSLPSAPAPVPALPLPRRPSALPPKENGCAVWSTEATFRPGPEPPPPPPRRRASAPHGPLDMAPFARLHECYGQEIRALRGQWLSSRVQP

SEQ ID NO: 70154 - protein, 249 aa, Artificial Sequence
  derived and/or modified sequence
MKLNERSLAFYATCDAPVDNAGFLYKKGGRHAAYHRRWFVLRGNMLFYFEDAASREPVGVIILEGCTVELVEAAEEFAFAVRFAGTRARTYVLAAESQDAMEGWVKALSRASFDYLRLVVRELEQQLAAVRGGGGMALPQPQPQSLPLPPSLPSALAPVPSLPSAPAPVPALPLPRRPSALPPKENGCAVWSTEATFRPGPEPPPPPPRRRASAPHGPLDMAPFARLHECYGQEIRALRGQWLSSRVQP

SEQ ID NO: 70155 - protein, 88 aa, Artificial Sequence
  derived and/or modified sequence
MKLNERSLAFYATCDAPVDNAGFLYKKGGRHAAYHRRWFVLRGNMLFYFEDAASREPVGVIILVAVALWPRALSVSPWWLSQGSPDTP

SEQ ID NO: 70156 - protein, 117 aa, Artificial Sequence
  derived and/or modified sequence
MKLNERSLAFYATCDAPVDNAGFLYKKGGRHAAYHRRWFVLRGNMLFYFEDAASREPVGVIILEGCTVELVEAAEEFAFAVRFAGTRARTYVLAAESQDAMEGWVKALSRASFDYLR

SEQ ID NO: 70157 - protein, 74 aa, Artificial Sequence
  derived and/or modified sequence
MKLNERSLAFYATCDAPVDNAGFLYKKGGRHAAYHRRWFVLRGNMLFYFEDAASREPVGVIILEGCTVELVEAA

SEQ ID NO: 70158 - protein, 80 aa, Artificial Sequence
  derived and/or modified sequence
MKLNERSLAFYATCDAPVDNAGFLYKKGGRHAAYHRRWFVLRGNMLFYFEDAASREPVGVIILEGCTVELVEAAEEFAFA

SEQ ID NO: 70159 - DNA, 3256 bp, Artificial Sequence
  derived and/or modified sequence
aggggcgcgcccgtgggtcgcggactgtccggttgctcccgcctccttccgtcggatccgcgctctcccgcggctgcgccggcccggccgcccaggagacaaagcgctgccgccgccgtcgccgccaccgggccagtcccgaaccatggccgggccaccccgcaacctcgcgcctcccgtcccgtcgccgccctaggcctgcgctgcgagatgcagaaacagaggcccagagagatgaatagcctgcctggggtcccccagcccagatgctgcagagctgacatttgaatccagagaagagcgagctgaggctggagctgagcagagggcagggaggcaagtggtggcctgagagtttgctgaggatgatggcttccagctccatctatttccccgcaaaggacatgatctcattcctttttatggctggatagttttccatggccccaggctcccctccaggccccgcgattgccaccatgaagctgaacgagcgcagcctggccttctacgccacctgtgacgccccggtggacaatgcaggcttcctgtacaagaagggtgggcggcacgcggcctaccaccggcgctggttcgtgctgcgcgggaacatgctcttctacttcgaggacgctgccagccgtgagcccgtgggcgtcatcatcctggagggctgcactgtggagctggtggaggccgccgaggagttcgccttcgctgtgcgctttgcggggacccgggcgcgcacctacgtgctggccgctgagagtcaggatgccatggagggctgggtcaaggccctgtcgcgtgccagcttcgactacctgcggctggtggtgcgcgagctggagcagcagctggcggctgtacgtggcgggggtggcatggccctgccccagccccagccccagtccctgcccttgcccccgtccctgccctctgccctggccccagtcccatccctgccttctgccccagccccggtcccagccctgcccctgccccgccggcccagtgccctcccgcccaaggagaatggctgcgctgtctggagcactgaggccaccttcaggcctggacccgagccccctccaccaccgcctcgccgccgggcctcggcaccccacgggcccctggacatggcccccttcgcccggctgcacgagtgctatggccaggagatccgggccctgcgtggccagtggctcagcagccgggtccagccctgaggccaccagggcgcctgttttagggggacacaagctctatgccctctgggacaggccgggtcctggagagactgggggagcagatcctgagggaaatcatgggcaaggctggcccccaggccctgagtggcctggttttgggggatgcaggctctgagaaggtgctggattctgagtgggcctttaggaccatgtgacccagaaggcctacccttgaggggaacgtcacgtgcaacactaaggagaatccagggcctgagggggaggtttcctgagaactccggccccaggctggcctgagctgccgggcagaggcctgtgctggcaacaggcattgccgggcctgcagctcagagggtcactgggactgagggcgatctgtggcctgaaaagcaaatgcacagttagtgcagctcctgaccaggccttcagggtggacagagggaggatcggtcatggcagccacacctgggcctggccttgctccgggacctgccagaggagctggcctggctctgtgcctgcctgcctccaggagcaggacggtggctgggagggtagtgactggggacacaggtgcaggtgttagtgcaggaccggaagggtgaggtggcctggtcctcggggctcctggcctgggctggctgaggcaggactctgccaaaagtcccctgccaggcctcatggtggtgctcctggtggcagtggctctctggccgcgggccctgtctgtgtctccgtggtggctctcacagggctctccagacactccttgactgcatccttcagtcttggcccctaggcctggggccccttgggagcttgcctgacctcccttcctgggctgggtagccatggcccgaggtgaccttctagcaggttcccccagggaggggaggccaccagctgactcaccgcctaggaaggcccaggtgctgacctagtggcggagaaaaagccgcacaccgagtgtggcttccagagcccctcttcagctccaggcagccccctctaacatgtcccctcctgagctcagcccccacccccatactcctggtggggaccaggtcttgcttggcttcggggctgaccgccggtcccctttcttctcaccacagtgcccatttttcatccagggagaacctcggggctgggacacctcctggccctcaccctgggtcatgtttacagtcctcagtgccccacaccggtggccccctgaggacacctccaccctgaccttgattttcccaaacgctgcctcttggtgacagactcagcccaaaaccccttccttctgtctctggagacccttgagcttggggaaatatggaggggtgtgtgtctgcaatcaaggcctctgcagctcacggctggcccggtgggctgggacttccgtctgaattttaaatacttagggttcatttttttttctctggcaacaaagcttgatgttttcactgctttagtttcctgtttgctggtgggaggggatacggtctgtgactctggacttgctctgggggaacagttgtcactgcccccggggagaggggcagcttgggctggagaagcacagccagagacagagcccctcgagagggatccttggctgcttcattgtcttccccccagcaagccctgctctccacaggcacctctggggtcttggtatggtccccgctcacctccttccagagtcctgagtggtgtgggtgtgggtggcacaggatctggggcatgggaggggttcagagcttcccagagccccgtgtcctggcagactcagctggtgggctggggtgttaaccccagtcctggcgtaggtttacagactctcaaggtacgttggccctggtctcctgggagagaggggtgagggatgtcccctaccaaagcacaaggtgggatcaggctgcctcctgggttgggtgtcgggggagctgtccggcagcctggcagggagatgcaagggctaaagtaaaattttgtcaagtaatggctgattgtgtcattttttttcccca

SEQ ID NO: 70160 - DNA, 3041 bp, Artificial Sequence
  derived and/or modified sequence
caaagcgctgccgccgccgtcgccgccaccgggccagtcccgaaccatggccgggccaccccgcaacctcgcgcctcccgtcccgtcgccgccctaggcctgcgctgcgagatgcagaaacagaggcccagagagatgaatagcctgcctggggtcccccagcccagatgctgcagagctgacatttgaatccagagaagagcgagctgaggctggagctgagcagagggcagggaggcaagtggtggcctgagaggccccaggctcccctccaggccccgcgattgccaccatgaagctgaacgagcgcagcctggccttctacgccacctgtgacgccccggtggacaatgcaggcttcctgtacaagaagggtgggcggcacgcggcctaccaccggcgctggttcgtgctgcgcgggaacatgctcttctacttcgaggacgctgccagccgtgagcccgtgggcgtcatcatcctggagggctgcactgtggagctggtggaggccgccgaggagttcgccttcgctgtgcgctttgcggggacccgggcgcgcacctacgtgctggccgctgagagtcaggatgccatggagggctgggtcaaggccctgtcgcgtgccagcttcgactacctgcggctggtggtgcgcgagctggagcagcagctggcggctgtacgtggcgggggtggcatggccctgccccagccccagccccagtccctgcccttgcccccgtccctgccctctgccctggccccagtcccatccctgccttctgccccagccccggtcccagccctgcccctgccccgccggcccagtgccctcccgcccaaggagaatggctgcgctgtctggagcactgaggccaccttcaggcctggacccgagccccctccaccaccgcctcgccgccgggcctcggcaccccacgggcccctggacatggcccccttcgcccggctgcacgagtgctatggccaggagatccgggccctgcgtggccagtggctcagcagccgggtccagccctgaggccaccagggcgcctgttttagggggacacaagctctatgccctctgggacaggccgggtcctggagagactgggggagcagatcctgagggaaatcatgggcaaggctggcccccaggccctgagtggcctggttttgggggatgcaggctctgagaaggtgctggattctgagtgggcctttaggaccatgtgacccagaaggcctacccttgaggggaacgtcacgtgcaacactaaggagaatccagggcctgagggggaggtttcctgagaactccggccccaggctggcctgagctgccgggcagaggcctgtgctggcaacaggcattgccgggcctgcagctcagagggtcactgggactgagggcgatctgtggcctgaaaagcaaatgcacagttagtgcagctcctgaccaggccttcagggtggacagagggaggatcggtcatggcagccacacctgggcctggccttgctccgggacctgccagaggagctggcctggctctgtgcctgcctgcctccaggagcaggacggtggctgggagggtagtgactggggacacaggtgcaggtgttagtgcaggaccggaagggtgaggtggcctggtcctcggggctcctggcctgggctggctgaggcaggactctgccaaaagtcccctgccaggcctcatggtggtgctcctggtggcagtggctctctggccgcgggccctgtctgtgtctccgtggtggctctcacagggctctccagacactccttgactgcatccttcagtcttggcccctaggcctggggccccttgggagcttgcctgacctcccttcctgggctgggtagccatggcccgaggtgaccttctagcaggttcccccagggaggggaggccaccagctgactcaccgcctaggaaggcccaggtgctgacctagtggcggagaaaaagccgcacaccgagtgtggcttccagagcccctcttcagctccaggcagccccctctaacatgtcccctcctgagctcagcccccacccccatactcctggtggggaccaggtcttgcttggcttcggggctgaccgccggtcccctttcttctcaccacagtgcccatttttcatccagggagaacctcggggctgggacacctcctggccctcaccctgggtcatgtttacagtcctcagtgccccacaccggtggccccctgaggacacctccaccctgaccttgattttcccaaacgctgcctcttggtgacagactcagcccaaaaccccttccttctgtctctggagacccttgagcttggggaaatatggaggggtgtgtgtctgcaatcaaggcctctgcagctcacggctggcccggtgggctgggacttccgtctgaattttaaatacttagggttcatttttttttctctggcaacaaagcttgatgttttcactgctttagtttcctgtttgctggtgggaggggatacggtctgtgactctggacttgctctgggggaacagttgtcactgcccccggggagaggggcagcttgggctggagaagcacagccagagacagagcccctcgagagggatccttggctgcttcattgtcttccccccagcaagccctgctctccacaggcacctctggggtcttggtatggtccccgctcacctccttccagagtcctgagtggtgtgggtgtgggtggcacaggatctggggcatgggaggggttcagagcttcccagagccccgtgtcctggcagactcagctggtgggctggggtgttaaccccagtcctggcgtaggtttacagactctcaaggtacgttggccctggtctcctgggagagaggggtgagggatgtcccctaccaaagcacaaggtgggatcaggctgcctcctgggttgggtgtcgggggagctgtccggcagcctggcagggagatgcaagggctaaagtaaaattttgtcaagtaa

SEQ ID NO: 70161 - DNA, 1448 bp, Artificial Sequence
  derived and/or modified sequence
gtccggttgctcccgcctccttccgtcggatccgcgctctcccgcggctgcgccggcccggccgcccaggagacaaagcgctgccgccgccgtcgccgccaccgggccagtcccgaaccatggccgggccaccccgcaacctcgcgcctcccgtcccgtcgccgccctaggcctgcgctgcgagatgcagaaacagaggcccagagagatgaatagcctgcctggggtcccccagcccagatgctgcagagctgacatttgaatccagagaagagcgagctgaggctggagctgagcagagggcagggaggcaagtggtggcctgagaggccccaggctcccctccaggccccgcgattgccaccatgaagctgaacgagcgcagcctggccttctacgccacctgtgacgccccggtggacaatgcaggcttcctgtacaagaagggtgggcggcacgcggcctaccaccggcgctggttcgtgctgcgcgggaacatgctcttctacttcgaggacgctgccagccgtgagcccgtgggcgtcatcatcctggtggcagtggctctctggccgcgggccctgtctgtgtctccgtggtggctctcacagggctctccagacactccttgactgcatccttcagtcttggcccctaggcctggggccccttgggagcttgcctgacctcccttcctgggctgggtagccatggcccgaggtgaccttctagcaggttcccccagggaggggaggccaccagctgactcaccgcctaggaaggcccaggtgctgacctagtggcggagaaaaagccgcacaccgagtgtggcttccagagcccctcttcagctccaggcagccccctctaacatgtcccctcctgagctcagcccccacccccatactcctggtggggaccaggtcttgcttggcttcggggctgaccgccggtcccctttcttctcaccacagtgcccatttttcatccagggagaacctcggggctgggacacctcctggccctcaccctgggtcatgtttacagtcctcagtgccccacaccggtggccccctgaggacacctccaccctgaccttgattttcccaaacgctgcctcttggtgacagactcagcccaaaaccccttccttctgtctctggagacccttgagcttggggaaatatggaggggtgtgtgtctgcaatcaaggcctctgcagctcacggctggcccggtgggctgggacttccgtctgaattttaaatacttagggttcatttttttttctctggcaacaaagcttgatgttttcactgctttagtttcctgtttgctggtgggaggggatacggtctgtgactctggacttgctctgggggaacagttgtcactgcccccggggagaggggcagcttgggctggagaagcacagccagagacagagc

SEQ ID NO: 70162 - DNA, 2317 bp, Artificial Sequence
  derived and/or modified sequence
aacattatttcagggatacaggagggtaggaggttatgaggctgtctggggaggcccgtgagacccaggccccaggctcccctccaggccccgcgattgccaccatgaagctgaacgagcgcagcctggccttctacgccacctgtgacgccccggtggacaatgcaggcttcctgtacaagaagggtgggcggcacgcggcctaccaccggcgctggttcgtgctgcgcgggaacatgctcttctacttcgaggacgctgccagccgtgagcccgtgggcgtcatcatcctggagggctgcactgtggagctggtggaggccgccgaggagttcgccttcgctgtgcgctttgcggggacccgggcgcgcacctacgtgctggccgctgagagtcaggatgccatggagggctgggtcaaggccctgtcgcgtgccagcttcgactacctgcggctggtggtgcgcgagctggagcagcagctggcggctgtacgtggcgggggtggcatggccctgccccagccccagccccagtccctgcccttgcccccgtccctgccctctgccctggccccagtcccatccctgccttctgccccagccccggtcccagccctgcccctgccccgccggcccagtgccctcccgcccaaggagaatggctgcgctgtctggagcactgaggccaccttcaggcctggacccgagccccctccaccaccgcctcgccgccgggcctcggcaccccacgggcccctggacatggcccccttcgcccggctgcacgagtgctatggccaggagatccgggccctgcgtggccagtggctcagcagccgggtccagccctgaggccaccagggcgcctgttttagggggacacaagctctatgccctctgggacaggccgggtcctggagagactgggggagcagatcctgagggaaatcatgggcaaggctggcccccaggccctgagtggcctggttttgggggatgcaggctctgagaaggtgctggattctgagtgggcctttaggaccatgtgacccagaaggcctacccttgaggggaacgtcacgtgcaacactaaggagaatccagggcctgagggggaggtttcctgagaactccggccccaggctggcctgagctgccgggcagaggcctgtgctggcaacaggcattgccgggcctgcagctcagagggtcactgggactgagggcgatctgtggcctgaaaagcaaatgcacagttagtgcagctcctgaccaggccttcagggtggacagagggaggatcggtcatggcagccacacctgggcctggccttgctccgggacctgccagaggagctggcctggctctgtgcctgcctgcctccaggagcaggacggtggctgggagggtagtgactggggacacaggtgcaggtgttagtgcaggaccggaagggtgaggtggcctggtcctcggggctcctggcctgggctggctgaggcaggactctgccaaaagtcccctgccaggcctcatggtggtgctcctggtggcagtggctctctggccgcgggccctgtctgtgtctccgtggtggctctcacagggctctccagacactccttgactgcatccttcagtcttggcccctaggcctggggccccttgggagcttgcctgacctcccttcctgggctgggtagccatggcccgaggtgaccttctagcaggttcccccagggaggggaggccaccagctgactcaccgcctaggaaggcccaggtgctgacctagtggcggagaaaaagccgcacaccgagtgtggcttccagagcccctcttcagctccaggcagccccctctaacatgtcccctcctgagctcagcccccacccccatactcctggtggggaccaggtcttgcttggcttcggggctgaccgccggtcccctttcttctcaccacagtgcccatttttcatccagggagaacctcggggctgggacacctcctggccctcaccctgggtcatgtttacagtcctcagtgccccacaccggtggccccctgaggacacctccaccctgaccttgattttcccaaacgctgcctcttggtgacagactcagcccaaaaccccttccttctgtctctggagacccttgagcttggggaaatatggaggggtgtgtgtctgcaatcaaggcctctgcagctcacggctggcccggtgggctgggacttccgtctgaattttaaatacttagggttcatttttttttctctggcaacaaagcttgatgttttcactg

SEQ ID NO: 70163 - DNA, 571 bp, Artificial Sequence
  derived and/or modified sequence
gtccggttgctcccgcctccttccgtcggatccgcgctctcccgcggctgcgccggcccggccgcccaggagacaaagcgctgccgccgccgtcgccgccaccgggccagtcccgaaccatggccgggccaccccgcaacctcgcgcctcccgtcccgtcgccgccctaggcctgcgctgcgaggccccaggctcccctccaggccccgcgattgccaccatgaagctgaacgagcgcagcctggccttctacgccacctgtgacgccccggtggacaatgcaggcttcctgtacaagaagggtgggcggcacgcggcctaccaccggcgctggttcgtgctgcgcgggaacatgctcttctacttcgaggacgctgccagccgtgagcccgtgggcgtcatcatcctggagggctgcactgtggagctggtggaggccgccgaggagttcgccttcgctgtgcgctttgcggggacccgggcgcgcacctacgtgctggccgctgagagtcaggatgccatggagggctgggtcaaggccctgtcgcgtgccagcttcgactacctgcgg

SEQ ID NO: 70164 - DNA, 2991 bp, Artificial Sequence
  derived and/or modified sequence
attcctctgaaatgtctggcatgcagcaggaactcacaacattatttcagggatacaggagggccccaggctcccctccaggccccgcgattgccaccatgaagctgaacgagcgcagcctggccttctacgccacctgtgacgccccggtggacaatgcaggcttcctgtacaagaagggtgggcggcacgcggcctaccaccggcgctggttcgtgctgcgcgggaacatgctcttctacttcgaggacgctgccagccgtgagcccgtgggcgtcatcatcctggagggctgcactgtggagctggtggaggccgccgaggagttcgccttcgctgtgcgctttgcggggacccgggcgcgcacctacgtgctggccgctgagagtcaggatgccatggagggctgggtcaaggccctgtcgcgtgccagcttcgactacctgcggctggtggtgcgcgagctggagcagcagctggcggctgtacgtggcgggggtggcatggccctgccccagccccagccccagtccctgcccttgcccccgtccctgccctctgccctggccccagtcccatccctgccttctgccccagccccggtcccagccctgcccctgccccgccggcccagtgccctcccgcccaaggagaatggctgcgctgtctggagcactgaggccaccttcaggcctggacccgagccccctccaccaccgcctcgccgccgggcctcggcaccccacgggcccctggacatggcccccttcgcccggctgcacgagtgctatggccaggagatccgggccctgcgtggccagtggctcagcagccgggtccagccctgaggccaccagggcgcctgttttagggggacacaagctctatgccctctgggacaggccgggtcctggagagactgggggagcagatcctgagggaaatcatgggcaaggctggcccccaggccctgagtggcctggttttgggggatgcaggctctgagaaggtgctggattctgagtgggcctttaggaccatgtgacccagaaggcctacccttgaggggaacgtcacgtgcaacactaaggagaatccagggcctgagggggaggtttcctgagaactccggccccaggctggcctgagctgccgggcagaggcctgtgctggcaacaggcattgccgggcctgcagctcagagggtcactgggactgagggcgatctgtggcctgaaaagcaaatgcacagttagtgcagctcctgaccaggccttcagggtggacagagggaggatcggtcatggcagccacacctgggcctggccttgctccgggacctgccagaggagctggcctggctctgtgcctgcctgcctccaggagcaggacggtggctgggagggtagtgactggggacacaggtgcaggtgttagtgcaggaccggaagggtgaggtggcctggtcctcggggctcctggcctgggctggctgaggcaggactctgccaaaagtcccctgccaggcctcatggtggtgctcctggtggcagtggctctctggccgcgggccctgtctgtgtctccgtggtggctctcacagggctctccagacactccttgactgcatccttcagtcttggcccctaggcctggggccccttgggagcttgcctgacctcccttcctgggctgggtagccatggcccgaggtgaccttctagcaggttcccccagggaggggaggccaccagctgactcaccgcctaggaaggcccaggtgctgacctagtggcggagaaaaagccgcacaccgagtgtggcttccagagcccctcttcagctccaggcagccccctctaacatgtcccctcctgagctcagcccccacccccatactcctggtggggaccaggtcttgcttggcttcggggctgaccgccggtcccctttcttctcaccacagtgcccatttttcatccagggagaacctcggggctgggacacctcctggccctcaccctgggtcatgtttacagtcctcagtgccccacaccggtggccccctgaggacacctccaccctgaccttgattttcccaaacgctgcctcttggtgacagactcagcccaaaaccccttccttctgtctctggagacccttgagcttggggaaatatggaggggtgtgtgtctgcaatcaaggcctctgcagctcacggctggcccggtgggctgggacttccgtctgaattttaaatacttagggttcatttttttttctctggcaacaaagcttgatgttttcactgctttagtttcctgtttgctggtgggaggggatacggtctgtgactctggacttgctctgggggaacagttgtcactgcccccggggagaggggcagcttgggctggagaagcacagccagagacagagcccctcgagagggatccttggctgcttcattgtcttccccccagcaagccctgctctccacaggcacctctggggtcttggtatggtccccgctcacctccttccagagtcctgagtggtgtgggtgtgggtggcacaggatctggggcatgggaggggttcagagcttcccagagccccgtgtcctggcagactcagctggtgggctggggtgttaaccccagtcctggcgtaggtttacagactctcaaggtacgttggccctggtctcctgggagagaggggtgagggatgtcccctaccaaagcacaaggtgggatcaggctgcctcctgggttgggtgtcgggggagctgtccggcagcctggcagggagatgcaagggctaaagtaaaattttgtcaagtaatggctgattgtgtcattttttttccccatcaaaatccttgattgatttccctggcagagcccagagcaggctgtgcaagggcagggactagtgtgtggtcccacatggctggtgccctgccaggcacgttctcacttctcaagg

SEQ ID NO: 70165 - DNA, 574 bp, Artificial Sequence
  derived and/or modified sequence
gactgtccggttgctcccgcctccttccgtcggatccgcgctctcccgcggctgcgccggcccggccgcccaggagacaaagcgctgccgccgccgtcgccgccaccgggccagtcccgaaccatggccgggccaccccgcaacctcgcgcctcccgtcccgtcgccgccctaggcctgcgctgcgagatgcagaaacagaggcccagagagatgaatagcctgcctggggtcccccagcccagatgctgcagagctgacatttgaatccagagaagagcgagctgaggctggagctgagcagagggcagggaggcaagtggctcccctccaggccccgcgattgccaccatgaagctgaacgagcgcagcctggccttctacgccacctgtgacgccccggtggacaatgcaggcttcctgtacaagaagggtgggcggcacgcggcctaccaccggcgctggttcgtgctgcgcgggaacatgctcttctacttcgaggacgctgccagccgtgagcccgtgggcgtcatcatcctggagggctgcactgtggagctggtggaggccgccga

SEQ ID NO: 70166 - DNA, 718 bp, Artificial Sequence
  derived and/or modified sequence
aggggcgcgcccgtgggtcgcggactgtccggttgctcccgcctccttccgtcggatccgcgctctcccgcggctgcgccggcccggccgcccaggagacaaagcgctgccgccgccgtcgccgccaccgggccagtcccgaaccatggccgggccaccccgcaacctcgcgcctcccgtcccgtcgccgccctaggcctgcgctgcgagatgcagaaacagaggcccagagagatgaatagcctgcctggggtcccccagcccagatgctgcagagctgacatttgaatccagagaagagcgagctgaggctggagctgagcagagggcagggaggcaagtggtggcctgagagtttgctgaggatgatggcttccagctccatctatttccccgcaaaggacatgatctcattcctttttatggctggatagttttccatggccccaggctcccctccaggccccgcgattgccaccatgaagctgaacgagcgcagcctggccttctacgccacctgtgacgccccggtggacaatgcaggcttcctgtacaagaagggtgggcggcacgcggcctaccaccggcgctggttcgtgctgcgcgggaacatgctcttctacttcgaggacgctgccagccgtgagcccgtgggcgtcatcatcctggagggctgcactgtggagctggtggaggccgccgaggagttcgccttcgc

SEQ ID NO: 70167 - DNA, 789 bp, Artificial Sequence
  derived and/or modified sequence
atggccccaggctccccacctggccccgccattgcgactatgaaactcaatgagcggtccttagctttctacgccacctgcgatgcacctgtggacaatgccggctttctgtataaaaagggtggccgacacgccgcctaccaccgcagatggttcgtgttgagagggaatatgctgttttacttcgaggatgccgcttcgcgcgagcccgtgggtgttattatcttagaagggtgtactgtggaacttgttgaggctgccgaagaattcgcctttgcagtgcgattcgcgggtactagggctaggacctacgtcctagctgctgaatcccaagacgcaatggaaggctgggtgaaagcactgtctagagcctcttttgattacctacgactcgtggtccgcgaacttgaacagcaactggcagccgtgcgcgggggcgggggaatggccctcccccagccacagccacaatcactacctctcccacctagtctgccatccgcgctggctcctgttcccagcttgccttcagcccctgcgccggtgccagccttgcccttgccgcggaggcccagtgcactgccacctaaagaaaacggctgtgccgtttggtcgacggaggccacgttccggccaggaccagagcctccccctcctcccccccgccgacgcgccagtgccccacatggccccctcgacatggcacctttcgcaagacttcatgaatgttacgggcaggagatccgggccctccggggacaatggctctcctcgcgcgtccaaccttag

SEQ ID NO: 70168 - DNA, 789 bp, Artificial Sequence
  derived and/or modified sequence
atggcccctggcagccccccaggccctgccatcgccaccatgaagctgaatgaaagaagcctggccttctacgccacctgtgatgcccctgtggacaatgccggcttcctgtacaagaagggcggcagacatgctgcctaccaccggcgctggtttgtgctgcggggcaacatgctgttctactttgaagatgctgccagccgggagcctgtgggcgtcatcatcctggagggctgcaccgtggagctggtggaggccgctgaggagtttgcctttgctgtgcgctttgctggcacccgggcccggacctacgtgctggccgctgagagccaggatgccatggagggctgggtgaaggccctgagccgggccagctttgactacctgcggctggtggtgcgggagctggagcagcagctggccgctgtgcggggcggcggcggcatggccctgccccagccccagccccagagcctgcccctgccccccagcctgcccagcgccctggcccctgtgcccagcctgcccagcgccccagcccctgtgcctgccctgcccctgccccggcggcccagcgccctgccccccaaggaaaatggctgtgctgtgtggagcacagaggccaccttccggcccggccctgagcccccacctcctccacccaggagaagagccagcgcccctcatggccccctggacatggccccctttgcccggctgcacgagtgctacggccaggagatccgggccctgcggggccagtggctgagcagccgggtgcagccctag

SEQ ID NO: 70169 - DNA, 789 bp, Artificial Sequence
  derived and/or modified sequence
atggcccccggcagcccccccggccccgccatcgccaccatgaagcttaacgaaagatccctagctttctatgcaacgtgtgatgcgcctgtagataatgcaggatttctgtacaaaaagggcggcaggcacgcagcatatcacagacgctggttcgttcttcgcgggaacatgttattctatttcgaggatgcagctagccgggaaccagtcggggtgattatcctggagggatgcaccgtggaactggtagaggctgccgaagagttcgccttcgcagtgaggttcgccggaactagagcacgcacctatgtgttggccgcagagtcccaggacgccatggagggatgggtgaaggctctgtctagggctagcttcgactatctgcggctggtcgtgcgagagctggaacagcagttagccgccgtaaggggcggcggagggatggctctgcctcagccccagccccagagtttgccgctcccaccctccctgcccagcgccttggcccctgtgccatcactgccgagtgcacctgcaccagtgccggcgttacctttacccaggcggcctagcgctctgccacccaaggagaacggttgcgccgtgtggtccacagaagccacatttcggccagggccggagccgccacctccaccccctcggaggcgggccagcgccccacatgggccattagacatggcccccttcgccagattgcacgaatgctacggccaggaaattagggcactgcgaggccagtggctgagctcgcgcgtccaaccttag

SEQ ID NO: 70170 - DNA, 789 bp, Artificial Sequence
  derived and/or modified sequence
atggcgcctggttcacctccaggccctgccatcgctactatgaagttaaatgaacggtccctggctttttacgctacatgtgatgcccctgttgataacgcgggatttttgtataagaagggcggtcggcacgccgcttaccatcggagatggttcgttctccggggtaacatgctgttttatttcgaggacgcggcttcccgcgaaccggtgggtgtgatcattttagaagggtgcactgtggagctggtggaggctgccgaggagtttgcctttgcagtgaggttcgccggaacacgcgcaagaacttatgtgttggcagccgagtcccaggacgcaatggaggggtgggtgaaggctctaagccgcgctagttttgactaccttagactcgtggtacgggagctggagcagcagcttgcggctgtgagaggcggtggtggcatggctctcccgcagccccagccccagtcactcccactccccccaagtctgccatccgctttggcgcctgtcccatcgctgcctagcgctccagcccctgtccctgccttacccctgccaaggcgtccttctgcactgccacctaaggaaaacggctgtgccgtgtggagtacagaagccactttccgacctggacctgagcctccccctcctccaccccgaagaagagcttctgctccccacggtcccctggatatggccccatttgcgagactgcatgaatgctacgggcaggaaatccgcgctttgcgcggacaatggctgtcctccagagtgcaaccctag

SEQ ID NO: 70171 - DNA, 789 bp, Artificial Sequence
  derived and/or modified sequence
atggcccccggcagcccccccggccccgccatcgccaccatgaagctgaacgagagaagcctggccttctacgccacctgcgacgcccccgtggacaacgccggcttcctgtacaagaagggcggcagacacgccgcctaccacagaagatggttcgtgctgagaggcaacatgctgttctacttcgaggacgccgccagcagagagcccgtgggcgtgatcatcctggagggctgcaccgtggagctggtggaggccgccgaggagttcgccttcgccgtgagattcgccggcaccagagccagaacctacgtgctggccgccgagagccaggacgccatggagggctgggtgaaggccctgagcagagccagcttcgactacctgagactggtggtgagagagctggagcagcagctggccgccgtgagaggcggcggcggcatggccctgccccagccccagccccagagcctgcccctgccccccagcctgcccagcgccctggcccccgtgcccagcctgcccagcgcccccgcccccgtgcccgccctgcccctgcccagaagacccagcgccctgccccccaaggagaacggctgcgccgtgtggagcaccgaggccaccttcagacccggccccgagccccccccccccccccccagaagaagagccagcgccccccacggccccctggacatggcccccttcgccagactgcacgagtgctacggccaggagatcagagccctgagaggccagtggctgagcagcagagtgcagccctag

SEQ ID NO: 70172 - DNA, 849 bp, Artificial Sequence
  derived and/or modified sequence
atgcaggccagctgcaccagaagagtgggcggcaccagacccaccaccggcgccggcagctgctgcgccggcacctgcagcagcaccagcagaaccctgcccgccgtgagcccctgggccagcagcagctggagagccgccctgtggagctggtggagaccccccagaagcagccccagcctgtgcgccctgagaggccccggcagagcccccacctgctggcccctgagagtgagaatgccctggagagccggcagcagaccctgcagagtgcccgccagcaccacctgcggctggtggtgcgccagctggagcagcagctggagactgtacgtggccggcgtggcctggccctgccccagccccagccccagcccctgcccctgccccagaccctgccccctgccctggccccagagccacccctgcctgctgccccagcccagaagccagccctgcccctgccccgccggccccgtgcccagcagacccagaagaatggccgccctgagcggcgccctgagaccccccagcggcctggaccccagccccctgcaccacagactggccgccggccccagacaccccaccggcccctggacctggccccccagccccggctgcaccagcgccatggccagaagaagcggcccctgcgtggccagcggcagcgccgccggcagcagccccgaggccaccagagcccccgtgctgggcggccacaagctgtacgccctgtgggacagacccggccccggcgagaccggcggcgccgaccccgagggcaaccacggccagggctggccccccggccccgagtggcccggcttcggcggctgcagactgtag

SEQ ID NO: 70173 - DNA, 846 bp, Artificial Sequence
  derived and/or modified sequence
catctgtatagcgggacaggatgtcacagatgtagagattcaacaggatgagagtgcctgagctgtgacgggtgcccagaacatgatctcaggaacacatatctccttttccagccggaagtacctgagagagaccccagaaggtggataagactgcagagagcagggagcatgaagcaccttgcccaaggtctcaccaggcaagagaagggcggagaagggcggcttcttcatggattgtaaatccccaaagcgtgcaaacatctgcccccatctccctggaggtggcctgttctccacgccaccctcacaggctgcctggcggactctcctcacagcactgtgcttcccggggcccacttgtacaggccccatgcgagaaggacctcgggcagtgtataatcctccaagggcccacaggaacagcagtgacaactgtgttatgaagcacctactatgtgctggggacaagaatggaacaagaagacatgctttgccctcacccctggagggcagcttccagccagggaggcaaatacctcctccccagactccttccacagatccccaaactctgcctctctccttcagatccctgctcagatgtcaccagctctgtgcagcctccctgccaccaagtctaaaattgccatagtcccctcagttcctcacccctctccctgctttctttgtctgtctcatccatgaggatgtgccctctgggaagggcaggcaggagctggctattctgttccttgccctgtccccagcaccgaggacagtgccaggcatggaggaaataattgctgaataaagaaataaaatcgacattctatgagacataaa

SEQ ID NO: 70174 - DNA, 750 bp, Artificial Sequence
  derived and/or modified sequence
atgaaactgaacgagcggagcctcgctttttacgccacgtgcgacgcacccgtggataacgccggctttttgtataaaaagggaggcaggcatgctgcataccaccggcgatggtttgtgctgaggggaaatatgctgttttatttcgaagatgctgcctctcgcgaacccgtcggcgtgatcattctcgaggggtgcaccgtagagcttgttgaggccgccgaggagtttgcctttgccgtgagattcgccggaaccagggcacggacttacgttctggctgccgagtcacaggacgcgatggaggggtgggtcaaggctctcagcagagcaagcttcgactacctgcgcctcgtcgtgcgagagttagaacagcaattggctgcggttagaggcggtggcgggatggccctgcctcagccacagccacagtccctgcctctgcctccaagcctgcctagcgctttggccccagttccatcactcccctctgccccagcacccgtaccggctcttccccttccgagaaggccatccgccctgcctcccaaggagaatggctgtgccgtgtggagcactgaggctacttttcggcctggcccggagccacccccccccccgccacgacgccgggcatcggcccctcacggtccgcttgacatggccccttttgcccggctgcacgagtgttatgggcaggaaattagagctctccgtggccagtggctctctagtagggtccagccctag

SEQ ID NO: 70175 - DNA, 267 bp, Artificial Sequence
  derived and/or modified sequence
atgaagctgaacgaaaggtccctggctttctatgccacttgtgacgccccagtcgataacgccggcttcctttacaagaagggcggacgacatgcggcgtaccatcgccggtggttcgtcctgagaggcaatatgctcttctatttcgaggacgctgcctcgcgggaaccggttggagtaatcatattagtggccgtcgccttgtggccgcgggctctgtcagtgtctccgtggtggttatctcaagggagccctgacaccccttag

SEQ ID NO: 70176 - DNA, 849 bp, Artificial Sequence
  derived and/or modified sequence
atgcaggcatcctgtacgagacgtgtcggcggaactagacctactaccggagcaggcagctgctgtgccggcacgtgcagcagtacttcacgaaccctgcctgccgttagtccctgggcttcctctagctggcgcgccgccttgtggtcttggtggagacctccacgatcaagtcctagcctgtgcgctctgagggggcccgggcgtgcgcctacatgctggccccttcgcgttcggatgccctggcgcgccggatctagaccttgtagggtgcctgcctccacgacttgcggttggtggtgcgcctcctggagcagctcttggagactttatgtggcgggcgtagcttggccctgtcccagcccatcaccctcaccctgtccctgcccaagaccatgccctctgccatggccacagtctcacccatgcctgctgccccaacctcgatcccagccctgcccctgccccgccggccccgtacctagcaggccacgccgtatggccgcactgagcggggccttaaggccacctagcggtctcgacccaagcccgttgcatcataggcttgccgccgggcctcggcaccctacaggcccatggacctggccaccctcaccaggctgtacgtccgccatggcccgacggtctggtccctgtgtagcctctggaagcgctgctggaagtagtccagaggcaacccgcgcgccagtgcttgggggccataagctgtatgccctctgggaccgccctggtcctggcgagactgggggcgcggaccccgaggggaaccatgggcagggttggcctcctgggccagagtggccaggtttcggcggctgtcggctttag

SEQ ID NO: 70177 - DNA, 354 bp, Artificial Sequence
  derived and/or modified sequence
atgaagcttaatgagcgctcgctcgccttttatgctacgtgtgacgctccagtggataacgcaggctttctctacaaaaagggaggaaggcatgctgcctatcatagacggtggttcgtgctgagggggaacatgctgttttatttcgaggacgccgccagtagggagccagtgggcgttataattctggagggttgtaccgtcgagctggtggaggctgccgaggaatttgcttttgccgtaagatttgcagggacacgcgcccggacctatgttctggccgccgaaagccaggacgccatggagggatgggtcaaagcactttcccgggcttcttttgactatctgagatag

SEQ ID NO: 70178 - DNA, 750 bp, Artificial Sequence
  derived and/or modified sequence
atgaaattgaacgagaggagcctcgcgttttatgcgacttgtgacgcccctgtcgacaacgctggtttcctgtataagaaagggggccgacacgccgcttaccacaggcggtggttcgtgctcagaggcaacatgctgttttacttcgaagacgccgcttcgagagaacccgtgggcgtgatcatcttggagggctgcacagtcgaacttgtggaggctgcggaggaattcgcttttgctgttagattcgctgggaccagagcacgcacttatgtgctcgcagccgagagccaagatgccatggaagggtgggtaaaagccctgtccagagccagcttcgattacctaaggttagtagtcagggagttagaacagcaactcgccgctgtgcggggaggtggcggaatggccctccctcagcctcagccccagagcctacccctgccgccctctctcccctccgcattggcccccgtcccctcattaccatcggctcccgcccccgtgcccgcgttgcctttgcctagacggccgagcgccctccctccgaaggaaaacggctgcgcagtgtggtctacggaggccacgtttaggcctggacctgagcccccaccaccgccgccaagacgaagagcaagtgcacctcatggaccccttgatatggcgccctttgcgcgcctccatgaatgttatggtcaggagattcgagccctgaggggccagtggcttagcagcagagtacaaccctag

SEQ ID NO: 70179 - DNA, 750 bp, Artificial Sequence
  derived and/or modified sequence
atgaaactgaacgagcggagcctagccttttatgccacatgcgacgccccggtggataatgcgggcttcttgtacaaaaaaggagggaggcatgcagcgtatcataggcgttggtttgtgcttaggggcaatatgctgttctacttcgaggacgccgcctctagggagccggtgggcgtgatcattctggaaggctgcacagttgagcttgtggaggccgccgaggagtttgcatttgctgtaaggtttgctggtaccagagctagaacttacgtgctggctgccgaatcccaggacgctatggagggttgggttaaggctctgtcacgggcaagctttgactacctaagattggtggtgagagagctggaacagcaactagccgcggtgagaggaggaggaggtatggccctgccccagcctcagccccagagtctaccactgccccctagcctcccctccgccctggcaccggtgccaagtctgccttctgcacctgccccagttccggccctgccattgccccggcggccatcagctcttccacccaaggagaatggctgtgctgtgtggagtaccgaggcgacgtttaggcccggccctgagcctccccccccaccacctcgacgtcgggcctctgcccctcatggccctctggacatggctccttttgcccggctccatgaatgctacggacaggaaatcagagccttacggggccagtggctgtctagcagagtacagccctag

SEQ ID NO: 70180 - DNA, 225 bp, Artificial Sequence
  derived and/or modified sequence
atgaaactcaatgagcggtccttagctttctatgccacttgcgacgctccagtggataacgctgggtttctgtacaagaaaggggggcgacacgccgcctatcacaggcggtggttcgtcctgaggggtaacatgctgttctactttgaggatgccgcttcacgagagcccgtgggcgtgatcattctggaaggatgtactgtggagctggtggaggctgcctag

SEQ ID NO: 70181 - DNA, 243 bp, Artificial Sequence
  derived and/or modified sequence
atgaagctgaacgagaggagtctggccttttatgctacttgcgacgctccagttgataacgcaggattcctttacaaaaagggaggtcggcacgctgcttaccacaggcgatggttcgtgctgaggggcaacatgctgttttactttgaggatgccgcatcgcgcgaacctgtgggtgtcatcatcctagagggctgcaccgtagaattagttgaggccgccgaggagttcgcatttgcctag

SEQ ID NO: 70182 - DNA, 750 bp, Artificial Sequence
  derived and/or modified sequence
atgaagctgaatgaaagaagcctggccttctacgccacctgtgatgcccctgtggacaatgccggcttcctgtacaagaagggcggcagacatgctgcctaccaccggcgctggtttgtgctgcggggcaacatgctgttctactttgaagatgctgccagccgggagcctgtgggcgtcatcatcctggagggctgcaccgtggagctggtggaggccgctgaggagtttgcctttgctgtgcgctttgctggcacccgggcccggacctacgtgctggccgctgagagccaggatgccatggagggctgggtgaaggccctgagccgggccagctttgactacctgcggctggtggtgcgggagctggagcagcagctggccgctgtgcggggcggcggcggcatggccctgccccagccccagccccagagcctgcccctgccccccagcctgcccagcgccctggcccctgtgcccagcctgcccagcgccccagcccctgtgcctgccctgcccctgccccggcggcccagcgccctgccccccaaggaaaatggctgtgctgtgtggagcacagaggccaccttccggcccggccctgagcccccacctcctcctccaagaagaagagccagcgccccccacggccccctggacatggccccctttgcccggctgcatgaatgttatggccaggagatccgggccctgcggggccagtggctgagcagccgggtgcagccctag

SEQ ID NO: 70183 - DNA, 267 bp, Artificial Sequence
  derived and/or modified sequence
atgaagctgaatgaaagaagcctggccttctacgccacctgtgatgcccctgtggacaatgccggcttcctgtacaagaagggcggcagacatgctgcctaccaccggcgctggtttgtgctgcggggcaacatgctgttctactttgaagatgctgccagccgggagcctgtgggcgtcatcatcctggtggccgtggccctgtggccccgggccctgtctgtgagcccctggtggctgagccagggcagcccagacaccccctag

SEQ ID NO: 70184 - DNA, 849 bp, Artificial Sequence
  derived and/or modified sequence
atgcaggccagctgcaccaggagagtgggcggcacccggcccaccaccggggccggcagctgctgtgccggcacctgcagcagcaccagcaggaccctgcctgctgtgagcccctgggccagcagctcctggagggctgccctgtggagctggtggaggcctcccaggagcagccccagcctgtgtgccctgcggggccctggccgggcccccacctgctggcccctgcgggtgaggatgccctggagggctggcagccggccctgccgggtgcctgccagcaccacctgtggctggtggtgtgcctcctggagcagctcctggaggctgtatgtggccggcgtggcctggccctgccccagccccagccccagcccctgcccctgcccccggccctgccccctgccctggccccagagccacccctgcctgctgccccagcccaggagccagccctgcccctgcccagctggccctgtgcccagccggcccaggaggatggccgccctgagcggggccctgcggccccccagcggcctggaccccagccccctgcaccaccggctggccgccggccccaggcaccccaccggcccctggacctggccacccagccctggctgcaccagcgccatggcccggcgcagcggcccctgtgtggccagcggcagcgctgctggcagcagccctgaggccacccgggcccctgtgctgggcggccacaagctgtatgccctgtgggaccggcccggccctggagaaacaggaggagctgaccctgagggcaaccacggccagggctggcccccaggccctgagtggccaggctttggaggctgccgcctgtag

SEQ ID NO: 70185 - DNA, 354 bp, Artificial Sequence
  derived and/or modified sequence
atgaagctgaatgaaagaagcctggccttctacgccacctgtgatgcccctgtggacaatgccggcttcctgtacaagaagggcggcagacatgctgcctaccaccggcgctggtttgtgctgcggggcaacatgctgttctactttgaagatgctgccagccgggagcctgtgggcgtcatcatcctggagggctgcaccgtggagctggtggaggccgctgaggagtttgcctttgctgtgcgctttgctggcacccgggcccggacctacgtgctggccgctgagagccaggatgccatggagggctgggtgaaggccctgagccgggccagctttgactacctgaggtag

SEQ ID NO: 70186 - DNA, 225 bp, Artificial Sequence
  derived and/or modified sequence
atgaagctgaatgaaagaagcctggccttctacgccacctgtgatgcccctgtggacaatgccggcttcctgtacaagaagggcggcagacatgctgcctaccaccggcgctggtttgtgctgcggggcaacatgctgttctactttgaagatgctgccagccgggagcctgtgggcgtcatcatcctggagggctgcaccgtggagctggtggaggccgcctag

SEQ ID NO: 70187 - DNA, 243 bp, Artificial Sequence
  derived and/or modified sequence
atgaagctgaatgaaagaagcctggccttctacgccacctgtgatgcccctgtggacaatgccggcttcctgtacaagaagggcggcagacatgctgcctaccaccggcgctggtttgtgctgcggggcaacatgctgttctactttgaagatgctgccagccgggagcctgtgggcgtcatcatcctggagggctgcaccgtggagctggtggaggccgctgaggagtttgcctttgcctag

SEQ ID NO: 70188 - DNA, 750 bp, Artificial Sequence
  derived and/or modified sequence
atgaagctgaacgagcggagcctggccttctacgccacctgcgacgctccagtggacaacgctggttttttgtacaagaaaggcggcagacacgcagcgtaccatcggcgttggttcgtcctaaggggaaacatgctcttctattttgaggatgcggctagccgagagccagtgggggtgataatcctggaaggatgtactgtcgagctggttgaggcagcagaggaattcgctttcgccgtgaggtttgctggtacacgggctcgtacgtacgtcctggccgccgaatcacaggacgccatggaagggtgggtaaaggcattatcaagagcatccttcgattatttacgcctagtcgtgagggaattagagcagcagctggctgcggtaagagggggcggtgggatggctctgccccagccacagccccagagcctgcctctgccaccgtctctgccatctgctttggcccccgtgccctcgctcccaagcgccccagcccctgtccccgctcttccccttcccaggcgaccatcagcccttcctcccaaggagaatggatgtgctgtgtggtcaaccgaagctacattcaggccaggtccagagcccccgccaccccccccccggcgtcgcgccagtgccccacacggccctttggatatggcaccctttgcccggcttcatgaatgctatgggcaggagattcgggcacttagaggccagtggctgtcctcaagggtccaaccttag

SEQ ID NO: 70189 - DNA, 267 bp, Artificial Sequence
  derived and/or modified sequence
atgaagctgaacgagcggagcctggccttctacgccacctgcgacgctccggtcgataatgctggcttcctgtacaagaaaggaggtaggcacgccgcctaccatcgccggtggttcgtactccgcggcaatatgctgttttactttgaggacgcagctagccgtgaaccagtaggcgtgatcatcctggtggctgtggcactttggccacgggctctgtctgtttccccctggtggctcagccaaggttccccagacaccccttag

SEQ ID NO: 70190 - DNA, 849 bp, Artificial Sequence
  derived and/or modified sequence
atgcaggccagctgcacccggcgggtgggcggcacccggcccaccaccggcgccggttcatgctgtgccggcacctgcagcagtacatctaggaccttgcctgcagtgagcccatgggcaagttctagttggagagccgcattgtggtcatggtggagaccccccagatcctctcccagcctctgcgcactcaggggccccggaagagcccctacctgctggcccttgagagttcgaatgccctggagggctggcagccggccttgccgagttccagccagcaccacgtgcggttggtggtgcgcttcatggtcttcgagctggaggctttatgtggcaggtgtcgcatggccgtgtccatctcctagcccgtcgccatgcccatgcccacgtccatgccctttgccgtggccacagagtcatccatgtctgcttccccagcctaggtcacagccatgtccttgccccgctgggcccgtaccctcacgccccagacgaatggcagccctgagcggagcacttaggcctccaagcggcttagatccctctcctctacatcatcgcctcgccgctgggccacgccaccccactgggccatggacatggccccccagtcctggctgcacctccgccatggccaggagatctggaccttgtgtggcctctggcagcgctgccgggtctagtcctgaagccaccagggctccagtgttgggcggccataagctgtacgcactgtgggaccggcccgggcccggggaaaccgggggggcggatccggagggaaaccacggacaggggtggccccccggacccgagtggcctgggtttggtggatgccgactatag

SEQ ID NO: 70191 - DNA, 354 bp, Artificial Sequence
  derived and/or modified sequence
atgaagctgaacgagcggagcctggccttctacgccacctgcgacgctcccgtcgataatgccggtttcctgtacaagaaaggcggccggcatgcagcctaccatcggcgctggttcgtgctgcgcggaaacatgctcttttattttgaggatgcggcaagcagggaacctgtgggagtcatcattctagaaggctgcaccgtagagttagtggaagcagccgaagagttcgcattcgccgtaaggttcgcaggcacccgcgcacgaacttatgtcctggccgcagagtcacaagacgctatggagggttgggtgaaggctctgtctagagcatcttttgactacctgaggtag

SEQ ID NO: 70192 - DNA, 750 bp, Artificial Sequence
  derived and/or modified sequence
atgaagctgaacgagcggagcctggccttctacgccacctgcgacgctccggttgataacgccggttttctgtacaagaaaggaggtagacacgccgcttaccatagaagatggtttgtgcttaggggaaatatgctgttctacttcgaggacgctgcctcccgggagcccgtaggggttatcatcctggaaggctgtacagtggagttagttgaggcagctgaggagttcgcattcgcggtgcgtttcgcagggacccgtgcccgcacttacgtgcttgctgccgagtctcaggacgctatggaagggtgggttaaagcactgtcccgagctagtttcgactacttgaggctggtagtgcgagagctggagcagcagctggccgcagtgcgcggcggcggcgggatggctttgcctcagccacagccccagtcgctgcccctgcccccgtctctgccatcagctctcgcaccggtgccaagcctgccctccgccccagcaccagtgcccgcccttcccctgcctcgtcgccccagcgcactgcccccaaaggagaacggatgtgcagtgtggtcaactgaagcgacttttaggccaggccccgagcctccaccaccaccaccccgcagaagggccagcgctccgcacggacctctcgatatggctccgttcgcccgcttgcacgaatgctacgggcaggagatccgtgccttgcgaggccaatggcttagcagcagggtgcagccttag

SEQ ID NO: 70193 - DNA, 750 bp, Artificial Sequence
  derived and/or modified sequence
atgaagctgaacgagcggagcctggccttctacgccacctgcgacgcacctgtggataacgcaggcttcctgtataaaaaagggggtcgccatgcagcatatcatagacgttggttcgttctacgaggtaacatgctgttttacttcgaagacgccgcatctcgagaacctgttggcgtgattattcttgagggctgcaccgttgagttggtggaagccgcagaggagtttgccttcgcagtgagattcgctggcactcgcgcccgtacgtatgtgctagccgctgagtctcaggatgctatggaaggatgggtcaaggctctgagccgggcctctttcgattacctgcggcttgtggtcagggagctggagcagcagctggctgcagttaggggaggaggcggtatggcactgccccagccgcagccccagtcactgccacttcccccatccttgccaagcgcattagcacctgtcccctctttgcctagcgcccccgcgccggtccccgctctgcctctgccaagacggccctcagctctcccacctaaagaaaatggatgcgccgtgtggagtaccgaagctacatttcgtcccgggccagagccaccacctccaccacctaggcgccgggctagcgccccccacggacctctggacatggccccttttgcccgacttcatgaatgctacggacaggagattagagcgctgaggggccagtggcttagcagccgcgtgcaaccttag

SEQ ID NO: 70194 - DNA, 225 bp, Artificial Sequence
  derived and/or modified sequence
atgaagctgaacgagcggagcctggccttctacgccacctgcgacgcccccgtggacaatgcgggattcttatacaagaagggcggcagacatgctgcctatcatcgccgctggttcgttctcagggggaatatgcttttttactttgaagatgcagcaagccgcgagcctgtgggagtcatcattctggaggggtgtacagtggagctggtggaagccgcctag

SEQ ID NO: 70195 - DNA, 243 bp, Artificial Sequence
  derived and/or modified sequence
atgaagctgaacgagcggagcctggccttctacgccacctgcgacgctcctgtagacaatgctggttttttgtacaagaaaggaggccgccacgccgcctaccacaggcggtggttcgtcctgcgaggtaatatgttgttctacttcgaggacgccgcaagccgggaaccagtcggcgtcatcattctcgagggttgcactgtggagctagtggaagctgccgaagaattcgctttcgcttag

SEQ ID NO: 70196 - DNA, 750 bp, Artificial Sequence
  derived and/or modified sequence
atgaaacttaacgagcgaagtctcgctttctacgctacctgtgacgctcctgtggataacgctgggttcctgtacaagaaagggggaagacacgccgcataccacagaagatggttcgtcctgcgtggcaatatgttattctacttcgaagacgccgcatctcgcgaacctgtgggcgtaattatcctcgaaggctgtaccgttgaattggtggaagccgctgaggagttcgcctttgctgtgagattcgcaggcaccagagcaagaacgtatgtcctggcagcagagtctcaggacgccatggagggttgggttaaagcattgtctagggcctccttcgactacttaaggttggtcgtcagggagctcgaacagcagttagctgcggtgcggggtggcggagggatggctttgccccaaccccagcctcagagtttgccactgccaccctccttgccgtccgcactcgcccctgtgccatcactgccctccgcgccagcgcctgttcctgccctgcccctacctagaaggcctagcgcccttccccctaaggagaacggatgtgccgtatggtccactgaagcgacattcagacccggtcctgagccccctcctccacctcccaggaggagagcttctgccccacacggccctttagacatggcaccgttcgctcgactgcacgaatgctacggccaggagatccgggctctgcgcggacagtggctgagctcacgagtccagccttag

SEQ ID NO: 70197 - DNA, 267 bp, Artificial Sequence
  derived and/or modified sequence
atgaaactcaacgagcgttccctcgctttctatgcgacttgcgatgctcccgtcgataacgccggttttctgtataagaaaggcggaaggcatgctgcctaccacagacggtggtttgtgctcagaggtaacatgctgttttattttgaggacgcagcatctagggagcctgtgggtgttatcattttggtggctgtcgccttgtggccgagagccctaagcgtgtccccatggtggcttagtcagggttctccagacacaccttag

SEQ ID NO: 70198 - DNA, 849 bp, Artificial Sequence
  derived and/or modified sequence
atgcaagctagctgcacccgacgagtgggcggaacaaggcctaccacaggagccggatcatgctgtgctgggacttgcagctccacgagccgaactttgcccgctgtttccccgtgggccagcagttcgtggcgtgccgctctctggtcctggtggcggcctccacgtagctctccctctctgtgcgcccttagaggtcccggtagagctccgacttgctggccccttcgtgtgaggatgccttggagggccggaagcaggccctgccgagtgcctgcaagtaccacttgtgggtggtggtgtgcatcatggtctagctcctggagactctacgtggcaggtgtggcctggccttgccctagcccatcaccttctccatgcccatgtcctaggccatgtccactcccctggccccagagccacccgtgtctcctgccccaacccagatcacagccttgtccctgccctgctggccctgttccatcaaggccaagaagaatggccgcattaagcggagccttgagacctccatctggcctcgatccctcacccctgcaccataggttggcagccggtcctagacaccctaccggaccttggacctggccgccttcccctggttgcactagcgccatggccaggcgaagtggcccttgtgtcgcctccggatccgcggctggatcaagtcctgaggcaacccgcgctcccgtcttaggaggccacaaactgtatgcactgtgggataggccaggacctggagagaccggtggcgcagatcccgaaggtaatcacggccaggggtggccgcctggcccagagtggcctggttttggaggctgcagactctag

SEQ ID NO: 70199 - DNA, 354 bp, Artificial Sequence
  derived and/or modified sequence
atgaagttaaacgagaggtctcttgccttttatgcgacttgcgacgccccagttgacaacgccggttttctgtataagaaggggggaaggcatgccgcttatcacagaagatggttcgttctcagaggcaacatgctgttttacttcgaggacgccgcatcccgagaacccgtgggcgtgattattctggaagggtgcactgtggagctcgtcgaggccgctgaagagtttgcctttgctgtccgcttcgctgggactcgcgctcggacgtacgtattggctgccgagtcccaagatgccatggaggggtgggtaaaagccctgtcacgcgcttccttcgactacctccggtag

SEQ ID NO: 70200 - DNA, 750 bp, Artificial Sequence
  derived and/or modified sequence
atgaagcttaatgagcggtcactcgccttttacgcaacctgcgacgcccctgtagacaatgctggcttcctgtacaagaaaggcggaagacatgcggcataccatcgcagatggtttgttctgagaggaaacatgctgttctactttgaagacgctgctagccgggagcctgtaggcgtgattatcctcgaaggctgtacagtcgaacttgttgaggctgctgaggaattcgcatttgctgtccgttttgccggtaccagagccagaacctatgttctcgccgcagagagccaagacgcaatggagggttgggtgaaagcgttgtcccgtgcgagctttgattatctccgactcgtggtgagggagctcgagcagcagctcgccgcagtaaggggcggtggaggcatggcgctgccccagccacagccacagagtctccccctcccgccatcgttaccttccgcccttgcacctgtaccaagccttccctccgctccagcccctgtccccgcacttcctctgccaagacgaccctccgccctgcctccaaaagaaaacggctgcgctgtgtggagcacggaagccacttttcgccctgggcctgagccccctccaccacccccaaggcgacgtgcttctgcgccacacggccctctggatatggccccatttgctagattgcacgagtgctacggccaggagatccgggcactcagaggccagtggctctctagccgcgtccagccttag

SEQ ID NO: 70201 - DNA, 750 bp, Artificial Sequence
  derived and/or modified sequence
atgaagctgaacgagagatcattggccttctacgccacctgcgacgcccctgttgacaacgccggtttcctgtataagaaggggggtaggcatgctgcataccacaggaggtggtttgttctgcggggaaatatgctgttttacttcgaagacgcagcctctcgtgaacccgtaggcgtcattattttggagggctgtactgtggagctggttgaagcagccgaagaatttgctttcgcggtgcggttcgctggaacccgcgcaagaacatacgttttggcagctgagtcccaggacgctatggagggctgggtaaaggccctgtcccgagcctcctttgattacttaagattggtcgttagagagctagagcaacagctagccgctgtcagaggcggaggaggcatggccctcccacagccccagccacagtccctgccacttcctcctagtttgccatctgccctggccccagttccgagccttccttccgctcccgcaccagtcccagctctgccattaccaaggcggccaagtgcacttccccctaaagagaacggttgtgcagtgtggtctaccgaagcgacatttcggcctggcccagaacctccaccaccaccgccaaggcggagggccagtgcccctcacggaccacttgatatggctccgtttgctagattacacgaatgttatgggcaggagattcgtgcactcaggggccaatggctcagctctcgggttcagccatag

SEQ ID NO: 70202 - DNA, 225 bp, Artificial Sequence
  derived and/or modified sequence
atgaaactgaatgaaagaagtctcgctttctatgctacctgtgacgctccagtcgataatgccggattcctctacaagaaagggggacgccacgctgcttatcatcggaggtggtttgttctgagagggaacatgctgttctacttcgaggatgccgctagccgcgagcctgtgggagtgataatcctggagggatgcaccgtggagcttgtcgaggccgcatag

SEQ ID NO: 70203 - DNA, 243 bp, Artificial Sequence
  derived and/or modified sequence
atgaagctcaacgagagatccttggcattctacgctacttgcgatgctcctgtggacaacgcagggtttttgtacaagaaggggggtagacacgccgcataccaccgcagatggttcgtgctaagagggaatatgctgttttattttgaggacgctgcctcaagggagcccgttggcgtgattatcttagaagggtgtactgtagagttggtggaggccgctgaggagtttgctttcgcctag

SEQ ID NO: 70204 - DNA, 750 bp, Artificial Sequence
  derived and/or modified sequence
atgaagctgaacgagagaagcctggccttctacgccacctgcgacgcccccgtggacaacgccggcttcctgtacaagaagggcggcagacacgccgcctaccacagaagatggttcgtgctgagaggcaacatgctgttctacttcgaggacgccgccagcagagagcccgtgggcgtgatcatcctggagggctgcaccgtggagctggtggaggccgccgaggagttcgccttcgccgtgagattcgccggcaccagagccagaacctacgtgctggccgccgagagccaggacgccatggagggctgggtgaaggccctgagcagagccagcttcgactacctgagactggtggtgagagagctggagcagcagctggccgccgtgagaggcggcggcggcatggccctgccccagccccagccccagagcctgcccctgccccccagcctgcccagcgccctggcccccgtgcccagcctgcccagcgcccccgcccccgtgcccgccctgcccctgcccagaagacccagcgccctgccccccaaggagaacggctgcgccgtgtggagcaccgaggccaccttcagacccggccccgagccccccccccccccccccagaagaagagccagcgccccccacggccccctggacatggcccccttcgccagactgcacgagtgctacggccaggagatcagagccctgagaggccagtggctgagcagcagagtgcagccctag

SEQ ID NO: 70205 - DNA, 267 bp, Artificial Sequence
  derived and/or modified sequence
atgaagctgaacgagagaagcctggccttctacgccacctgcgacgcccccgtggacaacgccggcttcctgtacaagaagggcggcagacacgccgcctaccacagaagatggttcgtgctgagaggcaacatgctgttctacttcgaggacgccgccagcagagagcccgtgggcgtgatcatcctggtggccgtggccctgtggcccagagccctgagcgtgagcccctggtggctgagccagggcagccccgacaccccctag

SEQ ID NO: 70206 - DNA, 354 bp, Artificial Sequence
  derived and/or modified sequence
atgaagctgaacgagagaagcctggccttctacgccacctgcgacgcccccgtggacaacgccggcttcctgtacaagaagggcggcagacacgccgcctaccacagaagatggttcgtgctgagaggcaacatgctgttctacttcgaggacgccgccagcagagagcccgtgggcgtgatcatcctggagggctgcaccgtggagctggtggaggccgccgaggagttcgccttcgccgtgagattcgccggcaccagagccagaacctacgtgctggccgccgagagccaggacgccatggagggctgggtgaaggccctgagcagagccagcttcgactacctgagatag

SEQ ID NO: 70207 - DNA, 225 bp, Artificial Sequence
  derived and/or modified sequence
atgaagctgaacgagagaagcctggccttctacgccacctgcgacgcccccgtggacaacgccggcttcctgtacaagaagggcggcagacacgccgcctaccacagaagatggttcgtgctgagaggcaacatgctgttctacttcgaggacgccgccagcagagagcccgtgggcgtgatcatcctggagggctgcaccgtggagctggtggaggccgcctag

SEQ ID NO: 70208 - DNA, 243 bp, Artificial Sequence
  derived and/or modified sequence
atgaagctgaacgagagaagcctggccttctacgccacctgcgacgcccccgtggacaacgccggcttcctgtacaagaagggcggcagacacgccgcctaccacagaagatggttcgtgctgagaggcaacatgctgttctacttcgaggacgccgccagcagagagcccgtgggcgtgatcatcctggagggctgcaccgtggagctggtggaggccgccgaggagttcgccttcgcctag

SEQ ID NO: 70209 - protein, 689 aa, Artificial Sequence
  derived and/or modified sequence
MAPWPELGDAQPNPDKYLEGAAGQQPTAPDKSKETNKNNTEAPVTKIELLPSYSTATLIDEPTEVDDPWNLPTLQDSGIKWSERDTKGKILCFFQGIGRLILLLGFLYFFVCSLDILSSAFQLVGGKMAGQFFSNSSIMSNPLLGLVIGVLVTVLVQSSSTSTSIVVSMVSSSLLTVRAAIPIIMGANIGTSITNTIVALMQVGDRSEFRRAFAGATVHDFFNWLSVLVLLPVEVATHYLEIITQLIVESFHFKNGEDAPDLLKVITKPFTKLIVQLDKKVISQIAMNDEKAKNKSLVKIWCKTFTNKTQINVTVPSTANCTSPSLCWTDGIQNWTMKNVTYKENIAKCQHIFVNFHLPDLAVGTILLILSLLVLCGCLIMIVKILGSVLKGQVATVIKKTINTDFPFPFAWLTGYLAILVGAGMTFIVQSSSVFTSALTPLIGIGVITIERAYPLTLGSNIGTTTTAILAALASPGNALRSSLQIALCHFFFNISGILLWYPIPFTRLPIRMAKGLGNISAKYRWFAVFYLIIFFFLIPLTVFGLSLAGWRVLVGVGVPVVFIIILVLCLRLLQSRCPRVLPKKLQNWNFLPLWMRSLKPWDAVVSKFTGCFQMRCCCCCRVCCRACCLLCDCPKCCRCSKCCEDLEEAQEGQDVPVKAPETFDNITISREAQGEVPASDSKTECTAL

SEQ ID NO: 70210 - protein, 163 aa, Artificial Sequence
  derived and/or modified sequence
MAPWPELGDAQPNPDKYLEGAAGQQPTAPDKSKETNKNNTEAPVTKIELLPSYSTATLIDEPTEVDDPWNLPTLQDSGIKWSERDTKGKILCFFQGIGRLILLLGFLYFFVCSLDILSSAFQLVGGKMAGQFFSNSSIMSNPLLGLVIGVLVTVLVQSSSTST

SEQ ID NO: 70211 - DNA, 2070 bp, Artificial Sequence
  derived and/or modified sequence
atggccccttggccagagctgggagatgctcagcccaacccagataagtatttggagggggccgctggccaacaacccactgcaccagataaatctaaggagaccaataagaacaatacagaggctcccgtgactaaaatcgagctgttgcctagctattcgaccgctacactgattgacgaacccaccgaggtggatgatccttggaacctgcctactctgcaagacagcgggatcaagtggtctgaaagagatacgaagggaaagattctatgcttctttcaaggtattgggaggctgattctgctcctgggtttcctctacttctttgtgtgcagtttggacattctttcaagtgccttccagctcgtgggcggtaagatggctgggcagtttttcagcaattcctcaatcatgtccaatccactactaggactcgtgattggagtgctcgtcaccgtattggtgcagagttcatccacaagtacaagcatagtggtgtccatggtgtcttcttcactcttaacagtgagggccgccatacccatcatcatgggcgctaatatcggaacaagtatcactaacacaattgtcgcactcatgcaggtgggagaccgctccgagtttagacgagcttttgctggggctacagtgcatgatttctttaattggctgtcagtgctcgtgttactacctgtagaagtcgccacacattatctcgaaattattacacaattgattgtggaatcattccattttaagaacggggaggacgcccctgacctacttaaagttattaccaaacccttcactaagctgattgtgcaactggacaagaaggtgatctctcagatcgccatgaacgatgagaaggctaagaataagtctctcgttaaaatatggtgtaagacgtttactaacaagactcagattaatgttaccgtgccctctaccgctaactgtacgtccccgtccttatgctggacagatggaattcaaaactggacaatgaaaaacgttacctataaggagaatattgccaaatgtcagcatatcttcgtgaatttccaccttcccgacttggccgtgggcacgatcctcctgattctgagccttctggtgttatgcgggtgcttaatcatgattgtcaagatccttggtagcgtcctcaagggacaggtggccacagtgataaaaaagactatcaacactgatttcccattccccttcgcttggttgactgggtatctggccattctggtgggagcaggcatgacttttattgttcagtcatcctccgtgttcacctctgcgctgactccactgattggtataggagtgatcaccatcgagagggcctatcccctgactctcgggtcaaatattgggacaactaccaccgcgatcttagcggcacttgctagtccgggaaacgcactccgatctagtctgcagatcgcactgtgccacttctttttcaacattagcgggatcctgctttggtatcccatcccctttacacggttacccatccggatggccaagggcctgggaaatatatctgccaaatacaggtggttcgcagtgttctatcttatcatctttttcttccttatcccactcacagttttcgggctctcattggcaggatggcgcgtactcgtcggcgtgggcgtaccagtagtcttcatcattatcttggtgttgtgccttcgactcttacagtctagatgtccgcgggttttgccaaagaagctgcagaattggaactttctgcctctgtggatgcgaagcctgaaaccttgggatgctgtggtcagcaagtttaccgggtgcttccagatgcgctgttgctgctgctgccgtgtttgctgtcgggcttgctgtctgctttgtgactgcccaaagtgctgtaggtgcagcaaatgctgtgaggatctggaagaggcccaggaggggcaggacgtgccggtgaaagctccagagaccttcgacaatatcacaatttctagagaggctcagggggaggtgccggcttcagatagtaagacagagtgcaccgccctgtag

SEQ ID NO: 70212 - DNA, 2070 bp, Artificial Sequence
  derived and/or modified sequence
atggccccctggcctgaactgggagatgcccagcccaaccctgacaaatatctcgaaggggctgcaggacagcagcctacagctccagacaaatcgaaagaaaccaataaaaacaatactgaagccccggtaacaaaaatagaactgctaccatcctattccacagctacgctcatcgatgaacccaccgaggtcgatgacccctggaatctccctaccttgcaggacagcgggatcaaatggagcgagagagataccaagggtaaaattctctgtttcttccaggggattggccgcctcatcctccttttgggattcttgtatttctttgtctgttccctcgacatcttgagctccgcattccaactggtagggggcaagatggcaggtcaatttttctctaactcctcgattatgtcgaatcctctcctcggcctggtcatcggcgtcctggtcacagtgcttgtgcagtctagcagcacctctactagcattgttgtgtcaatggtgtcttccagcctcttgacagttcgggctgctatccctatcatcatgggggcaaacatcggaacctccataacaaatacgatcgtggctctcatgcaggtgggtgaccgcagtgaatttagacgagcattcgctggtgctaccgtccacgacttcttcaactggctgagcgtcctggttttactgcccgttgaagtggccactcattacctggaaataattactcagttgatcgtggagtcctttcacttcaagaacggcgaagacgcccccgacttactgaaagttatcaccaaacccttcaccaagcttatcgtgcaactggacaagaaagtgatttctcaaatcgcaatgaatgacgaaaaagctaagaacaagagtctggttaagatttggtgtaagacctttaccaataaaacccaaataaatgttacggtcccgtctactgctaactgtaccagcccttctctatgctggaccgatggcatccagaattggacgatgaagaatgtaacctacaaggaaaacattgctaagtgccaacatatttttgtgaacttccatctgcctgaccttgcggttgggacgatccttctgattctgtctcttctggtgctttgtggatgccttattatgatcgtgaagatccttggcagtgtgttgaaaggacaggtggccaccgtaataaagaaaactatcaatactgatttcccatttccttttgcttggctgaccgggtacctggcgatccttgtgggcgcagggatgacattcatcgttcagtcatcctccgtgttcacatccgcactgacgccattgatcggaatcggggtcattactatcgagcgcgcctatcccctcacacttgggagtaacatcgggaccacaacaactgcaatcctggctgccctggcgtcccctggcaatgctctgaggtcttccctgcagatcgccctttgccatttctttttcaatatttccggcattctgctttggtaccccattcccttcacgaggcttcctatcagaatggcgaaaggtctcggcaatatttcagctaagtacagatggttcgccgtcttttacctgatcattttcttctttctcatccctctgaccgtgtttgggctttcgctagctggatggcgggttctggttggagttggtgtgcctgtagtattcataattatattggtgctgtgtctgcggctgcttcagagccggtgtccccgcgtgctaccgaagaagctgcaaaactggaattttttgcctttatggatgcggagcttaaagccctgggacgccgtggtgtctaagttcaccggctgtttccagatgagatgttgctgttgctgcagggtttgctgtcgcgcttgctgcctcctttgtgattgtcccaaatgctgccggtgtagcaagtgctgtgaagacctggaagaggcccaggaaggtcaggacgtgccagtcaaagcaccagaaaccttcgacaacattacaatctcccgtgaagcgcagggagaggttcctgcatcagactcaaagacggaatgtaccgcattgtag

SEQ ID NO: 70213 - DNA, 492 bp, Artificial Sequence
  derived and/or modified sequence
atggccccatggcctgaactgggagatgcccagcccaaccctgacaagtatctggagggagccgcgggacagcaacccacagcccccgacaaaagcaaggaaactaacaaaaacaatacagaggcgcccgtgactaagatagagctgcttccttcctattcaaccgctaccctgatcgatgaacctacggaggtggacgacccttggaatctgccgacattgcaggattccggcattaaatggtctgaacgcgatacaaagggaaagatcctgtgtttcttccagggaatcgggaggttaatcctgctgctggggtttctctacttttttgtctgctctctggacattctgagttccgcattccagctggtgggcggtaaaatggcaggccagttcttctcaaactcttccataatgtccaacccactccttggactggtgataggagttttggttaccgtactggtgcagagctccagtactagcacatag

SEQ ID NO: 70214 - DNA, 2070 bp, Artificial Sequence
  derived and/or modified sequence
atggccccctggccagagctgggagatgcccagcccaacccagacaagtacctggagggcgccgccggccagcagcccacagccccagacaagagcaaggagaccaacaagaacaacacagaggcccctgtgaccaagattgagctgctgcccagctacagcacagccaccctgattgatgagcccacagaggtggatgacccctggaacctgcccaccctgcaggacagcggcatcaagtggagcgagcgggacaccaagggcaagatcctgtgcttcttccagggcatcggccgcctcatcctgctgctgggcttcctgtacttctttgtgtgcagcctggacatcctgagcagcgccttccagctggtgggcggcaagatggccggccagttcttcagcaacagcagcatcatgagcaaccccctgctgggcctggtgattggagtgctggtgacagtgctggtgcagagcagcagcaccagcaccagcatcgtggtgtccatggtgagcagcagcctgctgactgtgcgggccgccatccccatcatcatgggcgccaacatcggcaccagcatcaccaacaccatcgtggccctgatgcaggtgggggacagaagtgagttccggcgggcctttgctggggccaccgtgcatgacttcttcaactggctgtctgtgctggtgctgctgcctgtggaggtggccacccactacctggagatcatcacccagctgattgtggagagcttccacttcaagaatggagaagatgccccagacctgctgaaggtgatcaccaagcccttcaccaagctgattgtgcagctggacaagaaggtgatcagccagatcgccatgaatgatgagaaggccaagaacaagagcctggtgaagatctggtgcaagaccttcaccaacaagacccagatcaacgtgacagtgcccagcacagccaactgcaccagccccagcctgtgctggacagatggcatccagaactggaccatgaagaatgtgacctacaaggagaacatcgccaagtgccagcacatctttgtgaacttccacctgcctgacctggccgtgggcaccatcctgctgatcctgagcctgctggtgctgtgtggctgcctgatcatgattgtgaagatcctgggctctgtgctgaagggccaggtggccaccgtcatcaagaagaccatcaacacagacttccccttcccctttgcctggctgaccggctacctggccatcctggtgggcgccggcatgaccttcatcgtgcagagcagctctgtgttcaccagcgccctgacccccctgattggaattggagtcatcaccatcgagcgggcctaccccctgaccctgggcagcaacatcggcaccaccaccacagccatcctggccgccctggccagccctggaaatgccctgcggagcagcctgcagatcgccctgtgccacttcttcttcaacatcagcggcatcctgctgtggtaccccatccccttcacccggctgcccatccgcatggccaagggcctgggcaacatcagcgccaagtaccgctggtttgctgtgttctacctgatcatcttcttcttcctgatccccctgactgtgtttggcctgagcctggccggctggagggtgctggtgggcgtgggcgtgcctgtggtgttcatcatcatcctggtgctgtgcctgcggctgctgcagagccgctgcccccgggtgctgcccaagaagctgcagaactggaacttcctgcccctgtggatgaggagcctgaagccctgggatgctgtggtgtccaagttcaccggctgcttccagatgcgctgctgctgctgctgccgggtgtgctgccgggcctgctgcctgctgtgtgactgccccaagtgctgccgctgcagcaagtgctgtgaggacctggaggaggcccaggagggccaggatgtgcctgtgaaggcccctgagacctttgacaacatcaccatcagccgggaggcccagggcgaggtgcctgccagtgacagcaagacagaatgtacagccctgtag

SEQ ID NO: 70215 - DNA, 492 bp, Artificial Sequence
  derived and/or modified sequence
atggccccctggccagagctgggagatgcccagcccaacccagacaagtacctggagggcgccgccggccagcagcccacagccccagacaagagcaaggagaccaacaagaacaacacagaggcccctgtgaccaagattgagctgctgcccagctacagcacagccaccctgattgatgagcccacagaggtggatgacccctggaacctgcccaccctgcaggacagcggcatcaagtggagcgagcgggacaccaagggcaagatcctgtgcttcttccagggcatcggccgcctcatcctgctgctgggcttcctgtacttctttgtgtgcagcctggacatcctgagcagcgccttccagctggtgggcggcaagatggccggccagttcttcagcaacagcagcatcatgagcaaccccctgctgggcctggtgattggagtgctggtgacagtgctggtgcagagcagcagcaccagcacctag

SEQ ID NO: 70216 - DNA, 2070 bp, Artificial Sequence
  derived and/or modified sequence
atggccccctggcccgagctgggcgacgcccagcccaaccccgacaaatatttagagggcgcagctgggcagcagcctactgccccagacaagagcaaggaaacaaataagaacaatactgaggcacctgtaacgaagatcgaacttctcccatcctactctaccgctactcttatcgatgaacctaccgaggtggacgacccatggaacttaccaacactgcaggactcaggtatcaaatggagtgagagggacacaaaaggaaaaatactttgtttcttccaaggcattggacgacttatcctgctattagggtttctctacttcttcgtgtgctctctggacattttgtcaagcgctttccaactggtgggcggtaagatggctggccagttcttttcaaatagctccattatgtccaatcccctcctcgggctggtaattggcgtgctcgtgactgtcctggtccaaagcagttctacctccaccagcattgtggtgtcaatggtgagttcatcactgctgacagttcgagccgcaatcccaattatcatgggggcaaacattggaaccagcatcactaataccattgtggccctgatgcaggtgggagacagaagcgagttccgcagggccttcgctggtgcgactgtgcacgacttttttaattggttatctgtgctggtcctgcttcccgttgaagtagccacccactacctcgagatcattactcaactgatcgtggaatcatttcactttaaaaatggggaggacgctccggacttgctgaaggtgatcactaagccattcaccaagctgatcgtccaattggacaaaaaggtcataagtcagatcgccatgaacgacgaaaaggccaaaaataagtctctagttaaaatctggtgcaagacctttactaataaaacccagatcaatgtgacggtgccaagcaccgcaaactgtacatcaccctccctgtgctggaccgatggtattcagaattggaccatgaagaacgtcacttataaggagaatatcgccaagtgtcagcatatcttcgtgaactttcacttgccggatctggctgtgggcaccattctactgatcctgtcgttattggttctctgcggatgcttgattatgatcgttaagattctcggtagcgtgcttaagggccaggtcgcaacagtgattaagaagactattaacacagacttcccctttccttttgcatggttaaccgggtacttggccatcctggttggggctgggatgacattcatcgtccagtctagcagcgtgttcacttcagccctgacgcctttgatcggaatcggggtcattactatcgagagggcctacccactcaccctaggcagtaacatcgggactacaacaaccgccatcttagccgctctggcgtcaccagggaacgccctccgaagtagcctgcagatcgctctgtgtcacttcttttttaatataagtggaatccttctctggtaccccatcccatttactaggctccccattaggatggctaagggcttgggtaacatctccgcaaaatacagatggtttgctgtgttttatctgataattttcttcttcctgatccctctgacggtattcggactgtctttggcaggctggagagtgctggttggcgtcggcgtgcccgttgtgtttattatcattctggtgctctgcctcagactgctacagagtagatgccctagggttctaccaaaaaagctgcagaactggaacttcttgccactctggatgcggagtctcaaaccttgggacgcagtggtttccaagtttaccgggtgttttcagatgcggtgctgctgctgttgcagagtgtgttgccgcgcctgctgtcttttgtgcgattgcccaaagtgctgtcgttgctcaaagtgctgtgaggatctcgaggaagcccaggagggacaggatgtgcctgtgaaagctcccgaaactttcgacaatatcactatctctagggaggcccagggggaagtaccagcctctgacagcaaaaccgagtgcacagccttgtag

SEQ ID NO: 70217 - DNA, 2070 bp, Artificial Sequence
  derived and/or modified sequence
atggccccctggcccgagctgggcgacgcccagcccaaccccgacaaatacctggaaggggctgccggtcaacaaccgaccgcgcccgacaagtctaaggaaacaaataagaacaatacggaggcacctgtcactaaaattgagttgctaccttcctattctactgccacgcttatcgacgagccaacagaagtcgatgatccctggaatcttcccacgcttcaagactcgggtatcaagtggagcgagcgcgacacaaagggtaaaatcctctgttttttccagggcatcgggaggctgatactgcttcttggatttttgtatttctttgtgtgctcactcgatattctgtcctcagccttccaactggtgggaggtaaaatggctggtcaattctttagtaattctagcatcatgtctaaccctcttctgggcttggtaatcggagtgttggtgactgtgctcgttcaatctagtagtacttcaacatcaatcgtcgtgtcaatggtgtcctcttcgctgctgaccgtgcgcgctgcaatcccaatcattatgggcgccaacatcggcacatcaatcacaaacacgatcgtcgcactgatgcaggtgggtgataggagcgagtttcggcgcgcttttgccggagccaccgtgcatgatttcttcaactggcttagtgtactcgtgctgttgccagtggaggtggcgactcactatttggagatcatcactcagctgatcgtagagagttttcatttcaagaatggagaggatgccccggacctgctcaaagttatcactaagccattcacaaagttgatcgtgcagctggacaagaaggtgatctcacagattgccatgaacgacgagaaagccaaaaacaagtccttagtgaaaatttggtgtaaaactttcaccaacaagacacagatcaatgtgaccgtccccagcacggccaattgtacttccccgagcctctgttggactgacggcatccagaattggacaatgaagaatgtgacctacaaggaaaacatcgccaagtgtcagcacatttttgtaaacttccacctgccggacctggccgtcggaaccatacttttgatactgtcccttctggtcctgtgcggctgtctgatcatgatcgttaagattctcggctcagtgctcaaggggcaggtcgcgactgtcatcaaaaagacaattaacactgatttccctttccccttcgcatggcttactggctacctagctatcctggtcggggcaggcatgactttcatcgtccagtcaagcagcgtgttcacttcagctctgacacccctgattgggattggcgtgattaccatcgaacgggcctatccactcacgttgggctccaatataggcacgaccacaaccgctatcctggccgctctggcctctccgggaaacgcacttcggagctccctccagatcgcactctgtcactttttcttcaatatctctggcatcttgctgtggtatcctatcccattcacccgtttgcccattcgcatggcgaaggggcttgggaacatcagtgccaaataccgctggtttgccgtgttctacttgatcatcttcttctttctaatcccattgaccgtgttcggcctgtcattggcagggtggagagtgcttgtgggggtgggggtaccagtagtgttcatcatcatcctggtgctctgtctgagactcctccaatcccgctgtcccagggtgctgcctaagaaacttcagaactggaacttcctgcctctgtggatgaggtccttaaaaccttgggatgctgtagtgtcaaaattcaccggctgtttccagatgaggtgttgttgctgctgcagagtgtgttgtcgagcctgttgcctcctctgcgactgccctaagtgctgtcgctgcagtaaatgctgcgaggacttagaggaagcgcaggagggacaggacgtccctgtcaaggccccggagacattcgacaacataacaattagtcgcgaagcacaaggcgaggtccctgcaagtgatagcaagaccgaatgcactgcgctgtag

SEQ ID NO: 70218 - DNA, 492 bp, Artificial Sequence
  derived and/or modified sequence
atggccccctggcccgagctgggcgacgcccagcccaaccccgacaagtacctggaaggggccgcgggacagcaaccgacagcgccggacaagtcgaaggaaacaaataaaaacaataccgaggctccagtcaccaaaattgagctgcttccatcctatagcacagcaacattgatcgatgaacctaccgaagtggacgacccatggaatctcccaactctgcaggactccgggattaagtggagcgaacgagacactaaggggaagatactctgcttcttccaggggatcgggcgcctgatcctgctactcggcttcctttattttttcgtctgttcactagacatcctctcttcggcttttcaactggtagggggaaaaatggcagggcagttttttagtaattccagcataatgtcaaaccctttgcttggcctggtcataggagtcctggttactgttctcgtacaatcctcatcaactagcacttag

SEQ ID NO: 70219 - DNA, 2070 bp, Artificial Sequence
  derived and/or modified sequence
atggccccatggcccgaactcggcgacgcccaacctaacccagataaatatctcgaaggagccgctggtcagcagcctactgcgccagataagagcaaagaaactaataagaataataccgaggcccctgttaccaagatagaactgcttccctcgtacagtacagcaacgttgatcgatgagccaacagaggtggacgatccctggaaccttcctaccttgcaggactccggtatcaaatggtccgaacgcgacactaaaggaaagattctatgcttttttcaaggcattggcaggctgatcctcctgttgggattcctttacttttttgtgtgttctctggacattctctcatctgcatttcagcttgtgggaggaaaaatggccggacagtttttttctaacagtagtattatgtcaaatcccctcctcggtctcgtaatcggcgtacttgtcaccgttttagttcaatcgagctctacctctactagtatcgttgtaagcatggtgtcatcctcgttactgaccgtaagggcagctatccccataataatgggcgcaaacatcggcacatctatcaccaacactattgtcgcccttatgcaagtcggcgatagaagtgaatttagacgagcgttcgctggcgcaactgtgcacgactttttcaactggctcagcgtgctggttctgctacctgttgaggtcgctactcactacctggagattattactcagctgatcgttgaatcttttcacttcaaaaacggagaggacgcacctgatctcctgaaagttattactaaaccattcacaaagctcatagttcaactagacaaaaaggtaatatcccagatcgccatgaatgacgagaaggcgaagaataagtccctggtcaagatctggtgcaagacattcaccaacaagacccagatcaacgtgaccgtgcccagcacagcaaattgcacatctccaagtctctgctggacagatggtatacaaaattggaccatgaaaaatgtgacatacaaggagaatatcgcgaaatgtcagcacatctttgtgaattttcatttaccagatctggccgtagggactatcctactgatactgtcactgcttgtcctgtgcgggtgcctcattatgatcgtgaagatcctgggctccgtgctgaaagggcaggtggcaacagtcattaagaagacaatcaataccgactttcctttccccttcgcttggctcaccggatatctcgccattctcgtcggtgcaggtatgacttttatcgttcagagttctagcgtttttacttctgcacttacccctctgataggtatcggcgtcataactatagaaagggcctaccccctgacattgggaagcaacatcggcacgactaccaccgccatcctggctgcgctagccagccctggcaacgctctgagaagttctctgcagattgccctgtgccactttttttttaatatctccgggatcctactctggtatccaattccatttaccagattaccaatccggatggccaaaggcctgggcaacatatctgccaagtaccgctggttcgcagttttttacttgattattttcttcttcctaatccctctgactgtgtttggcctgtccctggcaggctggcgcgtgctcgtgggagtgggtgtgcctgtggtgttcattattatccttgttctttgtctgcggctgctgcagtcgcgctgtcccagagtgctgcctaaaaagttgcagaactggaacttcctgcctttatggatgagaagtctgaagccatgggatgcggtggtgagtaagttcactggttgcttccagatgaggtgttgttgttgctgcagagtgtgctgtcgggcatgctgtcttctgtgcgactgccctaaatgttgtcggtgttctaagtgctgtgaagatttggaggaagcacaagaagggcaggatgtccctgttaaggcccctgaaacctttgacaacatcacaatctctcgagaggctcagggcgaagtgcctgcttctgattctaaaacagagtgcacagctctatag

SEQ ID NO: 70220 - DNA, 2070 bp, Artificial Sequence
  derived and/or modified sequence
atggctccttggcccgagctgggtgacgcccaacctaatccagacaagtacctcgagggagcggctggacagcagcctaccgccccagataaaagtaaagaaaccaataagaataatacggaggctcctgtgactaagatcgagctcctgcccagctattccaccgcaacattgatcgacgagccgacagaagttgatgacccatggaacctccccaccttacaagacagcggaattaagtggagcgagcgagacaccaaagggaaaatcctgtgttttttccagggaatagggcgactaatccttctgctcgggttcctgtattttttcgtgtgttccctcgacatattaagttcagcttttcaacttgtcggcggaaaaatggctgggcaatttttcagcaacagctctataatgtctaaccctctcctaggcctggttatcggcgtgcttgtgacggtgctggtgcagagctcatccaccagcacaagcattgtggtgagcatggtgtctagtagcctgctaaccgtgagggccgctattcccatcattatgggcgctaatataggcacatcgattacaaacacaatcgttgcattaatgcaggtcggtgatagatccgaattccggcgtgcatttgccggtgctacagtccatgatttctttaattggctgagcgtgcttgttctgctccccgtagaggtggccactcactatttggagataattactcagctgatcgtggagagttttcacttcaagaacggcgaagacgcgcctgatctcctgaaggtgattaccaagccatttaccaagttgatcgtccagctggataaaaaggtaatcagccagatcgcaatgaatgatgagaaagctaaaaacaagagtcttgtgaagatttggtgtaagaccttcactaacaagacccagataaacgtgaccgttccgagcacagcaaattgtacctctcctagcctttgctggacagacggaatccagaactggaccatgaaaaatgtgacttacaaagaaaatattgctaagtgccagcacatcttcgtgaattttcacttgccagacctggctgttgggacgatactgctcatcttgtctttactcgtgctatgtggctgcctgatcatgatcgtgaaaatcctgggctccgtgctgaaaggccaggtggctacagttattaaaaagaccatcaatactgatttccccttccccttcgcctggctcacgggatacctggccatccttgtgggagctggcatgacgttcatcgtccaatcttccagcgtgtttaccagcgccctcactcccttaatcggaattggcgttattaccattgagcgtgcctatcctctgaccttgggctctaacatcgggaccactactacagccatcctcgccgctctggcctccccagggaacgctttgaggagttccctccagattgcgctgtgtcatttcttttttaacatttctggaattctgctctggtatccgattcctttcactaggcttcccatccgaatggccaagggcctcggtaatatatcagccaaatataggtggtttgctgtgttttatctgattatcttcttctttttaatccccctgaccgtgtttggactctctctggctggttggagggttctcgttggtgtgggcgtgcccgtggtctttattattattttagtgctgtgcctgagacttttgcagtcacgctgtcccagagtattgcctaagaagctgcagaactggaactttttgccgttatggatgagatccctgaagccctgggacgctgtagtgtccaagttcactggctgctttcagatgcggtgttgttgttgctgccgcgtgtgctgtagagcatgttgtttactgtgtgattgccctaaatgttgtagatgcagcaagtgttgtgaggacctggaggaggcacaggaggggcaggatgttccagttaaggcacccgagacttttgacaacatcaccatttccagagaagctcagggggaagtaccagctagcgacagtaagacagagtgtaccgctctgtag

SEQ ID NO: 70221 - DNA, 492 bp, Artificial Sequence
  derived and/or modified sequence
atggctccttggcccgagctcggggatgcacagcccaaccctgataagtatcttgagggcgctgcagggcaacagccgacagccccagataaatcgaaagaaacaaataagaacaataccgaagcccctgtgaccaagatcgaactgctgccctcttattcaaccgcgacattaatcgacgagcccacagaagttgacgacccctggaacctgccaactctgcaggacagcggaatcaagtggtccgaacgggatactaagggtaagatcctgtgctttttccagggaataggaagattgatcctgttactgggttttctctactttttcgtctgctccctggatatcctctcgtctgcttttcaactggttggtggcaaaatggctggacagtttttctcgaacagttccattatgagtaatccattactcggtctggtgattggagtacttgtcacagtccttgttcaaagttctagtactagcacctag

SEQ ID NO: 70222 - DNA, 2174 bp, Artificial Sequence
  derived and/or modified sequence
agtttgtttctattagggcccgtggccatcagcgaagggtccgtccttcagccgtcttggggagcaaagcccgcaatttatgttttccaagccacaaatggaccatggctccctggcctgaattgggagatgcccagcccaaccccgataagtacctcgaaggggccgcaggtcagcagcccactgcccctgataaaagcaaagagaccaacaaaaataacactgaggcacctgtaaccaagattgaacttctgccgtcctactccacggctacactgatagatgagcccactgaggtggatgacccctggaacctacccactcttcaggactcggggatcaagtggtcagagagagacaccaaagggaagattctctgtttcttccaagggattgggagattgattttacttctcggatttctctactttttcgtgtgctccctggatattcttagtagcgccttccagctggttggaggaaaaatggcaggacagttcttcagcaacagctctattatgtccaaccctttgttggggctggtgatcggggtgctggtgaccgtcttggtgcagagctccagcacctcaacgtccatcgttgtcagcatggtgtcctcttcattgctcactgttcgggctgccatccccattatcatgggggccaacattggaacgtcaatcaccaacactattgttgcgctcatgcaggtgggagatcggagtgagttcagaagagcttttgcaggagccactgtccatgacttcttcaactggctgtccgtgttggtgctcttgcccgtggaggtggccacccattacctcgagatcataacccagcttatagtggagagcttccacttcaagaatggagaagatgccccagatcttctgaaagtcatcactaagcccttcacaaagctcattgtccagctggataaaaaagttatcagccaaattgcaatgaacgatgaaaaagcgaaaaacaagagtcttgtcaagatttggtgcaaaacttttaccaacaagacccagattaacgtcactgttccctcgactgctaactgcacctccccttccctctgttggacggatggcatccaaaactggaccatgaagaatgtgacctacaaggagaacatcgccaaatgccagcatatctttgtgaatttccacctcccggatcttgctgtgggcaccatcttgctcatactctccctgctggtcctctgtggttgcctgatcatgattgtcaagatcctgggctctgtgctcaaggggcaggtcgccactgtcatcaagaagaccatcaacactgatttcccctttccctttgcatggttgactggctacctggccatcctcgtcggggcaggcatgaccttcatcgtacagagcagctctgtgttcacgtcggccttgacccccctgattggaatcggcgtgataaccattgagagggcttatccactcacgctgggctccaacatcggcaccaccaccaccgccatcctggccgccttagccagccctggcaatgcattgaggagttcactccagatcgccctgtgccactttttcttcaacatctccggcatcttgctgtggtacccgatcccgttcactcgcctgcccatccgcatggccaaggggctgggcaacatctctgccaagtatcgctggttcgccgtcttctacctgatcatcttcttcttcctgatcccgctgacggtgtttggcctctcgctggccggctggcgggtgctggttggtgtcggggttcccgtcgtcttcatcatcatcctggtactgtgcctccgactcctgcagtctcgctgcccacgcgtcctgccgaagaaactccagaactggaacttcctgccgctgtggatgcgctcgctgaagccctgggatgccgtcgtctccaagttcaccggctgcttccagatgcgctgctgctgctgctgccgcgtgtgctgccgcgcgtgctgcttgctgtgtgactgccccaagtgctgccgctgcagcaagtgctgcgaggacttggaggaggcgcaggaggggcaggatgtccctgtcaaggctcctgagacctttgataacataaccattagcagagaggctcagggtgaggtccctgcctcggactcaaagaccgaatgcacggccttgtag

SEQ ID NO: 70223 - DNA, 2162 bp, Artificial Sequence
  derived and/or modified sequence
atatatacccggggcgctgcgctccacctggccgccgcctccagcccagcacctgcggagggagcgctgaccatggctccctggcctgaattgggagatgcccagcccaaccccgataagtacctcgaaggggccgcaggtcagcagcccactgcccctgataaaagcaaagagaccaacaaaaataacactgaggcacctgtaaccaagattgaacttctgccgtcctactccacggctacactgatagatgagcccactgaggtggatgacccctggaacctacccactcttcaggactcggggatcaagtggtcagagagagacaccaaagggaagattctctgtttcttccaagggattgggagattgattttacttctcggatttctctactttttcgtgtgctccctggatattcttagtagcgccttccagctggttggaggaaaaatggcaggacagttcttcagcaacagctctattatgtccaaccctttgttggggctggtgatcggggtgctggtgaccgtcttggtgcagagctccagcacctcaacgtccatcgttgtcagcatggtgtcctcttcattgctcactgttcgggctgccatccccattatcatgggggccaacattggaacgtcaatcaccaacactattgttgcgctcatgcaggtgggagatcggagtgagttcagaagagcttttgcaggagccactgtccatgacttcttcaactggctgtccgtgttggtgctcttgcccgtggaggtggccacccattacctcgagatcataacccagcttatagtggagagcttccacttcaagaatggagaagatgccccagatcttctgaaagtcatcactaagcccttcacaaagctcattgtccagctggataaaaaagttatcagccaaattgcaatgaacgatgaaaaagcgaaaaacaagagtcttgtcaagatttggtgcaaaacttttaccaacaagacccagattaacgtcactgttccctcgactgctaactgcacctccccttccctctgttggacggatggcatccaaaactggaccatgaagaatgtgacctacaaggagaacatcgccaaatgccagcatatctttgtgaatttccacctcccggatcttgctgtgggcaccatcttgctcatactctccctgctggtcctctgtggttgcctgatcatgattgtcaagatcctgggctctgtgctcaaggggcaggtcgccactgtcatcaagaagaccatcaacactgatttcccctttccctttgcatggttgactggctacctggccatcctcgtcggggcaggcatgaccttcatcgtacagagcagctctgtgttcacgtcggccttgacccccctgattggaatcggcgtgataaccattgagagggcttatccactcacgctgggctccaacatcggcaccaccaccaccgccatcctggccgccttagccagccctggcaatgcattgaggagttcactccagatcgccctgtgccactttttcttcaacatctccggcatcttgctgtggtacccgatcccgttcactcgcctgcccatccgcatggccaaggggctgggcaacatctctgccaagtatcgctggttcgccgtcttctacctgatcatcttcttcttcctgatcccgctgacggtgtttggcctctcgctggccggctggcgggtgctggttggtgtcggggttcccgtcgtcttcatcatcatcctggtactgtgcctccgactcctgcagtctcgctgcccacgcgtcctgccgaagaaactccagaactggaacttcctgccgctgtggatgcgctcgctgaagccctgggatgccgtcgtctccaagttcaccggctgcttccagatgcgctgctgctgctgctgccgcgtgtgctgccgcgcgtgctgcttgctgtgtgactgccccaagtgctgccgctgcagcaagtgctgcgaggacttggaggaggcgcaggaggggcaggatgtccctgtcaaggctcctgagacctttgataacataaccattagcagagaggctcagggtgaggtccctgcctcggactcaaagaccgaatgcacggccttgtaggggacgccccagattgtcag

SEQ ID NO: 70224 - DNA, 549 bp, Artificial Sequence
  derived and/or modified sequence
attgcggacctagagcccagactcccagggcagaaagcgccccacagactgataaagaccatggctccctggcctgaattgggagatgcccagcccaaccccgataagtacctcgaaggggccgcaggtcagcagcccactgcccctgataaaagcaaagagaccaacaaaaataacactgaggcacctgtaaccaagattgaacttctgccgtcctactccacggctacactgatagatgagcccactgaggtggatgacccctggaacctacccactcttcaggactcggggatcaagtggtcagagagagacaccaaagggaagattctctgtttcttccaagggattgggagattgattttacttctcggatttctctactttttcgtgtgctccctggatattcttagtagcgccttccagctggttggaggaaaaatggcaggacagttcttcagcaacagctctattatgtccaaccctttgttggggctggtgatcggggtgctggtgaccgtcttggtgcagagctccagcacctcaacg

SEQ ID NO: 70225 - DNA, 2070 bp, Artificial Sequence
  derived and/or modified sequence
atggccccctggcccgagctgggcgacgcccagcccaaccccgacaagtacctggagggcgccgccggccagcagcccaccgcccccgacaagagcaaggagaccaacaagaacaacaccgaggcccccgtgaccaagatcgagctgctgcccagctacagcaccgccaccctgatcgacgagcccaccgaggtggacgacccctggaacctgcccaccctgcaggacagcggcatcaagtggagcgagagagacaccaagggcaagatcctgtgcttcttccagggcatcggcagactgatcctgctgctgggcttcctgtacttcttcgtgtgcagcctggacatcctgagcagcgccttccagctggtgggcggcaagatggccggccagttcttcagcaacagcagcatcatgagcaaccccctgctgggcctggtgatcggcgtgctggtgaccgtgctggtgcagagcagcagcaccagcaccagcatcgtggtgagcatggtgagcagcagcctgctgaccgtgagagccgccatccccatcatcatgggcgccaacatcggcaccagcatcaccaacaccatcgtggccctgatgcaggtgggcgacagaagcgagttcagaagagccttcgccggcgccaccgtgcacgacttcttcaactggctgagcgtgctggtgctgctgcccgtggaggtggccacccactacctggagatcatcacccagctgatcgtggagagcttccacttcaagaacggcgaggacgcccccgacctgctgaaggtgatcaccaagcccttcaccaagctgatcgtgcagctggacaagaaggtgatcagccagatcgccatgaacgacgagaaggccaagaacaagagcctggtgaagatctggtgcaagaccttcaccaacaagacccagatcaacgtgaccgtgcccagcaccgccaactgcaccagccccagcctgtgctggaccgacggcatccagaactggaccatgaagaacgtgacctacaaggagaacatcgccaagtgccagcacatcttcgtgaacttccacctgcccgacctggccgtgggcaccatcctgctgatcctgagcctgctggtgctgtgcggctgcctgatcatgatcgtgaagatcctgggcagcgtgctgaagggccaggtggccaccgtgatcaagaagaccatcaacaccgacttccccttccccttcgcctggctgaccggctacctggccatcctggtgggcgccggcatgaccttcatcgtgcagagcagcagcgtgttcaccagcgccctgacccccctgatcggcatcggcgtgatcaccatcgagagagcctaccccctgaccctgggcagcaacatcggcaccaccaccaccgccatcctggccgccctggccagccccggcaacgccctgagaagcagcctgcagatcgccctgtgccacttcttcttcaacatcagcggcatcctgctgtggtaccccatccccttcaccagactgcccatcagaatggccaagggcctgggcaacatcagcgccaagtacagatggttcgccgtgttctacctgatcatcttcttcttcctgatccccctgaccgtgttcggcctgagcctggccggctggagagtgctggtgggcgtgggcgtgcccgtggtgttcatcatcatcctggtgctgtgcctgagactgctgcagagcagatgccccagagtgctgcccaagaagctgcagaactggaacttcctgcccctgtggatgagaagcctgaagccctgggacgccgtggtgagcaagttcaccggctgcttccagatgagatgctgctgctgctgcagagtgtgctgcagagcctgctgcctgctgtgcgactgccccaagtgctgcagatgcagcaagtgctgcgaggacctggaggaggcccaggagggccaggacgtgcccgtgaaggcccccgagaccttcgacaacatcaccatcagcagagaggcccagggcgaggtgcccgccagcgacagcaagaccgagtgcaccgccctgtag

SEQ ID NO: 70226 - DNA, 492 bp, Artificial Sequence
  derived and/or modified sequence
atggccccctggcccgagctgggcgacgcccagcccaaccccgacaagtacctggagggcgccgccggccagcagcccaccgcccccgacaagagcaaggagaccaacaagaacaacaccgaggcccccgtgaccaagatcgagctgctgcccagctacagcaccgccaccctgatcgacgagcccaccgaggtggacgacccctggaacctgcccaccctgcaggacagcggcatcaagtggagcgagagagacaccaagggcaagatcctgtgcttcttccagggcatcggcagactgatcctgctgctgggcttcctgtacttcttcgtgtgcagcctggacatcctgagcagcgccttccagctggtgggcggcaagatggccggccagttcttcagcaacagcagcatcatgagcaaccccctgctgggcctggtgatcggcgtgctggtgaccgtgctggtgcagagcagcagcaccagcacctag

SEQ ID NO: 70227 - DNA, 1647 bp, Artificial Sequence
  derived and/or modified sequence
atggccaccgacgacaagacttctcctacccttgattctgcgaatgatctgcctcgctcccctacttcaccttctcatcttacacactttaagcccctgactcctgaccaggacgaaccgccgttcaaatcagcatattccagcttcgtaaatctctttagattcaacaaggaacgcgcagaaggagggcagggtgaacagcagcctttgagcggttcttggacatcccctcagctgccttcgcggactcagtctgtgaggtctccaaccccctacaagaaacagctgaacgaggagttgcagcgccgctcttccgcattggacactagaaggaaagcagaacctacttttggcggacacgatccccgtaccgccgtccagctgagatctctgagtaccgtgctaaagaggctgaaggaaattatggaagggaagtcccaggactctgatctgaagcaatactggatgcctgactcccaatgtaaggagtgctacgactgttcggaaaagtttactacattcaggaggcggcatcattgccggctgtgtggtcagatcttctgtagtcggtgctgcaatcaggagattcccggtaaatttatgggttacacgggcgatctcagggcttgtacgtactgcaggaaaatcgctctatcatatgcccactccaccgattcgaactccattggagaggacctgaacgctctttctgattccgcctgctctgtttccgtgctggacccttccgagcccaggactcccgttggatctcggaaagcatccagaaatatctttctggaagacgacctggcttggcagagtcttattcaccctgattctagcaatacccctctgtctactcgtttagtgtctgtccaggaagacgccggtaagtctccagctcggaatcggtctgcctcgattaccaacctctcactcgatcgtagtgggtccccaatggtccctagttatgaaacaagtgtgagcccccaggccaacagaacatatgtaaggacagagactacagaggacgaacgaaaaatcctcctggactcagtgcagttgaaggacctgtggaagaaaatatgtcatcatagctctggaatggaatttcaggatcatagatattggctgagaacacaccccaattgcatagtgggaaaagagttagtcaactggctgatcagaaacggacatattgcaacacgcgctcaggccattgctatcggacaggccatggtagacggaaggtggttagactgcgtgtcacatcacgaccagctattccgcgacgaatacgcgttgtataggcccctgcaatcaactgagttcagtgagaccccttctccagactctgactcagtgaatagtgtggagggacacagtgagccctcttggtttaaagacattaagtttgatgattccgatacggagcagattgccgaagagggtgatgacaaccttgctaactcagcaagcccttccaagcggacaagcgtgagctccttccagtccaccgtggattccgatagtgccgcttcaatttcccttaacgtggaacttgataatgtgaatttccacattaagaaaccaagcaagtacccccacgttcccccccatccagccgaccaaaagggccggcgctag

SEQ ID NO: 70228 - DNA, 1647 bp, Artificial Sequence
  derived and/or modified sequence
atggccacagatgacaagaccagccccaccctggacagcgccaatgacctgcccaggagccccaccagccccagccacctgacccacttcaagcccctgaccccagaccaggatgagccccccttcaagagcgcctacagcagctttgtgaacctcttccgcttcaacaaggagcgggcagagggcggccagggcgagcagcagcccctgagcggctcctggaccagcccccagctgcccagcaggacccagagcgtgcgcagccccaccccctacaagaagcagctgaatgaggagctgcagaggaggagcagcgccctggacaccaggaggaaggccgagcccacctttggaggccatgaccccaggacagctgtgcagctgcggagcctgagcacagtgctgaagaggctgaaggagatcatggagggcaagagccaggacagcgacctgaagcagtactggatgccagacagccagtgcaaggaatgttatgactgcagcgagaagttcaccaccttcagaagaagacaccactgccgcctgtgtggccagatcttctgcagccgctgctgcaaccaggagatccctgggaagttcatgggctacaccggggacctgcgggcctgcacctactgcaggaagatcgccctgtcctatgcccacagcacagacagcaacagcattggagaggacctgaatgccctgagtgacagcgcctgcagcgtgtctgtgctggaccccagcgagcccaggacccctgtgggcagcaggaaggccagcaggaacatcttcctggaggatgacctggcctggcagagcctcatccacccagacagcagcaacacccccctgagcacccggctggtgtctgtgcaggaggatgctgggaagagccctgccaggaacagaagtgccagcatcaccaacctgagcctggacaggagcggcagccccatggtgcccagctatgagacctctgtgagcccccaggccaacagaacctacgtgaggacagagaccacagaagatgagaggaagatcctgctggacagcgtgcagctgaaggacctgtggaagaagatctgccaccacagcagcggcatggagttccaggaccaccgctactggctgcggacccaccccaactgcatcgtgggcaaggagctggtgaactggctgatcagaaatggccacatcgccacccgggcccaggccatcgccatcggccaggccatggtggatggccgctggctggactgtgtgagccaccacgaccagctgttcagagatgaatatgccctgtaccggcccctgcagagcacagagttcagcgagacccccagcccagacagcgacagcgtgaacagcgtggagggccacagcgagcccagctggttcaaggacatcaagtttgatgacagcgacacagagcagattgctgaggagggagatgacaacctggccaacagcgccagccccagcaagaggacctctgtgagcagcttccagagcacagtggacagcgacagcgctgccagcatcagcctgaatgtggagctggacaacgtgaacttccacatcaagaagcccagcaagtacccccacgtgcccccccaccctgctgaccagaagggcagaagatag

SEQ ID NO: 70229 - DNA, 1647 bp, Artificial Sequence
  derived and/or modified sequence
atggccaccgacgacaagaccagccccaccctggacagcgccaacgacctccctcgaagtccaacaagcccttcgcatctgactcacttcaagcctctgacaccagaccaggatgagcctccctttaagtcggcctactcgagcttcgtaaacctgttccggttcaataaagaaagggcagaaggcggacagggggaacagcagcctctctctggttcttggacgtccccacagctgccttctaggactcaaagtgttcgcagtcccacgccttacaagaaacagctcaatgaagaactccagagacggagctccgctctggacacacgacgtaaagctgagccaacgtttgggggtcacgacccgaggaccgccgtacagctgcgcagcctcagtacggtcctcaaaaggcttaaagaaattatggagggaaaaagtcaggacagcgacttgaaacaatactggatgcctgatagccagtgcaaggagtgttacgattgttccgagaaatttactactttcaggagacgccatcactgtcgactttgcggacagatcttttgctctaggtgctgcaaccaggaaattcctggaaaatttatgggctacaccggtgacctgagggcgtgcacctactgccgaaagatcgcactgtcttatgcccactccactgattctaactcgatcggcgaagatctaaacgcactcagcgattctgcctgtagcgtgtcagtattggatccaagcgaaccccgaactcccgtggggtctcgtaaagcatcaagaaatatatttttggaagatgatctggcttggcaaagcctgatccaccccgacagctctaacaccccactgtccacccggctggtcagcgtgcaggaggatgcaggaaagtctcctgcaaggaacagatctgctagcatcactaatctcagccttgaccgatccggatccccgatggtccccagttatgagaccagcgtatccccccaggccaaccggacttatgtgagaacagagaccacggaagacgagagaaagatattgctagactctgtacaactgaaggacctctggaaaaaaatatgccatcactcctcaggcatggagttccaggaccatcgctactggctcagaacccaccctaactgcatagtgggcaaggaactggtgaattggcttatccgtaacggccacattgctactcgggcacaggcaattgcgattgggcaggccatggtcgatggccgatggctggactgcgtcagtcaccatgaccaattgttccgagatgagtatgcactgtatcggcctctacagtctactgagttttctgaaaccccctcacctgattcagacagtgtcaattcagtggaaggacacagcgagccaagttggttcaaagatattaagtttgacgactctgacacagaacagattgcagaagagggagacgacaatcttgccaatagcgccagtccatctaagcggacttcagtctctagcttccagtcaacagtcgatagcgattccgcggcttccatctcactgaatgtagaactagacaatgtgaatttccatattaaaaaaccctccaagtacccccatgtaccacctcacccagctgatcagaaagggagacgatag

SEQ ID NO: 70230 - DNA, 1898 bp, Artificial Sequence
  derived and/or modified sequence
gcagcttcgcttcctgccgcaaccgtccgcggcctgaggagcccaccgccgctctcgggggccgacttccgggggctgagccgttgaagcggaggctggggcggggggcagccggcgcggccggggcaggaggcgcagactcatgaaatggccacagatgataagacgtccccaacactggactctgctaatgatttgcctcgatctcctactagtccttctcatctcacacactttaaacctttgactcctgatcaagatgagcccccttttaaatcagcttatagttcttttgtaaatctctttcgttttaacaaagagagagcagaaggaggccagggagaacagcagcctttgagtggaagttggaccagccctcagctcccttcgaggacacagtctgttaggtcacccacaccttataaaaagcagcttaatgaggaactccagcggcgctcttcagcattagacacaagaaggaaagcagaacctacctttggaggtcatgaccctcgtacagctgttcagcttcgaagcctcagcacagtattaaaacgcctcaaggaaatcatggaggggaaaagccaggatagtgacctgaaacaatactggatgccagatagccaatgtaaagagtgctatgactgtagtgagaaatttacaacctttaggcgcagacaccattgccgactatgtgggcagattttctgcagtcgttgctgtaatcaagaaatccctggaaaatttatgggctatacaggagacctccgagcttgcacatattgtagaaaaatagccttaagttatgctcattccacagacagtaattctattggggaagacttgaatgctctttcagattctgcttgctctgtgtctgtgcttgatccaagtgaaccccgaacacctgttgggagtaggaaagccagccgtaacatatttttagaggatgatttggcctggcaaagtttgattcatccagattcctcaaatactcctctttcaacaagacttgtatctgtgcaagaggatgctgggaaatctcctgctcgaaatagatcagccagcattactaacctgtcactggatagatctggttctcctatggtaccttcatatgagacatctgtcagtccccaggctaaccgaacatatgttaggacagagaccactgaggatgaacgcaaaattcttctggacagtgtgcagttaaaagacctgtggaaaaaaatctgccatcacagcagtggaatggagtttcaggatcaccgctactggttgagaacgcatcccaactgcattgtaggaaaggaattagtcaactggctaatccgaaatgggcatattgccacaagggcacaagctatagcaattggacaagcaatggttgatggacgttggctggattgtgttagtcatcacgaccagcttttcagagatgagtatgcgctgtatagaccactgcagagtacagaattttctgagacgccttctcccgacagtgactcagtgaactccgtggaaggacactctgagccatcctggtttaaagacataaagtttgatgacagtgacacagaacagatagctgaagaaggtgacgataatttggctaattctgccagtcctagcaagcgcacatcagtcagcagtttccagtccacagtggacagtgactcagccgcttctatcagcctgaacgtggagctggacaacgtgaacttccatatcaagaagccctccaagtacccacatgtgccccctcaccctgctgaccaaaaaggtaggaggtagtcaccatctggaatccaaacacaggctggacagctgggccataggatctcatgccagcctgtccttctggcttcctctgtcccacgtggctgagggtatttggt

SEQ ID NO: 70231 - DNA, 1647 bp, Artificial Sequence
  derived and/or modified sequence
atggcaacagatgataaaacgtcaccaacgctcgattcagctaacgatctccctcggagccccacctcccccagccatctgacccactttaaaccattaacgccagatcaagatgagccgccttttaagtctgcctattcctcatttgtgaatctgtttcgctttaataaagaaagagccgagggtgggcagggagagcaacagcccctgtctggatcatggacttctccccaattaccaagccggacccagtctgtccggtctcccaccccctacaagaaacagttgaacgaggaactgcagaggcgatctagcgctttagatactcggaggaaggctgagccaacgtttggcggacacgatcctagaaccgctgtgcagctcagaagcttgtcaactgtgctcaaaaggctcaaggagatcatggagggaaagtcccaggactccgacctgaaacagtattggatgcccgatagccagtgtaaagagtgctatgactgcagcgagaaatttacgacattccgcagacgacatcactgtagactgtgtggacaaattttttgtagtcgctgctgcaaccaagagattcctgggaagtttatgggatataccggggatctccgggcatgcacatactgtagaaagatagccctctcatacgcacactcaactgatagtaactccatcggtgaggatctcaatgcactcagcgattcagcttgtagcgtttctgtgctagatccttctgagcctcggaccccagtggggtctaggaaagcctccaggaacatctttctcgaggacgatttagcttggcagtcgttaatccatcccgatagcagcaacaccccgctatcgacccggctggtcagcgtccaggaggatgcgggaaaatctcccgctagaaatcggtcggcttcaatcaccaacctgagcttggacagatctggatccccaatggtcccctcctatgagacaagcgtctcgcctcaggctaaccggacatacgtgagaaccgagacaactgaggacgagaggaagattcttttggactccgttcagctcaaagatttgtggaaaaaaatatgtcaccacagtagtggcatggagttccaagaccaccggtattggctgaggacccatcctaactgcatcgtagggaaggagcttgtcaactggctgataagaaacgggcacatagccactagggcacaggcaatcgcgatcggccaagctatggtggatggcagatggctcgattgtgtgtcccatcatgatcaactgtttagggacgaatacgctttatatcgccctctgcagtctaccgaatttagcgagaccccatcccctgatagtgactccgtgaattcagtagaagggcactccgagccttcctggttcaaagacattaagttcgatgattctgatacagagcagatcgcagaggaaggtgacgacaatctggcgaacagcgcctcccccagcaagcgaacgtcagtgtcatcgtttcaaagtacagttgattctgactcggccgcatctatcagccttaacgtggagcttgataacgttaatttccacattaaaaagccaagcaagtatccacatgtccccccacatcccgcagatcagaaggggcgacgatag

SEQ ID NO: 70232 - DNA, 1647 bp, Artificial Sequence
  derived and/or modified sequence
atggccaccgacgacaagaccagccccaccctggacagcgccaacgacctgcccagaagccccaccagccccagccacctgacccacttcaagcccctgacccccgaccaggacgagccccccttcaagagcgcctacagcagcttcgtgaacctgttcagattcaacaaggagagagccgagggcggccagggcgagcagcagcccctgagcggcagctggaccagcccccagctgcccagcagaacccagagcgtgagaagccccaccccctacaagaagcagctgaacgaggagctgcagagaagaagcagcgccctggacaccagaagaaaggccgagcccaccttcggcggccacgaccccagaaccgccgtgcagctgagaagcctgagcaccgtgctgaagagactgaaggagatcatggagggcaagagccaggacagcgacctgaagcagtactggatgcccgacagccagtgcaaggagtgctacgactgcagcgagaagttcaccaccttcagaagaagacaccactgcagactgtgcggccagatcttctgcagcagatgctgcaaccaggagatccccggcaagttcatgggctacaccggcgacctgagagcctgcacctactgcagaaagatcgccctgagctacgcccacagcaccgacagcaacagcatcggcgaggacctgaacgccctgagcgacagcgcctgcagcgtgagcgtgctggaccccagcgagcccagaacccccgtgggcagcagaaaggccagcagaaacatcttcctggaggacgacctggcctggcagagcctgatccaccccgacagcagcaacacccccctgagcaccagactggtgagcgtgcaggaggacgccggcaagagccccgccagaaacagaagcgccagcatcaccaacctgagcctggacagaagcggcagccccatggtgcccagctacgagaccagcgtgagcccccaggccaacagaacctacgtgagaaccgagaccaccgaggacgagagaaagatcctgctggacagcgtgcagctgaaggacctgtggaagaagatctgccaccacagcagcggcatggagttccaggaccacagatactggctgagaacccaccccaactgcatcgtgggcaaggagctggtgaactggctgatcagaaacggccacatcgccaccagagcccaggccatcgccatcggccaggccatggtggacggcagatggctggactgcgtgagccaccacgaccagctgttcagagacgagtacgccctgtacagacccctgcagagcaccgagttcagcgagacccccagccccgacagcgacagcgtgaacagcgtggagggccacagcgagcccagctggttcaaggacatcaagttcgacgacagcgacaccgagcagatcgccgaggagggcgacgacaacctggccaacagcgccagccccagcaagagaaccagcgtgagcagcttccagagcaccgtggacagcgacagcgccgccagcatcagcctgaacgtggagctggacaacgtgaacttccacatcaagaagcccagcaagtacccccacgtgcccccccaccccgccgaccagaagggcagaagatag

SEQ ID NO: 70233 - protein, 1263 aa, Artificial Sequence
  derived and/or modified sequence
MGDSPGRGAPERRHKAQPGRARKYEWRPEGPTSMGSLGQREDLQDEDRNSAFTWKVQANNRAYNGQFKEKVILCWQRKKYKTNVIRTAKYNFYSFLPLNLYEQFHRVSNLFFLIIIILQSIPDISTLPWFSLSTPMVCLLFIRATRDLVDDMGRHKSDRAINNRPCQILMGKSFKQKKWQDLCVGDVVCLRKDNIVPADMLLLASTEPSSLCYVETVDIDGETNLKFRQALMVTHKELATIKKMASFQGTVTCEAPNSRMHHFVGCLEWNDKKYSLDIGNLLLRGCRIRNTDTCYGLVIYADGYMFVGFDTKIMKNCGKIHLKRTKLDLLMNKLVVVIFISVVLVCLVLAFGFGFSVKEFKDHHYYLSGVHGSSVAAESFFVFWSFLILLSVTIPMSMFILSEFIYLGNSVFIDWDVQMYYKPQDVPAKARSTSLNDHLGQVEYIFSDKTGTLTQNILTFNKCCISGRVYGPDSEATTRPKENPYLWNKFADGKLLFHNAALLHLVRTNGDEAVREFWRLLAICHTVMVRESPRERPDQLLYQAASPDEGALVTAARNFGYVFLSRTQDTVTIMELGEERVYQVLAIMDFNSTRKRMSVLVRKPEGAICLYTKGADTVIFERLHRRGAMEFATEEALAAFAQETLRTLCLAYREVAEDIYEDWQQRHQEASLLLQNRAQALQQVYNEMEQDLRLLGATAIEDRLQDGVPETIKCLKKSNIKIWVLTGDKQETAVNIGFACELLSENMLILEEKEISRILETYWENSNNLLTRESLSQVKLALVINGDFLDKLLVSLRKEPRALAQNVNMDEAWQELGQSRRDFLYARRLSLLCRRFGLPLAAPPAQDSRARRSSEVLQERAFVDLASKCQAVICCRVTPKQKALIVALVKKYHQVVTLAIGDGANDINMIKTADVGVGLAGQEGMQAVQNSDFVLGQFCFLQRLLLVHGRWSYVRICKFLRYFFYKSMASMMVQVWFACYNGFTGQPLYEGWFLALFNLLYSTLPVLYIGLFEQDVSAEQSLEKPELYVVGQKDELFNYWVFVQAIAHGVTTSLVNFFMTLWISRDTAGPASFSDHQSFAVVVALSCLLSITMEVILIIKYWTALCVATILLSLGFYAIMTTTTQSFWLFRVSPTTFPFLYADLSVMSSPSILLVVLLSVSINTFPVLALRVIFPALKELRAKEEKVEEGPSEEIFTMEPLPHVHRESRARRSSYAFSHREGYANLITQGTILRRGPGVSSDIASESLDPSDEEAASSPKESQ

SEQ ID NO: 70234 - DNA, 3792 bp, Artificial Sequence
  derived and/or modified sequence
atgggcgacagccctggaagaggcgcaccagaacggaggcataaagctcaacccggtcgggccagaaagtacgagtggcggccagagggcccaacttcaatggggagcctcgggcaacgagaggacctccaggatgaggatcgaaacagtgcattcacatggaaagttcaggccaacaaccgggcgtataatggccagtttaaggagaaagtgattttatgttggcagcgaaagaagtacaagacgaacgtcattaggacagctaaatacaacttttatagtttccttccgctgaatctttatgagcagttccacagagtcagcaatcttttttttctgatcataatcatcctgcagtccatccctgacatttctactttgccatggtttagcttatctacacctatggtgtgtctgttattcatccgtgcgacgcgggacctggtggacgacatgggtagacacaaatcagaccgtgctataaacaacagaccctgtcagatcctgatgggaaaaagcttcaaacaaaaaaagtggcaagatctgtgtgtgggcgacgttgtgtgcctccgcaaggataacatcgtcccagccgatatgctcctgttggcctcaacagaaccttcatccctttgctacgtcgagacagtcgatatcgatggcgaaaccaacttgaagttcaggcaggcgctcatggtgactcataaagagctggcaactataaaaaaaatggcatccttccaaggaaccgttacttgcgaagcacccaatagccgtatgcaccactttgtcggctgtctggagtggaatgacaagaaatattctctggatatcggcaatctcttacttcgaggatgtcgcattcgcaatacagatacttgctacgggttggtcatttatgctgatggctatatgttcgttggtttcgataccaagattatgaaaaattgtggcaagatccatctgaaaaggacgaagttggatctcctcatgaacaagttagtggtggtaatttttatcagtgttgtgctggtgtgcttggtgttggccttcggtttcggctttagcgtgaaagaattcaaagaccaccactactacctgagcggcgttcacggtagtagcgtggcagctgaatctttcttcgtgttctggtctttcctcatcttgttgtcagttactatccctatgtcgatgttcatactttcagaatttatatatcttggaaactctgtattcatcgattgggatgtccagatgtactacaagccacaggacgtacctgctaaggcacgttcgacatcactcaacgatcatttaggtcaggtagagtatattttctcggataagacaggaaccctcacgcagaacattttaacctttaataaatgctgtatttctgggcgcgtatatgggccagattcagaggcgactacgagaccaaaggagaatccctatctatggaataaatttgcggacgggaaactgctgtttcacaacgccgccctcttgcacctggtccggacaaacggcgacgaagccgtgagagagttttggcggctgttagcgatctgtcacaccgtcatggtgagggagtctccccgtgagcgccctgatcagctgctgtatcaggcggcttccccagatgaaggagcactggttacggcagctcgtaattttgggtatgtgttccttagccgtactcaggacaccgtcaccatcatggaattgggcgaagagagggtgtaccaagtcctcgccattatggattttaattcgactagaaagcggatgtccgtgttggtgagaaagcctgaaggcgccatctgtctgtatactaagggtgcggacacagtgatctttgaacggttacatagacggggagccatggaattcgccacggaagaggcactcgccgcatttgctcaagaaacacttcgcacactgtgtctagcttatagagaagtcgcggaagacatctacgaggattggcagcaacggcaccaggaggccagcctgctcctgcagaatcgggctcaggcccttcagcaggtctacaatgagatggagcaggacctgagactcctgggtgccacggcaatcgaggaccgcctccaggatggagtgcctgaaacaattaagtgtttaaaaaagtctaacataaagatctgggtactcaccggtgacaaacaggaaactgctgtgaacattggctttgcctgcgaactgctgtccgaaaatatgctgattctcgaagagaaggagatcagccgtatcctagaaacctactgggaaaatagtaataacctactgacccgcgaaagcctgtctcaagtcaaattggccctggttattaacggagatttcttggacaaattactcgtatcactccgtaaagaacctcgcgctcttgctcaaaatgtaaatatggacgaggcctggcaggagctgggccagtctcgaagggacttcttgtacgctaggagattatcgcttctctgcaggcgattcggactacccctggcagccccaccggcccaagacagccgagccagacggtcatcggaagtgctgcaggagcgcgcgttcgttgacctcgcgagcaagtgccaggccgtgatttgttgtagggtcaccccaaagcagaaggcactaatcgtggccctcgtgaaaaagtaccaccaagtagtgacgcttgctatcggtgacggggccaacgacatcaatatgatcaagacagccgatgttggtgttggcttggcaggccaggagggcatgcaggcagttcaaaactccgatttcgtgctgggacagttctgcttcctgcagcgattgctcctggtccatggcaggtggagctacgtgagaatatgcaagttcctgcgctatttcttctacaaatcgatggcttctatgatggtgcaggtctggtttgcgtgctacaatggattcacaggacagccactgtatgaaggttggttcttagcactgtttaatctattgtatagcacccttccggtcttatacataggtctgtttgaacaggacgtgagcgctgaacagagccttgagaagcccgagctgtatgtcgtgggtcagaaagacgagctttttaattactgggtgttcgttcaagccatcgcgcacggggtgaccacttctctggtcaacttctttatgacactatggatcagccgcgatacagcgggtcctgcaagcttctcggaccatcaaagcttcgcagtcgtggttgccttgtcgtgcctgcttagcatcacaatggaagtgatcctgattattaaatactggaccgcgctttgcgtggccaccattctgctgtctcttggcttttatgcgataatgacgaccaccacccagagtttttggctttttcgcgtctctccaaccacctttccgttcctctatgcagacctgtcagtgatgagctccccctcaatcttgctggtggtgctattatcggtctccatcaacacctttcctgtgctggctctgagggtcatattccccgctttgaaagagctcagagccaaggaagaaaaagttgaggaaggtccatccgaagaaatctttacaatggaaccgctccctcacgtgcatcgggagtctcgtgccaggcggtcaagctacgccttctcccatcgcgaggggtacgctaatctgattactcagggtaccatccttcggcgcggtcctggcgtgagcagcgatattgctagtgaatcactggatccaagtgatgaggaggccgcgtctagccccaaagagtcccaatag

SEQ ID NO: 70235 - DNA, 3792 bp, Artificial Sequence
  derived and/or modified sequence
atgggagacagccctggccgcggggcccctgagcggcggcacaaggcccagcccggccgggccaggaaatatgagtggaggcctgagggccccacctccatgggcagcctgggccagcgggaggacctgcaggatgaggacaggaacagcgccttcacctggaaggtgcaggccaacaacagagcctacaacggccagttcaaggagaaggtgatcctgtgctggcagaggaagaagtacaagaccaacgtcatcagaacagccaagtacaacttctacagcttcctgcccctgaacctgtatgagcagttccaccgggtgagcaacctcttcttcctgatcatcatcatcctgcagagcatcccagacatcagcaccctgccctggttcagcctgagcacccccatggtgtgcctgctcttcatccgggccacccgggacctggtggatgacatgggccgccacaagagtgaccgggccatcaacaaccggccctgccagatcctgatgggcaagagcttcaagcagaagaagtggcaggacctgtgtgtgggagatgtggtgtgcctgaggaaggacaacatcgtgcctgctgacatgctgctgctggccagcacagagcccagcagcctgtgctacgtggagaccgtggacattgatggagagaccaacctgaagttccggcaggccctgatggtgacccacaaggagctggccaccatcaagaagatggccagcttccagggcaccgtgacctgtgaggcccccaacagcaggatgcaccactttgtgggctgcctggagtggaatgacaagaagtacagcctggacatcggcaacctgctgctgcggggctgccgcatccggaacacagacacctgctacggcctggtgatctatgcagatggctacatgtttgtgggctttgacaccaagatcatgaagaactgtgggaagatccacctgaagaggaccaagctggacctgctgatgaacaagctggtggtggtgatcttcatctctgtggtgctggtgtgcctggtgctggcctttggatttggcttctctgtgaaggagttcaaggaccaccactactacctgagcggcgtgcacggcagctctgtggccgctgagagcttctttgtgttctggagcttcctgatcctgctgtctgtgaccatccccatgtccatgttcatcctgtctgagttcatctacctgggcaacagcgtcttcatcgactgggatgtgcagatgtactacaagccccaggatgtgcctgccaaggcccggagcaccagcctgaatgaccacctgggccaggtggagtacatcttcagtgacaagacaggcaccctgacccagaacatcctgaccttcaacaagtgctgcatcagcggccgggtgtatggccctgacagcgaggccaccacccggcccaaggagaacccctacctgtggaacaagtttgctgatggcaagctgctcttccacaatgctgccctgctgcacctggtgaggaccaatggagatgaagctgtgcgggagttctggaggctgctggccatctgccacacagtgatggtgcgggagagcccccgggagaggccagaccagctgctgtaccaggccgccagcccagatgagggcgccctggtgacagctgccaggaactttggctacgtgttcctgagcaggacccaggacacagtgaccatcatggagctgggggaggagcgggtgtaccaggtgctggccatcatggacttcaacagcaccaggaagaggatgtctgtgctggtgaggaagccagagggcgccatctgcctgtacaccaagggagctgacaccgtcatctttgagcggctgcacagaagaggagccatggagtttgccacagaggaggccctggccgcctttgcccaggagaccctgcggaccctgtgcctggcctaccgggaggtggccgaggacatctatgaggactggcagcagaggcaccaggaggccagcctgctgctgcagaacagagcccaggccctgcagcaggtgtacaatgagatggagcaggacctgcggctgctgggcgccacagccattgaagatcggctgcaggatggagtgcctgagaccatcaagtgcctgaagaagagcaacatcaagatctgggtgctgaccggggacaagcaggagacagctgtgaacatcggctttgcctgtgagctgctgtctgagaacatgctgatcctggaggagaaggagatcagccgcatcctggagacctactgggagaacagcaacaacctgctgacccgggagagcctgagccaggtgaagctggccctggtgatcaatggagacttcctggacaagctgctggtgtccctgaggaaggagccccgggccctggcccagaatgtgaacatggatgaggcctggcaggagctgggccagagccggcgggacttcctgtatgcccggcggctgagcctgctgtgccgccgcttcggcctgcccctggccgcccccccagcccaggacagccgggcccggcgcagcagcgaggtgctgcaggagcgggcctttgtggacctggccagcaagtgccaggccgtcatctgctgccgggtgacccccaagcagaaggccctgattgtggccctggtgaagaagtaccaccaggtggtgaccctggccatcggagatggagccaatgacatcaacatgatcaagacagcagatgtgggcgtgggcctggccggccaggagggcatgcaggccgtgcagaacagcgactttgtgctgggccagttctgcttcctgcagaggctgctgctggtgcacggccgctggagctatgtgcgcatctgcaagttcctgcgctacttcttctacaagtccatggcctccatgatggtgcaggtgtggtttgcctgctacaacggcttcaccggccagcccctgtatgagggctggttcctggccctcttcaacctgctgtacagcaccctgcctgtgctgtacatcggcctgtttgagcaggatgtgtctgctgagcagagcctggagaagccagagctgtatgtggtgggccagaaggatgagctgttcaactactgggtgtttgtgcaggccatcgcccacggcgtgaccaccagcctggtgaacttcttcatgaccctgtggatcagccgggacacagctggccctgccagcttcagtgaccaccagagctttgctgtggtggtggccctgagctgcctgctgagcatcaccatggaggtgatcctgatcatcaagtactggacagccctgtgtgtggccaccatcctgctgagcctgggcttctacgccatcatgaccaccaccacccagagcttctggctgttccgggtgagccccaccaccttccccttcctgtatgctgacctgtctgtgatgagcagccccagcatcctgctggtggtgctgctgtctgtgtccatcaacaccttccctgtgctggccctgcgggtcatcttccctgccctgaaggagctgcgggccaaggaggagaaggtggaggagggccccagcgaggagatcttcaccatggagcccctgccccacgtgcaccgggagagccgggcccggcgcagcagctatgccttcagccaccgggagggctacgccaacctgatcacccagggcaccatcctgcggcggggccctggggtgtccagtgacatcgccagcgagagcctggaccccagtgatgaggaggccgccagcagccccaaggagagccagtag

SEQ ID NO: 70236 - DNA, 3792 bp, Artificial Sequence
  derived and/or modified sequence
atgggcgacagccccggccggggcgcccccgagcggcggcacaaggcccaacctggtcgagcgagaaagtacgaatggaggcctgagggccctaccagtatgggtagccttggccagcgcgaagacctgcaggacgaggatcggaatagcgccttcacctggaaagtgcaggcgaacaatcgcgcttacaatggccagttcaaggagaaggtcattctttgctggcagagaaagaaatacaaaacaaacgttatcaggacggcgaagtataatttctacagcttcctcccattgaacctctatgaacaatttcatcgggtttcaaatcttttttttctgattatcatcatcctgcaatccattcctgacatatccactttaccatggttttcccttagcaccccgatggtttgcctgctgtttatacgggcaactcgtgaccttgtggacgatatgggtaggcacaaaagtgatcgagccatcaacaaccgaccatgccagatcttgatgggtaagtcattcaagcagaaaaaatggcaggacctgtgtgttggcgacgtcgtgtgtttacgaaaagacaatattgtccccgctgacatgctgctgcttgcaagcactgagcccagttcgctctgctatgtcgagacagtggatattgacggagagaccaatctcaagttccggcaggcacttatggtcactcataaggagttggcaactatcaagaagatggcaagtttccagggcaccgtgacgtgcgaagcacccaattcacgtatgcaccatttcgtgggttgtctggaatggaacgataagaagtatagcctggatatcggaaatctcttgttacgcggctgcagaatcaggaataccgacacctgctatggattggtcatctacgccgatggatacatgtttgtcggcttcgatacaaagattatgaagaattgcggtaaaatccatctgaaaaggactaagctcgaccttctgatgaacaagctcgtggttgtgattttcatttctgtggtccttgtttgtctagtgttggcgttcggatttgggttttccgtcaaggagtttaaagaccatcactactacctgtctggagtgcatggctcatctgtggccgctgagtccttcttcgttttttggtccttcctcattctgttatcggtgactattcccatgtctatgttcatcctatctgagttcatctatctgggtaactctgtgttcattgattgggatgtccagatgtactacaaaccccaggatgtccccgcaaaggcgcgctcaaccagtctgaatgaccatctgggccaggtagagtacatcttctcagataagactggtaccttgacccagaatatcttgacattcaataaatgctgtatttccgggcgggtgtatggtccagattctgaggcaacaacccggcccaaagagaatccctatctatggaacaaattcgcagacggaaaactgcttttccataacgcagctctcttgcacttagtgcgaaccaacggtgatgaggcagtgcgcgaattttggagattgttagcgatatgtcacacagtaatggtgagagagtcaccgagggaacgacctgatcagcttctctaccaggccgcgtcacccgatgagggggcactagtgacagcggcacgtaactttgggtatgtgttcctctctcgaactcaggataccgttaccattatggaactaggcgaggagcgcgtctatcaggtgttggctattatggactttaattccacccgtaagcggatgtctgtgcttgtacgcaagcctgagggcgccatatgtctgtacacaaaaggcgcagacactgtcatcttcgagcgcttgcacaggcgcggggccatggaattcgcaactgaagaagcactcgccgcctttgcccaagagactctcaggactctgtgcctggcctatcgcgaggttgctgaggacatatacgaagattggcagcagaggcatcaagaagccagcctgctcctgcaaaatcgagctcaggcccttcagcaagtttacaacgaaatggagcaggatctgaggctcctgggagcgaccgcgatcgaggatcggttacaggatggggttccagagaccattaagtgcctcaagaaatctaacattaaaatctgggtcttgaccggggacaagcaggagacagccgtgaatattggcttcgcctgcgaactgctttcggaaaacatgttgatcttagaagagaaagagatctctaggattttagagacctattgggaaaattcgaataacctcttgacgagagagtcactgtcgcaagtgaagctggctctggtgattaacggcgatttcttggacaagctcctggtgtcactgcgtaaagaacctcgggctctggcccagaacgttaacatggacgaagcatggcaggagcttggtcagtcgaggagagacttcttatatgctcgccgactcagtctgctgtgccggcgttttggcctccctctcgcagcacctcctgcgcaggacagtcgtgctaggcgaagttctgaggtgctccaggagagggcctttgttgatctggccagcaaatgccaagccgtgatctgctgccgagtgacacccaaacagaaggctctgattgtggcactggtgaagaagtaccatcaagtagtcactctggccattggcgacggggccaatgacattaatatgattaagactgccgatgttggggtcggcttggctggccaggaagggatgcaggcagttcagaactccgactttgtcctcggacagttctgctttctccaacggctgctacttgttcatgggcggtggtcatacgtccggatctgcaaatttctgagatacttcttctataagagtatggcatccatgatggtgcaggtgtggttcgcttgctacaacggcttcacgggtcagcccctgtacgagggctggttcctggcactcttcaaccttctgtattctacactgccagtgctttacataggactattcgagcaggacgttagcgccgaacagagcctcgaaaaacccgaactgtacgtagtgggacaaaaggacgagctgtttaattattgggtattcgtccaagcaattgctcacggagtgactacaagtctcgtaaactttttcatgaccttgtggatatcccgagataccgcgggaccagcatcttttagcgatcatcagagcttcgctgttgtggtcgcactaagctgtcttctcagcataacaatggaggtcatcctgatcattaaatactggacagcactttgcgtcgctactattctcctgtctctcggcttttacgccattatgacaaccacgacacagagcttctggttgttcagagtctccccaaccacgttccctttcttgtatgctgatctctccgtgatgtctagcccctccatcttgttagtggtcctgttgagtgtgtctattaacacttttccagtgcttgctttaagagttatatttcccgccttaaaagagctcagagcgaaggaggaaaaagtggaagaggggccttccgaagaaattttcaccatggagcctttgccacatgtgcatagggagtctcgcgcccggcgcagtagctacgccttctctcaccgtgagggatatgccaatctgatcacacagggtactatcctgaggcggggccctggggtatctagcgacatagcctcagagtccctggacccctccgacgaagaagcggcatctagcccaaaggaaagccagtag

SEQ ID NO: 70237 - DNA, 3792 bp, Artificial Sequence
  derived and/or modified sequence
atgggggattcgccaggacgcggagcccctgaaagacgacacaaggcccagccaggcagagcacggaagtatgagtggcggcctgagggcccaactagcatggggagcctgggtcaacgggaagatctgcaagatgaggatcgtaatagcgctttcacatggaaagtccaggcaaataatcgagcgtacaacggccagtttaaagagaaagtgattctgtgttggcagaggaagaagtataaaacaaatgtaattaggaccgccaaatacaatttttattccttccttccgctgaacttgtacgaacaattccaccgtgtcagcaatctcttcttcctcatcatcatcatcctccagtcaattccagacatcagcacgctcccatggttctctctgtccacccctatggtgtgcctactttttataagggctacccgcgacctggtagacgatatggggcgacataagtccgacagagccattaacaatagaccatgccagatcctaatgggcaaaagctttaaacagaaaaagtggcaagacctgtgcgtgggggacgtcgtttgcctgagaaaagataatatcgtgccagctgatatgttactgctcgcctctactgagccctcttccctttgctatgtggaaactgttgatattgatggcgagactaatctcaaatttcgacaggcacttatggtgacgcacaaagagctggcaaccataaagaagatggcctcttttcaaggaaccgtcacgtgtgaggccccaaatagtcgcatgcatcacttcgtcggctgcctggaatggaacgataaaaagtacagcctcgatattggaaatcttctcctgcggggatgccggatccgcaacactgacacttgctatgggctggtgatatatgccgatggctatatgtttgtaggcttcgacacgaagataatgaagaactgcggaaaaatccatttgaagagaactaagctggaccttctaatgaacaaactcgtggtcgtgattttcatttccgtggtgttagtttgtctcgtgctcgctttcggttttggattctcagtgaaggagttcaaggatcaccattactatttatcgggggtccacggctcgagcgtggccgctgaaagcttctttgtcttctggagcttcttgattctgttgtccgtcaccatccccatgagcatgttcatcctgagcgaattcatatacctcggcaatagtgtgtttatcgattgggacgtacaaatgtattataaaccgcaggatgtgccagccaaagccaggtccacttccctgaacgatcacctgggccaggttgagtacatctttagcgacaaaacaggaacattgacacagaatattcttacatttaacaaatgctgtataagcggtagagtttacgggccagattcagaggcaactactcgccctaaagagaatccctatctctggaacaaatttgctgacgggaaactgttgttccacaatgcagccctgctacatctggtacgcactaacggcgacgaggccgtgcgcgaattctggcgcttactggcaatctgtcataccgtgatggtgcgagagtcaccacgcgaaaggcccgaccagttactgtatcaggcagcctcaccggatgaaggggctttggtcaccgcagctagaaactttggatacgtgtttctttctaggacccaggatacggtgacgatcatggaattgggggaagagcgggtgtatcaggtactagccataatggacttcaattccacaagaaagcgtatgagtgtactggtgaggaagccagagggcgcaatatgtctttacaccaaaggagcagacactgtgatctttgagaggcttcatcgtcgaggtgccatggaatttgctacagaggaagcactagctgcatttgctcaggaaaccctgaggactctctgcctcgcatacagggaggtagctgaggacatctatgaagattggcagcaaaggcaccaggaagcttcgctcctgctgcagaatagagctcaggcgctccagcaggtgtacaatgagatggagcaggatctgaggctgctcggggctactgctatagaagaccgcctccaagatggagttccagagacgatcaaatgcctgaagaaaagcaatataaagatctgggtcctgaccggagacaagcaagaaaccgcggtgaatatcgggtttgcctgtgaactactttctgagaacatgctgattctggaggaaaaggagatcagccgaatcctggaaacctattgggaaaacagcaataacctgcttactagggaaagtttgagtcaagtgaaactggccctggttataaacggcgactttctggacaaactgttggtcagtctgcggaaagaaccaagggccttagcacagaatgtgaatatggacgaggcttggcaggagttgggtcagtcaaggcgtgactttctctacgcgaggagactctcactgctgtgtagacggtttggcctgcctctggccgctcctcccgcacaggacagtagagccagacgctcttcggaggtgcttcaggagagggctttcgtggatctggccagcaaatgccaggcagtcatttgctgcagagtaacgcctaaacaaaaggccttgatcgtggccctggtgaagaagtaccaccaagttgtgacgctagcaattggggacggcgcaaatgatattaatatgatcaagacagcagatgtaggagttggcctggctgggcaggaaggaatgcaggcggtgcagaatagcgattttgtgctggggcagttctgctttcttcagcggttgctactggtgcatggccgttggagttacgtccgaatctgcaagttcctgcgctactttttttacaaaagcatggccagcatgatggtccaggtctggtttgcttgctacaatgggtttaccggtcagcccttgtacgaggggtggttcctggccttgttcaatctactgtatagcactctccccgtcctatatatcggactgtttgagcaggacgtatctgccgagcagtccttggagaaacctgagctgtatgttgttggacagaaagacgagcttttcaattactgggtctttgtgcaggccattgcacatggcgtgactacctctctggtgaacttttttatgacactgtggatcagccgcgataccgctggtcctgcctccttctctgaccatcagtcattcgcggtggtggttgctctgtcatgtctgctctctattaccatggaggtcattcttattattaaatattggactgctctatgcgtcgcaacaatcttactgtcactgggcttttacgcaattatgacgacaaccacgcaatccttctggctgttccgcgtctcccccactacattccctttcctctacgccgacctgagcgttatgagttccccttctatcttgctcgttgttttactgagtgtgagcattaacactttcccagtgttagcccttagagtcatctttcctgccctgaaggagctccgtgctaaggaggagaaggtggaggagggaccctccgaggagatctttaccatggagccccttccccacgttcatcgcgaaagccgggctaggagatcctcgtacgccttctcacaccgggagggctacgcaaaccttattacacagggcactatcctgaggcgaggtcccggagtctctagcgacatcgcctcagaatcacttgacccaagtgacgaagaggccgctagctcccctaaggaatctcagtag

SEQ ID NO: 70238 - DNA, 3792 bp, Artificial Sequence
  derived and/or modified sequence
atgggcgacagccccggcagaggcgcccccgagagaagacacaaggcccagcccggcagagccagaaagtacgagtggagacccgagggccccaccagcatgggcagcctgggccagagagaggacctgcaggacgaggacagaaacagcgccttcacctggaaggtgcaggccaacaacagagcctacaacggccagttcaaggagaaggtgatcctgtgctggcagagaaagaagtacaagaccaacgtgatcagaaccgccaagtacaacttctacagcttcctgcccctgaacctgtacgagcagttccacagagtgagcaacctgttcttcctgatcatcatcatcctgcagagcatccccgacatcagcaccctgccctggttcagcctgagcacccccatggtgtgcctgctgttcatcagagccaccagagacctggtggacgacatgggcagacacaagagcgacagagccatcaacaacagaccctgccagatcctgatgggcaagagcttcaagcagaagaagtggcaggacctgtgcgtgggcgacgtggtgtgcctgagaaaggacaacatcgtgcccgccgacatgctgctgctggccagcaccgagcccagcagcctgtgctacgtggagaccgtggacatcgacggcgagaccaacctgaagttcagacaggccctgatggtgacccacaaggagctggccaccatcaagaagatggccagcttccagggcaccgtgacctgcgaggcccccaacagcagaatgcaccacttcgtgggctgcctggagtggaacgacaagaagtacagcctggacatcggcaacctgctgctgagaggctgcagaatcagaaacaccgacacctgctacggcctggtgatctacgccgacggctacatgttcgtgggcttcgacaccaagatcatgaagaactgcggcaagatccacctgaagagaaccaagctggacctgctgatgaacaagctggtggtggtgatcttcatcagcgtggtgctggtgtgcctggtgctggccttcggcttcggcttcagcgtgaaggagttcaaggaccaccactactacctgagcggcgtgcacggcagcagcgtggccgccgagagcttcttcgtgttctggagcttcctgatcctgctgagcgtgaccatccccatgagcatgttcatcctgagcgagttcatctacctgggcaacagcgtgttcatcgactgggacgtgcagatgtactacaagccccaggacgtgcccgccaaggccagaagcaccagcctgaacgaccacctgggccaggtggagtacatcttcagcgacaagaccggcaccctgacccagaacatcctgaccttcaacaagtgctgcatcagcggcagagtgtacggccccgacagcgaggccaccaccagacccaaggagaacccctacctgtggaacaagttcgccgacggcaagctgctgttccacaacgccgccctgctgcacctggtgagaaccaacggcgacgaggccgtgagagagttctggagactgctggccatctgccacaccgtgatggtgagagagagccccagagagagacccgaccagctgctgtaccaggccgccagccccgacgagggcgccctggtgaccgccgccagaaacttcggctacgtgttcctgagcagaacccaggacaccgtgaccatcatggagctgggcgaggagagagtgtaccaggtgctggccatcatggacttcaacagcaccagaaagagaatgagcgtgctggtgagaaagcccgagggcgccatctgcctgtacaccaagggcgccgacaccgtgatcttcgagagactgcacagaagaggcgccatggagttcgccaccgaggaggccctggccgccttcgcccaggagaccctgagaaccctgtgcctggcctacagagaggtggccgaggacatctacgaggactggcagcagagacaccaggaggccagcctgctgctgcagaacagagcccaggccctgcagcaggtgtacaacgagatggagcaggacctgagactgctgggcgccaccgccatcgaggacagactgcaggacggcgtgcccgagaccatcaagtgcctgaagaagagcaacatcaagatctgggtgctgaccggcgacaagcaggagaccgccgtgaacatcggcttcgcctgcgagctgctgagcgagaacatgctgatcctggaggagaaggagatcagcagaatcctggagacctactgggagaacagcaacaacctgctgaccagagagagcctgagccaggtgaagctggccctggtgatcaacggcgacttcctggacaagctgctggtgagcctgagaaaggagcccagagccctggcccagaacgtgaacatggacgaggcctggcaggagctgggccagagcagaagagacttcctgtacgccagaagactgagcctgctgtgcagaagattcggcctgcccctggccgccccccccgcccaggacagcagagccagaagaagcagcgaggtgctgcaggagagagccttcgtggacctggccagcaagtgccaggccgtgatctgctgcagagtgacccccaagcagaaggccctgatcgtggccctggtgaagaagtaccaccaggtggtgaccctggccatcggcgacggcgccaacgacatcaacatgatcaagaccgccgacgtgggcgtgggcctggccggccaggagggcatgcaggccgtgcagaacagcgacttcgtgctgggccagttctgcttcctgcagagactgctgctggtgcacggcagatggagctacgtgagaatctgcaagttcctgagatacttcttctacaagagcatggccagcatgatggtgcaggtgtggttcgcctgctacaacggcttcaccggccagcccctgtacgagggctggttcctggccctgttcaacctgctgtacagcaccctgcccgtgctgtacatcggcctgttcgagcaggacgtgagcgccgagcagagcctggagaagcccgagctgtacgtggtgggccagaaggacgagctgttcaactactgggtgttcgtgcaggccatcgcccacggcgtgaccaccagcctggtgaacttcttcatgaccctgtggatcagcagagacaccgccggccccgccagcttcagcgaccaccagagcttcgccgtggtggtggccctgagctgcctgctgagcatcaccatggaggtgatcctgatcatcaagtactggaccgccctgtgcgtggccaccatcctgctgagcctgggcttctacgccatcatgaccaccaccacccagagcttctggctgttcagagtgagccccaccaccttccccttcctgtacgccgacctgagcgtgatgagcagccccagcatcctgctggtggtgctgctgagcgtgagcatcaacaccttccccgtgctggccctgagagtgatcttccccgccctgaaggagctgagagccaaggaggagaaggtggaggagggccccagcgaggagatcttcaccatggagcccctgccccacgtgcacagagagagcagagccagaagaagcagctacgccttcagccacagagagggctacgccaacctgatcacccagggcaccatcctgagaagaggccccggcgtgagcagcgacatcgccagcgagagcctggaccccagcgacgaggaggccgccagcagccccaaggagagccagtag

SEQ ID NO: 70239 - protein, 941 aa, Artificial Sequence
  derived and/or modified sequence
MSDAAEAPREATGENGETEMKEEEEPNPNYKEVEDPQQESKDDTIAWRESQEEERKTGEEEGEEEGKEDKKIVMEETEEKAGEVQEKEASGIQEETTVEPQEVTASMIRLETQITDSQSITSGIFPKTQRGSKSKLSLQLEDAETDELLRDLSTQIEFLDLDQISPEEQQISSPERQPSGELEEKTDRMPQDELGQERRDLEPENREEGQERRVSDIQSKAGISRESLVSSTTEDILFQKDKSTPVYPLTMTWSFGWNSSLPVYYIREERQRVLLYVCAHTAIIYNVFRNNQYHLQGHANIISCLCVSEDRRWIATADKGPDCLVIIWDSFTGIPVHTIFDSCPEGNGIMAMAMTHDAKYLATISDAEVQKVCIWKWTLAVETPACTLELPTEYGVQNYVTFNPTNNKELVSNSKTRAIYYAWYEERDTLAHSAPLLTEKTFNKLVGKFSQSIFHLNLTQILSATMEGKLVVWDIHRPPSSASTFLGFPYIKPCKLVHLQKEGITVLTTIDSYIVTGDIKGNIKFYDHTLSIVNWYSHLKLGAIRTLSFSKTPATPPTEKSNYPPDCTLKGDLFVLRNFIIGTSDAAVYHLTTDGTKLEKLFVEPKDAICAISCHPYQPLIAIGSICGMIKVWNYENKQYLFSRVFEKGLGVQSLTYNPEGALLGAGFTEGTVYILDAMSLENESPEPFKYSRTSVTHISFSHDSQYMATADRSFTVAVYMLVVRNGQRVWEYLARLRSHRKSIRSLLFGVYLDSNEPRLLSLGTDRLLIEYDLLRSYKDHLEVLDIHHTDQGCYPTCMVWYPPLTRELFLLICNSGYKVKLFNATTKMCRKTLLGPAYGSPIEQTQVLPVRSMAELQKRYLVFINRDKVGLQILPVDGNPHKTSAIVCHPNGVAGMAVSYDGCYAFTAGGHDRSVVQWKITLSHPGSQAPILSPSDTSRS

SEQ ID NO: 70240 - DNA, 2826 bp, Artificial Sequence
  derived and/or modified sequence
atgagcgacgccgccgaggcccccagagaggccaccggcgagaacggcgagaccgagatgaaggaggaggaggagcccaaccccaactacaaggaggtggaggacccccagcaggagagcaaggacgacaccatcgcctggagagagagccaggaggaggagagaaagaccggcgaggaggagggcgaggaggagggcaaggaggacaagaagatcgtgatggaggagaccgaggagaaggccggcgaggtgcaggagaaggaggccagcggcatccaggaggagaccaccgtggagccccaggaggtgaccgccagcatgatcagactggagacccagatcaccgacagccagagcatcaccagcggcatcttccccaagacccagagaggcagcaagagcaagctgagcctgcagctggaggacgccgagaccgacgagctgctgagagacctgagcacccagatcgagttcctggacctggaccagatcagccccgaggagcagcagatcagcagccccgagagacagcccagcggcgagctggaggagaagaccgacagaatgccccaggacgagctgggccaggagagaagagacctggagcccgagaacagagaggagggccaggagagaagagtgagcgacatccagagcaaggccggcatcagcagagagagcctggtgagcagcaccaccgaggacatcctgttccagaaggacaagagcacccccgtgtaccccctgaccatgacctggagcttcggctggaacagcagcctgcccgtgtactacatcagagaggagagacagagagtgctgctgtacgtgtgcgcccacaccgccatcatctacaacgtgttcagaaacaaccagtaccacctgcagggccacgccaacatcatcagctgcctgtgcgtgagcgaggacagaagatggatcgccaccgccgacaagggccccgactgcctggtgatcatctgggacagcttcaccggcatccccgtgcacaccatcttcgacagctgccccgagggcaacggcatcatggccatggccatgacccacgacgccaagtacctggccaccatcagcgacgccgaggtgcagaaggtgtgcatctggaagtggaccctggccgtggagacccccgcctgcaccctggagctgcccaccgagtacggcgtgcagaactacgtgaccttcaaccccaccaacaacaaggagctggtgagcaacagcaagaccagagccatctactacgcctggtacgaggagagagacaccctggcccacagcgcccccctgctgaccgagaagaccttcaacaagctggtgggcaagttcagccagagcatcttccacctgaacctgacccagatcctgagcgccaccatggagggcaagctggtggtgtgggacatccacagaccccccagcagcgccagcaccttcctgggcttcccctacatcaagccctgcaagctggtgcacctgcagaaggagggcatcaccgtgctgaccaccatcgacagctacatcgtgaccggcgacatcaagggcaacatcaagttctacgaccacaccctgagcatcgtgaactggtacagccacctgaagctgggcgccatcagaaccctgagcttcagcaagacccccgccaccccccccaccgagaagagcaactacccccccgactgcaccctgaagggcgacctgttcgtgctgagaaacttcatcatcggcaccagcgacgccgccgtgtaccacctgaccaccgacggcaccaagctggagaagctgttcgtggagcccaaggacgccatctgcgccatcagctgccacccctaccagcccctgatcgccatcggcagcatctgcggcatgatcaaggtgtggaactacgagaacaagcagtacctgttcagcagagtgttcgagaagggcctgggcgtgcagagcctgacctacaaccccgagggcgccctgctgggcgccggcttcaccgagggcaccgtgtacatcctggacgccatgagcctggagaacgagagccccgagcccttcaagtacagcagaaccagcgtgacccacatcagcttcagccacgacagccagtacatggccaccgccgacagaagcttcaccgtggccgtgtacatgctggtggtgagaaacggccagagagtgtgggagtacctggccagactgagaagccacagaaagagcatcagaagcctgctgttcggcgtgtacctggacagcaacgagcccagactgctgagcctgggcaccgacagactgctgatcgagtacgacctgctgagaagctacaaggaccacctggaggtgctggacatccaccacaccgaccagggctgctaccccacctgcatggtgtggtacccccccctgaccagagagctgttcctgctgatctgcaacagcggctacaaggtgaagctgttcaacgccaccaccaagatgtgcagaaagaccctgctgggccccgcctacggcagccccatcgagcagacccaggtgctgcccgtgagaagcatggccgagctgcagaagagatacctggtgttcatcaacagagacaaggtgggcctgcagatcctgcccgtggacggcaacccccacaagaccagcgccatcgtgtgccaccccaacggcgtggccggcatggccgtgagctacgacggctgctacgccttcaccgccggcggccacgacagaagcgtggtgcagtggaagatcaccctgagccaccccggcagccaggcccccatcctgagccccagcgacaccagcagaagctag

SEQ ID NO: 70241 - DNA, 2826 bp, Artificial Sequence
  derived and/or modified sequence
atgtccgacgctgccgaagctcccagagaggcaactggtgagaacggcgagacggaaatgaaggaagaagaggagcccaaccccaactataaagaggtggaggatcctcagcaggaatccaaggatgataccattgcctggcgagaaagtcaggaggaggagagaaagactggtgaggaggaaggggaggaggaaggaaaggaggacaaaaaaattgtgatggaagaaaccgaagaaaaagccggtgaagtccaggagaaggaggccagcggtatacaggaggaaacgaccgtggagccccaggaggtgactgccagtatgatacggctcgagacccagatcacagactctcagtccattacttctgggattttccccaaaacccagagaggctccaagtctaagctttctctccagctggaagatgccgagactgacgagctgttacgtgacctctccacccaaatcgagtttctggacctggatcagatctctcccgaggagcagcagattagttcccctgaaagacaaccctccggagagctggaggagaaaactgataggatgccccaggacgaactgggccaggaacggcgtgatctggagcctgaaaaccgtgaggaggggcaggaacggcgggtgtccgacattcagtcgaaggctggaatcagccgagaaagtctggtgagctccactacagaagacatcttgttccagaaggacaaatccaccccggtgtacccactcactatgacgtggagcttcggatggaattccagcctgccagtgtactatataagggaggaaagacaacgcgtgctactatatgtgtgcgcccacaccgcaattatttataacgttttcaggaataaccagtaccacctgcaaggccatgcaaacattatatcctgcctttgcgttagcgaggacaggaggtggatcgctaccgccgacaaggggcccgactgcctggtgataatttgggacagcttcactggaattcctgtgcacacaatcttcgactcttgccctgaagggaatggcatcatggctatggctatgacacacgacgctaagtatctggccaccatttccgatgctgaagtacaaaaagtatgtatttggaaatggaccctggctgtcgagacgccagcctgcaccttagagctgcctactgaatatggtgtgcagaattatgtgacatttaatcccactaacaataaagagctcgtttcaaacagtaaaactagggcaatctactacgcctggtacgaagaacgtgatacactggcgcactcagcccctctgctaacagagaagacattcaataaactggtaggtaagttttcacagtctattttccacttaaatctgacccaaatcctcagtgctaccatggaaggcaaactggtggtttgggacatccaccgacctccatcaagcgccagtactttcctgggttttccgtatattaagccatgtaagctagtacacctgcagaaagaggggatcactgtcctgacaacgattgatagctacattgtgacaggggatatcaaaggaaatatcaagttctacgatcacactctgagcatcgtgaactggtatagccatctgaagcttggagctatccggactctctctttttctaagaccccggccaccccccccacagagaagtcaaattacccaccggactgcaccctgaaaggcgatcttttcgtgctacggaattttattatcggcacttccgatgccgccgtttatcacctgacaactgatgggaccaagctggaaaagctgtttgttgagcccaaggatgccatttgcgctatcagctgccatccatatcagcccttaatcgcgatcgggtctatctgcgggatgattaaagtgtggaattatgaaaacaaacaatacctgttctccagggtgttcgaaaaggggctcggagtccagtccctaacgtacaaccccgaaggggcattgctgggagccgggtttaccgaaggcaccgtttacattcttgacgctatgtccctggagaatgagtctccagaaccgttcaagtacagccgaacatcagtgacccatatatccttcagccacgacagccagtacatggcaactgcagacagatctttcacggttgccgtgtatatgctggttgtccggaacggacagcgcgtgtgggaatacttggctagactgcgctcacacaggaagagcatccggtcattgctgtttggcgtctatctggatagcaacgaaccaagactcttgtccttgggcacagataggctattgatagagtatgatctgctgcgcagctacaaggatcatctggaggtgttagatatccatcacaccgatcagggctgctatcctacgtgcatggtgtggtatccgcctctgacgcgggagttgttcctcctgatatgtaactcaggctacaaggtgaagctatttaatgccaccactaaaatgtgtagaaagacgctgctgggtcctgcatacggctccccgattgaacagacacaagtgctccccgtcaggtccatggccgaactacaaaagagatacctggtttttattaaccgcgataaggtcgggctgcagatactgccagtcgatggcaatccccataaaacctctgctattgtttgccacccgaatggtgtggctgggatggcagtgagctatgatgggtgttatgcttttaccgccggcggccacgacaggagtgtggtgcagtggaagatcaccctgtcccaccccggctctcaggcgcctattctcagtccctctgacacctccaggtcatag

SEQ ID NO: 70242 - DNA, 2826 bp, Artificial Sequence
  derived and/or modified sequence
atgtctgatgctgctgaggccccccgggaggccaccggggagaatggagaaacagagatgaaggaggaggaggagcccaaccccaactacaaggaggtggaggacccccagcaggagagcaaggatgacaccatcgcctggagggagagccaggaggaggagaggaagacaggagaggaggagggggaggaggagggcaaggaggacaagaagatcgtgatggaggagacagaggagaaggccggggaggtgcaggagaaggaggccagcggcatccaggaggagaccaccgtggagccccaggaggtgacagcctccatgatccggctggagacccagatcacagacagccagagcatcaccagcggcatcttccccaagacccagaggggcagcaagagcaagctgagcctgcagctggaggatgctgagacagatgagctgctgcgggacctgagcacccagatcgagttcctggacctggaccagatcagccctgaggagcagcagatcagcagccctgagcggcagcccagcggggagctggaggagaagacagacaggatgccccaggatgagctgggccaggagcggcgggacctggagcctgagaaccgggaggagggccaggagcggcgggtgtctgacatccagagcaaggccggcatcagccgggagagcctggtgagcagcaccacagaggacatcctcttccagaaggacaagagcacccctgtgtaccccctgaccatgacctggagctttggctggaacagcagcctgcctgtgtactacatccgggaggagcggcagagggtgctgctgtatgtgtgtgcccacacagccatcatctacaacgtgttcaggaacaaccagtaccacctgcagggccacgccaacatcatcagctgcctgtgtgtgtctgaagatcggcgctggatcgccacagctgacaagggccctgactgcctggtgatcatctgggacagcttcaccggcatccctgtgcacaccatctttgacagctgcccagagggcaatggcatcatggccatggccatgacccatgatgccaagtacctggccaccatcagtgatgctgaggtgcagaaggtgtgcatctggaagtggaccctggccgtggagaccccagcctgcaccctggagctgcccacagaatatggagtgcagaactacgtgaccttcaaccccaccaacaacaaggagctggtgagcaacagcaagacccgggccatctactatgcctggtatgaggagcgggacaccctggcccacagcgcccccctgctgacagagaagaccttcaacaagctggtgggcaagttcagccagagcatcttccacctgaacctgacccagatcctgagcgccaccatggagggcaagctggtggtgtgggacatccaccggccccccagcagcgccagcaccttcctgggcttcccctacatcaagccctgcaagctggtgcacctgcagaaggagggcatcaccgtgctgaccaccatcgacagctacatcgtgactggagacatcaagggcaacatcaagttctatgaccacaccctgagcatcgtgaactggtacagccacctgaagctgggcgccatccgcaccctgtccttcagcaagaccccagccaccccacccacagagaagagcaactaccccccagactgcaccctgaagggggacctgtttgtgctgaggaacttcatcatcggcaccagtgatgctgctgtgtaccacctgaccacagatggcaccaagctggagaagctgtttgtggagcccaaggatgccatctgtgccatcagctgccacccctaccagcccctgattgccatcggcagcatctgtggcatgatcaaggtgtggaactatgagaacaagcagtacctgttcagccgggtgtttgagaagggcctgggcgtgcagagcctgacctacaaccctgagggcgccctgctgggcgccggcttcacagagggcaccgtgtacatcctggatgccatgagcctggagaatgaaagccctgagcccttcaagtacagcaggacctctgtgacccacatctccttcagccatgacagccagtacatggccacagctgacaggagcttcaccgtggccgtgtacatgctggtggtgagaaatggccagagggtgtgggagtacctggcccggctgcggagccacaggaagagcatccgcagcctgctgtttggagtgtacctggacagcaatgagccccggctgctgagcctgggcacagaccggctgctgattgaatatgacctgctgcggagctacaaggaccacctggaggtgctggacatccaccacacagaccagggctgctaccccacctgcatggtgtggtacccacccctgacccgggagctgttcctgctgatctgcaacagcggctacaaggtgaagctgttcaatgccaccaccaagatgtgcaggaagaccctgctgggccctgcctacggcagccccatcgagcagacccaggtgctgcctgtgcgctccatggccgagctgcagaagcgctacctggtgttcatcaacagagacaaggtgggcctgcagatcctgcctgtggatggcaacccccacaagaccagcgccatcgtgtgccaccccaacggggtggccggcatggctgtgtcctatgatggctgctacgccttcaccgctgggggccatgacagatctgtggtgcagtggaagatcaccctgagccaccctggcagccaggcccccatcctgagccccagcgacaccagccgctcctag

SEQ ID NO: 70243 - DNA, 2826 bp, Artificial Sequence
  derived and/or modified sequence
atgagcgacgccgccgaggccccccgggaggccaccggcgagaacggtgagacagagatgaaagaggaggaggaaccaaacccaaattacaaagaggtggaagacccacaacaggaaagcaaagacgataccatcgcctggcgggaatcacaggaggaagaacgtaagaccggtgaggaggaaggggaggaggagggaaaagaagacaagaagatcgttatggaggaaacagaagaaaaggccggtgaggtgcaggaaaaggaggcaagtggtatccaggaagagaccactgtggaacctcaggaggtcaccgctagcatgatccggttagagacacagatcaccgatagccagagcataaccagcggcatctttcccaaaacccagagaggaagcaagtccaagctgagcctccagctagaggatgctgagaccgatgaacttctgagggacctgagcacacagatagaattccttgatctggatcaaataagccctgaggagcagcagattagcagccccgagagacagccctctggcgagctggaggaaaagaccgataggatgccccaggacgaactcgggcaggaacgtagggatctcgagcccgagaatagagaagaaggacaagaacggcgggtatcggatattcagtcaaaggccggaataagtagagagtcactggtttcttctacaaccgaggatatactgtttcaaaaggataaatctacacctgtctatcccctgacaatgacgtggagctttggttggaactcctctcttcccgtctactacattcgcgaagagcggcagagagtactcctctatgtctgtgcacacacggcaattatctacaacgtcttcagaaataaccagtaccacttacaggggcatgccaatattatcagctgcctgtgcgtctccgaagacaggcggtggattgcaacagccgacaagggaccagattgtctggtgattatttgggactccttcacaggcatcccagtgcacactatctttgatagctgccctgaagggaatgggatcatggccatggctatgacacatgatgccaaatatctcgctactatttctgatgccgaggtacagaaggtgtgtatatggaagtggacattagcggtggagacacctgcttgtaccctcgagctgcccacggagtatggagtccaaaactatgtgaccttcaatccaacaaataacaaagagctggtttccaatagcaaaacgagagccatttactacgcatggtacgaggaaagagacaccctcgctcatagtgcaccccttctcactgagaaaactttcaataaactcgtaggtaaattctctcagagcatttttcacctgaaccttacacagatcttgtccgccactatggaaggaaagctggtggtgtgggatattcacagacccccctctagtgcttctacattcctcgggttcccttacatcaaaccatgtaaactggtgcacctccagaaagaggggatcaccgtgttgactacaatcgatagttacatcgtgaccggcgatatcaagggaaacataaaattttatgatcacactttgtcgattgtgaactggtactctcaccttaaactgggggctatacgaactctgtcattcagcaagacccccgcaacaccaccaaccgaaaagagcaactatcctcccgactgtacactgaaaggtgacctcttcgttctgcgcaatttcataatcggaaccagcgatgcggccgtctaccacctgactacggacggcactaagctggagaagctgtttgtggagcctaaggatgccatatgtgctatttcttgccatccataccagcctttgatagctatcggctcaatatgcggtatgattaaggtgtggaactacgagaacaaacagtacctgttcagtagggtgttcgagaaaggactgggtgtacagagtttaacgtacaaccccgagggagcactcctcggcgccggctttactgaaggtactgtgtacatcctcgacgctatgtcactggaaaacgagtctcccgagccctttaaatactcccgcacatccgtcacccatatttcatttagccatgatagtcagtatatggctactgctgatagatccttcactgtggccgtctacatgctggttgttagaaatggacagagggtgtgggagtatttggctcgcctaaggagtcatcgtaaatcaatcaggtctctccttttcggggtgtatctcgattcaaacgaaccccgcttattgagcctggggaccgacaggctgctgatcgagtacgacctgcttagatcctataaggaccacctcgaagttctggatattcatcacaccgaccagggttgttaccctacatgtatggtctggtacccgcctctgactcgcgagctcttcctgcttatttgcaactcaggttataaagtgaagctgtttaatgcaacaacaaagatgtgcagaaaaactctgctcgggcccgcttatggatcccctatagagcaaacgcaggtgctacccgtacgctccatggccgaactacagaagcggtacctcgtctttatcaatcgggacaaggtgggcttacagattttaccggtggatggaaatccgcataaaacaagcgctatagtttgccaccctaacggagtggcgggtatggctgttagctacgacggctgctacgcatttaccgctggcgggcatgaccgctctgtagtgcagtggaagataactctctcccatcctggttcacaggcccctattctgtctccaagtgatacctcccggtcctag

SEQ ID NO: 70244 - DNA, 2826 bp, Artificial Sequence
  derived and/or modified sequence
atgtccgatgcggcagaagcacctcgtgaggccactggcgaaaacggagaaacagagatgaaagaagaggaagagcctaacccaaactacaaggaggtcgaggacccacagcaggaatcaaaagacgataccattgcctggagggaatcacaggaggaggaacgaaaaacgggcgaagaagagggcgaagaagaaggcaaagaggataagaagatcgtgatggaggaaaccgaggaaaaggcaggcgaagtgcaggagaaggaagcctccggcatacaagaggagacaacagtggagccacaggaagttaccgcaagcatgattaggttggagacccagatcaccgacagccagagtatcacctccggcatctttcccaagacccagaggggaagcaaaagcaagctgtccctgcaactcgaggatgccgagaccgatgagctactgagggatctgtctacccagatcgagttcttggacttggaccagatcagccctgaagagcagcagattagttctcccgagaggcaaccctcaggagagctcgaggagaaaaccgacagaatgccccaggacgaactcgggcaggaaagaagagacctcgagccagagaaccgggaggaagggcaagagcgacgcgtttcagatatacagtccaaggccggtatcagtcgggagagccttgtctcttccactacagaagacatactttttcagaaggacaagtccacccccgtctatccattgaccatgacctggtcattcggatggaattcatccttgccggtttactacattagggaggaaagacagcgcgtactcctctatgtgtgtgctcatacagctataatttacaatgtattccgcaacaatcaataccatctgcaaggtcatgccaatattatttcttgtttatgcgtgtccgaggatcgtcgttggattgcaaccgcagacaagggacccgattgtcttgtaatcatatgggacagtttcactgggatcccagtccatacgatttttgactcatgtccagagggtaacggaattatggcgatggcgatgacacatgacgctaagtacctggccactatttcagacgcggaagtgcaaaaggtttgtatttggaaatggaccttagcagtggaaacaccggcttgtactctcgaacttcccactgagtacggagtgcaaaactatgtaacgtttaatcccacaaataataaggaactcgtgtcaaactccaaaacacgggcaatttactatgcttggtacgaggaacgggatacccttgcgcactctgctccactgcttactgaaaaaacatttaataaactggtcggcaaatttagtcagtcgatctttcatctcaacctgacccagatcctctccgcaacaatggagggtaagttggtggtctgggatatccaccgcccacctagctccgcttcaaccttcttaggtttcccctatatcaagccttgtaagctggtgcacctgcagaaagagggcattaccgtgttgactacaattgattcttacattgttactggagacatcaagggcaacatcaaattctacgatcacacactgagcatcgtcaactggtattcgcatttgaaacttggcgctattaggacactatctttctccaaaacacctgcaacgccacccacagagaagtcgaactacccccctgactgcacacttaaaggagatctcttcgttctgcgcaacttcattatcgggacttctgacgccgctgtataccacctcactaccgatgggactaaactggaaaaactgttcgtcgaaccaaaagacgcaatttgcgcaatcagctgtcacccttaccagcctctaattgccataggctctatctgcggtatgataaaagtctggaactacgagaacaaacagtacctgttttctcgggtgttcgagaagggactcggagtgcagtcactgacttacaatccggagggggcactcctgggcgctgggtttacagaaggcacagtctatattctggacgctatgtcactcgagaacgagtcacccgagccttttaagtattccagaacatctgtcactcacatttcctttagtcatgatagccaatatatggcgacagctgaccgttccttcacggtcgctgtatacatgctggttgtccgtaacggtcaaagagtctgggaataccttgccagattacggtcacatagaaagtctattaggtccctgctgttcggtgtctatctcgattctaatgaacctagactgttaagcctcggcacagatcggctgctgatcgagtacgatctactgcgaagttataaagatcaccttgaggttttggatatccaccataccgaccagggctgttacccaacatgtatggtgtggtacccgcctctgacaagggaactgttcttacttatttgtaactctggatacaaagtgaagctgtttaatgccactaccaagatgtgtaggaagactctgctgggcccagcctacgggagtcctattgaacaaacacaagtgcttcccgtcagatccatggcagaactccagaagcgatacctcgtgtttattaaccgggataaggtaggactgcagattctgcctgtggacggaaatccacataagacatccgccattgtgtgtcatccaaacggcgtagccggaatggccgtctcgtatgacgggtgctacgcatttactgccggaggacatgatcggagcgtcgtgcagtggaagatcaccctgagccaccccggatcccaagcccctatcttgtccccaagcgacacctcccgcagttag

SEQ ID NO: 70245 - DNA, 3420 bp, Artificial Sequence
  derived and/or modified sequence
agaactagggagctggtggagaaggtggcggccgctggaaggaggcccgggaggtggctgaggggtccaggcggcgggacgactctggccttttgaagaccggggtgggtgctctctaggaaactctacagagaagaatgtcagatgcagcagaagctccccgagaagcaacaggagaaaatggagaaacagaaatgaaagaagaggaggaacctaatccaaattataaagaagtagaagatccacaacaggaatcaaaagatgacacaatagcatggagagagtctcaggaggaggagaggaaaacgggcgaggaggaaggggaggaggaggggaaggaggacaaaaagattgtcatggaagaaactgaggaaaaggctggagaagtccaagagaaggaggcttcaggaatacaggaagaaaccacagtagagccccaagaagtcacagcgtccatgatccgtttggagacacagattactgattcccagtcaatcacatcaggaattttcccaaaaacccaaagaggtagcaagtcaaagctttccttacaattggaggatgcagaaacagatgagcttttaagagacctgagcacacaaattgaatttcttgatttggatcaaatcagtcctgaggaacaacagattagttcccctgaaaggcagccctcaggagagcttgaggagaaaaccgaccggatgccccaagatgaactgggacaagaaagaagggacttggagccagaaaacagagaggagggacaagaaaggagagtatccgacatccagtccaaagcagggatctcccgggagtcactggtgtccagcaccacagaggacattctgtttcaaaaggataaaagcaccccggtgtatcccttgaccatgacctggtcgtttggatggaacagttctcttcctgtttactatattcgagaggaaaggcagagagttcttctgtatgtttgtgctcacactgcgatcatctacaacgtgttcaggaacaatcaataccaccttcagggccacgccaatattatctcctgcctctgcgtcagtgaagacaggcggtggatcgccacagcagacaaagggccagactgcctggtgattatatgggactccttcacaggtattcctgtgcacacaatatttgacagctgccctgaagggaatggcatcatggccatggccatgacccacgacgccaagtatctggcaaccatctcagatgctgaagtccagaaggtatgcatctggaagtggactttggcagtggaaacgccagcatgcactctcgaactccccacagagtacggtgttcagaactacgttacttttaacccaacaaataataaagaattggtgagcaatagtaaaacacgggcaatatattatgcatggtatgaagagagggatacactggctcacagtgccccacttttaactgaaaaaaccttcaacaagcttgtgggaaagtttagccagtccatctttcacttgaatttaacacaaatactctcagccacaatggaagggaagctggttgtctgggacatacaccgcccaccctcatctgcctccacctttttgggctttccctatatcaagccttgtaaattggttcatttgcagaaagagggtatcacggtacttaccacaattgatagctacattgtcacaggtgacattaaggggaacattaagttctatgatcacaccctgtctattgttaactggtacagtcacttgaaactgggcgccataagaactctgtccttttcaaagaccccagcaactcctcctactgaaaaatcaaactatcctcctgactgcactttaaaaggtgacctttttgtcttaaggaattttatcattggaacatctgatgccgcggtgtaccacttaacaacagatgggaccaaacttgagaagttatttgtagagcccaaggatgccatttgtgccatctcctgccacccatatcaacccctcattgccatcgggagcatctgtgggatgatcaaagtgtggaattatgaaaacaaacaatatcttttcagcagggtttttgagaaggggcttggagtccagagtctgacctacaaccccgaaggagcccttcttggagctggctttacagaggggacagtttacattcttgatgcaatgtctttagaaaatgaaagcccagagcctttcaaatattccagaaccagtgtgactcatataagcttttcccatgactcccagtatatggcaactgctgatagaagttttactgtggctgtttacatgctggtggtcagaaatggacagagggtctgggagtacttagcaagacttcgctctcatcgcaaaagcattcgaagtctcctgtttggggtttacctggacagcaatgagcctagactgctgagccttgggacagacaggctcttgatagagtatgatcttctcaggagctacaaagaccacctggaagtcctggacattcaccacaccgaccagggctgctatcccacctgcatggtctggtacccaccactcaccagggaactcttcctgcttatttgcaacagtggctacaaagtgaagctttttaatgctactaccaaaatgtgcagaaagacgcttctggggccagcttatggttcccctattgagcagacacaagtcctcccagtgagaagcatggcggagctacagaaacgctacttggtgtttattaacagagacaaggtgggacttcagatcttaccagttgacggcaatccacataagacatctgctattgtttgccacccgaacggggtggccggcatggccgtttcctatgatggctgctacgccttcactgcgggagggcacgatcgctcggtggtgcagtggaaaatcaccttaagccatcctgggagccaggcaccaatattatccccatcagacacatcaagaagctaactccaaggggtctgatgactgcccaagcaatggaggaggcagtggagctgggattcacagccagggctttctaagtccaccccacaccttaacaaacattcattacaggaggaaaataaaggacttttgtctccaatctttgtgatatggtttggctctgtgttcctacccaaatctcatcttgaattgtactccgataattcccgtgtatggtgggagggacctggtgggagatggttggatggtgggggagcagggggtggtttcccccatgttgttctcgtggtagtgaataagtctcacaagatctgatggtttgataaggggaaacctgtttcacttggctctcattctctcttgccactgccatgtgagacgtgcctttcaccttccgccatgattgtgaggcctccccagccacatgaaactgtaacaataaacctctttcttttgtaaa

SEQ ID NO: 70246 - protein, 681 aa, Artificial Sequence
  derived and/or modified sequence
MAGFWVGTAPLVAAGRRGRWPPQQLMLSAALRTLKHVLYYSRQCLMVSRNLGSVGYDPNEKTFDKILVANRGEIACRVIRTCKKMGIKTVAIHSDVDASSVHVKMADEAVCVGPAPTSKSYLNMDAIMEAIKKTRAQAVHPGYGFLSENKEFARCLAAEDVVFIGPDTHAIQAMGDKIESKLLAKKAEVNTIPGFDGVVKDAEEAVRIAREIGYPVMIKASAGGGGKGMRIAWDDEETRDGFRLSSQEAASSFGDDRLLIEKFIDNPRHIEIQVLGDKHGNALWLNERECSIQRRNQKVVEEAPSIFLDAETRRAMGEQAVALARAVKYSSAGTVEFLVDSKKNFYFLEMNTRLQVEHPVTECITGLDLVQEMIRVAKGYPLRHKQADIRINGWAVECRVYAEDPYKSFGLPSIGRLSQYQEPLHLPGVRVDSGIQPGSDISIYYDPMISKLITYGSDRTEALKRMADALDNYVIRGVTHNIALLREVIINSRFVKGDISTKFLSDVYPDGFKGHMLTKSEKNQLLAIASSLFVAFQLRAQHFQENSRMPVIKPDIANWELSVKLHDKVHTVVASNNGSVFSVEVDGSKLNVTSTWNLASPLLSVSVDGTQRTVQCLSREAGGNMSIQFLGTVVAEGQEICVIEAMKMQNSMTAGKTGTVKSVHCQAGDTVGEGDLLVELE

SEQ ID NO: 70247 - protein, 134 aa, Artificial Sequence
  derived and/or modified sequence
  misc_feature (1)..(1): Xaa can be any naturally occurring amino acid
XMPVIKPDIANWELSVKLHDKVHTVVASNNGSVFSVEVDGSKLNVTSTWNLASPLLSVSVDGTQRTVQCLSREAGGNMSIQFLGTVVAEGQEICVIEAMKMQNSMTAGKTGTVKSVHCQAGDTVGEGDLLVELE

SEQ ID NO: 70248 - DNA, 2046 bp, Artificial Sequence
  derived and/or modified sequence
atggccgggttctgggttgggacagcgcctctggtagcagccggtagacgaggtagatggccgcctcaacaattaatgctgtccgctgccttacgaacgcttaaacacgtcctgtactatagcagacagtgtctgatggtgtcccggaacctcggttctgtgggttatgacccgaatgagaaaactttcgacaagattctggtagctaatcgcggcgaaatcgcatgcagagttatccggacctgtaagaaaatgggcattaagacggttgcaatccactccgacgtggatgcaagtagcgtgcacgtgaagatggccgacgaggccgtttgtgtgggccccgcgcctacgtctaagtcatacctgaatatggacgcgatcatggaggccataaagaaaaccagagcacaggccgtgcatcctggctatggctttctgtctgaaaataaggagtttgccaggtgccttgccgccgaagacgtcgtgttcatagggcctgacacacatgctatccaggccatgggcgacaaaatcgaaagcaaattgctcgccaagaaggcggaagtgaatactatcccaggcttcgatggcgttgtgaaggacgcagaggaagctgttcgcattgcgagagagatcggatatcccgtcatgatcaaggcaagtgctggcggcggggggaaaggtatgcgtatagcctgggatgatgaagaaacccgggatggtttccgactttcctcacaggaggctgcttcgagctttggagatgaccgccttttgatcgaaaagttcatcgacaaccccagacacatcgaaatccaggtacttggagacaaacatggtaacgcgttgtggcttaacgaacgggagtgttcgattcagcggagaaatcagaaggtggtggaagaagctccttccatattcctcgacgccgagacccgtagagccatgggcgaacaagcagtcgcactggcgagagcggtcaaatatagttcagctgggaccgttgagttcctggtggatagtaagaagaacttctacttcctcgagatgaatactcggcttcaggtcgagcatcccgtgaccgagtgcatcaccggactggatctcgtccaagaaatgatccgtgttgccaagggctatccactgcgccacaaacaagcagatatccgcatcaatgggtgggccgtagagtgtcgagtctacgccgaggatccctataagtccttcgggctgccaagtatcggacgcctgagccagtaccaggagcccctgcacctccctggcgtgcgcgttgactctgggatccagcccggatcggacatctccatctactatgaccccatgatttcgaagctcatcacatacggctcagatcggaccgaagcgctcaaaagaatggccgacgcactggacaactacgtgattcgcggcgtgacccacaacattgcactactccgagaggtgataattaactcccgctttgtgaagggtgacattagtacgaaattcttgagtgacgtttacccggatggattcaaggggcatatgctgacaaaatcagagaaaaaccagttgcttgccattgcctcttccttattcgtcgcttttcagctgagggctcagcattttcaggagaactccaggatgccagtgataaagcccgacattgccaactgggagctgtcagtcaagctccacgacaaggtccatacagtggtcgcaagcaacaatggcagtgtattctcagtagaggtggatgggtcgaagctcaatgtgacgtcaacctggaacctggccagcccgcttctgagcgtctcggttgacggtacccagcgaactgttcagtgtttgagccgtgaggctggcggtaatatgtccatccaatttcttggaactgtggttgctgaaggacaggagatctgcgtaatcgaggcaatgaagatgcagaatagcatgactgcggggaaaaccggcaccgttaaaagcgtacactgccaggcaggggatactgtaggcgagggtgacctgcttgtcgagttagaatag

SEQ ID NO: 70249 - DNA, 405 bp, Artificial Sequence
  derived and/or modified sequence
tagatgcctgtaatcaaaccggacatagcgaactgggagctctccgtgaaattgcacgataaagttcacaccgtggtcgcttccaacaacggcagtgtcttctcggttgaggtggacggatctaagctgaatgtgacctctacgtggaacctagcgagccctctactctctgtgtctgtagacggcacccagcgcactgtgcagtgcctgagtcgcgaagctggcggtaatatgtccatccaattcttggggaccgtcgtggcggaaggtcaggaaatctgtgtcatcgaggccatgaagatgcagaactcgatgactgccggaaaaacgggaacggtaaaatcagtccattgtcaggcaggggataccgtcggcgaaggagatttgctggttgaactggagtag

SEQ ID NO: 70250 - DNA, 2046 bp, Artificial Sequence
  derived and/or modified sequence
atggccggcttctgggtgggcacagcccccctggtggccgccggccggcggggccgctggccaccccagcagctgatgctgtctgctgccctgcggaccctgaagcacgtgctgtactacagccggcagtgcctgatggtgtccaggaacctgggctctgtgggctatgaccccaatgagaagacctttgacaagatcctggtggccaacagaggagagatcgcctgcagggtcatccgcacctgcaagaagatgggcatcaagacagtggccatccacagtgatgtggatgccagctctgtgcacgtgaagatggctgatgaagctgtgtgtgtgggccctgcccccaccagcaagagctacctgaacatggatgccatcatggaggccatcaagaagacccgggcccaggccgtgcaccctggctacggcttcctgtctgagaacaaggagtttgcccgctgcctggccgcagaagatgtggtgttcatcggccctgacacccacgccatccaggccatgggagacaagattgagagcaagctgctggccaagaaggccgaggtgaacaccatccctggctttgatggagtggtgaaggatgctgaggaggccgtgcgcatcgcccgggagatcggctaccctgtgatgatcaaggccagcgctgggggcggcggcaagggcatgagaattgcctgggatgatgaggagaccagagatggcttccggctgagcagccaggaggccgccagcagctttggagatgaccggctgctgattgagaagttcatcgacaaccccaggcacatcgagatccaggtgctgggggacaagcatggaaatgccctgtggctgaatgaaagagaatgttccatccagaggaggaaccagaaggtggtggaggaggcccccagcatcttcctggatgctgagacccggcgggccatgggagagcaggccgtggccctggcccgggctgtgaagtacagcagcgctggcaccgtggagttcctggtggacagcaagaagaacttctacttcctggagatgaacacccggctgcaggtggagcaccctgtgacagagtgcatcaccggcctggacctggtgcaggagatgatccgggtggccaagggctaccccctgcggcacaagcaggccgacatccgcatcaatggctgggccgtggagtgccgggtgtatgcagaggacccctacaagagctttggcctgcccagcatcggccgcctgagccagtaccaggagcccctgcacctgcccggggtgcgggtggacagcggcatccagcccggcagtgacatcagcatctactatgaccccatgatcagcaagctgatcacctacggcagtgacagaacagaggccctgaagaggatggctgatgccctggacaactacgtgatccggggcgtgacccacaacatcgccctgctgcgggaggtgatcatcaacagcagatttgtgaagggggacatcagcaccaagttcctgagtgatgtgtacccagatggcttcaagggccacatgctgaccaagtctgagaagaaccagctgctggccatcgccagcagcctgtttgtggccttccagctgcgggcccagcacttccaggagaacagcaggatgcctgtgatcaagccagacatcgccaactgggagctgtctgtgaagctgcatgacaaggtgcacacagtggtggccagcaacaatggatctgtgttttctgtggaggtggatggcagcaagctgaatgtgaccagcacctggaacctggccagccccctgctgtctgtgtctgtggatggcacccagaggacagtgcagtgcctgagccgggaggccggcggcaacatgagcatccagttcctgggcaccgtggtggccgagggccaggagatctgtgtgattgaggccatgaagatgcagaacagcatgacagctgggaagacaggaacagtgaagtctgtgcactgccaggccggggacacagtgggggagggggacctgctggtggagctggagtag

SEQ ID NO: 70251 - DNA, 405 bp, Artificial Sequence
  derived and/or modified sequence
tgaatgcctgtgatcaagccagacatcgccaactgggagctgtctgtgaagctgcatgacaaggtgcacacagtggtggccagcaacaacggcagcgtcttctctgtggaggtggatggcagcaagctgaatgtgaccagcacctggaacctggccagccccctgctgtctgtgtctgtggatggcacccagaggacagtgcagtgcctgagccgggaggccggcggcaacatgagcatccagttcctgggcaccgtggtggccgagggccaggagatctgtgtgattgaggccatgaagatgcagaacagcatgacagctgggaagacaggcaccgtgaagtctgtgcactgccaggccggggacacagtgggggagggggacctgctggtggagctggagtag

SEQ ID NO: 70252 - DNA, 2046 bp, Artificial Sequence
  derived and/or modified sequence
atggccggcttctgggtgggcaccgcccccctggtggccgccggccgcagaggccgatggccccctcagcagctcatgctctcagccgctcttcggaccctaaaacacgtcctctactattccagacagtgtctgatggtctcgaggaacctgggttcagtgggctacgaccctaatgagaagaccttcgacaagatcctggtggctaaccgtggagagatcgcatgccgtgtgatccgcacctgtaagaaaatgggcataaaaaccgtggccatacattcagatgtggacgcatcctctgtgcacgtgaagatggcagatgaggcggtgtgcgtcggcccagcacccacgtctaagagctacctgaatatggatgccatcatggaggctattaagaagacaagggcccaagcagtgcacccaggatacggcttcctgtcagagaataaagagtttgcgaggtgccttgctgctgaggatgtagtgtttattggacctgatacacacgccattcaggctatgggtgacaaaatcgaaagcaagttgctggccaagaaggctgaggttaacaccataccgggcttcgatggcgtagtgaaggatgcggaggaggctgttcgtattgctagggaaatcgggtacccggtgatgattaaagcctctgccgggggcggtggtaaagggatgagaatcgcctgggatgacgaggagacgagagacgggttccgactgagctctcaggaggctgcctcatcattcggcgacgacaggctgttaattgagaaattcatagacaacccccgccacatcgaaatccaagtgctgggtgataagcatgggaacgccctgtggctgaatgaacgtgagtgctccatccaacggaggaatcagaaagtggtcgaggaggctccaagcatcttcctcgatgctgaaacaagaagagctatgggggaacaggccgtggcacttgcccgcgccgtgaagtacagttccgccggaacagtagaattcctggtagattctaagaaaaacttctatttcctggagatgaatacccgattgcaggtcgagcatcctgtgactgaatgtattacgggtctcgatcttgttcaagagatgattagggtagccaaaggatatcctctccggcataaacaggccgatatacggatcaatggctgggccgtcgaatgccgggtttacgccgaggatccttacaagtccttcgggctgccctccattggacgcctgagtcagtatcaggaaccactgcacctgcccggggtgagagttgacagcgggattcagcccgggtctgatattagcatttattacgacccaatgattagcaagctgatcacctatggcagtgaccggacggaggcactcaaaaggatggcagacgccttggacaactatgtgatccggggggttacgcataacattgccttgctaagggaggtaattatcaactcccgatttgtgaaaggcgacatcagcacaaaatttctgagcgatgtgtacccggatggatttaaaggacacatgctcaccaaaagtgagaagaaccagctgcttgccattgcatcatctttgtttgtggcctttcagttgcgggctcagcattttcaggagaattcccgcatgccagtgattaaacccgatatcgcgaattgggagcttagcgtcaagctccacgataaagtccatacagttgtggcgtcgaacaacggttctgtgtttagcgtggaagttgatgggtcaaaactcaatgtaacctctacctggaatctggcttcccccctgcttagtgtaagtgtggatggaactcaaagaaccgtccagtgtctttctcgtgaggcaggaggcaatatgtctattcagttcttgggtactgtcgtagcagagggccaggagatttgtgtgatagaagcaatgaagatgcagaatagcatgacagccgggaaaactggaactgttaagagcgttcactgccaagctggggatactgtcggcgaaggggatctgctcgtcgagttggaatag

SEQ ID NO: 70253 - DNA, 405 bp, Artificial Sequence
  derived and/or modified sequence
tgaatgcccgtgatcaagcccgacatcgccaactgggagctgagcgtgaagctccacgacaaagttcataccgttgttgcttcaaacaatggctcagtgttctccgtcgaagtggacggcagcaagttaaacgttacctcaacctggaacctggccagcccactgttgtccgtgtcggttgacggcacccagcgtacagtgcaatgccttagcagggaagcagggggaaacatgtctatacaattcctaggtacagtggttgccgagggccaagaaatttgtgtgattgaagcaatgaagatgcagaactccatgaccgccgggaaaacaggaaccgtgaagagcgtgcactgccaggctggcgacacagtgggcgagggcgatctgctcgtcgaactggagtag

SEQ ID NO: 70254 - DNA, 2046 bp, Artificial Sequence
  derived and/or modified sequence
atggccggtttttgggtaggaacagcccctctcgtggccgctggcaggcgtggtcgctggcctccacaacagctgatgttgagcgcagctctacggaccctgaagcatgtgctgtactacagtcgccagtgcctgatggtaagccggaacctggggtcggtgggttatgaccctaatgaaaaaacgtttgataagattcttgtcgccaacaggggcgaaatcgcctgccgcgtcataaggacctgcaaaaagatgggcataaagactgtagccatccacagtgacgtggacgcttcctccgtgcatgtgaagatggccgatgaagccgtgtgcgtcggtcccgctcctacctctaaaagttatctcaatatggatgcaatcatggaagcaattaaaaaaactagggctcaggcagtgcaccctggctatggcttcctgagcgagaacaaagagtttgctagatgcctcgccgctgaggatgtggtgttcatcggcccagacactcacgccatccaggccatgggggacaagatcgaatcgaagcttctggccaagaaagcagaagtgaacaccatcccaggctttgatggggtagtgaaggacgcagaagaagcagtccgaattgctcgggaaatcggatatcctgtgatgatcaaagcttccgcgggaggagggggtaaaggcatgcgcattgcctgggacgacgaggagacgcgggatggatttcgactgtcctctcaggaggcagcgtcttccttcggagatgacaggctccttatcgagaagttcatcgataatcccagacacatagaaatacaggtactgggggataagcatgggaatgccctttggttaaatgagagggaatgcagcattcagaggcggaatcagaaggtggttgaggaggctccatctatcttcctggacgctgaaacccgccgtgccatgggcgaacaggctgttgccctggctcgtgccgtgaaatatagttcagctggtacggtagaattcctggtggactctaaaaagaacttttactttcttgaaatgaacacaaggctgcaggtggagcatcccgtcaccgaatgtataactggtttagacctcgtgcaggaaatgattagagtcgcgaaagggtatccgttgagacacaaacaagcagatattaggataaacggatgggccgtggaatgcagagtctatgctgaagacccctataagagcttcgggcttccaagcattggcagactgtcacagtaccaggaacccttgcatctgcctggggtacgggtagattcagggatccagcctggctctgatatctctatttattatgaccccatgattagcaaactgatcacttatggctcggacagaaccgaagcgttgaaaagaatggcagatgccctcgataactatgtcatccgcggtgttacccacaacatagcactactgcgtgaggtgataattaattctcgcttcgtcaaaggcgacatctcgactaagttcctgtccgatgtctatcctgacggattcaagggacacatgttaaccaaaagcgaaaagaatcaacttctggccatcgcctcctctttgtttgtggccttccagttgcgtgcacagcacttccaggagaattcccgcatgcccgttatcaagcctgatattgctaattgggagttgtccgtcaaactgcatgacaaagttcatacagtggtagcctcaaacaacggtagtgtgttcagtgtagaagtggacgggtcgaagcttaatgtcacatctacttggaatctggctagcccccttctcagcgttagtgtggatgggacgcaacgcacggtgcaatgcctcagccgcgaagcaggcggaaatatgtccatacagttcttaggaactgtggtggctgaggggcaggaaatttgcgttatcgaggccatgaagatgcagaactccatgaccgcagggaagacagggactgtcaaatccgtccattgccaagccggagataccgtaggtgagggcgacctgcttgtggagctggagtag

SEQ ID NO: 70255 - DNA, 405 bp, Artificial Sequence
  derived and/or modified sequence
tagatgcccgtcattaagcctgatattgccaactgggagctttctgtgaaactgcatgataaggttcacacagttgttgcctccaataacggctccgtgttttctgtggaagttgatggttctaagcttaacgtcacttcaacctggaatttggcatctcccctcctcagcgtctccgtggacggcacacagagaacggtgcagtgtctgtcacgggaggccggagggaatatgtccatccagttcctaggaacagtggtggctgagggacaggagatttgcgtgattgaagctatgaagatgcagaatagtatgacagctgggaaaaccggaaccgtcaaaagcgtgcactgccaagcaggggacacagtgggagaaggcgatctcctggtggagctggaatag

SEQ ID NO: 70256 - DNA, 2418 bp, Artificial Sequence
  derived and/or modified sequence
ggcatcgggtttctggctcgtgatttgccggagctcctgcgctccccttctccaccccctccggctgtgtgagaggtcagcagaggggcggtctgcggggacaacaatggcggggttctgggtcgggacagcaccgctggtcgctgccggacggcgtgggcggtggccgccgcagcagctgatgctgagcgcggcgctgcggaccctgaagcatgttctgtactattcaagacagtgcttaatggtgtcccgtaatcttggttcagtgggatatgatcctaatgaaaaaacttttgataaaattcttgttgctaatagaggagaaattgcatgtcgggttattagaacttgcaagaagatgggcattaagacagttgccatccacagtgatgttgatgctagttctgttcatgtgaaaatggcggatgaggctgtctgtgttggcccagctcccaccagtaaaagctacctcaacatggatgccatcatggaagccattaagaaaaccagggcccaagctgtacatccaggttatggattcctttcagaaaacaaagaatttgccagatgtttggcagcagaagatgtcgttttcattggacctgacacacatgctattcaagccatgggcgacaagattgaaagcaaattattagctaagaaagcagaggttaatacaatccctggctttgatggagtagtcaaggatgcagaagaagctgtcagaattgcaagggaaattggctaccctgtcatgatcaaggcctcagcaggtggtggtgggaaaggcatgcgcattgcttgggatgatgaagagaccagggatggttttagattgtcatctcaagaagctgcttctagttttggcgatgatagactactaatagaaaaatttattgataatcctcgtcatatagaaatccaggttctaggtgataaacatgggaatgctttatggcttaatgaaagagagtgctcaattcagagaagaaatcagaaggtggtggaggaagcaccaagcatttttttggatgcggagactcgaagagcgatgggagaacaagctgtagctcttgccagagcagtaaaatattcctctgctgggaccgtggagttccttgtggactctaagaagaatttttatttcttggaaatgaatacaagactccaggttgagcatcctgtcacagaatgcattactggcctggacctagtccaggaaatgatccgtgttgctaagggctaccctctcaggcacaaacaagctgatattcgcatcaacggctgggcagttgaatgtcgggtttatgctgaggacccctacaagtcttttggtttaccatctattgggagattgtctcagtaccaagaaccgttacatctacctggtgtccgagtggacagtggcatccaaccaggaagtgatattagcatttattatgatcctatgatttcaaaactaatcacatatggctctgatagaactgaggcactgaagagaatggcagatgcactggataactatgttattcgaggtgttacacataatattgcattacttcgagaggtgataatcaactcacgctttgtaaaaggagacatcagcactaaatttctctccgatgtgtatcctgatggcttcaaaggacacatgctaaccaagagtgagaagaaccagttattggcaatagcatcatcattgtttgtggcattccagttaagagcacaacattttcaagaaaattcaagaatgcctgttattaaaccagacatagccaactgggagctctcagtaaaattgcatgataaagttcataccgtagtagcatcaaacaatgggtcagtgttctcggtggaagttgatgggtcgaaactaaatgtgaccagcacgtggaacctggcttcgcccttattgtctgtcagcgttgatggcactcagaggactgtccagtgtctttctcgagaagcaggtggaaacatgagcattcagtttcttggtacagtggtagcagaaggtcaagaaatttgtgtgattgaagccatgaaaatgcagaatagtatgacagctgggaaaactggcacggtgaaatctgtgcactgtcaagctggagacacagttggagaaggggatctgctcgtggagctggaatgaaggatttataacctttcagtcatcacccaatttaattagccatttgcatgatgctttcacacacaattgattcaagcattatacaggaacacccctgtgcagctacgtttacgtcgtcatttattccacagagtcaagaccaatattctgccaaaaaatcaccaatggaaattttcattgatataaatacttgtacatatgatttgtacttctgctgtgagattccctagtgtcaaaattaaatcaataaaactgagcatttgtct

SEQ ID NO: 70257 - DNA, 669 bp, Artificial Sequence
  derived and/or modified sequence
aatgcctgttattaaaccagacatagccaactgggagctctcagtaaaattgcatgataaagttcataccgtagtagcatcaaacaatgggtcagtgttctcggtggaagttgatgggtcgaaactaaatgtgaccagcacgtggaacctggcttcgcccttattgtctgtcagcgttgatggcactcagaggactgtccagtgtctttctcgagaagcaggtggaaacatgagcattcagtttcttggtacagtggtagcagaaggtcaagaaatttgtgtgattgaagccatgaaaatgcagaatagtatgacagctgggaaaactggcacggtgaaatctgtgcactgtcaagctggagacacagttggagaaggggatctgctcgtggagctggaatgaaggatttataacctttcagtcatcacccaatttaattagccatttgcatgatgctttcacacacaattgattcaagcattatacaggaacacccctgtgcagctacgtttacgtcgtcatttattccacagagtcaagaccaatattctgccaaaaaatcaccaatggaaattttcattgatataaatacttgtacatatgatttgtacttctgctgtgagattccctagtgtcaaaattaaatcaataaaactgagcatttgtct

SEQ ID NO: 70258 - DNA, 2046 bp, Artificial Sequence
  derived and/or modified sequence
atggcaggcttttgggtggggacggcaccgctggtagcggccggccgtaggggcaggtggcctcctcagcagttgatgctgtctgcggcactccggaccctaaagcatgtcttatactactccagacaatgcctcatggtgtcacgaaacctgggctccgttggatacgaccccaatgaaaagacgtttgataaaatattggtggcaaaccgaggggaaatcgcgtgccgagtgatccgaacttgtaaaaagatggggatcaagacagtcgcaatccactccgacgtggacgcctcatcagtgcacgtaaagatggcggacgaagccgtgtgcgtgggacctgcccctacatcgaaatcttatttaaatatggatgcaatcatggaagctatcaagaagacgcgcgctcaggccgttcatcccggatacggtttcctctccgagaacaaagaatttgcccgatgcctggccgccgaagatgttgtatttattggccccgatacacatgccatacaggccatgggtgataagatcgagtcgaagctgctggccaaaaaggccgaggtaaacaccattccaggttttgatggagtcgttaaagatgctgaggaagctgtgcggattgcccgagagattgggtatccagtgatgataaaggcctcagccggggggggggggaaagggatgaggattgcttgggacgacgaagagactagagatggcttccgcctgtcctctcaggaggccgcctcttcatttggtgacgaccgcctgctgatcgagaagttcattgacaaccctcgccacattgagatccaggtgctaggcgataagcacgggaacgctctttggctaaatgaacgcgagtgctctatccagcgtcggaatcagaaagtcgtggaagaggcgccaagtatattcctggacgcagaaactagaagggctatgggcgagcaggctgtcgcactggcgagagccgtcaaatacagctccgctgggactgtcgaattcctcgtggattcaaaaaaaaacttttacttcctggagatgaacacaaggcttcaggtcgaacatccggttactgagtgcattaccggactggatctagttcaggagatgattcgcgttgcgaagggttacccactgagacataaacaggccgacatccgaattaatgggtgggctgtcgaatgtagagtctatgccgaagacccatataagtcgtttggcttaccatctatcggcaggcttagtcagtaccaagaacccctacacctcccaggcgtgcgggttgattcgggcatccagccgggatcagatatcagcatttactacgacccgatgatttcgaagctaataacctacggaagcgacaggactgaggcgctcaaaagaatggcagatgcgcttgacaattatgtcatccgaggtgttacccacaacatcgcactgctaagggaggtcataattaactctagattcgtcaagggagacatctcaaccaagttcctgtcggatgtgtatccggatgggttcaaaggacatatgctgacaaaatcggaaaaaaatcaactgctggcaattgcctcctctctgtttgtggcttttcaactccgagcccagcacttccaggaaaatagtagaatgcccgttatcaaaccagatatcgctaactgggagctctccgtcaaactgcacgacaaggttcacacagtcgttgctagtaataatgggtctgtattctcagttgaagtagatggctcaaagctgaacgtcacaagcacctggaatctcgcaagtccacttttgtccgtctcagtcgatggtacccagcgtacagtccaatgcttgagcagggaagccggaggaaatatgtctattcagttccttggtaccgtggtagccgaagggcaggagatctgcgtaatcgaggctatgaagatgcagaatagcatgacagctggaaaaacagggactgttaagtcggtacactgccaggcgggtgatacagttggagaaggcgacctcctagttgaattggagtag

SEQ ID NO: 70259 - DNA, 405 bp, Artificial Sequence
  derived and/or modified sequence
taaatgcctgtgatcaagcctgacattgcgaactgggagctctccgtaaagctgcatgacaaagtgcatacagttgtagcctcaaacaacgggtctgttttctccgtcgaagtggatggatccaaactgaacgtcactagcacttggaatctcgccagcccgttattaagcgtttccgtcgacggcacccagcgcacagtgcagtgcctgagcagagaagcagggggaaacatgtccatacaattcctgggaactgtggtagccgaaggccaagaaatttgtgtgatcgaagcaatgaagatgcagaactccatgaccgcagggaagaccgggactgtgaaatcagtgcattgtcaggccggcgatacagtcggtgaaggagacctgctggtggaactcgagtag

SEQ ID NO: 70260 - DNA, 2046 bp, Artificial Sequence
  derived and/or modified sequence
atggcaggcttctgggttggtacagcacccctagtggccgcaggtagacgcgggaggtggcctcctcagcaactcatgctatctgcagctctccggacactgaagcatgtactgtactacagccgacagtgcctgatggtttctcggaacctcggcagtgtggggtacgatccaaatgagaagacctttgataagatcctggtggccaatcgaggtgagattgcctgtagagtgattagaacatgcaagaagatgggaattaaaacggtggctattcacagcgacgttgacgcttctagcgtgcacgtaaagatggcggacgaagccgtgtgcgtgggacctgcccctacatcgaaatcttatttaaatatggatgcaatcatggaagctatcaagaagacgcgcgctcaggccgttcatcccggatacggtttcctctccgagaacaaagaatttgcccgatgcctggccgccgaagatgttgtatttattggccccgatacacatgccatacaggccatgggtgataagatcgagtcgaagctgctggccaaaaaggccgaggtaaacaccattccaggttttgatggagtcgttaaagacgccgaggaggcagtgagaattgctcgggagattggctaccctgtcatgattaaggccagcgccggcgggggggggaagggcatgcgtatagcttgggatgacgaggaaacacgtgacgggtttaggctgagttcacaggaagccgcatcctctttcggggacgaccggctgctgattgagaaatttatagacaaccccagacacatcgagattcaggtactcggggataaacatggcaatgcgttgtggttaaatgagagggaatgtagtatacagaggaggaaccagaaggtagtggaggaggctcctagcatattccttgatgccgaaacccgcagagcgatgggcgaacaggcagtggccctcgcacgcgctgtcaagtattcatctgctggtaccgtcgagttccttgtagacagcaaaaaaaacttttatttcctagagatgaacacaaggctgcaagtggaacatccagtcaccgaatgcattaccgggctcgacctggtacaagagatgatccgtgtcgcgaaaggatatcccctgaggcataagcaagctgacatcagaattaatggctgggccgtggagtgccgagtctatgctgaggatccttataagagtttcggacttccttccattggacgactgtcccagtaccaggagccacttcatttgcctggtgtccgggtcgactcggggattcagcccggctccgacatctcaatttactatgaccctatgatatcaaaactaatcacttatgggagcgataggaccgaagccctgaaaagaatggctgacgcattagataattatgtgattcggggcgtgacacataacattgcactgctgagagaggtcattataaatagtcgtttcgtcaagggcgacatctccaccaaattcttgagcgatgtgtacccagacggattcaaagggcacatgcttacaaaatcagagaagaatcagctccttgccattgctagcagcctcttcgtggcttttcagcttagagctcagcactttcaagaaaattccagaatgcctgttataaagccggatatcgccaattgggaactgagtgtcaagttacatgacaaggtgcataccgtagtagcctcaaacaacggaagtgtgttcagcgtggaagtggatggcagcaaattgaatgtcacttcaacatggaatttagcctcccctcttctgtccgtgagcgttgatggcacacagcgaacggttcaatgtttatcgcgagaagccggtggcaatatgagcatccaattcttggggaccgtggtggcggaggggcaggaaatctgtgtgatcgaggctatgaagatgcagaactctatgacagccgggaaaacaggaactgtaaagtcggtccactgccaggctggtgataccgtaggagagggcgacttgctagtggagctggaatag

SEQ ID NO: 70261 - DNA, 405 bp, Artificial Sequence
  derived and/or modified sequence
tagatgccagtgataaagccagacattgctaactgggaattatcggttaaattacacgacaaggtccacacagtggtggcatctaataatggatctgtcttctccgtcgaagtggatggctccaaacttaatgtgacaagtacttggaacctcgcctcacctctactcagtgtgtcagtggatggaactcagagaacagtccagtgcctgtctagggaggccggagggaatatgagtattcagttcctcggcacagtggtcgccgaaggtcaagaaatttgcgtaattgaagcaatgaagatgcaaaactccatgaccgcaggcaagaccggaacagttaaaagtgtgcattgccaggccggagacacagtcggggaaggagatttactcgtagagcttgaatag

SEQ ID NO: 70262 - DNA, 2046 bp, Artificial Sequence
  derived and/or modified sequence
atggccggcttctgggtgggcaccgcccccctggtggccgccggcagaagaggcagatggcccccccagcagctgatgctgagcgccgccctgagaaccctgaagcacgtgctgtactacagcagacagtgcctgatggtgagcagaaacctgggcagcgtgggctacgaccccaacgagaagaccttcgacaagatcctggtggccaacagaggcgagatcgcctgcagagtgatcagaacctgcaagaagatgggcatcaagaccgtggccatccacagcgacgtggacgccagcagcgtgcacgtgaagatggccgacgaggccgtgtgcgtgggccccgcccccaccagcaagagctacctgaacatggacgccatcatggaggccatcaagaagaccagagcccaggccgtgcaccccggctacggcttcctgagcgagaacaaggagttcgccagatgcctggccgccgaggacgtggtgttcatcggccccgacacccacgccatccaggccatgggcgacaagatcgagagcaagctgctggccaagaaggccgaggtgaacaccatccccggcttcgacggcgtggtgaaggacgccgaggaggccgtgagaatcgccagagagatcggctaccccgtgatgatcaaggccagcgccggcggcggcggcaagggcatgagaatcgcctgggacgacgaggagaccagagacggcttcagactgagcagccaggaggccgccagcagcttcggcgacgacagactgctgatcgagaagttcatcgacaaccccagacacatcgagatccaggtgctgggcgacaagcacggcaacgccctgtggctgaacgagagagagtgcagcatccagagaagaaaccagaaggtggtggaggaggcccccagcatcttcctggacgccgagaccagaagagccatgggcgagcaggccgtggccctggccagagccgtgaagtacagcagcgccggcaccgtggagttcctggtggacagcaagaagaacttctacttcctggagatgaacaccagactgcaggtggagcaccccgtgaccgagtgcatcaccggcctggacctggtgcaggagatgatcagagtggccaagggctaccccctgagacacaagcaggccgacatcagaatcaacggctgggccgtggagtgcagagtgtacgccgaggacccctacaagagcttcggcctgcccagcatcggcagactgagccagtaccaggagcccctgcacctgcccggcgtgagagtggacagcggcatccagcccggcagcgacatcagcatctactacgaccccatgatcagcaagctgatcacctacggcagcgacagaaccgaggccctgaagagaatggccgacgccctggacaactacgtgatcagaggcgtgacccacaacatcgccctgctgagagaggtgatcatcaacagcagattcgtgaagggcgacatcagcaccaagttcctgagcgacgtgtaccccgacggcttcaagggccacatgctgaccaagagcgagaagaaccagctgctggccatcgccagcagcctgttcgtggccttccagctgagagcccagcacttccaggagaacagcagaatgcccgtgatcaagcccgacatcgccaactgggagctgagcgtgaagctgcacgacaaggtgcacaccgtggtggccagcaacaacggcagcgtgttcagcgtggaggtggacggcagcaagctgaacgtgaccagcacctggaacctggccagccccctgctgagcgtgagcgtggacggcacccagagaaccgtgcagtgcctgagcagagaggccggcggcaacatgagcatccagttcctgggcaccgtggtggccgagggccaggagatctgcgtgatcgaggccatgaagatgcagaacagcatgaccgccggcaagaccggcaccgtgaagagcgtgcactgccaggccggcgacaccgtgggcgagggcgacctgctggtggagctggagtag

SEQ ID NO: 70263 - DNA, 405 bp, Artificial Sequence
  derived and/or modified sequence
tgaatgcccgtgatcaagcccgacatcgccaactgggagctgagcgtgaagctgcacgacaaggtgcacaccgtggtggccagcaacaacggcagcgtgttcagcgtggaggtggacggcagcaagctgaacgtgaccagcacctggaacctggccagccccctgctgagcgtgagcgtggacggcacccagagaaccgtgcagtgcctgagcagagaggccggcggcaacatgagcatccagttcctgggcaccgtggtggccgagggccaggagatctgcgtgatcgaggccatgaagatgcagaacagcatgaccgccggcaagaccggcaccgtgaagagcgtgcactgccaggccggcgacaccgtgggcgagggcgacctgctggtggagctggagtag

SEQ ID NO: 70264 - protein, 299 aa, Artificial Sequence
  derived and/or modified sequence
MAPAGRPGAKKGILERLESGEVVIGDGSFLITLEKRGYVKAGLWTPEAVIEHPDAVRQLHMEFLRAGSNVMQTFTFSASEDNMESKYFEHVEEAVWAVEVLKESDRPVAVTMCIGPEGDMHDITPGECAVRLVKAGASIVGVNCRFGPDTSLKTMELMKEGLEWAGLKAHLMVQPLGFHAPDCGKEGFVDLPEYPFGLESRVATRWDIQKYAREAYNLGVRYIGGCCGFEPYHIRAIAEELAPERGFLPPASEKHGSWGSGLDMHTKPWIRARARREYWENLLPASGRPFCPSLSKPDF

SEQ ID NO: 70265 - DNA, 900 bp, Artificial Sequence
  derived and/or modified sequence
atggctccggctggccggcccggtgctaagaaggggatcctggagaggttggaatcgggagaggttgtgattggcgatggatcgttcttgatcaccctggagaagcggggctatgtgaaagcaggcctgtggacgcctgaagcagttatcgagcaccctgacgcagtgcgccagctgcatatggagttcctcagggctggctccaatgttatgcaaactttcactttttcggcttcggaggacaatatggagagcaagtatttcgagcacgtggaggaagccgtatgggcggtggaagtactgaaagaatccgatagacccgtggccgtgaccatgtgtatcgggcccgagggcgatatgcatgacatcactcctggagaatgtgccgtgcggctggtgaaggccggtgcctcaattgtcggcgtgaactgcaggtttggcccagatacaagcctgaagaccatggagctgatgaaagagggcctggagtgggcaggtttaaaagcacatctcatggttcagccgcttggcttccacgcccctgattgtggcaaggagggctttgtagacttgcctgagtaccctttcggtctggagtctcgagtggcaacaagatgggatatccagaaatatgctcgggaggcctacaatttaggggtgcgctatatcggaggatgttgcggatttgagccttaccatattcgtgcaatcgccgaggaactggcacccgagcgtgggttcctgcctccagcttcagagaaacacggttcctggggctccggccttgacatgcataccaagccatggataagagcaagagctagacgggaatattgggagaatttgctgcctgcttcaggcagacccttttgcccatccctgtctaaacctgacttctag

SEQ ID NO: 70266 - DNA, 900 bp, Artificial Sequence
  derived and/or modified sequence
atggccccagctggccggcctggggccaagaagggcatcctggagcggctggagagcggggaggtggtgattggagatggcagcttcctgatcaccctggagaagaggggctacgtgaaggccggcctgtggaccccagaggccgtcatcgagcacccagatgctgtgcggcagctgcacatggagttcctgcgggccggcagcaatgtgatgcagaccttcaccttcagcgccagcgaggacaacatggagagcaagtactttgagcacgtggaggaggccgtgtgggccgtggaggtgctgaaggagagtgacaggcctgtggccgtgaccatgtgcatcggccctgagggggacatgcatgacatcaccccaggagaatgtgctgtgcggctggtgaaggccggggccagcatcgtgggcgtgaactgccgcttcggccctgacaccagcctgaagaccatggagctgatgaaggagggcctggagtgggccggcctgaaggcccacctgatggtgcagcccctgggcttccacgccccagactgtgggaaggagggctttgtggacctgcctgagtaccccttcggcctggagagccgggtggccacccgctgggacatccagaagtatgcccgggaggcctacaacctgggcgtgcgctacatcggcggctgctgcggctttgagccctaccacatccgggccatcgccgaggagctggcccctgagcggggcttcctgcccccagccagcgagaagcacggctcctggggcagcggcctggacatgcacaccaagccctggatccgggcccgggcccggcgggagtactgggagaacctgctgcctgccagcggccggcccttctgccccagcctgagcaagccagacttctag

SEQ ID NO: 70267 - DNA, 900 bp, Artificial Sequence
  derived and/or modified sequence
atggcccccgccggccggcccggcgccaagaagggcatcctggagaggctcgagtcaggggaggtcgtaatcggcgatggctcattcttaattaccctcgagaaacggggctacgttaaggctgggctgtggactcctgaagccgtgattgaacaccctgatgccgtgaggcagttgcatatggagtttctgagggccgggtccaatgtaatgcagacgttcaccttctcagcctccgaagataacatggagtctaagtactttgaacacgtcgaagaggccgtctgggccgtggaagttctaaaagagtccgatcggcccgtggcagtaacaatgtgtatcggcccagaaggagacatgcatgacattacgccaggcgagtgcgcagtcagattggtgaaggctggagctagtattgtaggagtgaattgccgcttcggtcccgatacatcgttgaagacgatggaacttatgaaagagggtttggagtgggccggcctgaaagcacacctgatggtacaaccactcgggtttcatgcgccagattgtgggaaagaagggttcgtggatcttcctgagtaccccttcggtctggaaagcagggtggctactcggtgggacatccagaaatatgcccgcgaggcctacaatttgggcgtgcgatatattggggggtgttgcggatttgagccatatcatattcgggccattgcagaggaactggcaccggagcgcggcttcctcccccctgccagcgagaaacatggcagctggggaagtggtctggatatgcacacaaagccatggattcgggcgcgcgctaggcgcgagtattgggagaatctgttgcccgcttccggtcgacctttttgtccttctctgtcaaagccagacttctag

SEQ ID NO: 70268 - DNA, 900 bp, Artificial Sequence
  derived and/or modified sequence
atggcccctgctgggagacctggagccaagaagggcatcctagaaaggttagaatcaggcgaggttgtcatcggcgacggtagcttcctcattacactggaaaagcggggttatgtaaaagctggactgtggaccccagaagccgtgattgagcacccagatgcagtgcgtcagctacacatggaatttctccgcgctgggagtaatgtgatgcaaaccttcactttttcagcttcagaggacaatatggaaagtaaatacttcgagcatgttgaggaggcagtgtgggccgtggaagtccttaaagaaagcgaccggcctgtggctgtaactatgtgcatcggtcccgagggcgatatgcacgacatcacccctggggagtgtgctgtgcgactggtgaaagcgggagccagcattgtcggggtcaactgccggttcggtcccgacacctcactcaagacgatggagctgatgaaggagggtctggagtgggccggtttaaaagctcacctgatggtgcagccactgggcttccacgctccagactgtggaaaagagggcttcgtagatctgcctgaatatcctttcggcctggagtccagagtcgcaactcgctgggacatacagaagtacgcccgtgaggcatataacctgggggtgcgctacattggtgggtgttgcgggtttgagccatatcacatcagggcaatagccgaagagctcgccccagaacgcggatttctaccacccgcatcggaaaagcacggttcctggggctccgggcttgacatgcacacaaagccatggatacgggctcgagcccgtcgggagtattgggaaaacctgctgcccgcaagtggtagacccttttgcccatctctctcgaagcctgacttttag

SEQ ID NO: 70269 - DNA, 1537 bp, Artificial Sequence
  derived and/or modified sequence
acagagccgcggcaccatggcacctgctggacgcccgggggccaagaaggggattttggagcgcctggagagtggggaggttgtgattggagatggcagctttctcattactctggagaagagaggctatgtgaaggctgggctctggactccagaggcagtgatagaacacccagacgcagttcgtcaacttcacatggaattcttgagagcaggatcaaatgtcatgcagacttttaccttttctgccagtgaggacaatatggaaagcaagtattttgagcacgttgaagaagctgtgtgggctgtggaagtcttaaaagaatcagatagacccgtggcagttaccatgtgcataggcccagagggagacatgcatgatataacccccggagaatgtgctgtgaggctggtgaaggcaggggcttccatcgttggcgtgaactgccgctttgggcccgacaccagcttgaagacgatggagctcatgaaggagggtcttgagtgggcagggctgaaagcgcacctcatggtgcagcctctggggttccacgcgcctgactgtggcaaagaggggtttgtggatctcccagaatatccctttggactggagtccagagttgccaccagatgggatattcaaaaatacgccagagaggcctacaacctgggggtcaggtacattggcgggtgctgtggatttgagccctaccacatcagggcaattgcagaggagctggccccagaaaggggctttttgccaccagcttcagaaaaacacggcagctggggaagtggtttggacatgcacaccaaaccctggattagagcaagggctcgaagggagtattgggagaatctgctgccagcttcaggcagacctttctgtccttcgctgtcaaagccagacttctaaggagtagtgaaagaaaaccctgaaataatcgaacaggaaaaagttgccctcaagcctgacctggaaccgttcctcaccttcatcctcaccatgccctgctatctccagctgctgagcagctgaggtgctgcagccccttcccttccagcccacaagtgtgtgcatattgagctcctgctgtggttaagcactgcaacagactctaccagagatgcaaagagaagcgagagaggcaccttgttctccaagaacttactgtccaatcatgctgtggtgcattcctttgaagatcatgaagaatagccaaacttgtctttgagggtgaatttgacactttaaaataatcagaagtcactgagacccaaagctagtgaataattcaagtgactaagctagatacttgaggatgatagagcaacactaaactaaagcaatgagtctgctttttttaatgatttatacaatgactccaaaggcaatcccaaagaaaagatgtaaagaatgttttgagcaatggtagcattattgaaataaatgtttaactatccaaagtgattactttcaaagatgatttttacttaaagatattaggtctggccaggcgaagtgactcacacctgc

SEQ ID NO: 70270 - DNA, 900 bp, Artificial Sequence
  derived and/or modified sequence
atggcccccgccggcagacccggcgccaagaagggcatcctggagagactggagagcggcgaggtggtgatcggcgacggcagcttcctgatcaccctggagaagagaggctacgtgaaggccggcctgtggacccccgaggccgtgatcgagcaccccgacgccgtgagacagctgcacatggagttcctgagagccggcagcaacgtgatgcagaccttcaccttcagcgccagcgaggacaacatggagagcaagtacttcgagcacgtggaggaggccgtgtgggccgtggaggtgctgaaggagagcgacagacccgtggccgtgaccatgtgcatcggccccgagggcgacatgcacgacatcacccccggcgagtgcgccgtgagactggtgaaggccggcgccagcatcgtgggcgtgaactgcagattcggccccgacaccagcctgaagaccatggagctgatgaaggagggcctggagtgggccggcctgaaggcccacctgatggtgcagcccctgggcttccacgcccccgactgcggcaaggagggcttcgtggacctgcccgagtaccccttcggcctggagagcagagtggccaccagatgggacatccagaagtacgccagagaggcctacaacctgggcgtgagatacatcggcggctgctgcggcttcgagccctaccacatcagagccatcgccgaggagctggcccccgagagaggcttcctgccccccgccagcgagaagcacggcagctggggcagcggcctggacatgcacaccaagccctggatcagagccagagccagaagagagtactgggagaacctgctgcccgccagcggcagacccttctgccccagcctgagcaagcccgacttctag

SEQ ID NO: 70271 - protein, 122 aa, Artificial Sequence
  derived and/or modified sequence
MKLLTGLVFCSLVLGVSSRSFFSFLGEAFDGARDMWRAYSDMREANYIGSDKYFHARGNYDAAKRGPGGAWAAEVITDARENIQRFFGHGAEDSLADQAANEWGRSGKDPNHFRPAGLPEKY

SEQ ID NO: 70272 - DNA, 369 bp, Artificial Sequence
  derived and/or modified sequence
atgaagctcctgactggtctggtgttctgcagtcttgtgctgggggtgtcctccaggagttttttttcatttctgggggaagcttttgacggcgctcgcgacatgtggagggcatactccgatatgagggaggctaattatatcggctcagacaagtatttccacgctcgaggcaactacgatgcagctaaacgaggcccaggcggcgcctgggccgccgaagttatcacagacgctcgtgaaaacattcagcggttcttcggccatggcgccgaggattccttagctgaccaggctgccaacgagtggggacgttctgggaaggacccaaaccattttcgacctgctggacttccagagaaatattag

SEQ ID NO: 70273 - DNA, 369 bp, Artificial Sequence
  derived and/or modified sequence
atgaagctattaacaggtcttgtcttttgtagcctagtattaggcgtgtctagcagatctttttttagctttcttggagaggctttcgatggtgcccgagacatgtggagagcgtactcagacatgagagaggccaattatatcggctcggacaagtactttcacgcacgtggcaactacgacgctgctaagagaggccctggaggcgcctgggccgcagaagtgatcacagacgctcgcgagaacatccagcggttttttgggcacggtgctgaagatagtctagcagatcaggcagcaaacgaatggggcaggtcaggcaaggaccccaatcactttagaccagcaggcctacccgaaaaatattag

SEQ ID NO: 70274 - DNA, 369 bp, Artificial Sequence
  derived and/or modified sequence
atgaagctactaactggcctggtcttttgcagcctagtgctaggtgttagttctcgatctttcttttccttcctgggtgaagcctttgacggagcaagagacatgtggcgcgcatacagcgacatgcgcgaggccaactatattggttcagacaaatacttccacgctcgggggaattacgatgccgccaagagagggccagggggcgcctgggccgctgaggtgatcactgatgcccgggaaaacatacagaggtttttcggacatggcgctgaggacagcctggccgaccaggcagcaaatgaatggggacgctcgggtaaagatcccaatcactttagaccagcaggactcccagaaaaatactag

SEQ ID NO: 70275 - DNA, 369 bp, Artificial Sequence
  derived and/or modified sequence
atgaagctgctgaccggcctggtgttctgcagcctggtgctgggcgtgagcagccgctccttcttctccttcctgggggaggcctttgatggagcccgggacatgtggagggcctacagcgacatgagggaggccaactacatcggcagtgacaagtacttccacgcccggggcaactatgatgctgccaagaggggccctggaggagcctgggccgctgaggtgatcacagatgcccgggagaacatccagcgcttctttggacatggagctgaggacagcctggccgaccaggccgccaatgagtggggccgcagcggcaaggaccccaaccacttccggcctgctggcctgcctgagaagtactag

SEQ ID NO: 70276 - DNA, 369 bp, Artificial Sequence
  derived and/or modified sequence
atgaagctgctgaccggcctggtgttctgcagcctggtgctgggcgtcagtagcagatccttcttttctttccttggcgaagctttcgatggggcacgggatatgtggagggcttactcagacatgcgggaggccaattatatcggctctgataaatatttccacgccagaggaaattatgacgccgccaaacgaggacctggaggagcctgggctgccgaggtcattacagacgcccgtgagaatattcagaggttctttggtcatggagccgaggattcactcgcggatcaagcagccaatgagtgggggaggagtgggaaagatcctaatcacttccgccctgctggtctcccagagaaatattag

SEQ ID NO: 70277 - DNA, 369 bp, Artificial Sequence
  derived and/or modified sequence
atgaagctgctgaccggcctggtgttctgcagcctggtgctgggcgtgagtagcaggtccttcttctccttccttggggaggctttcgacggtgctagagacatgtggagggcgtacagtgatatgagggaagctaattacattggttccgataagtattttcacgcgcgtggcaactatgacgctgcaaagagaggtcccggcggcgcatgggcagctgaagtcataactgatgctcgggaaaacatccagcgcttctttggacatggtgcagaggacagcctagcagaccaggcagcaaatgagtggggaaggtccggcaaagaccccaatcatttcaggcccgcaggacttccagagaaatactag

SEQ ID NO: 70278 - DNA, 369 bp, Artificial Sequence
  derived and/or modified sequence
atgaagctgctgaccggcctggtgttctgcagcctggtgctgggcgtttcttcaaggagcttcttttctttcctcggggaggcattcgacggcgcccgcgatatgtggcgggcttattccgacatgcgcgaggccaactatatcggctcagacaagtacttccatgcaaggggaaattatgatgccgccaaacgcggcccaggaggcgcctgggctgcagaggtgataactgacgcaagagaaaatatccagcgcttcttcgggcatggggcagaagactcattggctgaccaagccgccaacgagtggggacggagcggtaaagaccctaaccatttccggcctgctggcttgcctgagaagtattag

SEQ ID NO: 70279 - DNA, 369 bp, Artificial Sequence
  derived and/or modified sequence
atgaagctgctaacagggctcgtcttttgctctttggtcctgggcgtctcatccaggagctttttttctttcctcggggaagcctttgacggcgctcgcgatatgtggcgcgcatattctgacatgagagaggctaattacattggtagcgacaagtattttcatgctaggggtaactacgacgctgctaaaagaggtcccggaggggcatgggcagccgaggtgatcactgatgcccgagaaaacatccaaaggttcttcgggcacggagctgaggactctctcgctgaccaggcagccaatgaatggggaaggtctggcaaggaccctaatcactttaggcctgcagggctgccggaaaagtattag

SEQ ID NO: 70280 - DNA, 369 bp, Artificial Sequence
  derived and/or modified sequence
atgaagctccttactgggttggttttttgctcgttagtacttggcgtgtctagtcggtccttcttcagcttcctgggagaggcttttgatggggctcgcgatatgtggcgcgcttacagcgatatgagggaggctaactatataggatcggacaaatatttccacgcccgtggcaactatgatgccgctaagcgcggacccggaggagcatgggctgctgaggtcattaccgacgctcgcgagaacatacagagatttttcggtcacggggcagaggattcattagctgatcaagcagcaaacgaatggggtcggtctggaaaggatcctaaccacttccggccagccggtttgccagagaagtattag

SEQ ID NO: 70281 - DNA, 369 bp, Artificial Sequence
  derived and/or modified sequence
atgaagctcctgacaggcttggtcttttgctcactggtgttgggggtaagctctcgctccttcttttctttcctcggcgaggcttttgatggcgctagagacatgtggagggcgtattccgatatgcgcgaagctaactatattggatcggataaatattttcatgccagaggaaattacgacgccgctaagcgcggaccgggaggggcttgggctgcggaggtgatcaccgatgcacgtgaaaatattcagagattttttgggcacggtgcggaggactcgctggctgatcaggcggcaaacgaatggggcaggagtgggaaagaccccaatcactttaggcctgctgggttaccggagaagtattag

SEQ ID NO: 70282 - DNA, 615 bp, Artificial Sequence
  derived and/or modified sequence
tccccagggaccacatccagcttttcttcgctcccaagaaaccagcagggaaggctcagtataaatagcagccaccgctccctggcaggcagggacccgcagctcagctacagcacagatcagcaccatgaagcttctcacgggcctggttttctgctccttggtcctgggtgtcagcagccgaagcttcttttcgttccttggcgaggcttttgatggggctcgggacatgtggagagcctactctgacatgagagaagccaattacatcggctcagacaaatacttccatgctcgggggaactatgatgctgccaaaaggggacctgggggtgcctgggctgcagaagtgatcaccgatgccagagagaatatccagagattctttggccatggtgcggaggactcgctggctgatcaggctgccaatgaatggggcaggagtggcaaagaccccaatcacttccgacctgctggcctgcctgagaaatactgagcttcctcttcactctgctctcaggagatctggctgtgaggccctcagggcagggatacaaagcggggagagggtacacaatgggtatctaataaatacttaagaggtggaatttgtgg

SEQ ID NO: 70283 - DNA, 675 bp, Artificial Sequence
  derived and/or modified sequence
agggacccgcagctcagctacagcacagatcaggtgaggagcacaccaaggagtgatttttaaaacttactctgttttctctttcccaacaagattatcatttcctttaaaaaaaatagttatcctggggcatacagccataccattctgaaggtgtcttatctcctctgatctagagagcaccatgaagcttctcacgggcctggttttctgctccttggtcctgggtgtcagcagccgaagcttcttttcgttccttggcgaggcttttgatggggctcgggacatgtggagagcctactctgacatgagagaagccaattacatcggctcagacaaatacttccatgctcgggggaactatgatgctgccaaaaggggacctgggggtgcctgggctgcagaagtgatcaccgatgccagagagaatatccagagattctttggccatggtgcggaggactcgctggctgatcaggctgccaatgaatggggcaggagtggcaaagaccccaatcacttccgacctgctggcctgcctgagaaatactgagcttcctcttcactctgctctcaggagatctggctgtgaggccctcagggcagggatacaaagcggggagagggtacacaatgggtatctaataaatacttaagaggtggaatttgtggaaa

SEQ ID NO: 70284 - DNA, 583 bp, Artificial Sequence
  derived and/or modified sequence
aggcagggacccgcagctcagctacagcacagatcagttatcctggggcatacagccataccattctgaaggtgtcttatctcctctgatctagagagcaccatgaagcttctcacgggcctggttttctgctccttggtcctgggtgtcagcagccgaagcttcttttcgttccttggcgaggcttttgatggggctcgggacatgtggagagcctactctgacatgagagaagccaattacatcggctcagacaaatacttccatgctcgggggaactatgatgctgccaaaaggggacctgggggtgcctgggctgcagaagtgatcaccgatgccagagagaatatccagagattctttggccatggtgcggaggactcgctggctgatcaggctgccaatgaatggggcaggagtggcaaagaccccaatcacttccgacctgctggcctgcctgagaaatactgagcttcctcttcactctgctctcaggagatctggctgtgaggccctcagggcagggatacaaagcggggagagggtacacaatgggtatctaataaatacttaagaggtggaa

SEQ ID NO: 70285 - DNA, 369 bp, Artificial Sequence
  derived and/or modified sequence
atgaagctgctgaccggcctggtgttctgcagcctggtgctgggcgtgagcagcagaagcttcttcagcttcctgggcgaggccttcgacggcgccagagacatgtggagagcctacagcgacatgagagaggccaactacatcggcagcgacaagtacttccacgccagaggcaactacgacgccgccaagagaggccccggcggcgcctgggccgccgaggtgatcaccgacgccagagagaacatccagagattcttcggccacggcgccgaggacagcctggccgaccaggccgccaacgagtggggcagaagcggcaaggaccccaaccacttcagacccgccggcctgcccgagaagtactag

SEQ ID NO: 70286 - protein, 559 aa, Artificial Sequence
  derived and/or modified sequence
MAAALRVAAVGARLSVLASGLRAAVRSLCSQATSVNERIENKRRTALLGGGQRRIDAQHKRGKLTARERISLLLDPGSFVESDMFVEHRCADFGMAADKNKFPGDSVVTGRGRINGRLVYVFSQQIIGWAQWLPLVISALWEAEDFTVFGGSLSGAHAQKICKIMDQAITVGAPVIGLNDSGGARIQEGVESLAGYADIFLRNVTASGVIPQISLIMGPCAGGAVYSPALTDFTFMVKDTSYLFITGPDVVKSVTNEDVTQEELGGAKTHTTMSGVAHRAFENDVDALCNLRDFFNYLPLSSQDPAPVRECHDPSDRLVPELDTIVPLESTKAYNMVDIIHSVVDEREFFEIMPNYAKNIIVGFARMNGRTVGIVGNQPKVASGCLDINSSVKGARFVRFCDAFNIPLITFVDVPGFLPGTAQEYGGIIRHGAKLLYAFAEATVPKVTVITRKAYGGAYDVMSSKHLCGDTNYAWPTAEIAVMGAKGAVEIIFKGHENVEAAQAEYIEKFANPFPAAVRGFVDDIIQPSSTRARICCDLDVLASKKVQRPWRKHANIPL

SEQ ID NO: 70287 - DNA, 1680 bp, Artificial Sequence
  derived and/or modified sequence
atggcagccgccttaagagtcgcagccgttggagccaggctgagtgtgctcgctagtgggcttagggcggcggttaggtccctgtgttcccaagctacatccgttaatgagcgcatagagaataagagaaggactgccttgttgggtggaggtcaacgcagaatcgacgcacaacataagagaggtaagctcacggcgagagaaaggatctctctgctgcttgatcctggatcttttgttgaaagcgacatgttcgtcgaacatagatgcgcggatttcggcatggcagctgataagaacaaattccccggcgattctgtggttaccggccggggacgtatcaatggcagactggtctacgtgttcagccagcagatcattggatgggcacaatggctgcctctggtcatctcagccttatgggaagctgaagactttacggtattcgggggcagtctctctggcgcccacgcccagaagatatgtaagatcatggaccaggcgatcacggtgggcgcccccgtgataggtctcaatgactctggaggagccagaattcaggagggcgtggagagcctcgctggctacgctgatatcttcctccgaaatgtgacagccagcggggtgatcccacagatttcactgatcatgggcccctgcgctggcggtgcagtctactcaccagctctgaccgatttcacattcatggtgaaggacactagttacctgtttataaccggccctgacgtggtgaagtcggtcaccaacgaagatgtgacgcaagaagaactcggcggggccaaaacccacacaaccatgtctggcgtggcgcaccgggctttcgaaaatgacgttgacgccctgtgtaatctgcgcgacttttttaattacctgccactatccagccaagacccggcgcccgtgagagagtgccatgatccatccgaccgactggtgccagaacttgataccatcgtccccttggagtccacaaaagcctataatatggtcgacatcatccactcggttgtcgatgagagggaattttttgaaatcatgccaaactacgccaaaaatattatcgtggggtttgctcggatgaacggccgcacagtcggcattgttgggaatcagcccaaagtggcgagcggatgcctggatattaatagtagtgtgaaaggcgcccgctttgttagattctgcgacgcctttaacattcctttgatcaccttcgtggatgtccctggatttttgcccggaacagcccaggagtacggcggaattatccggcacggtgcaaagctcttatatgcctttgcagaagccacagtgccaaaagtgaccgtgataactcgtaaagcttacggcggcgcttacgacgtgatgagttccaaacacctgtgtggagacacaaattacgcttggccaacggcagaaatcgccgttatgggcgccaagggagccgtggagataatctttaagggacatgagaatgttgaggccgctcaggccgaatacattgaaaagttcgctaacccatttcctgctgccgtgagaggattcgtggacgatataatccagcctagctcaacaagagcacgcatctgttgcgacctggacgttctcgcttccaagaaggttcaacggccctggcggaagcacgcgaatattcctctgtag

SEQ ID NO: 70288 - DNA, 1680 bp, Artificial Sequence
  derived and/or modified sequence
atggctgctgccctgcgggtggccgctgtgggcgcccggctgtctgtgctggccagcggcctgcgggctgctgtgcgcagcctgtgcagccaggccacctctgtgaatgaaagaattgagaacaagagaagaacagccctgctgggcggcggccagaggagaattgatgcccagcacaagaggggcaagctgacagcccgggagcgcatcagcctgctgctggaccccggcagctttgtggagagtgacatgtttgtggagcaccgctgtgccgactttggcatggctgctgacaagaacaagtttcctggggacagcgtggtgacaggccggggccgcatcaatggccgcctggtgtatgtgttcagccagcagatcatcggctgggcccagtggctgcccctggtgatcagcgccctgtgggaggccgaggacttcaccgtgtttggaggcagcctgagcggggcccacgcccagaagatctgcaagatcatggaccaggccatcaccgtgggcgcccctgtgattggcctgaatgattctggaggagcccgcatccaggagggcgtggagagcctggccggctatgctgacatcttcctgagaaatgtgacagccagcggggtcatcccccagatcagcctcatcatgggcccctgtgccggcggcgctgtgtacagccctgccctgacagacttcaccttcatggtgaaggacaccagctacctgttcatcaccggcccagatgtggtgaagtctgtgaccaatgaagatgtgacccaggaggagctgggcggggccaagacccacaccaccatgtctggagtggcccaccgggcctttgaaaatgatgtggatgccctgtgcaacctgcgggacttcttcaactacctgcccctgagcagccaggaccctgcccctgtgcgggagtgccacgaccccagcgaccggctggtgcctgagctggacaccatcgtgcccctggagagcaccaaggcctacaacatggtggacatcatccacagcgtggtggatgagcgggagttctttgagatcatgcccaactatgccaagaacatcatcgtgggctttgccaggatgaatggccgcacagtgggcatcgtgggcaaccagcccaaggtggccagcggctgcctggacatcaacagctctgtgaagggggccaggtttgtgcgcttctgtgatgccttcaacatccccctcatcacctttgtggatgtgcccggcttcctgcctggaacagcccaggagtatggaggcatcatcagacatggagccaagctgctgtatgcctttgctgaggccaccgtgcccaaggtgaccgtcatcaccaggaaggcctatggaggagcctatgatgtgatgagcagcaagcacctgtgtggggacaccaactatgcctggcccacagctgagattgctgtgatgggcgccaagggagctgtggagatcatcttcaagggccatgaaaatgtggaggccgcccaggccgagtacatcgagaagtttgccaaccccttccctgctgctgtgcggggctttgtggatgacatcatccagcccagcagcacccgggcccgcatctgctgtgacctggatgtgctggccagcaagaaggtgcagaggccctggaggaagcacgccaacatccccctgtag

SEQ ID NO: 70289 - DNA, 1680 bp, Artificial Sequence
  derived and/or modified sequence
atggccgccgccctgcgggtggccgccgtgggcgcccggctgagcgtgctcgccagcggactccgcgcagctgtgagatctctgtgttctcaagcaacttctgtgaacgagcgtatagaaaacaagcgcaggactgccctcttgggaggtggtcagcggaggattgacgcccagcacaagcggggtaaacttacagccagggagaggatctcattactactggaccctgggagctttgtagaaagtgacatgtttgttgaacataggtgcgccgatttcggtatggccgctgacaagaataagttccccggggactctgttgtcacaggtaggggcagaataaatggccgcttagtatatgtgtttagccaacagatcatcggttgggcccagtggctgcctctcgtgatctctgccttatgggaagctgaagacttcactgtttttggtgggtctctgagcggcgcccacgcccagaaaatatgcaaaatcatggaccaggctatcacagtcggtgcccccgtcattgggctgaacgattctggcggggcccgcatccaggagggagtggagtcgctcgcaggttatgccgacatttttctacgcaacgtcacagcgagtggggtgatccctcagatttctcttattatgggcccctgcgcagggggcgctgtgtattcacctgctcttaccgactttacatttatggtcaaagatacgtcttacctgttcataactggcccagatgtggtaaagagtgtcaccaatgaagacgtgacacaagaagaactcggcggcgctaagactcatacgacaatgagtggagtcgcacaccgcgcattcgaaaacgatgtcgatgccctctgcaacctccgggactttttcaactacctccctttgagttcccaggacccagcccccgtgcgggaatgccatgatccctctgacaggcttgtgcctgagttggacactattgtaccactggaatccacgaaggcatacaacatggtggatatcattcacagtgtggtggacgaacgagagttcttcgagattatgccgaactacgctaagaacattatcgtcggctttgcgaggatgaacggtagaaccgtgggaatagtgggaaaccaacccaaggtcgcttccgggtgtctggacattaattcttccgtgaaaggtgcaagatttgtaaggttttgcgatgcattcaatataccgctaattactttcgttgacgtccctggatttctgcctgggactgctcaggagtacggcggtattatccggcatggcgctaaactgctatatgcattcgcagaggcaacggtgcccaaggtgactgtgatcactaggaaggcttacggcggcgcctatgatgttatgtcatcgaagcacctttgcggggatacgaactatgcatggccaacagccgaaatcgctgttatgggggccaaaggagcagtggagattattttcaaggggcatgagaacgttgaagccgcacaagccgagtatatagagaaatttgcaaatccattccccgctgccgttaggggcttcgtggacgatataatccagcccagctcaacccgggccaggatttgttgcgatctggacgtgctcgcttctaaaaaagtccaaagaccctggaggaagcacgctaatatacccctctag

SEQ ID NO: 70290 - DNA, 1680 bp, Artificial Sequence
  derived and/or modified sequence
atggcggcagccctgagagttgccgcagtcggagccaggttatcagtgttagcatctggcctgcgcgctgcagtgcggtctctttgtagtcaggctacttcggtgaatgaaaggatagaaaataaacgaaggaccgctctgcttggtggaggacagagacgcatcgatgcccagcacaaacgtggaaagctgacagctcgcgagagaataagcctgctcctcgaccctgggagttttgtggagagcgacatgtttgtagagcatcgttgcgcagattttggaatggccgctgacaagaacaagtttccgggagatagcgtcgtaaccggcaggggtcggattaacggcagactcgtgtatgtgttctcccagcagattattgggtgggctcagtggttacccctggtaatatcggcactttgggaggccgaagacttcaccgtttttggcggaagtctgagcggcgctcacgcccagaagatttgcaagattatggatcaagcaataactgtcggggctcccgtgataggtctgaatgatagcggtggcgcacggatccaagaaggagtcgagtcactcgcaggatatgccgacattttcctgagaaacgtgacagcgtccggcgtaataccgcagatctcactcatcatgggcccatgcgccggaggagcagtctatagtcctgcgttaacagacttcaccttcatggtcaaggataccagctacttgtttataacgggaccggacgtagtgaagagcgtgaccaacgaagacgtgactcaggaggagctggggggagcaaaaactcatactacaatgagcggcgtggcgcacagggcctttgaaaacgacgttgatgcactttgcaacctacgggatttctttaactatttacccttgagttctcaggaccccgctcccgtgcgagaatgtcacgatccatctgatcgtttggtgcctgaactggataccatcgtgcccctggagagcaccaaggcatacaatatggtggatattatccactctgtggttgacgagagggaattctttgaaattatgcccaattatgcaaagaacattattgtcgggtttgcacgtatgaatggacgcactgtgggaatcgtcggtaaccaacctaaagtggcctccggctgcttggacattaattccagtgtaaagggcgctcgatttgtacgcttttgcgatgcttttaatatcccgctgatcacatttgtggatgtacctggcttccttccgggaaccgctcaagagtatgggggtattatcagacatggagcaaaactgctgtacgcatttgctgaggccactgtaccaaaggtcaccgttattacgcggaaagcctacggaggagcctacgacgttatgagcagcaaacacctttgtggggatacgaattatgcttggccgaccgcagagatcgctgtgatgggcgctaagggtgccgtcgagatcatttttaaaggccatgagaacgtcgaagccgctcaagcggagtacattgagaagttcgccaatccctttcctgcagccgtgagaggattcgttgacgacatcatccagccgtctagtaccagggcccgtatctgctgcgatctggacgtgctggcaagtaagaaggtacagcgcccatggcgaaaacacgctaatattccactctag

SEQ ID NO: 70291 - DNA, 1841 bp, Artificial Sequence
  derived and/or modified sequence
gcgccggcacagcaaaaatggcggcggcattacgggtggcggcggtcggggcaaggctcagcgttctggcgagcggtctccgcgccgcggtccgcagcctttgcagccaggccacctctgttaacgaacgcatcgaaaacaagcgccggaccgcgctgctgggagggggccaacgccgtattgacgcgcagcacaagcgaggaaagctaacagccagggagaggatcagtctcttgctggaccctggcagctttgttgagagcgacatgtttgtggaacacagatgtgcagattttggaatggctgctgataagaataagtttcctggagacagcgtggtcactggacgaggccgaatcaatggaagattggtttatgtcttcagtcagcaaataataggctgggcacagtggctcccgcttgtcatctcagcactttgggaggccgaggattttacagtttttggaggcagtctgtcaggagcacatgcccaaaagatctgcaaaatcatggaccaggccataacggtgggggctccagtgattgggctgaatgactctgggggagcacggatccaagaaggagtggagtctttggctggctatgcagacatctttctgaggaatgttacggcatccggagtcatccctcagatttctctgatcatgggcccatgtgctggtggggccgtctactccccagccctaacagacttcacgttcatggtaaaggacacctcctacctgttcatcactggccctgatgttgtgaagtctgtcaccaatgaggatgttacccaggaggagctcggtggtgccaagacccacaccaccatgtcaggtgtggcccacagagcttttgaaaatgatgttgatgccttgtgtaatctccgggatttcttcaactacctgcccctgagcagtcaggacccggctcccgtccgtgagtgccacgatcccagtgaccgtctggttcctgagcttgacacaattgtccctttggaatcaaccaaagcctacaacatggtggacatcatacactctgttgttgatgagcgtgaattttttgagatcatgcccaattatgccaagaacatcattgttggttttgcaagaatgaatgggaggactgttggaattgttggcaaccaacctaaggtggcctcaggatgcttggatattaattcatctgtgaaaggggctcgttttgtcagattctgtgatgcattcaatattccactcatcacttttgttgatgtccctggctttctacctggcacagcacaggaatacgggggcatcatccggcatggtgccaagcttctctacgcatttgctgaggcaactgtacccaaagtcacagtcatcaccaggaaggcctatggaggtgcctatgatgtcatgagctctaagcacctttgtggtgataccaactatgcctggcccaccgcagagattgcagtcatgggagcaaagggcgctgtggagatcatcttcaaagggcatgagaatgtggaagctgctcaggcagagtacatcgagaagtttgccaaccctttccctgcagcagtgcgagggtttgtggatgacatcatccaaccttcttccacacgtgcccgaatctgctgtgacctggatgtcttggccagcaagaaggtacaacgtccttggagaaaacatgcaaatattccattgtaaacaaatcaaaggaaaagaaaccaagaactgaattactgtctgcccattcacatcccattcctgccttttgcaatcatgaaacctgggaatccaaatagttggataacttagaataactaagtttattaaattctagaaagatct

SEQ ID NO: 70292 - DNA, 1680 bp, Artificial Sequence
  derived and/or modified sequence
atggccgccgccctgagagtggccgccgtgggcgccagactgagcgtgctggccagcggcctgagagccgccgtgagaagcctgtgcagccaggccaccagcgtgaacgagagaatcgagaacaagagaagaaccgccctgctgggcggcggccagagaagaatcgacgcccagcacaagagaggcaagctgaccgccagagagagaatcagcctgctgctggaccccggcagcttcgtggagagcgacatgttcgtggagcacagatgcgccgacttcggcatggccgccgacaagaacaagttccccggcgacagcgtggtgaccggcagaggcagaatcaacggcagactggtgtacgtgttcagccagcagatcatcggctgggcccagtggctgcccctggtgatcagcgccctgtgggaggccgaggacttcaccgtgttcggcggcagcctgagcggcgcccacgcccagaagatctgcaagatcatggaccaggccatcaccgtgggcgcccccgtgatcggcctgaacgacagcggcggcgccagaatccaggagggcgtggagagcctggccggctacgccgacatcttcctgagaaacgtgaccgccagcggcgtgatcccccagatcagcctgatcatgggcccctgcgccggcggcgccgtgtacagccccgccctgaccgacttcaccttcatggtgaaggacaccagctacctgttcatcaccggccccgacgtggtgaagagcgtgaccaacgaggacgtgacccaggaggagctgggcggcgccaagacccacaccaccatgagcggcgtggcccacagagccttcgagaacgacgtggacgccctgtgcaacctgagagacttcttcaactacctgcccctgagcagccaggaccccgcccccgtgagagagtgccacgaccccagcgacagactggtgcccgagctggacaccatcgtgcccctggagagcaccaaggcctacaacatggtggacatcatccacagcgtggtggacgagagagagttcttcgagatcatgcccaactacgccaagaacatcatcgtgggcttcgccagaatgaacggcagaaccgtgggcatcgtgggcaaccagcccaaggtggccagcggctgcctggacatcaacagcagcgtgaagggcgccagattcgtgagattctgcgacgccttcaacatccccctgatcaccttcgtggacgtgcccggcttcctgcccggcaccgcccaggagtacggcggcatcatcagacacggcgccaagctgctgtacgccttcgccgaggccaccgtgcccaaggtgaccgtgatcaccagaaaggcctacggcggcgcctacgacgtgatgagcagcaagcacctgtgcggcgacaccaactacgcctggcccaccgccgagatcgccgtgatgggcgccaagggcgccgtggagatcatcttcaagggccacgagaacgtggaggccgcccaggccgagtacatcgagaagttcgccaaccccttccccgccgccgtgagaggcttcgtggacgacatcatccagcccagcagcaccagagccagaatctgctgcgacctggacgtgctggccagcaagaaggtgcagagaccctggagaaagcacgccaacatccccctgtag

SEQ ID NO: 70293 - protein, 1118 aa, Artificial Sequence
  derived and/or modified sequence
MEIKDQGAQMEPLLPTRNDEEAVVDRGGTRSILKTHFEKEDLEGHRTLFIGVHVPLGGRKSHRRHRHRGHKHRKRDRERDSGLEDGRESPSFDTPSQRVQFILGTEDDDEEHIPHDLFTELDEICWREGEDAEWRETARWLKFEEDVEDGGERWSKPYVATLSLHSLFELRSCILNGTVLLDMHANTLEEIADMVLDQQVSSGQLNEDVRHRVHEALMKQHHHQNQKKLTNRIPIVRSFADIGKKQSEPNSMDKNAGQVVSPQSAPACVENKNDVSRENSTVDFSKGLGGQQKGHTSPCGMKQRHEKGPPHQQEREVDLHFMKKIPPGAEASNILVGELEFLDRTVVAFVRLSPAVLLQGLAEVPIPTRFLFILLGPLGKGQQYHEIGRSIATLMTDEVFHDVAYKAKDRNDLVSGIDEFLDQVTVLPPGEWDPSIRIEPPKNVPSQEKRKIPAVPNGTAAHGEAEPHGGHSGPELQRTGRIFGGLILDIKRKAPYFWSDFRDAFSLQCLASFLFLYCACMSPVITFGGLLGEATEGRISAIESLFGASMTGIAYSLFGGQPLTILGSTGPVLVFEKILFKFCKEYGLSYLSLRASIGLWTATLCIILVATDASSLVCYITRFTEEAFASLICIIFIYEALEKLFELSEAYPINMHNDLELLTQYSCNCVEPHNPSNGTLKEWRESNISASDIIWENLTVSECKSLHGEYVGRACGHDHPYVPDVLFWSVILFFSTVTLSATLKQFKTSRYFPTKVRSIVSDFAVFLTILCMVLIDYAIGIPSPKLQVPSVFKPTRDDRGWFVTPLGPNPWWTVIAAIIPALLCTILIFMDQQITAVIINRKEHKLKKGCGYHLDLLMVAVMLGVCSIMGLPWFVAATVLSITHVNSLKLESECSAPGEQPKFLGIREQRVTGLMIFILMGSSVFMTSILKFIPMPVLYGVFLYMGASSLKGIQFFDRIKLFWMPAKHQPDFIYLRHVPLRKVHLFTIIQMSCLGLLWIIKVSRAAIVFPMMVLALVFVRKLMDLLFTKRELSWLDDLMPESKKKKLEDAEKEEEQSMLAMEDEGTVQLPLEGHYRDDPSVINISDEMSKTALWRNLLITADNSKDKESSFPSKSSPS

SEQ ID NO: 70294 - protein, 408 aa, Artificial Sequence
  derived and/or modified sequence
MEIKDQGAQMEPLLPTRNDEEAVVDRGGTRSILKTHFEKEDLEGHRTLFIGVHVPLGGRKSHRRHRHRGHKHRKRDRERDSGLEDGRESPSFDTPSQRVQFILGTEDDDEEHIPHDLFTELDEICWREGEDAEWRETARWLKFEEDVEDGGERWSKPYVATLSLHSLFELRSCILNGTVLLDMHANTLEEIADMVLDQQVSSGQLNEDVRHRVHEALMKQHHHQNQKKLTNRIPIVRSFADIGKKQSEPNSMDKNAGQVVSPQSAPACVENKNDVSRENSTVDFSKGLGGQQKGHTSPCGMKQRHEKGPPHQQEREVDLHFMKKIPPGAEASNILVGELEFLDRTVVAFVRLSPAVLLQGLAEVPIPTRYFMMLPIKLKIVMTWYQELMSFWIRLLFSLLENGIQAFE

SEQ ID NO: 70295 - DNA, 3165 bp, Artificial Sequence
  derived and/or modified sequence
atggagatcaaggaccagggcgcccagatggagcccctgctgcccaccagaaacgacgaggaggccgtggtggacagaggcggcaccagaagcatcctgaagacccacttcgagaaggaggacctggagggccacagaaccctgttcatcggcgtgcacgtgcccctgggcggcagaaagagccacagaagacacagacacagaggccacaagcacagaaagagagacagagagagagacagcggcctggaggacggcagagagagccccagcttcgacacccccagccagagagtgcagttcatcctgggcaccgaggacgacgacgaggagcacatcccccacgacctgttcaccgagctggacgagatctgctggagagagggcgaggacgccgagtggagagagaccgccagatggctgaagttcgaggaggacgtggaggacggcggcgagagatggagcaagccctacgtggccaccctgagcctgcacagcctgttcgagctgagaagctgcatcctgaacggcaccgtgctgctggacatgcacgccaacaccctggaggagatcgccgacatggtgctggaccagcaggtgagcagcggccagctgaacgaggacgtgagacacagagtgcacgaggccctgatgaagcagcaccaccaccagaaccagaagaagctgaccaacagaatccccatcgtgagaagcttcgccgacatcggcaagaagcagagcgagcccaacagcatggacaagaacgccggccaggtggtgagcccccagagcgcccccgcctgcgtggagaacaagaacgacgtgagcagagagaacagcaccgtggacttcagcaagggcctgggcggccagcagaagggccacaccagcccctgcggcatgaagcagagacacgagaagggccccccccaccagcaggagagagaggtggacctgcacttcatgaagaagatcccccccggcgccgaggccagcaacatcctggtgggcgagctggagttcctggacagaaccgtggtggccttcgtgagactgagccccgccgtgctgctgcagggcctggccgaggtgcccatccccaccagattcctgttcatcctgctgggccccctgggcaagggccagcagtaccacgagatcggcagaagcatcgccaccctgatgaccgacgaggtgttccacgacgtggcctacaaggccaaggacagaaacgacctggtgagcggcatcgacgagttcctggaccaggtgaccgtgctgccccccggcgagtgggaccccagcatcagaatcgagccccccaagaacgtgcccagccaggagaagagaaagatccccgccgtgcccaacggcaccgccgcccacggcgaggccgagccccacggcggccacagcggccccgagctgcagagaaccggcagaatcttcggcggcctgatcctggacatcaagagaaaggccccctacttctggagcgacttcagagacgccttcagcctgcagtgcctggccagcttcctgttcctgtactgcgcctgcatgagccccgtgatcaccttcggcggcctgctgggcgaggccaccgagggcagaatcagcgccatcgagagcctgttcggcgccagcatgaccggcatcgcctacagcctgttcggcggccagcccctgaccatcctgggcagcaccggccccgtgctggtgttcgagaagatcctgttcaagttctgcaaggagtacggcctgagctacctgagcctgagagccagcatcggcctgtggaccgccaccctgtgcatcatcctggtggccaccgacgccagcagcctggtgtgctacatcaccagattcaccgaggaggccttcgccagcctgatctgcatcatcttcatctacgaggccctggagaagctgttcgagctgagcgaggcctaccccatcaacatgcacaacgacctggagctgctgacccagtacagctgcaactgcgtggagccccacaaccccagcaacggcaccctgaaggagtggagagagagcaacatcagcgccagcgacatcatctgggagaacctgaccgtgagcgagtgcaagagcctgcacggcgagtacgtgggcagagcctgcggccacgaccacccctacgtgcccgacgtgctgttctggagcgtgatcctgttcttcagcaccgtgaccctgagcgccaccctgaagcagttcaagaccagcagatacttccccaccaaggtgagaagcatcgtgagcgacttcgccgtgttcctgaccatcctgtgcatggtgctgatcgactacgccatcggcatccccagccccaagctgcaggtgcccagcgtgttcaagcccaccagagacgacagaggctggttcgtgacccccctgggccccaacccctggtggaccgtgatcgccgccatcatccccgccctgctgtgcaccatcctgatcttcatggaccagcagatcaccgccgtgatcatcaacagaaaggagcacaagctgaagaagggctgcggctaccacctggacctgctgatggtggccgtgatgctgggcgtgtgcagcatcatgggcctgccctggttcgtggccgccaccgtgctgagcatcacccacgtgaacagcctgaagctggagagcgagtgcagcgcccccggcgagcagcccaagttcctgggcatcagagagcagagagtgaccggcctgatgatcttcatcctgatgggcagcagcgtgttcatgaccagcatcctgaagttcatccccatgcccgtgctgtacggcgtgttcctgtacatgggcgccagcagcctgaagggcatccagttcttcgacagaatcaagctgttctggatgcccgccaagcaccagcccgacttcatctacctgagacacgtgcccctgagaaaggtgcacctgttcaccatcatccagatgagctgcctgggcctgctgtggatcatcaaggtgagcagagccgccatcgtgttccccatgatggtgctggccctggtgttcgtgagaaagctgatggacctgctgttcaccaagagagagctgagctggctggacgacctgatgcccgagagcaagaagaagaagctggaggacgccgagaaggagcactag

SEQ ID NO: 70296 - DNA, 3357 bp, Artificial Sequence
  derived and/or modified sequence
atggagatcaaggaccagggcgcccagatggagcccctgctgcccaccagaaacgacgaggaggccgtggtggacagaggcggcaccagaagcatcctgaagacccacttcgagaaggaggacctggagggccacagaaccctgttcatcggcgtgcacgtgcccctgggcggcagaaagagccacagaagacacagacacagaggccacaagcacagaaagagagacagagagagagacagcggcctggaggacggcagagagagccccagcttcgacacccccagccagagagtgcagttcatcctgggcaccgaggacgacgacgaggagcacatcccccacgacctgttcaccgagctggacgagatctgctggagagagggcgaggacgccgagtggagagagaccgccagatggctgaagttcgaggaggacgtggaggacggcggcgagagatggagcaagccctacgtggccaccctgagcctgcacagcctgttcgagctgagaagctgcatcctgaacggcaccgtgctgctggacatgcacgccaacaccctggaggagatcgccgacatggtgctggaccagcaggtgagcagcggccagctgaacgaggacgtgagacacagagtgcacgaggccctgatgaagcagcaccaccaccagaaccagaagaagctgaccaacagaatccccatcgtgagaagcttcgccgacatcggcaagaagcagagcgagcccaacagcatggacaagaacgccggccaggtggtgagcccccagagcgcccccgcctgcgtggagaacaagaacgacgtgagcagagagaacagcaccgtggacttcagcaagggcctgggcggccagcagaagggccacaccagcccctgcggcatgaagcagagacacgagaagggccccccccaccagcaggagagagaggtggacctgcacttcatgaagaagatcccccccggcgccgaggccagcaacatcctggtgggcgagctggagttcctggacagaaccgtggtggccttcgtgagactgagccccgccgtgctgctgcagggcctggccgaggtgcccatccccaccagattcctgttcatcctgctgggccccctgggcaagggccagcagtaccacgagatcggcagaagcatcgccaccctgatgaccgacgaggtgttccacgacgtggcctacaaggccaaggacagaaacgacctggtgagcggcatcgacgagttcctggaccaggtgaccgtgctgccccccggcgagtgggaccccagcatcagaatcgagccccccaagaacgtgcccagccaggagaagagaaagatccccgccgtgcccaacggcaccgccgcccacggcgaggccgagccccacggcggccacagcggccccgagctgcagagaaccggcagaatcttcggcggcctgatcctggacatcaagagaaaggccccctacttctggagcgacttcagagacgccttcagcctgcagtgcctggccagcttcctgttcctgtactgcgcctgcatgagccccgtgatcaccttcggcggcctgctgggcgaggccaccgagggcagaatcagcgccatcgagagcctgttcggcgccagcatgaccggcatcgcctacagcctgttcggcggccagcccctgaccatcctgggcagcaccggccccgtgctggtgttcgagaagatcctgttcaagttctgcaaggagtacggcctgagctacctgagcctgagagccagcatcggcctgtggaccgccaccctgtgcatcatcctggtggccaccgacgccagcagcctggtgtgctacatcaccagattcaccgaggaggccttcgccagcctgatctgcatcatcttcatctacgaggccctggagaagctgttcgagctgagcgaggcctaccccatcaacatgcacaacgacctggagctgctgacccagtacagctgcaactgcgtggagccccacaaccccagcaacggcaccctgaaggagtggagagagagcaacatcagcgccagcgacatcatctgggagaacctgaccgtgagcgagtgcaagagcctgcacggcgagtacgtgggcagagcctgcggccacgaccacccctacgtgcccgacgtgctgttctggagcgtgatcctgttcttcagcaccgtgaccctgagcgccaccctgaagcagttcaagaccagcagatacttccccaccaaggtgagaagcatcgtgagcgacttcgccgtgttcctgaccatcctgtgcatggtgctgatcgactacgccatcggcatccccagccccaagctgcaggtgcccagcgtgttcaagcccaccagagacgacagaggctggttcgtgacccccctgggccccaacccctggtggaccgtgatcgccgccatcatccccgccctgctgtgcaccatcctgatcttcatggaccagcagatcaccgccgtgatcatcaacagaaaggagcacaagctgaagaagggctgcggctaccacctggacctgctgatggtggccgtgatgctgggcgtgtgcagcatcatgggcctgccctggttcgtggccgccaccgtgctgagcatcacccacgtgaacagcctgaagctggagagcgagtgcagcgcccccggcgagcagcccaagttcctgggcatcagagagcagagagtgaccggcctgatgatcttcatcctgatgggcagcagcgtgttcatgaccagcatcctgaagttcatccccatgcccgtgctgtacggcgtgttcctgtacatgggcgccagcagcctgaagggcatccagttcttcgacagaatcaagctgttctggatgcccgccaagcaccagcccgacttcatctacctgagacacgtgcccctgagaaaggtgcacctgttcaccatcatccagatgagctgcctgggcctgctgtggatcatcaaggtgagcagagccgccatcgtgttccccatgatggtgctggccctggtgttcgtgagaaagctgatggacctgctgttcaccaagagagagctgagctggctggacgacctgatgcccgagagcaagaagaagaagctggaggacgccgagaaggaggaggagcagagcatgctggccatggaggacgagggcaccgtgcagctgcccctggagggccactacagagacgaccccagcgtgatcaacatcagcgacgagatgagcaagaccgccctgtggagaaacctgctgatcaccgccgacaacagcaaggacaaggagagcagcttccccagcaagagcagccccagctag

SEQ ID NO: 70297 - DNA, 3165 bp, Artificial Sequence
  derived and/or modified sequence
atggagattaaagatcagggagcgcagatggaacctctcctacccacaagaaatgatgaagaagccgtcgtcgaccgtggggggacccgcagtatcctaaaaactcacttcgagaaggaagacctcgagggacatcgaacactgttcattggggtgcacgtccctttaggcggacgaaaatcgcatcgcaggcaccggcatagggggcataagcatcgcaagcgggacagagagagggactcaggacttgaggatggtcgtgaatctcccagctttgatacaccgtctcagagagtgcagtttatactgggcactgaagatgatgatgaggaacatatcccccatgacctttttactgagctggacgagatttgttggcgcgaaggcgaagacgccgaatggcgggagacagctcgctggctcaaatttgaggaggatgtggaagacgggggcgagcggtggtccaagccatacgtggccaccctgagccttcactcactgttcgagcttagatcctgtattctgaatggaacggtgctgctcgacatgcatgcgaacactctcgaggagatcgctgacatggtactggatcaacaggtgtcttcaggtcaactaaatgaggatgtcagacacagggtccacgaggccctcatgaagcagcatcaccaccagaaccaaaagaagcttactaaccgtatccctatcgttcgatctttcgccgatattggcaaaaagcagtctgagcccaattctatggacaagaatgccggccaggttgtttccccgcagtccgcacctgcctgcgtggaaaacaaaaacgacgtaagtagagagaacagcacagtggatttttctaagggccttggaggccagcaaaaaggccacaccagcccctgcggtatgaaacagaggcacgaaaaaggccctcctcaccagcaggagagagaagtggacctgcactttatgaagaagatccccccaggagctgaggccagcaacattctcgtgggggaactggagttcctggatcgcacagtagtggcattcgttagactgtcaccagcagtcctgttgcaaggcctggcagaagttccaataccaactagattcctgttcatcctgctgggaccactcggcaagggtcagcagtatcatgagatcgggagatctatcgcaacactgatgactgatgaagtgttccacgatgtagcttacaaggctaaggaccgaaacgacctagtgagcggaatcgacgaattcctcgatcaagtgaccgttctgccccctggtgaatgggatccctccataaggatcgagccccccaaaaatgtgccaagtcaggaaaagcggaaaatccccgctgtccccaacggaacagcagcacatggcgaggctgagccccacggcggacatagtggacctgagctgcaacgaacaggcaggattttcggaggcttgattctggatattaagcgaaaggccccatatttttggtccgatttccgtgacgccttttcccttcagtgtctcgcctcctttctcttcctttattgcgcttgcatgtccccggttatcactttcggggggctcctcggcgaggccacggagggacgcatctcagctatcgagtcactgtttggggcctcaatgacaggcatcgcatactcgctctttggcggccagcccctgaccattctaggatcaacagggcccgttttagtgttcgaaaaaatcttgttcaagttctgcaaggagtacggtctgagttacttatcgctgagggccagtattggtctttggacagccaccctttgtatcatcctcgtggcaaccgacgcgtccagccttgtttgttatataactagatttaccgaagaggcctttgcctcactcatctgtataatcttcatatatgaggcattggaaaagctgtttgagctgtcagaggcatatcctatcaatatgcacaacgacttagaactgctgacccagtactcttgcaactgtgtcgagccgcacaatccctccaatggaacactcaaggaatggagagagagtaatatttccgcctctgacattatctgggaaaatctcacagtgtccgagtgtaagtctttgcatggcgagtacgtcggcagagcttgcggacatgatcacccatacgtgcctgatgttttgttttggtccgtcattctgtttttttctaccgtgacattatcagcaaccctaaagcagtttaaaaccagcaggtattttcccacgaaggtgagatctatagtctccgatttcgcagtgttcctgaccatcttatgtatggtgcttatagactacgcaatagggatacccagtccaaaactgcaggtgccaagcgtattcaaaccgacgcgtgatgatcgcggatggttcgtaactcccttagggccaaatccctggtggaccgtgattgcggccatcattccagccctcttgtgcaccatactcatcttcatggaccagcagattactgccgtaatcattaaccgtaaagagcataagctcaaaaagggttgtggataccacttagatctcctcatggttgccgttatgctgggcgtgtgcagcatcatggggctgccttggttcgtggcggcaaccgtactctcaatcactcacgtcaatagccttaaactggaatccgaatgttccgcccctggggagcagcccaagttcctgggcatcagggaacagcgcgtcaccggcctgatgatttttatcttaatgggctctagtgttttcatgactagtatcctcaaatttattccaatgcccgtactgtatggggtcttcctgtacatgggagcatcgtcattgaaagggatccagttctttgatagaatcaaactattttggatgcctgcaaagcaccagccagacttcatctacctcaggcacgtgccattgcgcaaggtgcacttgtttacaataatacagatgtcttgcttggggctgctctggattattaaggtgagccgggcagcaatcgtgtttccgatgatggtgctggccttggtctttgttcggaagctgatggacctcttattcacaaaaagggagctctcttggctggatgatcttatgccagagagtaagaaaaagaagttagaggacgcggagaaagagcattag

SEQ ID NO: 70298 - DNA, 3357 bp, Artificial Sequence
  derived and/or modified sequence
atggagatcaaggaccagggcgcacagatggaacccctgttacccacacgcaatgacgaggaggcggttgtcgataggggaggcacacggagcatccttaagacccacttcgagaaggaggatctggaggggcaccgaacgttgttcataggcgtccacgtcccactgggcggcaggaagtcacatcgccgccaccgccaccgcggacacaaacatcgcaaaagggacagggagagggatagtggccttgaagacggacgtgaatccccatcctttgacaccccatcccagagggtgcagttcatcctgggtacagaggatgatgacgaggagcacatcccacatgacctttttactgagctagacgagatctgctggcgcgaaggggaggatgcggagtggagagagaccgctcgctggttaaagttcgaagaggacgtggaagacggcggtgagcggtggtcaaagccatacgtcgctacgctttccctgcacagccttttcgaattgaggtcgtgcatcctcaacgggacagtcctgctggatatgcacgccaatactttagaggagattgccgacatggtcctggaccagcaggtgtcttctggccaactcaatgaggacgtgcgtcacagagtacacgaggcactcatgaagcaacaccaccaccagaaccaaaagaagctaaccaaccgaatccctatagtgagaagctttgctgacattggcaaaaagcaaagcgagcctaattccatggacaagaacgcaggccaagtggtgagcccgcagagcgcccccgcttgcgttgaaaacaaaaatgacgtcagtagggagaattccaccgtggatttcagtaagggcctgggcggccagcagaaaggacatacgtctccctgcgggatgaaacaacgccatgagaagggccctccccatcagcaggagcgcgaagtagacctccactttatgaaaaaaattcctccaggcgctgaggctagcaatattctggtgggggagcttgaatttctggaccgcaccgtcgttgcctttgtgcgcctgagtccggccgttcttctgcagggccttgccgaggtccccatccccactaggttcctttttatactactgggaccccttggaaaagggcaacagtaccatgaaattggtaggtcaatcgccaccctaatgaccgacgaggtcttccacgacgtcgcatataaagccaaagaccgtaacgacctcgtttcaggcattgatgagttcttggaccaagtcacggttctgccaccgggtgaatgggacccgtcgatacgaatcgagccccctaaaaacgtgccctcccaggagaaaagaaagatccctgctgtgcccaacggaactgctgctcatggcgaagctgagcctcacggaggacacagtggaccagagttacagaggaccgggaggatattcggcgggctgatcctggatatcaagcggaaggcaccttacttctggtcagactttcgggatgccttttcgctgcagtgcctggcgtccttcctgttcctctattgcgcttgtatgtctcccgtcattacttttggaggcctcctcggcgaagccactgaaggccgcattagtgccatagaaagtctatttggtgcgtctatgaccggaattgcctactctctcttcggcggccaacccttgacaattttgggaagcaccggacctgtactggtcttcgaaaagattctgtttaaattttgtaaagagtacggcctgtcttaccttagtttacgcgcatccattggcctttggactgccacactttgcatcattctcgtggctactgatgcaagttcactcgtgtgctatatcacacggtttactgaagaagcgtttgccagcctgatttgcatcatctttatctatgaggcactggagaagctatttgagctttccgaagcttatccaataaacatgcacaatgatctggagctgctcacccagtacagttgcaactgcgtcgaaccacataacccctccaacggtacactcaaggagtggcgggaatcgaatatcagtgcatctgatataatctgggagaatttgactgtgtctgaatgtaagtcgctgcacggtgaatacgtcgggcgagcatgtgggcacgatcacccatacgtgcccgacgttttgttttggtcagtcatcctgtttttttcgacggtgaccttaagcgcaactctgaagcaattcaagaccagccgatattttccaaccaaagtgaggagtatcgtgtccgactttgccgtgtttctcacaattctttgcatggttttaattgattacgcaatcggtatacctagcccaaaactgcaggtaccctcagtcttcaaacccacgcgggatgacagaggctggttcgtgacacctcttggtcccaacccttggtggaccgtcattgcggccataatacctgcgttgctttgtaccatccttatttttatggaccagcagatcacggcagtgatcattaataggaaagagcacaagctaaaaaaaggatgcggttaccatttagacttactcatggttgccgtgatgctaggcgtgtgcagcataatgggtcttccgtggttcgttgcagcaacagtactgagtatcacgcacgttaactctttgaaacttgagagcgagtgcagcgctcctggggaacagccaaagttcttgggaattcgagaacagagagtgaccggtctgatgatttttatattgatgggctctagcgtcttcatgacttctatccttaagttcattccgatgcccgttctgtacggtgtatttctgtatatgggggcctcatccctgaagggcatacagttctttgaccgcatcaaactcttttggatgccagccaagcaccagcctgactttatctacctacgccatgttcctcttcgaaaggtgcacctgttcacaattattcaaatgagttgtctcggcttgctgtggatcatcaaagtgagcagggccgccatcgtgtttccgatgatggtgttggccctcgtatttgttcgcaaactgatggacctgctctttaccaagcgggaacttagctggcttgacgacctaatgccggaatctaaaaaaaagaagttggaggatgccgaaaaagaggaagagcagtctatgctggccatggaggatgagggcaccgtgcagctgcccctggaggggcactacagagatgatcccagcgtcattaacatctcggacgaaatgagcaagaccgcactgtggcgcaacctccttataaccgcagataattcaaaggacaaagagtcgagctttccctcaaagtcttcacccagctag

SEQ ID NO: 70299 - DNA, 3165 bp, Artificial Sequence
  derived and/or modified sequence
atggagatcaaggaccagggcgcccagatggagcccctgctgcccaccagaaatgatgaggaggccgtggtggacagaggaggcaccaggagcatcctgaagacccactttgagaaggaggacctggagggccacaggaccctcttcatcggcgtgcacgtgcccctgggcggcaggaagagccacagaagacaccgccaccggggccacaagcacaggaagagggaccgggagcgggacagcggcctggaggatggccgggagagccccagctttgacacccccagccagagggtgcagttcatcctgggcacagaagatgatgatgaggagcacatcccccatgacctcttcacagagctggatgagatctgctggagggagggggaggatgctgagtggagggagacagcccgctggctgaagtttgaagaagatgtggaggatggaggagagcgctggagcaagccctacgtggccaccctgagcctgcacagcctgtttgagctgcggagctgcatcctgaatggcaccgtgctgctggacatgcacgccaacaccctggaggagattgctgacatggtgctggaccagcaggtgagcagcggccagctgaatgaagatgtgcgccaccgggtgcatgaggccctgatgaagcagcaccaccaccagaaccagaagaagctgaccaaccgcatccccatcgtgcgcagctttgctgacatcggcaagaagcagagcgagcccaacagcatggacaagaatgccggccaggtggtgagcccccagagcgccccagcctgtgtggagaacaagaatgatgtgtcccgggagaacagcacagtggacttcagcaagggcctgggcggccagcagaagggccacaccagcccctgtggcatgaagcagagacatgagaagggccccccccaccagcaggagcgggaggtggacctgcacttcatgaagaagatccccccaggagctgaggccagcaacatcctggtgggggagctggagttcctggacagaacagtggtggcctttgtgcggctgagccctgctgtgctgctgcagggcctggccgaggtgcccatccccacccgcttcctgttcatcctgctgggccccctgggcaagggccagcagtaccatgaaattggccgcagcatcgccaccctgatgacagatgaggtgttccatgatgtggcctacaaggccaaggacagaaatgacctggtgtctggaattgatgagttcctggaccaggtgacagtgctgcccccaggagagtgggaccccagcatccgcatcgagccccccaagaatgtgcccagccaggagaagaggaagatcccagctgtgcccaatggaacagctgcccacggggaggccgagccccacggcggccacagcggccctgagctgcagaggacaggccgcatctttggaggcctcatcctggacatcaagaggaaggccccctacttctggagcgacttcagagatgccttcagcctgcagtgcctggccagcttcctgttcctgtactgtgcctgcatgagccctgtgatcacctttggaggcctgctgggggaggccacagagggccgcatcagcgccatcgagagcctgtttggagcctccatgactggaattgcctacagcctgtttggaggccagcccctgaccatcctgggcagcactggacctgtgctggtgtttgagaagatcctcttcaagttctgcaaggagtatggcctgagctacctgagcctgcgggccagcatcggcctgtggacagccaccctgtgcatcatcctggtggccacagatgccagcagcctggtgtgctacatcacccgcttcacagaggaggcctttgccagcctcatctgcatcatcttcatctatgaggccctggagaagctgtttgagctgtctgaggcctaccccatcaacatgcacaatgacctggagctgctgacccagtacagctgcaactgtgtggagccccacaaccccagcaatggcaccctgaaggagtggagggagagcaacatcagcgccagtgacatcatctgggagaacctgactgtgtctgagtgcaagagcctgcatggagaatatgtgggccgggcctgtggccatgaccacccctacgtgcctgatgtgctcttctggagcgtcatcctcttcttcagcacagtgaccctgagcgccaccctgaagcagttcaagaccagccgctacttccccaccaaggtgcgcagcatcgtgtctgactttgctgtgttcctgaccatcctgtgcatggtgctgattgattatgccatcggcatccccagccccaagctgcaggtgcccagcgtcttcaagcccaccagagatgaccggggctggtttgtgacccccctgggccccaacccctggtggacagtgattgctgccatcatcccagccctgctgtgcaccatcctgatcttcatggaccagcagatcacagctgtgatcatcaacaggaaggagcacaagctgaagaagggctgcggctaccacctggacctgctgatggtggccgtgatgctgggcgtgtgcagcatcatgggcctgccctggtttgtggccgccaccgtgctgagcatcacccacgtgaacagcctgaagctggagagtgaatgttctgcccctggagagcagcccaagttcctgggcatccgggagcagagggtgacaggcctgatgatcttcatcctgatgggcagctctgtgttcatgaccagcatcctgaagttcatccccatgcctgtgctgtatggagtcttcctgtacatgggcgccagcagcctgaagggcatccagttctttgaccgcatcaagctgttctggatgcctgccaagcaccagcctgacttcatctacctgcggcacgtgcccctgaggaaggtgcacctgttcaccatcatccagatgagctgcctgggcctgctgtggatcatcaaggtgtccagagctgccatcgtgttccccatgatggtgctggccctggtgtttgtgaggaagctgatggacctgctcttcaccaagcgggagctgtcctggctggatgacctgatgcctgagagcaagaagaagaagctggaggatgctgagaaggagcactag

SEQ ID NO: 70300 - DNA, 3357 bp, Artificial Sequence
  derived and/or modified sequence
atggagatcaaggaccagggcgcccagatggagcccctgctgcccaccagaaatgatgaggaggccgtggtggacagaggaggcaccaggagcatcctgaagacccactttgagaaggaggacctggagggccacaggaccctcttcatcggcgtgcacgtgcccctgggcggcaggaagagccacagaagacaccgccaccggggccacaagcacaggaagagggaccgggagcgggacagcggcctggaggatggccgggagagccccagctttgacacccccagccagagggtgcagttcatcctgggcacagaagatgatgatgaggagcacatcccccatgacctcttcacagagctggatgagatctgctggagggagggggaggatgctgagtggagggagacagcccgctggctgaagtttgaagaagatgtggaggatggaggagagcgctggagcaagccctacgtggccaccctgagcctgcacagcctgtttgagctgcggagctgcatcctgaatggcaccgtgctgctggacatgcacgccaacaccctggaggagattgctgacatggtgctggaccagcaggtgagcagcggccagctgaatgaagatgtgcgccaccgggtgcatgaggccctgatgaagcagcaccaccaccagaaccagaagaagctgaccaaccgcatccccatcgtgcgcagctttgctgacatcggcaagaagcagagcgagcccaacagcatggacaagaatgccggccaggtggtgagcccccagagcgccccagcctgtgtggagaacaagaatgatgtgtcccgggagaacagcacagtggacttcagcaagggcctgggcggccagcagaagggccacaccagcccctgtggcatgaagcagagacatgagaagggccccccccaccagcaggagcgggaggtggacctgcacttcatgaagaagatccccccaggagctgaggccagcaacatcctggtgggggagctggagttcctggacagaacagtggtggcctttgtgcggctgagccctgctgtgctgctgcagggcctggccgaggtgcccatccccacccgcttcctgttcatcctgctgggccccctgggcaagggccagcagtaccatgaaattggccgcagcatcgccaccctgatgacagatgaggtgttccatgatgtggcctacaaggccaaggacagaaatgacctggtgtctggaattgatgagttcctggaccaggtgacagtgctgcccccaggagagtgggaccccagcatccgcatcgagccccccaagaatgtgcccagccaggagaagaggaagatcccagctgtgcccaatggaacagctgcccacggggaggccgagccccacggcggccacagcggccctgagctgcagaggacaggccgcatctttggaggcctcatcctggacatcaagaggaaggccccctacttctggagcgacttcagagatgccttcagcctgcagtgcctggccagcttcctgttcctgtactgtgcctgcatgagccctgtgatcacctttggaggcctgctgggggaggccacagagggccgcatcagcgccatcgagagcctgtttggagcctccatgactggaattgcctacagcctgtttggaggccagcccctgaccatcctgggcagcactggacctgtgctggtgtttgagaagatcctcttcaagttctgcaaggagtatggcctgagctacctgagcctgcgggccagcatcggcctgtggacagccaccctgtgcatcatcctggtggccacagatgccagcagcctggtgtgctacatcacccgcttcacagaggaggcctttgccagcctcatctgcatcatcttcatctatgaggccctggagaagctgtttgagctgtctgaggcctaccccatcaacatgcacaatgacctggagctgctgacccagtacagctgcaactgtgtggagccccacaaccccagcaatggcaccctgaaggagtggagggagagcaacatcagcgccagtgacatcatctgggagaacctgactgtgtctgagtgcaagagcctgcatggagaatatgtgggccgggcctgtggccatgaccacccctacgtgcctgatgtgctcttctggagcgtcatcctcttcttcagcacagtgaccctgagcgccaccctgaagcagttcaagaccagccgctacttccccaccaaggtgcgcagcatcgtgtctgactttgctgtgttcctgaccatcctgtgcatggtgctgattgattatgccatcggcatccccagccccaagctgcaggtgcccagcgtcttcaagcccaccagagatgaccggggctggtttgtgacccccctgggccccaacccctggtggacagtgattgctgccatcatcccagccctgctgtgcaccatcctgatcttcatggaccagcagatcacagctgtgatcatcaacaggaaggagcacaagctgaagaagggctgcggctaccacctggacctgctgatggtggccgtgatgctgggcgtgtgcagcatcatgggcctgccctggtttgtggccgccaccgtgctgagcatcacccacgtgaacagcctgaagctggagagtgaatgttctgcccctggagagcagcccaagttcctgggcatccgggagcagagggtgacaggcctgatgatcttcatcctgatgggcagctctgtgttcatgaccagcatcctgaagttcatccccatgcctgtgctgtatggagtcttcctgtacatgggcgccagcagcctgaagggcatccagttctttgaccgcatcaagctgttctggatgcctgccaagcaccagcctgacttcatctacctgcggcacgtgcccctgaggaaggtgcacctgttcaccatcatccagatgagctgcctgggcctgctgtggatcatcaaggtgtccagagctgccatcgtgttccccatgatggtgctggccctggtgtttgtgaggaagctgatggacctgctcttcaccaagcgggagctgtcctggctggatgacctgatgcctgagagcaagaagaagaagctggaggatgctgagaaggaggaggagcagagcatgctggccatggaggatgagggcaccgtgcagctgcccctggagggccactacagagatgaccccagcgtcatcaacatcagtgatgagatgagcaagacagccctgtggaggaacctgctgatcacagctgacaacagcaaggacaaggagagcagcttccccagcaagagcagccccagctag

SEQ ID NO: 70301 - DNA, 3165 bp, Artificial Sequence
  derived and/or modified sequence
atggagatcaaggaccagggcgcccagatggagcccctgctgcccacacggaacgatgaagaagcagttgttgatcgtggcggtacccggagtattctgaagacccattttgaaaaggaagatctggaaggccatcgaaccttgttcatcggggttcacgttcccttaggcggccgaaaatcacataggaggcaccggcaccgggggcataagcataggaagagagacagagagcgcgactctgggttagaagacggtagggaatccccgtcatttgacacaccctcccaacgagtacagttcattctggggacggaagacgacgacgaggaacatatcccacatgacctgtttaccgaactggatgaaatttgctggagggagggcgaggatgcagagtggcgcgagacagcccggtggttaaagttcgaggaggacgtggaagatgggggagagcgctggagcaaaccgtacgtggccactttgagcctccactccctctttgagttgaggtcttgcatactgaacggcaccgtgttgttggatatgcatgctaacaccttggaagaaatagctgacatggtactggatcaacaggtgtccagtggtcagttaaacgaagatgtcagacatagggtgcacgaggctctgatgaaacaacatcaccaccagaatcaaaaaaagctcacgaatcgtatccccattgtaaggagcttcgccgatatcgggaagaaacagtctgagcccaatagcatggacaaaaatgctggacaggtagtctctcctcagagcgcccctgcctgtgtggaaaacaaaaatgacgtttctcgcgagaacagcacggttgatttctcaaagggcctgggagggcaacagaaaggccacactagcccgtgcgggatgaagcagaggcacgagaaagggccaccccaccagcaggaaagggaggtggacctgcactttatgaagaaaatcccaccaggggctgaggcctctaatatcctcgtgggcgagctcgagttcctggatagaaccgtcgttgcctttgtgagactatctccagctgtcctgctacagggcctggccgaagtcccaatcccgaccaggtttctctttatactgctgggccctctaggcaagggtcagcagtaccacgaaatcggacgtagcattgccactcttatgacggatgaagttttccatgatgtagcctacaaggccaaggaccgaaacgatcttgttagtggaattgatgagtttttagaccaggtaacagtgctgccacctggagagtgggacccatcgattagaatcgaaccgccaaaaaacgtgccctcacaggagaagagaaagatcccagcagtgcccaacggtacggctgcccatggcgaggccgaaccacacgggggacattcagggccagaactgcagcgtactggccgcatcttcgggggtctcatcctagatatcaaacggaaggctccatacttttggtcagacttcagggatgcatttagcctacagtgtctggcctcctttctcttcttgtattgcgcgtgcatgtccccggtgattaccttcggtggactattgggcgaagccaccgaggggaggatctctgcaattgaaagcctcttcggagcttccatgacgggaatcgcctattctttattcggtggccagcccctgacaatcttgggctctactggtcccgtgctggtcttcgaaaagatcctgttcaagttctgcaaagagtacggtctatcttatttgagtcttcgcgctagtatcgggctgtggacagccacactgtgcattatcctggttgctaccgacgcatcgtcactcgtatgctacataactaggtttaccgaggaagcatttgcttcactaatatgtataatcttcatttacgaggccctggaaaagcttttcgagctgtctgaggcctacccaattaacatgcacaacgacctggaacttctcacccaatattcttgtaattgcgtagaaccccacaacccgtccaatggtaccctcaaagagtggcgggagtcgaatatcagcgcatccgacatcatctgggaaaacttaactgtgagtgaatgcaagagcttgcacggagaatatgtgggccgcgcatgcggccacgatcatccgtacgttcccgatgtcctcttttggtctgtgatcctgtttttttcaacagtgaccctttcggccacccttaagcaatttaaaaccagtcggtacttcccgactaaagtgaggtcaatcgtatctgactttgctgtattcctaaccatcctctgcatggtcctcattgattacgccatcggcatcccttctccaaagttacaagtcccgtcagtgttcaagccgacgagagacgaccggggatggtttgtgaccccattgggccccaacccctggtggacagtgattgccgcgatcattcccgccttgctgtgcactatcctcatcttcatggaccagcagatcaccgcggtgatcattaaccggaaggaacataaactaaagaagggatgcggctatcatttggacttattaatggttgctgtgatgctgggagtctgtagcattatggggttgccttggtttgttgccgccacagtgctatctattacccacgtgaatagcctaaaactggaaagcgagtgtagtgctcccggggaacagcccaagtttttgggcatccgcgagcagagggtcactgggttaatgattttcatactaatgggcagcagtgtttttatgaccagtattttaaagtttataccaatgccagtgctttacggcgtgttcctgtacatgggtgcaagtagtctcaaaggaatccagttttttgatcggatcaagttgttctggatgccagcgaagcatcagcccgacttcatatacctccggcatgtgcccctgaggaaagtgcatttatttacgattatccaaatgtcatgcctgggtttgctgtggattattaaggtgagtagggctgccatcgtatttccaatgatggtgctcgctctggtgtttgtccggaaactcatggatctgttgttcaccaagagggagttgagctggttggacgacttgatgcctgagtccaagaagaaaaagctcgaagatgctgagaaggagcactag

SEQ ID NO: 70302 - DNA, 3357 bp, Artificial Sequence
  derived and/or modified sequence
atggagatcaaggaccagggcgcccagatggagcccctgctgcccacgcgtaacgatgaggaggccgttgttgatcggggcggaactcgttcaattttgaagacccactttgaaaaagaggatctagagggccacaggactttgtttattggagtccacgttcccctgggcggtaggaagagccatagaagacacagacaccggggccataaacacaggaaacgggaccgggagagagatagcggtttggaggacgggcgagaatcgcccagtttcgatacaccttcacagagggtgcagttcattctcggtaccgaggatgatgatgaagaacatatcccgcacgacctgtttacagagctggatgaaatttgttggagggaaggtgaggatgcggagtggcgagaaaccgcacggtggctgaaattcgaggaagacgtagaggatggaggggaaaggtggagcaagccttatgtggcaaccctgagtctgcattcactgttcgagctgcgctcttgtattctgaatgggacggttctgttagatatgcacgccaatacactggaggaaatcgcggacatggtccttgaccagcaggtctctagcggacagctgaacgaggatgtgagacacagggtgcacgaggcgctgatgaagcaacatcatcaccagaatcagaagaagcttacgaatcgcatcccaattgtgaggagcttcgcagacattggtaagaaacaatcagagccaaactctatggataagaacgcaggccaggttgtctcaccccaaagtgctcctgcgtgtgttgagaataaaaacgacgtcagtcgagagaattcaactgtcgatttttctaagggtcttggaggtcagcagaagggacacacgtccccttgtggcatgaaacagcggcacgagaaagggccacctcaccaacaagagcgagaggtagatttgcacttcatgaaaaaaatccctcctggagctgaagcaagtaacatcctagtgggagagctggagtttctcgataggacagtggtagcattcgtgcggttgtccccagccgtcttgctgcaaggtctggctgaggtacctatccccacaagatttctcttcatcctgctgggtcccctgggtaaaggacagcagtaccatgaaatcgggcgctctattgctacgcttatgacagacgaggtcttccacgatgtggcatacaaggcaaaggacagaaacgacctcgttagtggtatcgatgaattcctggatcaggtgactgttcttcctcctggagagtgggatccatcaatccgaatcgagccgccgaaaaacgtgccttcccaggagaaaagaaaaatcccagctgtgcctaatggaacagcagcccacggcgaggctgagcctcacggaggccatagtggccccgaattgcaacgcacagggcggatttttggtggactgatcctcgacatcaagagaaaagctccatacttttggagtgatttccgcgatgccttctcactccagtgtctggcatctttcttatttttatactgtgcctgcatgagcccagtgattacattcggaggattgctcggcgaggccacagaagggcgcattagcgctatcgagtctctgtttggggccagcatgactggcattgcctactccctatttggcgggcaaccgctgacaatcctgggctcaactggccccgtgttagtcttcgaaaagatcttgttcaagttctgcaaggagtacggactgtcctatctcagcttacgggcctcgattggtctgtggacagcaacactctgcatcatcctggtcgccacagatgccagctctctggtgtgctacataacgaggtttaccgaggaggcttttgcctctctgatctgcatcatcttcatctatgaagctctggagaagttatttgaactatctgaggcctaccctatcaatatgcacaatgatctggagctgttaacccaatacagctgcaactgtgtggaacctcataatccgtccaacggcacattaaaagaatggcgagaaagcaatattagtgcttccgatataatctgggagaatctgactgtttccgagtgcaaaagcttacatggcgaatatgtcgggcgagcttgcggccacgaccatccctatgtacctgacgtcctcttctggtccgtgattctgttcttcagcactgtgacacttagcgccacattgaaacaattcaagacgtcccggtattttccgacaaaagtacgaagcattgtcagtgacttcgcagtcttcctgaccatcctttgtatggtgctcattgactatgctattggtatcccctccccgaaactgcaagtaccatctgtgttcaagcccacacgggacgaccggggttggttcgtgacgccactcgggccaaacccatggtggacagtcatcgccgccatcataccagcccttctttgcaccatactgatcttcatggatcagcagatcacagctgtcattataaatcgaaaggaacataagctcaaaaaaggctgcgggtatcatctggatctactcatggttgctgtgatgctgggagtgtgctcaatcatggggcttccgtggttcgtagcggcaacagtcctatctattacccacgtgaacagcctgaaactcgagtccgaatgctccgctcccggggaacaacctaagtttctcgggatcagagaacagagagtaaccggcctgatgattttcattctgatgggttcctcggttttcatgactagtatattgaagttcattcccatgccagttctgtacggcgtcttcctgtacatgggagccagctccctcaaagggatccagttcttcgatagaattaagctcttctggatgcccgctaagcaccagccagactttatctatctacggcatgtgccactgaggaaagtgcacctgttcacaatcatccagatgtcctgtcttggcctcctgtggattattaaggtgagcagggcggccattgtgttccccatgatggtgctggccctcgtatttgttcggaaactcatggaccttttgttcacgaagagggaactctcctggttggatgatcttatgcccgagtcaaagaagaaaaagctagaggacgcggaaaaagaagaagagcaatccatgctcgcaatggaggatgaaggtacagtgcagctaccgcttgagggccattaccgcgacgacccgagtgttatcaacatctcagacgagatgtcaaaaaccgcgctttggaggaacctgttgatcactgcagataacagcaaagacaaagagagcagtttcccctctaagagttcaccctcatag

SEQ ID NO: 70303 - DNA, 3165 bp, Artificial Sequence
  derived and/or modified sequence
atggagattaaggatcagggcgctcagatggagcctctcctgccaacccgaaacgacgaggaggccgtggtggaccggggagggacccggtccatcctgaaaacgcacttcgaaaaggaagatctcgaagggcacagaacgctctttattggtgttcatgtgccgcttggagggagaaagtcccatcgcaggcatcgccatagagggcacaaacatcgcaagagggatagggagcgcgacagcgggctggaagacggaagagagagcccatcattcgataccccctcacagagagtacagttcatcctcgggaccgaagacgacgatgaagaacatataccccacgacttgttcactgagctggacgaaatctgttggcgtgaaggagaagacgcagagtggcgggagaccgcgaggtggctcaagttcgaggaagacgttgaagacggcggagagcgctggtctaaaccctacgttgctacattatctctgcattccctgttcgagctgaggagctgcattctaaatggaaccgtactgctggacatgcacgccaacaccctggaggaaattgctgacatggtgctcgatcagcaggtgtcctctggccagctaaacgaagacgtgaggcaccgcgtgcacgaggctttaatgaagcagcatcaccatcagaaccagaagaaactgaccaatagaatccctatagtgcgaagttttgctgacataggtaagaaacagtcagagccaaacagcatggacaaaaacgcaggacaagtggtgagcccacagtccgctcccgcatgtgtggagaataaaaacgatgtgtctcgcgagaatagcacagtcgatttttctaagggccttggtggacaacaaaaggggcacacaagtccctgcggaatgaagcagcggcacgagaaaggtccgccacaccaacaggagcgagaagtagacctgcatttcatgaaaaaaatcccaccaggagcggaggcctcgaatatactggttggagaactggagtttctggataggactgtggtggccttcgtccgcctgagtcctgcagtactgctccaggggctggccgaggttcctatacccactcgtttcctgttcattctgctgggcccactggggaaaggccagcagtaccacgagatagggagaagcatcgctaccttgatgactgacgaggtgtttcacgacgtggcttacaaggctaaggataggaatgatctagtatctggtatcgatgaattcctcgatcaggtcacggtactgccccctggcgaatgggatcctagcatcaggattgaaccacccaagaatgttccctctcaggagaagcgaaagatacctgccgtgcccaatggcacagctgctcatggagaagctgaacctcacggcggtcatagcggtccggagctgcagaggaccgggaggatttttgggggacttattctggacatcaagcggaaagcaccatatttctggagcgactttcgggatgctttttcgttgcagtgtctcgcatcatttctctttctttactgcgcgtgcatgtctccagtgatcacctttggcggacttctgggtgaggccactgagggcagaatctccgccatcgagtcactctttggggctagcatgaccggtattgcctacagcctctttggagggcagcccctgaccattctgggctccacaggccctgtgctggtcttcgagaaaatcctgttcaagttctgtaaagaatatggcctttcctacctgtcactccgggcttctataggcttatggacagccacgctctgtattatccttgtcgcaacagacgcctcgagcctggtgtgttacataactcgtttcacagaggaagcctttgcaagtttaatatgcattatcttcatctatgaggccctggagaagctatttgaactgagcgaagcctacccaatcaacatgcataacgatctcgagctgttgacacagtactcttgcaattgcgtcgaacctcataacccctctaatggcacactgaaagaatggcgcgagtctaatataagcgcctcagatattatttgggaaaacctaacagtgagcgaatgcaagtctcttcacggggagtacgtgggaagggcatgcggacatgatcacccttacgttccagacgtactgttctggtctgtgatcctcttttttagtacagtcacgctgtcagccactcttaaacagttcaagaccagcaggtacttcccgacaaaagtccgaagcattgtctcagactttgcggtctttctgaccattctatgcatggttcttatcgactatgcgatcggtattccttccccaaaactgcaagtgcctagtgtgtttaagcctacgcgagatgaccgcggatggtttgtgacccccctggggcctaatccttggtggacagtcatcgcagccataatccctgctctgctctgtacgatcctaatttttatggaccagcagatcactgctgtgattataaataggaaggagcacaaactgaagaaaggttgtgggtaccatttggatctactcatggtggcagtgatgctcggcgtgtgctcaataatgggactcccgtggtttgtggccgcaactgttctttctattacccacgtgaactcacttaaactcgagagcgagtgcagtgccccaggcgagcagcctaaattcttggggattcgggagcaaagagtcacgggcctaatgatctttatccttatggggtctagtgtattcatgactagcatcctgaagtttataccgatgcccgtgttatatggagtgtttctatacatgggagccagcagcttaaagggcatccagttttttgatagaattaaacttttttggatgcccgctaagcatcagcccgatttcatttatttaagacacgtaccacttagaaaggttcatctgtttacgattatacaaatgagctgtctggggcttctgtggattatcaaggtttctcgagctgctattgtgttccccatgatggtgctggctctggtctttgtgaggaagctcatggatctgcttttcactaagcgagagctatcttggttagacgacctgatgcctgagagcaaaaaaaaaaagctggaagatgccgaaaaggaacactag

SEQ ID NO: 70304 - DNA, 3357 bp, Artificial Sequence
  derived and/or modified sequence
atggagattaaggatcagggcgcacagatggagccactcctacccactaggaacgacgaggaggctgtggtggacaggggtggtacaagatctatactgaaaacgcacttcgagaaggaagatctggaggggcatcggacgctgtttattggcgttcacgtaccgctcggagggcgtaaatcccaccggaggcatagacatagaggccataagcacaggaagcgcgatcgcgaacgagatagcggactggaggatgggagggagagcccttcctttgataccccctcccaacgggtgcagtttatactgggtaccgaggatgacgatgaggagcacattccacacgatctatttactgagctggatgagatctgttggcgggagggggaggacgctgagtggcgcgaaactgcgagatggttgaagttcgaggaggacgttgaggatggtggggaacggtggagcaagccttatgtggctaccttgtccctgcacagcctgttcgaacttcgatcttgtatacttaatggcactgtgctcctggatatgcatgccaacactttagaggagattgcagatatggtattggatcaacaggtgtcatcagggcagcttaatgaggatgtgagacacagagtgcatgaagcattaatgaagcaacatcatcaccaaaaccagaagaagctgacaaaccggatcccaattgttcgctcatttgcagatatcggcaagaagcagagcgaacctaatagcatggataaaaacgcgggacaggtcgtttcccctcagtccgccccagcatgtgttgagaacaagaacgacgtgagcagagagaattccaccgtcgacttcagtaaggggctggggggtcagcaaaaagggcatacctccccgtgcggcatgaagcagcggcatgagaaaggaccaccccaccagcaagagcgtgaagtcgatctccattttatgaagaagatacctcccggagccgaggccagcaatattcttgtgggagagctggagttcttggaccggacagtcgtcgcattcgtacgcctgtctccagccgtcctgctccaggggctcgcagaagtccctataccgacacgattcctatttatcctcctaggaccgctcgggaaaggacaacaataccacgaaattggcaggagtatcgcgacactgatgacggatgaggtgttccacgacgtggcctataaggccaaggacagaaacgatctggtgtccggtattgatgagttcttggatcaggtgacagtgttgccgccaggggaatgggaccccagtatccgtatagaacctcctaaaaacgttccatctcaggagaaaagaaaaattcctgctgtgccaaacggcacagccgcacacggcgaagccgagccccacgggggacattcaggccctgaacttcaaagaacagggagaatttttggcggattgatcctggacatcaagcggaaggccccatacttttggagtgacttccgcgatgccttctcactgcagtgcctcgcatcttttttgtttctgtactgcgcctgcatgtcccccgtaatcactttcggcggtttactgggggaggccacagaaggaaggatctcggcaattgagtccctttttggtgctagtatgaccggcatcgcttattctttgtttggaggccagccacttacaattctgggcagcacaggccctgtattagtgttcgagaagatccttttcaaattctgcaaggagtacggtctgtcctatctaagtttgcgtgccagtatcggattatggactgccacgctgtgtataatactggttgctactgatgcatcaagtctggtttgctacattaccagatttactgaagaggccttcgcctctctcatttgtatcatcttcatctatgaggctcttgagaagctgtttgagctgtcagaagcttaccctattaatatgcacaatgacctggagctgcttacacaatactcttgtaactgcgtcgaaccccataacccctccaatggtacactgaaagagtggagagagagcaacattagtgccagcgacattatctgggaaaatctgaccgtttccgagtgtaaatcgctgcacggagagtatgtggggagggcgtgcggtcatgaccatccctacgttccggatgtcctgttttggagcgtgattctgtttttcagcaccgtaacactgtctgctactctcaagcagtttaaaacatctcgttactttccaactaaggtgcgatcaattgtgtctgattttgccgtcttcctgacaattttatgcatggtgctcattgactatgcaattggaatcccgtcccctaagctccaggtcccgagcgtttttaagcccacacgggacgatcggggttggtttgtcacgccactgggcccaaatccctggtggactgtaatcgcagcaataatccccgcattgctgtgcactatcctgatttttatggaccagcagattaccgctgtgattattaataggaaggagcataaactgaaaaaagggtgtggctaccaccttgatctgctgatggtggccgtgatgctcggcgtgtgctccattatgggactcccctggttcgtggccgctactgtactctcgatcactcacgtgaacagcttaaaattggagagtgaatgctctgccccaggtgagcaaccaaagttcctgggcatcagagagcagcgagtgactgggttgatgatattcatcctgatgggttcctcagtctttatgactagcatactgaagtttatcccaatgccagtcctgtacggagtgttcctatacatgggagcctcttctctcaaggggattcagttcttcgatcgaattaaactgttctggatgcctgctaaacaccagccagactttatctatctgagacacgttcccctgagaaaagttcatctcttcaccatcattcagatgagttgtctgggcctgctttggatcattaaggtcagccgtgccgctattgtgttccctatgatggtgttagcactggtctttgtcagaaaactcatggatcttctgttcaccaagcgcgagctctcgtggctggatgatctaatgccagaatcgaagaaaaagaagctcgaagatgcggagaaggaggaggagcagagtatgctggctatggaggatgaaggcaccgttcagttgcccctggagggccattacagggacgaccccagcgtgatcaatataagcgacgagatgagtaaaacagccctgtggaggaacctgctcatcaccgcagataatagcaaggataaggaaagtagctttccatcgaagtcttcgcccagctag

SEQ ID NO: 70305 - DNA, 3398 bp, Artificial Sequence
  derived and/or modified sequence
gtgtaagacactgaagacactgcagagcaaggtgcttattccagaggcgttacaaaacatggagattaaagaccagggagcccaaatggagccgctgctgcctacgagaaatgatgaagaagcagttgtggatagaggtggaactcgttctattctcaaaacacactttgagaaagaagatttagaaggtcatcgaacactatttattggagtacatgtgcccttgggaggaagaaaaagccatcgacgtcacaggcatcgtggtcataaacacagaaagagagacagagaaagagattcaggattagaggatggaagggagtcaccttcttttgacaccccatcacagagggtacagtttattcttggaaccgaggatgatgacgaggaacacattcctcatgaccttttcacagaactggatgagatttgttggcgtgaaggtgaggacgctgagtggcgagaaacagccaggtggttgaagtttgaagaagatgtggaagatggaggagaaaggtggagcaagccttatgtggctactctttcattgcacagcttgtttgaattgagaagttgtattctgaatggaactgtgttgctggacatgcatgccaacactttagaagaaattgcagatatggttcttgaccaacaagtgagctcaggtcagctgaatgaagatgtacgccatagggtccatgaggcattgatgaaacagcatcatcatcagaatcagaaaaaactcaccaacaggattcccattgttcgttcctttgctgatattggcaagaaacagtcagaaccaaattccatggacaaaaatgcaggtcaggttgtttctcctcagtctgctccagcctgtgttgaaaataaaaatgatgttagcagagaaaacagcactgttgactttagcaagggactgggaggccaacaaaaggggcatactagtccatgtgggatgaaacaaaggcatgaaaaaggacctccacaccagcaagagagagaggttgatctgcattttatgaaaaagattcctccaggtgctgaagcatcgaacatcttagtgggagaactggagttcttggatcgaacagtagttgcgtttgtcaggttgtctccagctgtattgcttcaaggactggctgaagtcccaatcccaaccagatttttgttcattcttctgggacccctgggaaagggtcaacagtaccatgagattggcagatcaattgcaaccctaatgacagatgaggtatttcatgatgttgcctataaagctaaagatcgtaatgacttggtatcaggaattgatgagtttctggatcaggttactgttctccctcctggagaatgggatccaagcattcgaatagagcctcccaaaaatgttccttcccaggagaagaggaagattcctgctgtaccaaatggaacagcagctcatggggaagcagagccccacggaggacatagtggacctgaactccagcgaactggaaggatttttgggggacttattttagatatcaaaagaaaagctccatacttctggagtgacttcagagatgctttcagcctgcagtgcttagcatcttttctatttctctactgcgcgtgtatgtctcctgtcatcacgtttggaggactgctgggagaagcaactgaagggcgtataagtgcaattgaatctctctttggagcatccatgaccgggatagcctattctctctttggtggacagcctcttaccatattaggcagtacaggaccagttttggtgtttgaaaagattttgtttaaattttgcaaagaatatgggctgtcatacctatctttaagagctagcattggactttggactgcaactctatgtatcatacttgtggccacagatgctagttcccttgtctgctacatcactcggtttactgaagaagcttttgcttccctgatttgcatcattttcatttatgaggccctggagaagttgtttgaactcagtgaagcatatccaatcaacatgcataatgatctggaactgctgacacaatactcgtgtaactgtgtggaaccgcataatcccagcaatggcacattgaaggaatggagggaatccaatatttctgcctctgacataatttgggagaacctaactgtgtcagaatgcaaatcattgcatggagagtatgttggacgggcctgtggccatgatcacccatatgttccagatgttctattttggtctgtgatcctgttcttttccacagttactctgtcagccaccctgaagcagttcaagactagcagatattttccaaccaaggttcgatccatagtgagtgactttgctgtctttcttacaattctgtgtatggttttaattgactatgccattgggatcccatctccaaaactacaagtaccaagtgttttcaagcccactagagatgatcgtggctggtttgttacgcctttaggtccaaacccatggtggacagtaatagctgctataattccagctctgctttgtactattctaatttttatggaccaacagattacagctgtcatcatcaacaggaaagagcataagctaaagaaaggttgtgggtaccatctggacctattaatggtggctgtcatgctcggtgtatgctccatcatgggcctgccatggtttgtggctgccacagtcctctccatcactcatgtcaatagcctaaaactggaatcagaatgctcagctccaggagaacaacccaaatttctcggcattcgggagcaaagggttactgggcttatgatttttattcttatgggttcatcagtctttatgaccagtattctgaagtttattcccatgccagtgctatatggagtgtttctttatatgggtgcttcatctctaaagggaattcagttctttgataggataaagctcttctggatgccggcaaaacatcaaccagattttatatacctaaggcacgtaccgcttcgaaaagtgcatctcttcacaattattcagatgagttgccttggccttttgtggataataaaagtttcaagagctgctattgtctttcccatgatggtgttagccctggtatttgtaagaaagttgatggacttgttgttcacgaagcgggaactcagctggttggatgatttgatgcccgagagtaagaaaaagaaactggaagatgctgaaaaagaacattgaaagccgaaaagagaagaaagctgactcagggaaaggtgttgacagggagacttgtctatgactcgatcttcaatttattttttacatatatatgagaagagtgtcacaattattaataaaactgctttgatcatgtattgtaaattctgtccctcaacccaaatccaccttcata

SEQ ID NO: 70306 - protein, 1099 aa, Artificial Sequence
  derived and/or modified sequence
MQSLGVSGNRKVMQSGTCEPFQSLSHQRNDEEAVVDRGGTRSILKTHFEKEDLEGHRTLFIGVHVPLGGRKSHRRHRHRGHKHRKRDRERDSGLEDGRESPSFDTPSQRVQFILGTEDDDEEHIPHDLFTELDEICWREGEDAEWRETARWLKFEEDVEDGGERWSKPYVATLSLHSLFELRSCILNGTVLLDMHANTLEEIADMVLDQQVSSGQLNEDVRHRVHEALMKQHHHQNQKKLTNRIPIVRSFADIGKKQSEPNSMDKNAGQVVSPQSAPACVENKNDVSRENSTVDFSKVDLHFMKKIPPGAEASNILVGELEFLDRTVVAFVRLSPAVLLQGLAEVPIPTRFLFILLGPLGKGQQYHEIGRSIATLMTDEVFHDVAYKAKDRNDLVSGIDEFLDQVTVLPPGEWDPSIRIEPPKNVPSQEKRKIPAVPNGTAAHGEAEPHGGHSGPELQRTGRIFGGLILDIKRKAPYFWSDFRDAFSLQCLASFLFLYCACMSPVITFGGLLGEATEGRISAIESLFGASMTGIAYSLFGGQPLTILGSTGPVLVFEKILFKFCKEYGLSYLSLRASIGLWTATLCIILVATDASSLVCYITRFTEEAFASLICIIFIYEALEKLFELSEAYPINMHNDLELLTQYSCNCVEPHNPSNGTLKEWRESNISASDIIWENLTVSECKSLHGEYVGRACGHDHPYVPDVLFWSVILFFSTVTLSATLKQFKTSRYFPTKVRSIVSDFAVFLTILCMVLIDYAIGIPSPKLQVPSVFKPTRDDRGWFVTPLGPNPWWTVIAAIIPALLCTILIFMDQQITAVIINRKEHKLKKGCGYHLDLLMVAVMLGVCSIMGLPWFVAATVLSITHVNSLKLESECSAPGEQPKFLGIREQRVTGLMIFILMGSSVFMTSILKFIPMPVLYGVFLYMGASSLKGIQFFDRIKLFWMPAKHQPDFIYLRHVPLRKVHLFTIIQMSCLGLLWIIKVSRAAIVFPMMVLALVFVRKLMDLLFTKRELSWLDDLMPESKKKKLEDAEKEEEQSMLAMEDEGTVQLPLEGHYRDDPSVINISDEMSKTALWRNLLITADNSKDKESSFPSKSSPS

SEQ ID NO: 70307 - DNA, 3300 bp, Artificial Sequence
  derived and/or modified sequence
atgcagagcctgggcgtgagcggcaacagaaaggtgatgcagagcggcacctgcgagcccttccagagcctgagccaccagagaaacgacgaggaggccgtggtggacagaggcggcaccagaagcatcctgaagacccacttcgagaaggaggacctggagggccacagaaccctgttcatcggcgtgcacgtgcccctgggcggcagaaagagccacagaagacacagacacagaggccacaagcacagaaagagagacagagagagagacagcggcctggaggacggcagagagagccccagcttcgacacccccagccagagagtgcagttcatcctgggcaccgaggacgacgacgaggagcacatcccccacgacctgttcaccgagctggacgagatctgctggagagagggcgaggacgccgagtggagagagaccgccagatggctgaagttcgaggaggacgtggaggacggcggcgagagatggagcaagccctacgtggccaccctgagcctgcacagcctgttcgagctgagaagctgcatcctgaacggcaccgtgctgctggacatgcacgccaacaccctggaggagatcgccgacatggtgctggaccagcaggtgagcagcggccagctgaacgaggacgtgagacacagagtgcacgaggccctgatgaagcagcaccaccaccagaaccagaagaagctgaccaacagaatccccatcgtgagaagcttcgccgacatcggcaagaagcagagcgagcccaacagcatggacaagaacgccggccaggtggtgagcccccagagcgcccccgcctgcgtggagaacaagaacgacgtgagcagagagaacagcaccgtggacttcagcaaggtggacctgcacttcatgaagaagatcccccccggcgccgaggccagcaacatcctggtgggcgagctggagttcctggacagaaccgtggtggccttcgtgagactgagccccgccgtgctgctgcagggcctggccgaggtgcccatccccaccagattcctgttcatcctgctgggccccctgggcaagggccagcagtaccacgagatcggcagaagcatcgccaccctgatgaccgacgaggtgttccacgacgtggcctacaaggccaaggacagaaacgacctggtgagcggcatcgacgagttcctggaccaggtgaccgtgctgccccccggcgagtgggaccccagcatcagaatcgagccccccaagaacgtgcccagccaggagaagagaaagatccccgccgtgcccaacggcaccgccgcccacggcgaggccgagccccacggcggccacagcggccccgagctgcagagaaccggcagaatcttcggcggcctgatcctggacatcaagagaaaggccccctacttctggagcgacttcagagacgccttcagcctgcagtgcctggccagcttcctgttcctgtactgcgcctgcatgagccccgtgatcaccttcggcggcctgctgggcgaggccaccgagggcagaatcagcgccatcgagagcctgttcggcgccagcatgaccggcatcgcctacagcctgttcggcggccagcccctgaccatcctgggcagcaccggccccgtgctggtgttcgagaagatcctgttcaagttctgcaaggagtacggcctgagctacctgagcctgagagccagcatcggcctgtggaccgccaccctgtgcatcatcctggtggccaccgacgccagcagcctggtgtgctacatcaccagattcaccgaggaggccttcgccagcctgatctgcatcatcttcatctacgaggccctggagaagctgttcgagctgagcgaggcctaccccatcaacatgcacaacgacctggagctgctgacccagtacagctgcaactgcgtggagccccacaaccccagcaacggcaccctgaaggagtggagagagagcaacatcagcgccagcgacatcatctgggagaacctgaccgtgagcgagtgcaagagcctgcacggcgagtacgtgggcagagcctgcggccacgaccacccctacgtgcccgacgtgctgttctggagcgtgatcctgttcttcagcaccgtgaccctgagcgccaccctgaagcagttcaagaccagcagatacttccccaccaaggtgagaagcatcgtgagcgacttcgccgtgttcctgaccatcctgtgcatggtgctgatcgactacgccatcggcatccccagccccaagctgcaggtgcccagcgtgttcaagcccaccagagacgacagaggctggttcgtgacccccctgggccccaacccctggtggaccgtgatcgccgccatcatccccgccctgctgtgcaccatcctgatcttcatggaccagcagatcaccgccgtgatcatcaacagaaaggagcacaagctgaagaagggctgcggctaccacctggacctgctgatggtggccgtgatgctgggcgtgtgcagcatcatgggcctgccctggttcgtggccgccaccgtgctgagcatcacccacgtgaacagcctgaagctggagagcgagtgcagcgcccccggcgagcagcccaagttcctgggcatcagagagcagagagtgaccggcctgatgatcttcatcctgatgggcagcagcgtgttcatgaccagcatcctgaagttcatccccatgcccgtgctgtacggcgtgttcctgtacatgggcgccagcagcctgaagggcatccagttcttcgacagaatcaagctgttctggatgcccgccaagcaccagcccgacttcatctacctgagacacgtgcccctgagaaaggtgcacctgttcaccatcatccagatgagctgcctgggcctgctgtggatcatcaaggtgagcagagccgccatcgtgttccccatgatggtgctggccctggtgttcgtgagaaagctgatggacctgctgttcaccaagagagagctgagctggctggacgacctgatgcccgagagcaagaagaagaagctggaggacgccgagaaggaggaggagcagagcatgctggccatggaggacgagggcaccgtgcagctgcccctggagggccactacagagacgaccccagcgtgatcaacatcagcgacgagatgagcaagaccgccctgtggagaaacctgctgatcaccgccgacaacagcaaggacaaggagagcagcttccccagcaagagcagccccagctag

SEQ ID NO: 70308 - DNA, 3300 bp, Artificial Sequence
  derived and/or modified sequence
atgcagagcctgggcgtcagcggaaataggaaagtgatgcagtcgggcacctgtgagccgtttcaatcactttcacaccagcggaatgatgaagaagccgttgttgatagagggggcactcgctctattcttaagacacacttcgaaaaggaggatctcgagggccaccgcacactgttcataggggtgcacgtgccacttggggggagaaagtcccacagaagacacagacacagaggccacaagcacagaaagcgcgaccgggagagagatagcgggctggaagacggccgcgagtcaccgtcatttgacaccccctcgcagcgggtccagttcatccttggcaccgaagacgatgacgaggagcacatacctcacgatctgttcactgaacttgatgagatttgctggagggaaggcgaggacgcggagtggcgcgagactgctcggtggctgaagttcgaggaagatgtagaagatggtggagagagatggtccaaaccttatgtggctaccctcagcttacactctctgttcgagttgagatcttgcattttgaatggaaccgttctcctggatatgcatgcaaatactctggaagagattgctgacatggtgcttgatcagcaagtcagcagtggtcaacttaacgaggacgtccgccacagagttcatgaggccctgatgaaacaacaccaccaccaaaatcaaaaaaagctgaccaacagaattcctatcgtcaggtcctttgctgatatcggtaaaaaacagtcagagcctaacagtatggataagaacgccgggcaagttgtatccccccagagcgctccagcctgtgtggaaaacaaaaacgacgtttctagagagaactccactgtcgacttcagtaaagtcgacctccatttcatgaagaagattccccctggagctgaagcatctaacattctcgttggtgagctggagttcctagaccgtaccgtcgtggccttcgtccggctgtcaccggcagttctgctacaaggcctagccgaggtcccaatacctaccaggttcctttttattctgctgggccccctggggaagggccagcagtaccatgagatcggtcgttccatcgccactctcatgactgacgaagtgtttcatgacgttgcttataaggccaaagataggaacgatctcgtatcggggatcgatgagttcctggatcaggtgacagtgcttccaccaggggaatgggatccatcaatcagaatagaacccccgaaaaatgttcccagccaggagaaacggaagatcccagcggtccccaatggaactgccgcccacggagaggccgaaccccacggcggacatagcggcccagagctgcaaagaaccggccggatctttggaggattgatcctagatattaaacggaaggctccatatttctggtcagattttcgggatgcattctcactccaatgtctagcgagcttcctgttcctgtattgcgcatgtatgagtccagtgattacctttggcggccttcttggtgaggccacagaaggacgcattagtgcaatcgaatccctgttcggtgcatccatgaccgggattgcatactctctgttcggcggccagcctctgaccattctggggagcacagggcccgtgcttgtgtttgaaaagattctctttaagttctgcaaagagtacgggctctcatacttatcacttcgcgcttccatcggactgtggacagctactctgtgcatcatcctggtagcaaccgacgccagttcactggtgtgctacataacaagatttaccgaagaggctttcgcttctcttatttgtatcatttttatctacgaagccctggagaaactgtttgaactgagcgaggcctacccaataaatatgcataatgacttggaactgcttacccagtacagttgtaactgtgtggagccacataacccctcaaacggaaccctcaaggagtggcgcgagtctaatataagcgccagcgatattatctgggaaaacctaacagtctccgagtgcaagtcactgcacggagagtatgtcggccgggcttgtggacatgatcacccttacgtccctgatgtgttgttctggtccgtcatcctcttcttttctactgttacactcagtgctaccctcaagcagtttaagacctctcgttacttccccacgaaggtccgatcaatcgtgtcagacttcgccgtatttctgaccattctttgtatggttctgatcgactatgcaattggcatcccaagccccaaacttcaggttcctagcgtatttaaacccactcgagatgaccggggatggttcgtgacaccactgggacctaacccttggtggaccgtgattgcggcaatcattcccgccttattgtgcacgattttaattttcatggaccagcagattaccgccgtgatcattaaccggaaggagcacaagctgaagaaaggttgcgggtaccatctggaccttttaatggtggcggtgatgctcggcgtttgcagcatcatgggtctaccctggtttgtcgccgccaccgtgcttagcattacgcatgtcaattccctgaaattggagagtgaatgctccgcacccggtgaacagccaaaatttttgggcatccgcgagcagcgcgtcactggactcatgatatttatcctgatggggtctagtgtattcatgacttccatactgaagtttattcctatgccagtgctctacggcgtatttctgtacatgggagcctcttcgctgaagggcatccagttttttgaccgaatcaagttgttttggatgcctgctaaacaccagcccgatttcatctatctgcgccacgtgccccttaggaaggtgcatctttttaccattatccagatgtcttgtctcgggctgctctggattattaaggtttcccgtgctgccattgtctttccaatgatggtgctggctctcgtatttgtgcgtaaactgatggaccttttgttcactaagcgagagttatcttggctcgatgacctcatgccagagtcaaaaaagaaaaagctggaggacgcagaaaaagaggaggagcagagcatgctagctatggaggacgagggcactgtgcaattgccactcgaaggacactatagagatgatccaagcgtgatcaatatttcagacgaaatgagcaagaccgccctctggcgaaacctcctgataacagccgataactcaaaagataaggaaagctccttcccttctaaatcaagccccagctag

SEQ ID NO: 70309 - DNA, 3300 bp, Artificial Sequence
  derived and/or modified sequence
atgcagagcctgggcgtgtctggcaacaggaaggtgatgcagagcggcacctgtgagcccttccagagcctgagccaccagagaaatgatgaggaggccgtggtggaccggggcggcaccaggagcatcctgaagacccactttgagaaggaggacctggagggccacaggaccctcttcatcggcgtgcacgtgcccctgggcggcaggaagagccaccggcggcaccgccaccggggccacaagcacaggaagagggaccgggagcgggacagcggcctggaggatggccgggagagccccagctttgacacccccagccagagggtgcagttcatcctgggcacagaagatgatgatgaggagcacatcccccatgacctcttcacagagctggatgagatctgctggagagaaggagaagatgctgagtggagggagacagcccgctggctgaagtttgaggaggatgtggaggatggaggagagcgctggagcaagccctacgtggccaccctgagcctgcacagcctgtttgagctgcggagctgcatcctgaatggaacagtgctgctggacatgcacgccaacaccctggaggagattgctgacatggtgctggaccagcaggtgagcagcggccagctgaatgaagatgtgcgccaccgggtgcatgaggccctgatgaagcagcaccaccaccagaaccagaagaagctgaccaaccgcatccccatcgtgcgcagctttgctgacatcggcaagaagcagagcgagcccaacagcatggacaagaatgccggccaggtggtgagcccccagagcgccccagcctgtgtggagaacaagaatgatgtgtcccgggagaacagcacagtggacttcagcaaggtggacctgcacttcatgaagaagatccccccaggagctgaggccagcaacatcctggtgggggagctggagttcctggacagaacagtggtggcctttgtgcggctgagccctgctgtgctgctgcagggcctggccgaggtgcccatccccacccgcttcctgttcatcctgctgggccccctgggcaagggccagcagtaccacgagatcggccgcagcatcgccaccctgatgacagatgaggtgttccatgatgtggcctacaaggccaaggacagaaatgacctggtgtctggaattgatgagttcctggaccaggtgacagtgctgcccccaggagagtgggaccccagcatcagaattgagccccccaagaatgtgcccagccaggagaagaggaagatcccagctgtgcccaacggcacagctgcccatggagaggccgagccccatggaggccacagcggccctgagctgcagaggacaggccgcatctttggaggcctcatcctggacatcaagaggaaggccccctacttctggagcgacttcagagatgccttcagcctgcagtgcctggccagcttcctgttcctgtactgtgcctgcatgagccctgtgatcaccttcggcggcctgctgggggaggccacagagggccgcatcagcgccatcgagagcctgtttggagcctccatgacaggcatcgcctacagcctgtttggaggccagcccctgaccatcctgggcagcacaggccctgtgctggtgtttgagaagatcctcttcaagttctgcaaggagtatggcctgagctacctgagcctgcgggccagcatcggcctgtggacagccaccctgtgcatcatcctggtggccacagatgccagcagcctggtgtgctacatcacccgcttcacagaggaggcctttgccagcctcatctgcatcatcttcatctatgaggccctggagaagctgtttgagctgtctgaggcctaccccatcaacatgcacaatgacctggagctgctgacccagtacagctgcaactgtgtggagccccacaaccccagcaatggcaccctgaaggagtggagggagagcaacatcagcgccagtgacatcatctgggagaacctgactgtgtctgagtgcaagagcctgcacggggagtatgtgggccgggcctgtggccatgaccacccctacgtgcctgatgtgctcttctggagcgtcatcctcttcttcagcacagtgaccctgagcgccaccctgaagcagttcaagaccagccgctacttccccaccaaggtgcgcagcatcgtgtctgactttgctgtgttcctgaccatcctgtgcatggtgctgattgattatgccatcggcatccccagccccaagctgcaggtgcccagcgtcttcaagcccaccagagatgaccggggctggtttgtgacccccctgggccccaacccctggtggacagtgattgctgccatcatcccagccctgctgtgcaccatcctgatcttcatggaccagcagatcacagctgtgatcatcaacaggaaggagcacaagctgaagaagggctgcggctaccacctggacctgctgatggtggccgtgatgctgggcgtgtgcagcatcatgggcctgccctggtttgtggccgccaccgtgctgagcatcacccacgtgaacagcctgaagctggagagcgagtgcagcgcccctggagagcagcccaagttcctgggcatccgggagcagagggtgacaggcctgatgatcttcatcctgatgggcagcagcgtcttcatgaccagcatcctgaagttcatccccatgcctgtgctgtatggagtcttcctgtacatgggcgccagcagcctgaagggcatccagttctttgaccgcatcaagctgttctggatgcctgccaagcaccagcctgacttcatctacctgcggcacgtgcccctgaggaaggtgcacctgttcaccatcatccagatgagctgcctgggcctgctgtggatcatcaaggtgtcccgggccgccatcgtgttccccatgatggtgctggccctggtgtttgtgaggaagctgatggacctgctcttcaccaagcgggagctgtcctggctggatgacctgatgcctgagagcaagaagaagaagctggaggatgctgagaaggaggaggagcagagcatgctggccatggaggatgagggcaccgtgcagctgcccctggagggccactacagagatgaccccagcgtcatcaacatcagtgatgagatgagcaagacagccctgtggaggaacctgctgatcacagctgacaacagcaaggacaaggagagcagcttccccagcaagagcagccccagctag
